United States Patent Application Publication US 2006/0134663 A1 - sequence listing, part 67

SEQ ID NO: 175044 - DNA, 252 bp, Homo Sapiens
tgtgtgagccactgcgcccgaccccaggggacaggtttagtcagattccagggtggtcctcatggaggggacgcacaggcaggagggcagggagagaaagcacagaaagcagacctgctaggagaggaccaggatagggaggggcagggacaaggacatgggacttctgggagcaggtggccgggggtcaacgtccaggaggatttcctgaaccagttagaggactagacccccctctcacctagtctatca

SEQ ID NO: 175045 - DNA, 394 bp, Homo Sapiens
gctccgacggggtgggatggggaagaggctcttcaaagcccaaaagctgccagccacacgtgtcaccccgcggcgaatcagagggagcgggagctgtatggcaagactggccaagcccttcggtctgtaaaacctcctgtgtccgccagatccgatggcttcctcagatgaaacacctttgtccagctatcagcttagtccccggctgcccccacccccatctccttttttgtcctgtccagctgcactgctggcactgtgtacactccgcagacacacgtgtctttcctgcctcccaggacttgagtgtcctgtcccatttgcctgcacctcgcatgccactgtccccaaggcagaactgacttctaagcccactacaccccgtcgggtggag

SEQ ID NO: 175046 - DNA, 464 bp, Homo Sapiens
ctcggtacccgctccacccgacggggtggcagtaggtggatttcaggaccatgggcctgtgctgtttacagaaccttgtccaggtgcccagctgtgggagggcagcatggagaggaggaagagggggcccctagtagcaagcttcagaaacttgccacttcaggctagagagctcgcaccctcccacggcagcagggtagccatttctccctgactggggtgtccaccatggtgctctgcagccacctctcacttcattaagagtccacagatctaggagcagaggactggtctggagctgggcaagggcaggcagcaaatggggagtttttgctgtgtgacctgaggtcacttgcctgccttctctggactgcactgtagggcctggagacctgttcccctgttccaatttccccaccccgtcgggtggagcggggacctctagatcgaccagcagcagcaag

SEQ ID NO: 175047 - DNA, 280 bp, Homo Sapiens
ctccacccgacggggtgggttcatgtgggagttaattcatggtggaggcaaggcaggcttgctttctctggcattcctctaggcttctcactcgccagcttttggctgcttctgttatctaggccaagcagagtcaatgaccctgagatgtggaggagggaagtgggcatcatggtcagccccatcaccacctgttatatttaggggccaagcctgggtatgtatgctccttccctgtgggcaggttgaggccaatagcacctatcaagtatttgtttgt

SEQ ID NO: 175048 - DNA, 343 bp, Homo Sapiens
ctccacccgacggggtgggtacgtgatggctcacagtcacacagtcagggagagataggtcaggcctcaaatcccaggttctgggctccataggccactgtcctttctctctttctaaagtctagtcttctgccctctggggcatcacggaatccatccgtttggaggcagcctgcaggctcctcttctgaggcgcgacctcctgggcgcttcacaaaccttccccaggttccctgcccctgccttcctttaaacttgacctgggggcccccatcccacagagaatgtggttcctagaagcaaacaccatatccccttctttatcctctccaacaccccgcac

SEQ ID NO: 175049 - DNA, 1189 bp, Homo Sapiens
  misc_feature (896)..(904): n is a, c, g, or t
  misc_feature (910)..(987): n is a, c, g, or t
  misc_feature (1003)..(1014): n is a, c, g, or t
  misc_feature (1037)..(1080): n is a, c, g, or t
ggcctgggtggcgaattcggcacgaggcaggaacgcagcgtctatgaagactggcccatttgcagagcactccaaccagctgtggaacatcagcgccgtcccttcctggtccaaagtgaaccagggtctcatccgcatgtataaggccgagtgcctggagaagttccctgtgatccagcacttcaagttcgggagcctgctgcccatccatcctgtcacgtcgggctaggaggggccaagccgaagagccacccaggccacagttcctgtgcctgccttccccaccccagcagtggcccctccccatcccctccctctgttcgtcccgtttgatgagaggctgtttactggggtggggtggcgagatgggcttgagggggctcagagcataaggcttcagggcccaagttgggagaagtgaccaaagtgtagccagttttctgagttcccgtgtgctagactggccagaagagagggtctggggcctggtcactcggccactctctcctgtttctggcctcttctcccttcactcccgtccagtctggttttgagagcaggggctgttctgcagcacctcagggaagggaggagagatacctgctgcttccattgcttttcccttcctggagtcgatgcctttctaagggttggagctgctccttgcaggggcgggtcagtttcccaggccatgccggggtggccatctatgctagggctggaagctgaggctggccgccagctgtgggctgcggtggggtgggtggggccccctacttagccattcacccccgtacccccgtgcagcccgaacccaccccggtcgcattcccatcccccgttatgcccctggtccttccgtctactcggcctatccccggtttgccgttgtctannnnnnnnngttcannnnnnnnnnnnnnnnnnnnnnnnnnnnnnnnnnnnnnnnnnnnnnnnnnnnnnnnnnnnnnnnnnnnnnnnnnnnnngcgcctttatatcctnnnnnnnnnnnngtttctatgttttcgcgccactnnnnnnnnnnnnnnnnnnnnnnnnnnnnnnnnnnnnnnnnnnnnaatactccgccgctcaaacaactcgccccctacgttcctagattgaacgatgtaccgccgatattccgcgactacgcccgcatgttctagcgcgcctgtcccggtgccg

SEQ ID NO: 175050 - DNA, 1124 bp, Homo Sapiens
  misc_feature (105)..(105): n is a, c, g, or t
  misc_feature (170)..(170): n is a, c, g, or t
  misc_feature (446)..(484): n is a, c, g, or t
  misc_feature (499)..(499): n is a, c, g, or t
gctcctcataacgctctgtgccatcgcgacttcatctcgctctggtctccagttctggttcgtcctctgttatgtcctgcgtgcagtgggcctatgtccatctantacttcaagggcgctgacgtctgatattgagtcgacgtggctctgatcaggttgtcaccggcatngatcgccgtgtggtggccgagtatggtgttaccaatgttcgatagtagcgcgaggtggtttaggtgacacttaggaacccgacacaccatttgccgggacgacgcgagagcgttcatacagcgcaccgagctccggagacccaagaagatccacgcgctgggcgcgccctcggtgtgcaccaaatgcggaaagaactaatgctcccgcgcgggcggggagggggacaaccacgacgaccacgccccccgcggggacgtgacacgagtcccgagcannnnnnnnnnnnnnnnnnnnnnnnnnnnnnnnnnnnnnnccccttttggggctnttgacggggaaccgacgaccgtgccaagacccaagaagaccccagggaggaagcggacggggttgcgatggaccccgcggcatccccggctccccgccctcctctgtccctgcgccgtccgtgggggggcactggggcgtattagggcccgttcacttctccgcctcgagactctgccccctcagcctggcccgcccttcctaagttatcggcctgcgagccggagagacaatggagagaactgcagaggccgagtggcgaccaggccccaagcggaaggccattttccctgctcttcctcagttgtccggggcgggggtggggggtgctgcgaggaatggagaaaccaggccctttagaggatcccagagagggaagagaaccaggggcccttttctcttttagaattttcttttaatcagcccaccttttgactccccgcccgccccaatccattatttttttctgccttccgggtcccatccttagagctcgagtcgttccttcccctcctggattccgggtaggagaggcagcgccgcaggaggcgggtgcccgtttgtcccaggcctgggcgtggtggaggaaggggtgctggaacaataaacggcactatccaaatgtc

SEQ ID NO: 175051 - DNA, 532 bp, Homo Sapiens
  misc_feature (445)..(445): n is a, c, g, or t
taatttgtctgtttattcccacaaggtagccaggggtgggggctccgagcaagcccagcaggccatgggaccttcctccggcggggtgcacgctggattttcgggtctgccccaccagcaggtttgcaggcaggccgtcatgagtgccggtggaaggctccaagggcgtgggcaggggctcgggcggggcacacacttgtggagctagaaatagtggggcaggtccttctctatcaccaggggctcctccatgggtccgtagcgcttcaccacgcagccgttcttgtcgatgaggaacttggtgaagttccacttgatggcatttcccaggatgcccttgcccttgggtttggatcttcatccacttccacagcgggtggggcgttcgtcccgttcacgcagatcttgctgaacatatcgattttgacgtttaacccgcgcgaanctctttgatctctccgttaatccctggctctgcttccgaactggtaaacgggaaggcaagatcgaaaccaaattagctatcgggcgt

SEQ ID NO: 175052 - DNA, 810 bp, Homo Sapiens
  misc_feature (11)..(11): n is a, c, g, or t
gcctgggtggnaattcggacgaggctgctctgtggggctctggccgcgcctggcctggccgggaccatgtgcgcgtcccgggacgactggcgctgtgcgcgctccatgcacgagttttccgccaaggacatcgacgggcacatggttaacctggacaagtaccggggcttcgtgtgcatcgtcaccaacgtggcctcccagtgaggcaagaccgaagtaaactacactcagctcgtcgacctgcacgcccgatacgctgagtgtggtttgcggatcctggccttcccgtgtaaccagttcgggaagcaggagccagggagtaacgaagagatcaaagagttcgccgcgggctacaacgtcaaattcgatatgttcagcaagatctgcgtgaacggggacgacgcccacccgctgtggaagtggatgaagatccaacccaagggcaagggcatcctgggaaattcctcatcgacaagaacggctgcgtggtgaagcgctacggacccatggaggagcccctggtgatagagaaggacctgccccactatttctaactccacaaatgtgtgaccccgcccgaacccctgcccaaaccctcggaaccttccaccggcactcatgacggcctacctgcaaacctgctgggggggcaaacccgaaaatccagcgtgcaccccgccggaggaaggtcccatggcctgctgggcttggctcggcgcccccacccctggctaccttgtggggaataaaccgacaaatttagaaaaaataaagaaacccgatccctcaaaacccctgtccccccagcct

SEQ ID NO: 175053 - DNA, 947 bp, Homo Sapiens
ggggccgcctactgaagccggcgctgctctgtggggctctggccgcgcctggcctggccgggaccatgtgcgcgtcccgggacgactggcgctgtgcgcgctccatgcacgagttttccgccaaggacatcgacgggcacatggttaacctggacaagtaccggggcttcgtgtgcatcgtcaccaacgtggcctcccagtgaggcaagaccgaagtaaactacactcagctcgtcgacctgcacgcccgatacgctgagtgtggtttgcggatcctggccttcccgtgtaaccagttcgggaagcaggagccagggagtaacgaagagatcaaagagttcgccgcgggctacaacgtcaaattcgatatgttcagcaagatctgcgtgaacggggacgacgcccacccgctgtggaagtggatgaagatccaacccaagggcaagggcatcctgggaaatgccatcaagtggaacttcaccaagttcctcatcgacaagaacggctgcgtggtgaagcgctacggacccatggaggagcccctggtgatagagaaggacctgccccactatttctagctccacaagtgtgtggccccgcccgagcccctgcccacgccctcggagccttccaccggcactcatgacggcctgcctgcaaacctggctggtgggggcagacccggaaaatccaggcggggcacccccgccgggaggaaaggtccccatgggcctgcctggggcttgggctcgggggccccccaccccctggcctaaccttggtggggaagtagacaggaccagatttagcgagagaagagaggggggaaagaaagacctcgaaggccatcgtaatgtcgcgggggcgcggaaaaaggaagggtaagtgggaaatgggccccaatgggtcccataaacctgggtttcccgtgaaccgcagggtgtgtt

SEQ ID NO: 175054 - DNA, 823 bp, Homo Sapiens; identical to SEQ ID NO: 97933
  misc_feature (622)..(622): n is a, c, g, or t
  misc_feature (714)..(764): n is a, c, g, or t

SEQ ID NO: 175055 - DNA, 797 bp, Homo Sapiens
ccgcctactgaagccggcgctgctctgtggggctctggccgcgcctggcctggccgggaccatgtgcgcgtcccgggacgactggcgctgtgcgcgctccatgcacgagttttccgccaaggacatcgacgggcacatggttaacctggacaagtaccggggcttcgtgtgcatcgtcaccaacgtggcctcccagtgaggcaagaccgaagtaaactacactcagctcgtcgacctgcacgcccgatacgctgagtgtggtttgcggatcctggccttcccgtgtaaccagttcgggaagcaggagccagggagtaacgaagagatcaaagagttcgccgcgggctacaacgtcaaattcgatatgttcagcaagatctgcgtgaacggggacgacgcccacccgctgtggaagtggatgaagatccaacccaagggcaagggcatcctgggaaatgccatcaagtggaacttcaccaagttcctcatcgacaagaacggctgcgtggtgaagcgctacggacccatggaggagcccctggtgatagagaaggacctgccccactatttctagctccacaagtgtgtggccccgcccgagcccctgcccacgccctcggagccttccaccggcactcatgacggcctgcctgcaaacctgctggtggggcagacccgaaaatccagcgtgcaccccgccggaggaaggtcccatggcctgctgggcttggctcggcgcccccacccctggctaccttgtgggaataaacagacaaattagaacaaccaaacaaaag

SEQ ID NO: 175056 - DNA, 459 bp, Homo Sapiens
  misc_feature (12)..(12): n is a, c, g, or t
  misc_feature (105)..(105): n is a, c, g, or t
  misc_feature (124)..(124): n is a, c, g, or t
tccccccagaangcccctttgccccttggggttggaaactttcatccaacttccaaaagcgggtggccgtcgtccccgttcaacgcaagatcttgctgaaacatnatcgaaatttgacgttgtnaacccgcggcgaactctttgatctcttcgttactcccctggctcctgcttcccgaactggttacacgggaaggccaggatccgcaaaccacactcagcgtatcgggcgtgcaggtcgacgagctgagtgtagtttacttcggtcttgcctcactgggaggccacgttggtgacgatgcacacgaagccccggtacttgtccaggttaaccatgtgcccgtcgatgtccttggcggaaaactcgtgcatggaagcgacagcgccagtcgtcccgggacgcgcacatggtcccggccaggccaggcgcgccagagccccacagagcagcgctgcttc

SEQ ID NO: 175057 - DNA, 445 bp, Homo Sapiens
  misc_feature (372)..(372): n is a, c, g, or t
gctagagggttgtggaagggccgcaggtaggtgctgtgtatcctgggcagtcctaaccctgcatgtgaccagggtcaccgagggccccagctcccagggtagggggtcgtgccattatgcactgccttttcttcttccggtgctgctttactttctcttgctcctggagcagtgctcactggagacactgggaccctgagcactgaccaagagtgatccctgacagcgtcagattcctatgcagaagggactgctgggtgggaaatggatcaccgacaggttctaaatgcaaacccacaggctgcaggagaggggtgaggggcgaaggagggaatcccacctctgggaaagcatcctcaggaaacctagatnggtcctggaggtgaggacaatcgccaaggagggagaaggaaaaggaggaccctggttaatctgcaccccgtcg

SEQ ID NO: 175058 - DNA, 405 bp, Homo Sapiens
ctccacccgacggggtgggagggcctgaagaagagcataggttgggtggggtggggcatggactgatttggcctctttgtcttgatgccaggccagacctgagggagtgggtatgctcttggggagtacacaggcagtaccatgctgtcattatctttgctttggtcttgggggtttagccaaagatttcatccggcacttgatggagaaggacccagacaaaagattcacctgtgagcaggccttgcagcacccatggtgagaattcacacaacctgtgagctggggcgggatttggggccctcaggtctgcttctgccctcataggcaacccaccacataaccccatcctaggattgcaggagatacagctctagataagaatatccaccccgtcgggtggag

SEQ ID NO: 175059 - DNA, 841 bp, Homo Sapiens
  misc_feature (32)..(32): n is a, c, g, or t
  misc_feature (164)..(164): n is a, c, g, or t
tcttctcatcatagaccagggtaggacgactnttttggggttgccacccagtagttgcataaccattaatgttatccgccaaggtggttcatcatggacccagactcacaggttcaatgtagaacaccatctttcggtacattttgtgtttgtacatgtaatgnatggtctcattcaggtcctttacatgaagatcttcattgggaaaaaccagtattccagtagatccatggtcagtgaagtaaatgaacacgtgatcctgggggccactcttcaggactttgccggatcctatgcccttcactgcttctgcatcgcctctcaacacagcaaggaaattttgtggggtaacatcctctccagtgtagtccttcgggactccctgatagacatctgtgccattgggcctgttgatcacaattcctggagtgggattgtcttcagagtaagcaatgtcatcgtacatcatcacaacgatctgttcgtcaggaatcccattgcggtgaatgatctggtaggcatggcacgcgtctgcctggtgcctataattataccagccatttgaacctgccacgatcaccacccagtgcttgcctccatcttcaggatcatctataggaatggcaccaatgcccagggccacactgaggaatacagctactttccaaaccattctgcaccttggagttcaattgcagacacctgtggcaggcgaccgtggtggcagtggtggcggcggcggcggtgagtgaccgcggtggtggcgccggcgggaccgtgagaactcgcggcggctcgcagcctcacaccaaacacccacgacgtcggcactgctgtgatt

SEQ ID NO: 175060 - DNA, 987 bp, Homo Sapiens
acgtcgtgggtgtttggtgtgaggctgcgagccgccgcgagttctcacggtcccgccggcgccaccaccgcggtcactcaccgccgccgccgccaccactgccaccacggtcgcctgccacaggtgtctgcaattgaactccaaggtgcagaatggtttggaaagtagctgtattcctcagtgtggccctgggcattggtgccgttcctatagatgatcctgaagatggaggcaagccactgggtggtgatcgtggcaggttcaaatggctggtataattataggcaccaggcagacgcgtgccatgcctaccagatcattcaccgcaatgggattcctgacggacagatcgttgtgatgatgtacgatgacattgcttactctgaagacaatcccactccaggaattgtgatcaacaggcccaatggcacagatgtctatcagggagtcccgaaggactaccctggagaggatgttaccccacaaaatttccttgctgtgttgagaggcgatgcagaagcagtgaagggcataggatccggcaaagtcctgaagagtggcccccaggatcacgtgttcatttacttcactgaccatggatctactggaatactggtttttcccaatgaagatcttcctgtaaaaggacctgaattgagaccatcccattagcatcgtacaaaccacaaaattgtacccgaaaagaattggtgtttctatcattgaaagcctggtgaagtctggggtccatgaatgaaccccccctgcccggaataacatgaaatggtttatggaaactaactggctgcccaaacccccgaaaaagtccgtccctacgccctggttacttatgatggaaaaaagagggtccacggtaaccttgggggggaatgggtaacaagccgtccaacttgaattgggaagaaaattcggaacagggggaaaaattctgggacttaaaagaacacccctgtccaaaaaaccaat

SEQ ID NO: 175061 - DNA, 517 bp, Homo Sapiens
ggcaatggcttcaaggaaatttagtaccattagtccggttattgagttctcccaggcgctggatcccttctaaatgaatattttgggttagaaaatggttcaagatgggccttcaccaagctgttcacttcaactgtagggaaatccagtagaaagtgtggttgtgatcggccatagcctcctggtattctggccagtacaactcagcagtaacataaaatcccaggataccaaatcagtttcaaaatggagttcttcttctagggagggtagttttcattttgatccagtttgtaaagagtcctttctggtagttaaatacacatgccgtttctctcttagtttcttcttttcattgttcctggttgcagatattaaaaacatatcattagcataagagaagaaacgtatttcccaactcactgtggcatatattttactcatctgtaagtggtagccgacagccaaggatacattttaagagtataaaaaccttagccctcatccttctaaaatg

SEQ ID NO: 175062 - DNA, 1213 bp, Homo Sapiens
  misc_feature (1200)..(1200): n is a, c, g, or t
acatcgatgagtattcacgggctgtccgtgatgtgaaaaccgactggaatgaagaatgcaagagccccaagaagggtcggtgctctggccacaaccacgtgcccaattcgctcagctacgcccgcgatgagctcacccagtccttccaccgacgtctcggtctgtgtgtatggcaacaatctccatggcaacagtgaggtgaaccttcatggttgcagggacctggggggagattgggctccctttcctcatgacatcctgccctatcaggactctggagatagtgggagcgactaccttttcccagaagctagtgaagaatcagcaggcatcccgggaaagtcagaacttccctacgaagagctgtggctggaggaaggcaagcccagccatcagcctctcactcgctctctgagcgagaagaacagatgtgatcagtttagaggttctgtccgatccaaatgtgcgacttctcctcttcccatccctgggactctgggagcagcagtgaagtcttcagatactgccctacctccagctccagtgcctcccaaatctgaagccgtcagagaagaatgccggctcctgaacgccccagctgttccagcccgaagcgcagagcctttgtccaccagtccctccatccctcctcgcacagtcaagccagcgcgggcaacagactcgctctcccagccccaacttgtcctactattcttcagggctacacaacatcagggtcactaaaactgacacaaatccttctgaaagcactcctggttcctgctatccatgtaaccgagtgaaaactgattctgtggacctgaaatccccgtttggaagtccttctgctgaagctgtgtcctctcggctctcatggcctaaccattattcaggagcatcagaaagccagaccaggagtgacttcctgctggatccaagcaggagttatagttaccctagacaaaagacgccaggcacaccaaagagaaactgcccagcaccttttgattttgatggctgtgagctcctggccagccccactagcccagtcactgcagaattcagtagcagcgtctctggttgtcccaagtcagccagctactctctggagagcacagatgtgaaatctcttgcagctggtgtgacaaagcagagtacgtcatgccctgcctttaccccccagggcttccaaaattagtnggaagagaaggtc

SEQ ID NO: 175063 - DNA, 426 bp, Homo Sapiens
  misc_feature (284)..(337): n is a, c, g, or t
aagttaggtgctataaacagttgtgtaaaagcaggcggtacggtcggaatcccgggatatcgtcgaccacgcgtcggacccacgcgtccgggagacctttgatgaattcttcctctccttcccacaaaagacagacccagtgagtgaatcaggcaaagtgcttataatgtgtgttgtgtgagcgtggccttgggaggacatgcgtgtgtcagggatgagttgaggtgatatttttatgtgcagcgacccttggtgtttcccttccgcggtggcctctggggtannnnnnnnnnnnnnnnnnnnnnnnnnnnnnnnnnnnnnnnnnnnnnnnnnnnnntatgtcagtggtttctacttcccctgggatgctgacccaggaatagtggacatggtcacagtcctatgtacagagctttcttttgtatt

SEQ ID NO: 175064 - DNA, 1182 bp, Homo Sapiens
  misc_feature (1159)..(1159): n is a, c, g, or t
  misc_feature (1171)..(1171): n is a, c, g, or t
ggcctcttttgccctttaggctgttgctagggagagggaagagggagaccaaatgtcggggttggggtgggagggcgtcaggcagaggcaactgacttcatttgtgccacacgcatgggcatgcagccttgcgctgtcccaggcatgcagctgcctggggcccaagttgcagtgagcagggtggggtctgggagggggtgagaggcaggaatgggggtcagaagaagtgggagcagcttcttgggctgagtgcagccaaaggggagccagaaatgggcagttctcccaggagtgagcagctactgtaacttttttaaattaagacaaaaagccttgaagaaaatgactttatttttctaagtgtaacctcagtatttatgtaatttgtacaggggccatgcaccacccccctcctccccctttggggatagaccttgagggtgggccagcataggggggagggtcttttaccctgtgtcagagcctaccttcaccacctatatccagaaggggagctttttcagaaacagggcagcagtggggtgaaattttcttaacccctaagactgccttcagtaggaacaagctggcttctgtgattaggtgaagggatgggggaagattttatgcacagcctagttatcaaggggatgatttgccgacatgtttgagaaccccctaacctctaaccctcattgctgtcttgccccagtttggggttgccaagatggaagtcacctttctgggctttctcctggagatagctggggcttatgggtggctttcaaggctggggcatggcaaatcaggggccagagagcaggggagcttgggactcaggtctgtaactgcccagccccttttctctgctcttgtttcactccaccatcactcactcactccccactcccccacccatggggaggagacctttgatgaattcttcctctccttcccacaaaagacagacccagtgagtgaatcaggcaaagtgcttataatgtgtgttgtgtgagcgtggccttgggaggacatgcgtgtgtcagggatgagttgaggtgatatttttatgtgcagcgacccttggtgtttcccttcctcggtggctctggggtatgtgttgtgtgggtgtttgcgcctgagtgagtgtgtgtgcttnaatgtgagtgtnttatgtcagtg

SEQ ID NO: 175065 - DNA, 823 bp, Homo Sapiens
  misc_feature (248)..(417): n is a, c, g, or t
ttcgggcacgaagtgccaatggtctttaggtcaaggtttccaacccaagatttcactgtggatacaattatttggcagctggcggtacaatccccagaactcctcggaagctgggcgtggcaggagtgatgggggtcatgggagtcatggggaggggatacagtggagtggtgcccggcaagggtgcagttgtgagagtctgtgagtggaagagctgtggtgcctggcctgaggttccctgtgttgcnnnnnnnnnnnnnnnnnnnnnnnnnnnnnnnnnnnnnnnnnnnnnnnnnnnnnnnnnnnnnnnnnnnnnnnnnnnnnnnnnnnnnnnnnnnnnnnnnnnnnnnnnnnnnnnnnnnnnnnnnnnnnnnnnnnnnnnnnnnnnnnnnnnnnnnnnnnnnnnnnnnnnnnnnncttccaaaatagacagactattggtgttctgaataggctgtggggtcagtccagtgccataaggcatcattggactaaagatagggattccgggagtcatggcaccctgaggggaggccaagccctgagcgtaaggtggcaggctgttgttctgatccatgatgttcactttcttcttggcaaaccagaaacccttgcgctggaactcgtctcactattcaattttttcctagagcatctccagcacactcttctcagcaacttcctcaattccttgggttatcttcacacgccaagaaacagtgatgctgggtcactgcaaagatcactatgggccagcggaagcgaagttaaacagccggcggcccaggcgcccgccacagcgaacctgcccgacctcactccc

SEQ ID NO: 175066 - DNA, 343 bp, Homo Sapiens
gccatggctctcaaaccaaagacagtagctaaagttgacctcctctcaacttaaggcaaaaggctggcatacagcacagaagcagaccaccagcttctttactccacatttccaccactggatggcagatattccccctctagaaatgcattaattttatttactaaacagggcagcagttcacaggtctcaagaccggtcactttgtgatgttttgcagccacacaacaggaggctaataattattttaatagccatactgagactcttcagtttattaagaaaaatgtatttcctcaggcattttaaaatatatatacatttaatatttttggagctgtat

SEQ ID NO: 175067 - DNA, 705 bp, Homo Sapiens
tcaggttcctggaaagaactggtttgtgtgggtgacacagatgaaccatattcccatgcacattgatcatgaccggaacatggactgggtttccacccagctccaggccacatgcaatgtccacaagtctgccttcaatgactggttcagtggacacctcaacttccagattgagcaccatctttttcccacgatgcctcgacacaattaccacaaagtggctcccctggtgcagtccttgtgtgccaagcatggcatagagtaccagtccaagcccctgctgtcagccttcgccgacatcatccactcactaaaggagtcagggcagctctggctagatgcctatcttcaccaataacaacagccaccctgcccagtctggaagaagaggaggaagactctggagccaaagcagaggggagcttgagggacaatgccactatagtttaatactcagagggggttgggtttggggacataaagcctctgactcaaactcctcccttttatcttctagccacagttctaagacccaaagtggggggtggacacagaagtccctaggagggaaggagctgttggggcaggggtgtaaattatttcctttttctagtttggcacatgcaggtagcttggtgaacaaagagaaccggagggtaacagaagaggaggacctaagttcagagtcagggtacgagctcgatt

SEQ ID NO: 175068 - DNA, 809 bp, Homo Sapiens
  misc_feature (561)..(567): n is a, c, g, or t
  misc_feature (569)..(603): n is a, c, g, or t
  misc_feature (612)..(650): n is a, c, g, or t
  misc_feature (697)..(769): n is a, c, g, or t
gggccagcaccgaagactgcgatgacttctgcactgacccaggggctggagcgaatcccagaccagctcggctacctggtactgagtgaaggtgcagtgctggcgtcatctggggacctggagaatgatgagcaggcagccagtgccatctctgagctggtcagcacagcctgcggtttccggctgcaccgcggcatgaatgtgcccttcaagcgcctgtctgtggtctttggagaacacacactgctggtgacggtgtcaggacagagggtgtttgtggtgaagaggcagaaccgaggtcgggagcccattgatgtctgagcctgccggagggcgagggtcggagaagcggattgggtcctgggcctctgtgatgaggcaggcacacctgtcggtcttggcttgctgctagaactagggccttctgctcgcccacctcccacccctacctggacgggcccaggcttggggactctgagctgtgttaaggagaacaagggcaaggagacctccctttgtgctccctcactccctaataaacatgagtctgatgttctccannnnnnnannnnnnnnnnnnnnnnnnnnnnnnnnnnnnnnnnnctcgaggcnnnnnnnnnnnnnnnnnnnnnnnnnnnnnnnnnnnnnnncatggtcatagctgtttcctgacccagctttcttgtacaaagtggtnnnnnnnnnnnnnnnnnnnnnnnnnnnnnnnnnnnnnnnnnnnnnnnnnnnnnnnnnnnnnnnnnnnnnnnnntgcagtacccggggaattaaccccgcctaatgagcggggc

SEQ ID NO: 175069 - DNA, 892 bp, Homo Sapiens
gggctttcccatctggcggccgcggctcctgtccagaccctgaccctccctcccaaggctcaaccgtcccccaacaaccgccagccttgtactgatgtcggctgcgagagcctgtgcttaagtaagaatcaggccttattggagacattcaagcaaaggttggacaactacttttccagaacagaaaggaaactcatgcatcagaaaaggtgactaataaaggtaccagaagaatatggctgcacaaataccagaatctgatcagataaaacagtttaaggaatttctggggacctacaataaacttacagagacctgcttttgggactgtgttaaagacttcacaacaagagaagtaaaacctgaagagaccacctgttcagaacattgcttacagaaatatttaaaaatgacacaaagaatatccatgagatttcaggaatatcatattcagcagaatgaagccctggcagccaaagcaggactccttggccaaccacgatagagaagtcctgatggatgaacttttgatgaaagattgccaacagctgctttattggaaatgaggactcatctgatagaatcccctgaaagcagtagccaccatgttcaaccatctgtcatgactgtttggcaaatggaaaccgctggagaaacaaaattgctatttaccaggaataatcacaatagaaggtcttattgttcagtgaaataataagatgcaacatttgttgaggccttatgattcagcagctgggtcacttgattagaagaaataaaccatggtttcttcaattgtgactgttaattttaaagcaacttatgtgttcgatcatgtatgagatagaaaaatttttattactcaaagtaaaataaatggaaatatcactga

SEQ ID NO: 175070 - DNA, 521 bp, Homo Sapiens
tttgatggggagtacctcgtgtcgtacatttctctcttaaagaaaaatagtctatattttaacctgcataaaaaggtctttaaaatattgttgaacacttgaagccatctaaagtaaaaagggaattatgagtttttcaattagtaacattcatgttctagtctgctttggtactaataatcttgtttctgaaaagatggtatcatatatttaatcttaatctgtttatttacaagggaagatttatgtttggtgaactatattagtatgtatgtgtacctaagggagtagtgtcactgcttgttatgcatcatttcaggagttactggatttgttgttctttcagaaagctttgaatactaaattatagtgtagaaaagaactggaaaccaggaactctggagttcatcagagttatggtgccgaattgtctttggtgcttttcacttgtgttttaaaataaggatttttctcttatttctccccctagtttgtgagaaacatctcaataaagtgcttta

SEQ ID NO: 175071 - DNA, 689 bp, Homo Sapiens
  misc_feature (372)..(372): n is a, c, g, or t
  misc_feature (662)..(662): n is a, c, g, or t
tggggatcgacttccttggccagcttgagggcgtcggagttggccaggtccatgttggcgggcgtgacagccagaatgaggctgctctcccggctgatgaactgcaggatcatgtccttgatctggtactccatgtcgggaggatggtcgcccacagacaccttggtgatacccgggaggtcgatgagggtcaagttcaacacgtgtggcgagtagactcgaaggttgatgggcactggggagatgcctttgttggtccccgtgaccctgtcggtctctgcttcaatctcctgccggacttcatcaaagtctgtaaactttttggacttgcagtgcaaaaactcggcatgttctgtttttgagaagatgagntgcagaatgagaggccgccgggtgacgattcctgaaccgcggggaaggaagtcccggcccacgaagttctccagcaccgagctcttgccggcgctctggccgcccactacagcgatctgcggcaggtccaggtggcagctctggccgatggagctgaaggcgtcctgcagtttgttgaccagcgggatcagctcttccatcccgcggttgcccatggcgccggcggcccccggcccgagcgccctgcgctccctcgtgccgaattcgccacccaggcctcgctacgtggngagtgagccgcgcgaggacgagagaaa

SEQ ID NO: 175072 - DNA, 442 bp, Homo Sapiens
  misc_feature (93)..(153): n is a, c, g, or t
atgcagcggactcggcagaaatacaatccgagctacaaagcatgggaaaaagagactcttttaggatcagatctgtgagcacgttggcgaggnnnnnnnnnnnnnnnnnnnnnnnnnnnnnnnnnnnnnnnnnnnnnnnnnnnnnnnnnnnnnttggaagagaggaccatgagaattttaataaaacagaaggaaactaatggaccttccaggatttattgtggacggatgtggatatattctgtacaggaacaacacatctggaagtggactgaagcctatgtagaaacacacacacactgaacattgttattcattttgtaaaatactagtctttatcatcattttttgtagaaatataaacatcgtatgcgcataaagaaaaaggcaacaagaattaggaggatactaacagggtccatcagaatttatcccagactct

SEQ ID NO: 175073 - DNA, 786 bp, Homo Sapiens
  misc_feature (105)..(105): n is a, c, g, or t
  misc_feature (157)..(157): n is a, c, g, or t
  misc_feature (249)..(304): n is a, c, g, or t
  misc_feature (306)..(306): n is a, c, g, or t
tgtctgtgggacagtcacggcctacaggcccatcagggctatagcctggggcttcaactgcccgtcccctaagaatcaagggacacttgggccaagattcaaacnccgcggtacaggaaaagtcagcgggcaagcaggcttggtggagggagagggncgagcagagcagcccaccagcaagatccaatccgagctacaagcatgggaaaagagctctttaggatcagatctgtgagcacgtggcgaggnnnnnnnnnnnnnnnnnnnnnnnnnnnnnnnnnnnnnnnnnnnnnnnnnnnnnnnnanattggaagagaggaccatgagaattttaataaaacagaaggaaactaatggaccttccaggatttattgtggacggatgtggatatattctgtacaggaacaacacatatggaagtggactgaagcctatgtagaaacacacacacactgaacattgttattcattttgtaaaatactagtctttattttcattttttgtaaaatttaaacatcgtatgcgcataaagaaaaaggaaacaagaattaggggaaaataacattttccaaataattataaaaaattgtcctgtgtctatgtatctatatctgttttgtatttttttctggttccaaaccagatttcctgtgattctatactaataatttttgatataaccctttgcttcttataatgagtgcgatatatgttgtcgaggctgttcttcaagaattaaaattgaagtgaaaatttaaacaaaaataaaagaatttagcaaaaa

SEQ ID NO: 175074 - DNA, 756 bp, Homo Sapiens
aatgcagcggactcggcacgacatgaaatcccccgacgaggtgctacgcgagggcgagttggagaagcgcagcgacagcctcttccagctatggaagaagaagcgcggggtgctcacctccgaccgcctgagcctgttccccgccagcccccgcgcgcgccccaaggagctgcgcttccactccatcctcaaggtggactgcgtggagcgcacgggcaagtacgtgtacttcaccatcgtcaccaccgaccacaaggagatcgacttccgctgcgcgggcgagagctgctggaacgcggccatcgcactggcgctcatcgatttccagaaccgccgcgccctgcaggactttcgcagccgccaggaacgcaccgcacccgccgcacccgccgaggacgccgtggctgccgcggccgccgcaccctccgagccctcggagccctccaggccatccccgcagcctaaatcccgcacgccatgagcccgccgcgggtcatacgctggacgagtcggaccgaggctaggacgcggccggcgctctccagccctgcagcagaagaacttcccggtgcgcgcggatcctcgctccgttgcacgggcgcccttaagctatgggactatctaatatctatgcacttatttccgctgggttctttgaagccacatatttttatagtccttaatatcttgcgttttgcatcacctggggcccattgccaaataaattcactttgggccagtttggctttttctacc

SEQ ID NO: 175075 - DNA, 782 bp, Homo Sapiens
gggagagccggcgccgtcaccgcccgcattgccgctcccagtcccgcgctcggcacgacatgaaatcccccgacgaggtgctacgcgagggcgagttggagaagcgcagcgacagcctcttccagctatggaagaagaagcgcggggtgctcacctccgaccgcctgagcctgttccccgccagcccccgcgcgcgccccaaggagctgcgcttccactccatcctcaaggtggactgcgtggagcgcacgggcaagtacgtgtacttcaccatcgtcaccaccgaccacaaggagatcgacttccgctgcgcgggcgagagctgctggaacgcggccatcgcgctggcgctcatcgatttccagaaccgccgcgccctgcaggactttcgcagccgccaggaacgcaccgcacccgccgcacccgccgaggacgccgtggctgccgcggccgccgcaccctccgagccctcggagccctccaggccatccccgcagcccaaaccccgcacgccatgagcccgccgcgggccatacgctggacgagtcggaccgaggctaggacgtggccggcgctctccagccctgcagcagaagaacttcccgtgcgcgcggatcctcgctccggtgcacgggcgccttaagttattggactatctaatatctatggatttatttcgctgggtctttgtagtcacatattttataggcttaatatcttgggttttggatcactgtgcccatttgcaattaaatcactttggccagtttggttttctaccc

SEQ ID NO: 175076 - DNA, 287 bp, Homo Sapiens
  misc_feature (156)..(156): n is a, c, g, or t
tgtggacaactgttactgttcttccgtggccaaccatggcggccaccagccctacccccgctccggccactttccctggacagtgccctcgcaggagtactcacacccgctcccgcccacaccctccgtcccccagtcccttcccagcctggcggntcagagactggcttgacgcctcccagcagcccggccaccagggatttctacagggtgtatgggcagccgtccaccaaacactacgtgaacgagctaacgccacggagggcggcgggggcttgggggaattt

SEQ ID NO: 175077 - DNA, 823 bp, Homo Sapiens
cccgccgtaccagttgcggtcagccgagtgggcgtaggcggcgctgggggtggcaatggttcactctcgtgggggtcacaatgcccacagatttccaagcgtccttggcccagcgcaggatgaaggtgacctcgctcccctgggtggtgttgcaccgggaacgctcagtggctgcgcttacccccacggtgccctcattggccttcaccccacacaggtagccggtgccggtgccggcgctgtcagggacctgggcattggtgttgtacgtcttggagagggccacgaacgggaacgttgtccatctccagcctggtctcctccccagggttgtggtggagctgacccttgaggatgcgggcagccgtcactgtggagacacccatcccatctcccaggaacatgatgacattcttagccacgttggtgttgagcttctgaagctccagggcatatttcagtgtctcttgcgcttggtctcgccagtacttggggtctttctctttctctggcactaaggagttagtaaggcaggtgccaatggccagtactaagaatggtgaaatcatggtgcaccccaagacctgctttatccctggagcccagagatgcaatcgacgtgggtgggagggggtgggctggcagtggtcagatgttaactgatgttccaatcctctttcaggaaggctccaggatggtcactcactcattccaatataacaccactgagcttcatgccacctcaaacatcgcatgtacctctctttttgaaggtaatatagttctttcctgggccatctcagctgccacaccgggagttttt

SEQ ID NO: 175078 - DNA, 941 bp, Homo Sapiens
  misc_feature (851)..(851): n is a, c, g, or t
caccaagcaggtaaccggaacctttaattttattatgtggaatgcttaatgcagagttaataggggctagagtggctaggagaggggactactgagataaataacaggagacagtaatgagttacatgtggatttggggggctgcagaacaggaaaataggggcagatatagctacatactttattcaaataccactgggaggcaaggggtaagaggcaagggcagaatgtacaggtcaggattctagtgtcttcagcctgccgacagcaacctgggtgctgggccctgtgtctcctggagccaagggttagggcctgagcagctgtcactctctgggaagcccagggagtggggctgactgagcaggggccatagagcctagtaagggaagagggagctggcaaggagcccagggagggaggctctgtgaattgtctctgattcctttcctggagcacctgcctcgtcacctcctgggatgcgtctcaaggtcatggaggttgtagtggaggaggactgggggctgtttctcagacaaagaatgaggttattggcacagaattggatcagggggcctctgtgccaactccttcctgccttcagaaagggagggggcattgaagggatgagaactccactaagtccctcgaaccccccactccccaatgaggctcctcaaagctactctcagcccctgagtgggagacacggccagctccgggcacagtctctgggtggcctagcccttaggcactgtggcataggtggcatgggcatgtcagaccctcactatctgtgagagagaaaacaggagtcataggagtggtaaggcctccgatgccaccaaccntggtgcttcccctccccgaggagggtgagcaggcccttctcaggtcctgggatagagggtcattcctgggggaaggtgcagcccctcatc

SEQ ID NO: 175079 - DNA, 720 bp, Homo Sapiens
agggcttccaccccgaccccaaggccctcaagggcttccaccccgaccccaaggccctcaagggtttccacactgaccccgaggccctcaagggcttccaccccgaccccaaggccctcaagggcttccaccccgaccccgaggccctcaagggcttccaccccgaccccgaggccctcaagggcttccaccccgaccccgaggccctcaagggcttccacactgaccccaatgccgaggaggcccctgagaacttacccttacctctcggacaaagatgggcagctccagccacaggcagcccacgtcgaaagccgagtgccccaatctctgttttgaaggaaaccttaccccaaagcttctacactctgacttagctcctactctgctggagtgaaaatctacccacgacgctcacaaacttataattcctcctcaccacaagtttatgtgttaaaaaccatcatcataaaaggaaatgagacccgtatctgaaggaaacagatgttcggtaccacggacgacgccgactctccccatcacccaagctgccctcggttgccccaggagagccacagtgccttgagaacataagcaatttagtgaacagagttcttttcagaatttcctttttcttaagtaagcatctctgttacttaatttctcaccacagctagatgtctataatctgccccaaaaagaaaagaaaacgtgtagatg

SEQ ID NO: 175080 - DNA, 569 bp, Homo Sapiens
  misc_feature (63)..(63): n is a, c, g, or t
cgtggaggtgctgaccgatgccggagttgggtgctgattgaccggagcggccgtcactttggnacaatcctcaattacctgcgggatgggtctgtgccactgccggagagtacgagagaactgggggagctgctgggcgaagacgctactacctgggtgcagggcctgattgaggactgccagctggcgctgcagtccagggcatactccggtttctccagttgttccagaaatgtgtttttacagctggttcatcaaaccagggtccagtctagatcttcacgttgcatctggttatctgcaagttaacaatggaaagcatgactttgcggatagtttcatgtaataatgttgaagagatgataagagttataggtattctgtggcacgaatgtgattgctggttcagcaaaaaagggagacgctgtccccgctgtgcctcatccccatggtgacatctccccgggaggagcagcagctcctggccagcacctccaagcccgtggtgaagctcctgcacaaccgcagtaacaacaagtactcctacaccagcacttcagattggtaac

SEQ ID NO: 175081 - DNA, 600 bp, Homo Sapiens
  misc_feature (317)..(317): n is a, c, g, or t
tctccgctcaaccgaacagggtgctgctgccacccgccccagccagccacctgctcctgacagccagcagctgtgtatttgacaaagtcattggtatatttttacttactggattctccttgcactttacctgttcttttccagagctgacagcacgggctccggcgcagtgtgcctggcttggcttcccttccccatggctgggggctggggtaggactcacccattctaatttattttgtcttttggcttctcagtagctaaggggaaggctgatgtcaggagagggagagggggctgaggaggtagtgctgtangcccagggggtcagggaaagggaggggggcatgtgagggatggaaatgacctcctggcaccaggctcacccacccaaggccccctgccccagcactgaatcccagcgctgccctgaggcccccagccactccctccagcagcctggttcaccacacaaactctgcctggaccccattgtctgtctgcttcccacctgcccctccccaccccctgcccctcgggcaccagcctgcatatgtgttcacttttattttaataaactggtgtggaaaaagcaaaaaa

SEQ ID NO: 175082 - DNA, 1109 bp, Homo Sapiens
  misc_feature (307)..(357): n is a, c, g, or t
  misc_feature (524)..(532): n is a, c, g, or t
  misc_feature (607)..(658): n is a, c, g, or t
  misc_feature (724)..(842): n is a, c, g, or t
  misc_feature (850)..(923): n is a, c, g, or t
  misc_feature (1067)..(1067): n is a, c, g, or t
ctcctgtagatagagatataccgcgcgcgggcatataaagggcgggatgtggtcaaaaaagaaatcggggcgaagaaatggggtggtgtaagtagagaagagaagagcgggggcccgcgtttgtccccaaaaaaagggtgtttcttttggagagcgaagtgtttttgggtgtgtttcagtcgccagaaggcgtcggggggggagaaatgtcgccaccggtgtgggcggggtaaaagagaggggggaaacacgaggtgtggggcagagttgttttgtttgcgccccactgtggtttctcccacggggnnnnnnnnnnnnnnnnnnnnnnnnnnnnnnnnnnnnnnnnnnnnnnnnnnnggtggaaggcggccgacgacggggtcggtttatgaggaggttttcctaccggggcggccgcgtttttttagggagggcgtgtcactaactctgcgggggggaaaagtggtcctctgatgggagttctcccacccccatttctgtatatagaaggccgcccagggccnnnnnnnnnaatttggataatgcgggtgcccgggcgggccccccttagaaaaaacgccgggagtggcccccagaagctcccttnnnnnnnnnnnnnnnnnnnnnnnnnnnnnnnnnnnnnnnnnnnnnnnnnnnnaaaccaacccagtagtcatgacagggttttttttgaaaaaagggaaggccagtgtcgggtccctannnnnnnnnnnnnnnnnnnnnnnnnnnnnnnnnnnnnnnnnnnnnnnnnnnnnnnnnnnnnnnnnnnnnnnnnnnnnnnnnnnnnnnnnnnnnnnnnnnnnnnnnnnnnnnnnnnnnnntaaatagnnnnnnnnnnnnnnnnnnnnnnnnnnnnnnnnnnnnnnnnnnnnnnnnnnnnnnnnnnnnnnnnnnnnnnnnnncattttcttctgtttatttcaagagaacaaagattcaaccatcagttctgtacaaaaacatggtgtgagagccatgggatcctcgggccagcccccttcccgcacttgagccccgggcccccctaatttgccaaaaaaccaggngaagaccaaaaaattcaaactctggggaaaaaaattactatg

SEQ ID NO: 175083 - DNA, 1613 bp, Homo Sapiens
  misc_feature (294)..(356): n is a, c, g, or t
  misc_feature (486)..(535): n is a, c, g, or t
  misc_feature (652)..(660): n is a, c, g, or t
ggcccgggtttgtccaggggaaacccgttatgcccacgttcaccttccctgatggggcccgcgcgcccaaacggaatgtttttgaaaagttttttggagggcccgaggcgggccgacaaggaatttttttgccacttcccgacttttcctcgttcgttttctttcggtttatttccaagaggaccaaagattccacccatcagtttctgtacaaaaaacatggtgtgagagccatgggatccttgggccagcccccttccccgcacttgagccccgggcccccctaatttgccnnnnnnnnnnnnnnnnnnnnnnnnnnnnnnnnnnnnnnnnnnnnnnnnnnnnnnnnnnnnnnncaggggagaccttcctgggcctccctttctccctatccccaatctagaaatttagtgggggtcgcggttcatggccatggcaggaggtggggcagatgggtgtcggcagatttagtgtttggcaaccagnnnnnnnnnnnnnnnnnnnnnnnnnnnnnnnnnnnnnnnnnnnnnnnnnnaaagatcttggaccctgccccggcccataggacactcaaaaacactttataaaaattggggccacagagtagaagaaaaacgagtcatcagaatcaaaaactaaagagtggaaagannnnnnnnncttgtctaaaaggcaaaaaactacaaacagcccaagtcctgagctccccaagacctggatcctccactgtccccctgaaacccggcaggaggcgggatggggagcacaagaggtgggttcttaaaaaagtcacccctggatgggaaagctcttcatcttctgccgccttcctctgcctcccgctgctgccggaggagagagatggagaggaccggggctatgccggcaaactcaacttcttcccctttaggactttggtgatatagaggtagaagaaatcgcagtagaggactgtctggaccaggcctgccacaatggcgatgaggtcgaagaagccctcgaaatggtagcgccagatccagttgaagagatagagcgtgcggtaaacgcctagcgcaaacaagtagtggctggtgatggtctccgcctcgccggtcttgctcaccatgaacagctgcggcaagatggccactgactccaggtagatggagaaggtccagaggatctccagaggggtgaagtcatgattgaccaggaacgccagaatggctgtgggaacgaccaggaactccactctgaacgtgtcatggttcccatcgtaagtagctttgaacttgctataaatcaaccagaccgtggtgaaggagcaggctatgtagaccaccttcatacacgtgttgtagagtgagatgtagttggtgaagaggtccagatatcgggcagtgaacaccacagcaaacaggacctggctcttcccctgaaattccggcgcacgagcgggacttccagattttgagcagtagcaagatgatggcgaggaggtgggagaggtctcccaggaatcggaagagattcatggctggggaaccctggcagggctgagcgggagggaggcaggctggcgggggtgccccccgaggctgctggtctgaacgggtagctgggctgggggg

SEQ ID NO: 175084 - DNA, 251 bp, Homo Sapiens
tctccgctcaaccgaacactgggttaccgtgagtatgtgctccccacctctactgtccgcccttaactgaaatcaagtgggtcctttgattgatgggatttggtctgtgtagccttcatttgcttgttagccaagttcatggtttatacatctgtccccaccctcctctgtggctggccagagacgctaattcagtcatcacacatggtgctgttcctgagaagatgcctgttcgtgagcggagaggtcca

SEQ ID NO: 175085 - DNA, 660 bp, Homo Sapiens
tccccgctcaaccgaacaccaccggcccgtgatcaccgtgcacagcgggatcgcccggagcccacacccgtcctccgctctgcatttccctacgacgtccatcctaccccagacggcctccacctacttcgccccacacggccatccgctacccacctcatctcaacccccaggacccgctcaaagatcttgtctcgctggcctgcgacccagccagccagcaacctggaccgttaaatgaaagtggtcagctcaaaatgcccacgccactgcctttctgctcagatgctggcacctccggcccccggggctgccacggctggcgctcccccctgccaccaaacccgccaccacctccgagggaggagccacgtcgccgacctcgccttcctactctccgcccgacacgtcccctgcaaaccgttcctttgtgggattaggaccaagggatcctgcgggcatttatcaggcacagtcctggtatctgggatagcaaaggtcttcttccctcgccccttctccatcgtcccaggaatcccagggggcagcacagccggcccccggcccacgttttcggtggaaaattagagtgaacaagaacacccctgccgactcccagcccggccaaaaagacaaaacacatagacgcacacactcagg

SEQ ID NO: 175086 - DNA, 601 bp, Homo Sapiens
tggacgcaggacatggaggaggcatctcgtcgcggtgaagaagacagagatggcgaagtcaccattcagcagctcgtcccgccaggactctccgcgcctctgcagcttcacacagcgccacgggcccgtcatcgccgtgcacagcgggatcgccctgagcccacacacgtcctccgctctgcatttccctacgacgtccatcactaccccagacggcctccacctacttccaccacacggccatccgctacccacctcatctcaacccccaggacccgctcaaagatcttgtctcgctggcctgcgacccagccagccagcaacctggaccgcctactctccgcccgacacgtcccctgcaaaccgttcctttgtgggattaggaccaagggatcctgcgggcatttatcaggcacagtcctggtatctgggatagcaaaggtcttcttccctcgccccttctccatcgtcccaggaatcccagggggcagcacagccgcccccggcccacgttttcggtggaaaattagagtctacaagaacacccctgccgttgttaagtctagtcaataagtcaaaacacatagacgcacacactcag

SEQ ID NO: 175087 - DNA, 525 bp, Homo Sapiens
acgcctcttgctcaccgaacagaggacaaccctgaggtgtggcatatgggcacctggcactgggagtcgggggagcacgtccaggcgtggtgcatcctggggcagagcgccatggctcctccccgctctcttggcttctgcctgttggggtctcattcctttctgttccccagtgccccggggcggcattttactgctcagaatttggagggagggagcagtaccttcccggagtccacgcatgtcagttgggtcaagtgcattggacctagggaaagagaaagaaagaataaaagctggagagagagtgaagtgaatgcaagatacaaagtgggatggaagaattaaatccagagttccaggcaatcaaaatgagtgcaggttgaaagaaaacaggtgaattttagtggcatatggatgataaagctgtaaaccaaattcttgttgatgaaactctccggttcacgagacacaagacgtggtaactgcacaggagactggtgtgactgtgtaccagagcagaag

SEQ ID NO: 175088 - DNA, 1248 bp, Homo Sapiens
gggacctcgcaggcgacctcgctggaccctaagtccaggccacagtcagggaagggcgctgagaggcgagcgtgagcccagcgacaggagagtgagctcaccacgcgcagcgcaatgaccagcaagggtcccgaggaggagcacccatcggtgacgctcttccgccagtacctgcgtatccgcactgtccagcccaagcctgactatggagctgctgtggctttctttgaggagacagcccgccagctgggcctgggctgtcagaaagtagaggtggcacctggctatgtggtgaccgtgttgacctggccaggcaccaaccctacactctcctccatcttgctcaactcccacacggatgtggtgcctgtcttcaaggaacattggagtcacgacccctttgaggccttcaaggattctgagggctacatctatgccaggggtgcccaggacatgaagtgcgtcagcatccagtacctggaagctgtgaggaggctgaaggtggagggccaccggttccccagaaccatccacatgacctttgtgcctgatgaggaggttgggggtcaccaaggcatggagctgttcgtgcagcggcctgagttccacgccctgagggcaggctttgccctggatgagggcatagccaatcccactgatgccttcactgtcttttatagtgagcggagtccctggtgggtgcgggttaccagcactgggaggccaggccatgcctcacgcttcatggaggacacagcagcagagaagctgcacaaggttgtaaactccatcctggcattccgggagaaggaatggcagaggctgcagtcaaacccccacctggaaagaggggtccgtgacctccgtgaacctgactaagctagaggggtggcgtgggcctataacgtgatacctgccaccatgagcgccagctttgacttccgtgtggcaccgggatgtgggacttcaaaggcttttgaggagcagctgcaggagctgggtgccaggcagcttggcgaaggggtcacccctagagtttgctcagaagtggatgcaccccccaagtgaccacctactgatgactcaaaccctttggtgggcagccttttagcccgggtcctgccaaggatatggaacctcactccggggagccctggagaattatgccctggcttggccacctgaacaaccgcttattaaccccccgccgggtgggggggttccccaagcttcttagggctttctccc

SEQ ID NO: 175089 - DNA, 334 bp, Homo Sapiens
tctccgctcaaccgaacaggggttggtgtaaaatagggaacagagggagggcactggagccattgcctgcctagttcagtcctcaaatgggtccaagccagctcaggtctgcagcgccaggcccagggtacctggcagcccagccgatggtaccattggctggtgctcccactgaggtcttgagaaggtaatggggagagccacttgcccctgcctctgtccccagtggacttggttttgttcaaggccaaatgccaccccgtcagagagaggaccggttctcctgtcgccccaggtcttggtggctcacagcgtgtgttcgctgagcgagagg

SEQ ID NO: 175090 - DNA, 531 bp, Homo Sapiens
  misc_feature (162)..(171): n is a, c, g, or t
acagctagagccgaaagctctgactccatgactttattaaatgtttcctctaacggttctggccattctgctgggcgatgaaaggctaccccagggcctcagatatgagcgtggtgtctgtatgtggtcctttcatggagggcaggaagcatcataattacnnnnnnnnnnaacggttttcaatttgtgttgacaaagagccttagtgaatctgttggaagaagagtgacttcaaaatgaacctgactccctgtatgttaggagtccatattctctgatacagttaacgttttccttccaacctcttcactgttcaagcaaagtggtatttaagctattcactgtttgacactttaataggagttttgatgagcaatttcaggatgtggaattgctacactgcaccaggttcctgcaggagcagcagcctcagcctgtggatgggacgtgagatcttggcgctttctcctggaggaaacgctgtgctgctgtgttgatgacggggcgtgtatggggttgatgagtgggtga

SEQ ID NO: 175091 - DNA, 479 bp, Homo Sapiens
gcagagtatcaggatgctcaccgagaaactacagtgcgggtgtgcgggtagacgtaggtcaggttgggctccatgatgtcgctggctctcagctggtccagtttccacctctgtctcccattccagaagcggcacgcctcgcaggcccacgtggatatcataaatgcccttattgaaaaagtcccctgtccatttggccaccatcagtgtgaccatgatggggagcccgtaggtgatctcattggtggactcgatcaggatgaccgtgaggctgatggtcatgcggaccaccccgcccaagaaagccgctgcaccaatcagggcaaaggtccccgaatagatgtggcccaatccaatgtagctttttaggacattggcaactaaacgtccaaaagcagctccacacagcagagaaggcacaaaaaggccacttggaacagaaatgccgtaagtccaacatgcaagcaagacatagagaa

SEQ ID NO: 175092 - DNA, 504 bp, Homo Sapiens
cactccatagctagcggcaggcgcaagggcatggtaggggtcggctgtgtacaccctgccataaccgtcactgtaagcggctgcagcggctgcagcagcggtggctgcggttgcagtagcaggctgtgcatatctgtaggctgcatatccacccctggataggcggggatggctgttggaggtaccgctcggactgcaccatatactgtccgccctctgcccctcaaatgggctcctctgaaagcggctgccgtggtggctgcagtagggtaagggaagccaggaactaaagggagactgattaaaggaatgtaagtgttgataccccctcttcctgataggggcactgctgcatcattgcctagggacacatctgcttgaaagctggatgctgcatatatactccggaccatatactagctccaactactgggcttaactttccaaccatttgcatatgggcgaccatcttcttattggtcatgacacgtgcagtagcatatt

SEQ ID NO: 175093 - DNA, 740 bp, Homo Sapiens
aaattacacggcacgtggtagagggccgtaaaatcgaggtgaataatgctacagcacgtgtaatgaccaatagaagatggtcacaccatatgcaaatggttggaaattaagcccagtagttggagctgtatatggtccggagttatatgcagcatccagctttcaagcagatgtgtccctaggcaatgatgcagcagtgcccctatcaggaagagggggtatcaacacttacattcctttaatcagtctccctttagttcctggcttcccttaccctactgcagccaccacggcagccgctttcagaggagcccatttgaggggcagagggcggacagtatatggtgcagtccgagcggtacctccaacagccatccccgcctatccaggggtggtttaccaggacggattttacggtgctgacctctatggtggatatgcagcctacagatatgcacagcctgctactgcaaccgcagccaccgctgctgcagccgctgcaagccgcttacagtgacggttatggcagggtgtacacagccgacccctaccatgcccttgccccttgccgctagctatggagttggcgctgtggcgagtttataccgaggtggctacagccgatttgccccctactgaagtgacgtgagacccctgcaaatgggacaagcccccagttcatgaggcctggctattgcaatatttactagtagaggaactctatagcaagatgacagagg

SEQ ID NO: 175094 - DNA, 911 bp, Homo Sapiens
ggggaaaccgaaaccgctgtgctgtgggcgcagcgccgagattgattcaccttcacctgtgctgcactccagctgacccaagtaggaagccagacgagctgtaaaacatgaacggaagagtggattatttggtcactgaggaagagatcaatcttaccagagggccctcagggctgggcttcaacatcgtcggtgggacagatcagcagtatgtctccaacgacagtggcatctacgtcagccgcatcaaagaaaatggggctgcggccctggatgggcggctccaggagggtgataagatcctttcggtaaatggccaagacctaaagaacctgctgcaccaggatgctgtagacctctttcgtaatgcaggctatgctgtgtctctgagagtgcagcacaggttacaggtgcagaatggacctataggacatcgaggtgaaggggacccaagtggtattcccatatttatggtgctggtgccagtgtttgccctcaccatggtagcagcctgggctttcatgagataccgggcacaactttgaaaaacttgctctcctttcaatactcccaaatgaagatacatttcactcacccctcaacccctgctattctgccatgtctttccctctctctgcatagccagatttgaagtgactgatacccaccccaaacctttgctgttcacagtctccaattcttcatattccaatgggaaaggaaaggtattgtttgaaagaaaactgaaaaaaagaacttggcctaaaaccaaatgaggagttatatattttactaagactttttgaataaaaattcagctacaacccaaagagagaaagattgagtcttcctgtcaccataggcaatacctttttttcttagctggcatgccataaaggccagctatgtga

SEQ ID NO: 175095 - DNA, 590 bp, Homo Sapiens
  misc_feature (502)..(502): n is a, c, g, or t
  misc_feature (518)..(518): n is a, c, g, or t
  misc_feature (522)..(522): n is a, c, g, or t
agctcggcccgatgtagcaccgtggtcatgatgactaaatagtctagcacactagaaaaatataactgcatagaaaaattacaaactaaagcaatccattcacagtttctacatatgttctcattatacattgaattagacctattctatgtggaaaaaatatctttggctggtaaggtagaagctatcaaatgttcaccttaaatactggcagaagaccagtgctgtcatgagatgacacacagcagggtgtttcctaaatgaattgcagcgaggcaaatattccctttagtgtcttctgaccctaggaggaggctttgaattactccggctgcaagtcaagggaattgactcttggtgttcgaaattctatcctcacacccaaggagatggaaccagaaaggcagcctctctccagagtttcccaagcttgcatgaattcatgctaaattgctggaagggctgcgtctctgctgtggtgtagttccggatgccacacatncacgatgaatatcagnccgnaaagatgaggcattctgccattcctcgtgcttcaaagagtcatccaagatgagcaccttgccttcctc

SEQ ID NO: 175096 - DNA, 371 bp, Homo Sapiens
tggacattgagtgtgtctgcattgtcgaagtcactcagcatgttgccatgcgtttatccacttaggtcaacgttaagggaagttcatcgcctctgcttcttcagtaactgatgtctggtgcatcaactgatatgcatttcaggcttttcagcagttcccccagatctatgggtaaaaaaaggttttcaccatgcccacctccccagtgagagaccaatgtctcattgttaatgcatctaatgcacagagtttagtggtctgagggaggtcagtcgccaagcggagattgaaatcacatttgtatttacattattacttttctacagtaaggttagttgcaggctttcacactactaatctgggctgaatcc

SEQ ID NO: 175097 - DNA, 596 bp, Homo Sapiens
agtgagttgggtctagaatctggtctcttggatcttagaccgagatttttgtttgcttggcgtagctgttaatctcaggtctgatgttgggataccctgattctaatctagtggcatccggggacgctgctcagcttcaatgtgagaacaactctgcatgcttctgggaggcttggtggtttatagtccactccctcatacattatctgataagcttgtcagcaaatacatatgctacaaaaaatatgcagggcacttgcaaattattacttatctgcagcaaagttctgactgctttccttgtctcagactgtagaaaatcatgtgaaaatgacaagcatattaaaatgctctctgttgaaaactccatcagtagttctcagggcatcaggagcaaagtctggactcttcctgaacgtgtgaggaagctcctggcctggctgcagcctcatttactcttaggcccccagcacactccaactggaatgtgaggaataattggtgcacctggacagcccttcggtggcatggtttctcactggctgttccctccccgtggcccagtgttgcaggaagtctcattcgtgagagcatat

SEQ ID NO: 175098 - DNA, 256 bp, Homo Sapiens
tgagccaccacacctggcctaggatcctttttctaatacagttgttcaggaaacccattataatactcttgctctgcttttggggaatgaagggaacctgctcctttctcactgtcagtgcctttcccccataccaccaggtggacttaagccactccagtccttccaagtagccaccaatttgctgattaccacggtgctataacgcgttatagcaccgtggtacaataagatgtctgtctgtctgagatggggt

SEQ ID NO: 175099 - DNA, 159 bp, Homo Sapiens
ctccacagaccctgcctccgcatcatcatctctgtcatcatgtgaatcaaacaggtctaaaataaagcagatcttattagaatggtgctaaattgggccaatctgtcctgatactagaattacaattttgtttgtttgtttgtttgagatggagtctca

SEQ ID NO: 175100 - DNA, 363 bp, Homo Sapiens
  misc_feature (45)..(127): n is a, c, g, or t
agcaccgtggtacatctgtcaaaaccaagagactgaaattggtannnnnnnnnnnnnnnnnnnnnnnnnnnnnnnnnnnnnnnnnnnnnnnnnnnnnnnnnnnnnnnnnnnnnnnnnnnnnnnnnnntgccacattgcactgaagacactctcccttttcaattctattactggtcacctcagtcaactttcccggggaaagagaatgcatgggataagctcttgtccttattattgaactggagaaactgaggcgttaaaagtgccgagttgaccaagttcccgttagagggcctagagaacaaggcctgccttactctgttccctttaccccagggactctggttttcagagcccctatga

SEQ ID NO: 175101 - DNA, 301 bp, Homo Sapiens
ttgactgaggtgaccagtaatagaattgaaaagggagagtgtcttcagtgcaatgtggcatcctggattgggtcttggaacaaaaacaggacattagtgggaaaattggaaatctgaaaaaagtccgaattttagttaatataccaatttcagtctcttggttttgacagatgtaccatggtgatgtaagatgttgaccttggggtaggctgggtgaagggtatacaggaactctttgtactatctctgcaacttctctgtaaatctagtatcattccaaaataaaagtttatttaattta

SEQ ID NO: 175102 - DNA, 413 bp, Homo Sapiens
  misc_feature (391)..(391): n is a, c, g, or t
ccctggatgtgctgtagactcgcctgatgaactccaagggggagtagtcagggcgtttcccactgcgccgtggagactgcgacgctcgtggcctctggccttttacaatggcctcgctcccagctggcatctgtctcatcccccacaccgtgctcacttttgtgtctctggagacagctacgcaaaaactttggcatcaaagtgccatcctgaccagccgtgggaatggctgggctgccaggccagacacgctaggttcttccaaagagtcccaagcccagcacctgctcctggggccacgacctccctggccgtggcacccgtcctccgcagcaggcccctgctgtccccccacctgctggctgagctcctcctggcctcgtcccctctnagctgtagctgcaccacccccg

SEQ ID NO: 175103 - DNA, 138 bp, Homo Sapiens
gagtgagaccccatctcaaaaaaatgataataattgattctaaactggggaatagagagacttcccaatttaaaatcttctacagtggttctcaaacgttagccacaccagaatcaatagggctagtaaacgatgcta

SEQ ID NO: 175104 - DNA, 631 bp, Homo Sapiens
cgcgagggtcactacattcactgggaacacgtcatggtgccgcactgggaccccaagatctcggccagctacccccgcggccgccacagccccccagacgacttgggctccagcttctacccggagctggggccctacagctcccgggaccccgaagtgctgcgggagcagtatgacccagctcaaggaagccgccatcggcgtcctggtcctgtcctggtacccacctggcatggctgatgataacggggagccctcagatgacctggtgcccgccattctggacaccgcccatcagtacagcatccaggtggccttccacatccaaccctacaagggccgggatgacatcactgtacatgacaacatcaagtacatcattgacacgtatggctcccatggtgcattttaccgctataagaacagcatgggcaagagcctcccactcttttatatctacgactcatacctgacgtcccctgaggcctgggcccacctcctgacaccaaacgggccccattcgatccgcaacacgccctacgatggggtcttcatagcgctgctggtggaggagggccacacccacgatatcctggccgccggatttgacggcatgtacacctactttgcc

SEQ ID NO: 175105 - DNA, 539 bp, Homo Sapiens
ggcacaggatgatctcaccgtggtacctcaatgagatagggatctgcacacagaaatgtgccctgaacaggacggacataccagtgcccatggaagcaccagcctccctacatcagtggcagagtagcctcgatatgttgagatccgaacatttgaaccgaggcttctggtccaaagcattgaattgcaaagcccccgtttcagtacctcaggaggatcaaacattatctatgtgcacaacaatcattttgtttggagactcatccctgtcccccatgcaaacccaaatccaacaacttctccaggacaagcagtttgaattggctctgcagctcgcagaaatgaaagatgattctgacagtgaaaagcagcaacaaattcatcacatcaagaacttgtatgccttcaacctcttctgccagaagcgttttgatgagtccatgcaggtctttgctaaacttggcacaagatcccacccatgtgatgggcctgtaccctgacctgctgcccacagactacagaaaacagttgcagtaccc

SEQ ID NO: 175106 - DNA, 1247 bp, Homo Sapiens
  misc_feature (1091)..(1091): n is a, c, g, or t
tgatattatctgatgaattgaaactgcctcggaatactacaagaagacactactgttggcccgacagcttaaagaccgagctgtagaagcacagtcttgttacagtcttggaaatacatatactttacttcaagactatgaaaaggccattgattatcatctgaagcacttagcaattgctcaagagctgaatgatagaattggtgaaggaagagcatgttggagcttaggaaatgcatacacagcactaggaaatcatgatcaagcaatgcattttgctgaaaagcacttggaaatttcaagagaggttggggataaaagtggtgaactaacagcacgacttaatctctcagaccttcaaatggttcttggtctgagctacagcacaaataactccataatgtctgaaaatactgaaattgatagcagtttgaatggtgtacgccccaagttgggacgccggcatagtatggaaaatatggaacttatgaagttaacaccagaaaaggtacagaactggaacagtgaaattcttgctaagcaaaaacctcttattgccaaaccttctgcaaagctactctttgtcaacagactgaaggggaaaaaatacaaaacgaattcctccactaaagttctccaagatgccagtaattctattgaccaccgaattccaaattctcagaggaaaatcagtgcagatactattggagatgaagggttctttgacttattaagccgatttcaaagcaataggatggatgatcagagatgttgcttacaagaaaagaactgccatacagcttcaacaacaacttccactccccctaaaatgatgctaaaaacatcatctgttcctgtggtatcccccaacacggatgagtttttagatcttcttgccagctcacagagtcgccgtctggatgaccagagggctagtttcagtaatttgccagggcttcgtctaacacaaaacagccagtcggtacttagccacctgatgaataatgacaacaaagaggctgatgaagatttcttagacatccttgtaaaatgtcaaggatccagattagatgatcaacagatgtgctccnacactgctaccacaaagggtccgacagtaccagatgaagactttttcagccttattttacggtcccagggaaagagaatggatgaacagagagttcttttacaaagagatcaaaacagagacactgacttgggctaaaggacttttgcaaaatatg

SEQ ID NO: 175107 - DNA, 688 bp, Homo Sapiens
  misc_feature (128)..(245): n is a, c, g, or t
ccttagtacagctaaagcccttagaaggtataaccaggcacccataaggctgtgaaagtaccttgagagagtatgcttagagtagagtgatggcagaggagaaaggcaatcagaagtgtttggaaagnnnnnnnnnnnnnnnnnnnnnnnnnnnnnnnnnnnnnnnnnnnnnnnnnnnnnnnnnnnnnnnnnnnnnnnnnnnnnnnnnnnnnnnnnnnnnnnnnnnnnnnnnnnnnnnnnnnnnncaagcttggaaagttacagcggtaagatctgctaaaggatttgatgagatgggtatgagataaagaagaattaaaattgtcttctagatttgtggcttcagtagttgagtggacacgaaatgtcatttaccttagatcagagattgatcttagtggagaaacaggttttaaactagattgaaggccctctgattagttaaaccattcccctactgactggtcatttagttgatttccagttttattatctttgtaaggaatatccttgtacttgtgtatttgtacgtgtggacatattctggaagataaatccctagatgtaaagttctctcatcgaagaggacagtacatatgtttcaagttttgaccgatattcattagttgccctccaaaagtgaggtgttggcttggatcccccaacagagtatgccttattcctgcac

SEQ ID NO: 175108 - DNA, 365 bp, Homo Sapiens
cgcaggctggggcttgatagatagcgcgaccctaacataggcggatatatttatagattaacattattagctcttcctccctcctggtttattcaggtggttttcacaatcagttccttgggcttgaggctactatgtaaagcaatcttagacccttggtgagtcagcctggcaccttggttctgattagctaatacttcctataggcaaaatcagttccgagtttcagctacttgtaataaggatggctaaaacatcaaacctctactagactcccctgccccaagtcacaggacactcctacttcagaatatcattaactgagactgctttgtgcatttctgcagcatcaacaaacagaagat

SEQ ID NO: 175109 - DNA, 400 bp, Homo Sapiens
taatcacacatacacaaatgctaaactgcaatcataacaagttttatgaaggaggtatacatgatgttatgggagcctatgctggaacagaagaaaaacacttccaagcaaaaggaacaggccacacaaagacccctagaaaagagcagtggaaacagaggaaactaaaggaaggcattgtgagtggagtataaaaattaaggaaagcagagtttaatagaaggctagaaataaaggtgggtcatgtgggccttataggctatatagaaggaatgctgtctttattccaagagccaaataaaccctattaaaatgttttacgcaagggaaagacaatttcatttgtattttaaaagatcacactgctaagcgatggaaagatagagggtttgaaaagtca

SEQ ID NO: 175110 - DNA, 241 bp, Homo Sapiens
ctgttacgtatgcaaagtaaaatggttaacagagaagcagttccaaatcctagtaagatttctatgccacttgcgccacaattgtagtgtctatttacacagagacccaggactacatagagcagctcaactatttgataacaagataaaacaatcacctgttttaattggggatgcctgtattttatgcacgatttaaaaatgtatgtatatattttttgagacggagttccgctcttgt

SEQ ID NO: 175111 - DNA, 230 bp, Homo Sapiens
  misc_feature (230)..(230): n is a, c, g, or t
agtgggaatttaacaactcccaaaatgggctatagtaatcaagagcgtatggcagcagtacagaaataagtggttgaataaactgaacctcaaatgattaagaagacatcaagtaaatgggaaatgcaagatgtttgaataaattgagaaaactggatctctgagtgaaaagatacaggcctacatcataaacaaaaatttttggccaagcgccatggctcacacttttn

SEQ ID NO: 175112 - DNA, 451 bp, Homo Sapiens
acgcacaggctgttgctggagcaccaggactgcattgcccctgatcaccaaggccccctgcatgagctcctggaggatcgtgggggagctgcccaccatccctgaccggattggtgagagcatcgctgcagataggcacacggacctgagcaagctagaagtgtccctgacgctgaccaacaagtttgaaggactagaggcagatgctgatgactccaacacccgtagcccggttctgagcaccaagcagctgttggccgatatcatacagttccatcctggggacaccctcaaggagatcctgtccctctcggcttccagagagcaagaagcagcccacaagcagctgatgagccgacgccaggcctgtacagcccagacaccggagccactgcgacgacaccgctcactgacagctcactccctcctgccactggcagagaagcagcgg

SEQ ID NO: 175113 - DNA, 343 bp, Homo Sapiens
gtctgtgcccacttccactctgcacaccagacccgtgtccagtgcaggtgcgtgctcctgcctgccacacgtccacgcactgctgatgtatcggtgcacacgtgtgctcctgcctgcccgcacctccactctgctgtatcggtgcacgcgtgctgctgcctgccacacatccacactctgctgctgatgtatcggtgcacgtgtgctcctgcctgccacacatccacacactgctgatgcgtctttgctcacgtgcatgtgtgtgcacttgttcacgccccatgtcggcacccgtgggtgtggacacagactcacgtgctcatgtggtcacaggcacaccctt

SEQ ID NO: 175114 - DNA, 354 bp, Homo Sapiens
  misc_feature (19)..(19): n is a, c, g, or t
tacgcgacctgcttagctntcatgagtcagacaagatcaggcgtgttcagagtggtgcagccatattcaaagaagaactaaaaagtgtaataaaataagaacacaagactatcactgaaaagaagttcacaatttcatgcacacacatgaaaaagttataggccaaaagcaatatagacatgagagtctaggggaggttaacagcatccagtctggagtccgagtacttgagagttattctaagtttctcatttctctgtgatcttgagcaagttatgaaattctctttgcctcaattctttatattgttaaatcaagtttagactaaagctgccttttaacgtattttaagtt

SEQ ID NO: 175115 - DNA, 354 bp, Homo Sapiens
cctgcacgtcagccacgaagtcctcatagtgatgagagtctggcctggccccactgctgtgtgtgaactatggactgttgcctgcacgtgagcggcagaggaaattgggctccttgggaagagaggaagatgtcgcttcaactgagcagggctcagcatttggcccagacactgggaaggaatgacattgaggaggaagcccaggagggaaacagggaatggtttcaagtgtccgtcgcctggcatggcagaactaggaagctgtgatgttccccttcctggtcatcacatcttggggttcacacttgacctagtgttcccctcatctcattccccagctatccagcaaccatg

SEQ ID NO: 175116 - DNA, 915 bp, Homo Sapiens
  misc_feature (634)..(634): n is a, c, g, or t
  misc_feature (742)..(742): n is a, c, g, or t
agactgcgcccccggagccccccggccggagccgtgtcgcgtgccgggaggatcggactctttccgtcacccgtttgcacctctgcagctgtcaggagcgggtcaggttatgccaaggacgccctgaatctggcacagatgcaggagcagacgctgcagttggagcaacagtccaagctcaaagagtatgaggccgccgtggagcagctcaagagcgagcagatccgggcgcaggctgaggagaggaggaagaccctgagcgaggagacccggcagcaccaggccagggcccagtatcaagacaagctggcccggcagcgctacgaggaccaactgaagcagcagcaacttctcaatgaggagaatttacggaagcaggaggagtccgtgcagaagcaggaagccatgcggcgagccaccgtggagcgggagatggagctgcggcacaagaatgagatgctgcgagtggaggccgaggcccgggcgcgcgccaaggccgagcgggagaatgcagacatcatccgcgagcagatccgcctgaaggcggccgagcaccgtcagaccgtcttggagtccatcaggacggctggcaccttatttggggaaggattccgggcctttgtgacagactggngacaaagtgacagccacggtggctgggctgacgctgctggctgttggggtctactcagccaagaatgccacgcttgtcgccggccgcttcatcgaggctcggctgggngaagccgtccctagtggagggagacgtcccgcatcacggtgctttgagcgctgcggcaccccatccaggtcagccggcggctcctcagtcgacccagaccccccttgtgaagaggggtttgtgctcagcccccacccgggaaaccacggggtggcgcgacatcggccatagca

SEQ ID NO: 175117 - DNA, 226 bp, Homo Sapiens
tgagtgtgagcagctgttgtgttggtgcaggaggggtcatgcgcactttatcccctgagcgcagcagtgcctgatgccacatccgcttgagtgggcaggcgagtgaagatgttgcccaaatcctggaccacaacagtgtccttctcatacctaaaatggctgggcacccctccagcacacggtgcgttggcccaacacggtgcgttggcccaacacggtgcgttga

SEQ ID NO: 175118 - DNA, 809 bp, Homo Sapiens
gggtgggggtttgggtttgagggaagggagcagggtggcggttgaggaacgcttcagccttagctgctacctttcggcagcagtgaaatacaagctgcagcctcggctgccagggctcccttttgacttattgtcgccactgccccttggtgctgtgtggtcccagtggaaggaggggaagattttggaaacctggtagccaccagtaaggtgattctctgccctgttggggcctaaatttgggggcttttgggcaacctctccgtgtactgcgtctgtccacactcgattgggccccaggtgtgtatgaggcgctctggtaaggtgctcaggccagttgcaatgtctgtcagtaacgaggcttttgatgtgttgagctggaggtgagtggaccgggggctgtgttttaagctgcttccttggcatttggcatcactgccttctgttcccgggggagcatggatcttttgtcctcactgctttctaatggggagggctgagggctccctgtccccacagcaggtatgttgggctctgccccagccccacacttgctctgaaaaccaagtgtcagagccccttccccttggttttattttactggtataataaatattaactttccttggaattagaaataaagttttggacttgggaggtccagctggaaaacaggcccctggccgcgccgacgagcggtcccttgggtcgggccgccctcggccccttcggaaaatttttcttgaaaccctttttgtttggcggcgcgggccgccccttaggtaaaaggcgacaacgggccccatacc

SEQ ID NO: 175119 - DNA, 291 bp, Homo Sapiens
gtggacggggcttgcactggccccaaggtgcaggcgagccctgcctgcctgtctcctgctaggcttgcctagggctcccgcctacagaccatgagaattcttctagcatgggaagagagtctgaccaaagtgacaacagccatcccctgactgcccagcactgttcacttcttcccagatactcctaccagaccaggtcagcccttcttttactggggggccagaaacgtccccccaatccagtccaggactccagatgatgcccatttctctgccagtcccagcaatctc

SEQ ID NO: 175120 - DNA, 758 bp, Homo Sapiens
  misc_feature (402)..(438): n is a, c, g, or t
tggccccgttgggccaacgcaccgtggcccctgcagcggaaaccaaagtccccctactatgtgcggggcgcctggggactgagtggctaacgggaagcctccctgcttctctggggccagagcagcttccaggaagtgaagagacccctctccccagtgccccacatctttctctgggagacactcgcgccccctatcctggccagtgatggaggggtatctctacaggggtcctcggtctccatctacttccctttcttcatgtgtttccagccccaccctcagccagagccaggcccccaggcaggagcttcccagcgagcggcctcccctcacttcctcctggtggtcccgttgtctctgctgaatcagagctgagaacggtgccaaaatccaacgatnnnnnnnnnnnnnnnnnnnnnnnnnnnnnnnnnnnnngggcctcatgaccctgggggctgcccccctcggtgctcccagagcctccagtagagtagcgtcacaagcaatctccctggcgcttcctgggtggggacccctgctctgtccccgcttcctagctgcccacttttcagtgttacgaagcctggggaccggggcaggcacccacggggctctccacacgccccctacactgcccgccaccattttgcacactgcctgttcacatgtcgccccaggcggggaaaaatggaaaataaagtgtatttacacagtcaaaaagacagaaagggccttaaaaagcggggaaaaaacct

SEQ ID NO: 175121 - DNA, 648 bp, Homo Sapiens
  misc_feature (12)..(12): n is a, c, g, or t
tctgaacaaggnatgggcacctggatgggagtgaggtgggccactgggtgctgccccctgcccaggaccagcccctggtggaagccaaccacctgctgcacgagagcgacacggacaaggatgggcggctgagcaaagcgcataatcctgggtaattggaacatgtttgtgggcagtcaggccaccaactatggcgaggacctgacccggcaccacgatgagctgtgagcaccgtgcacctgccacagcctcagaggcccgcacaatgaccggaggaggggccgctgtggtctggccccctccctgtccaggccccgcaggaggcagatgcagtcccaggcatcctcctgcccctgggctctcagggaccccctgggtcggcttctgtccctgtcacacccccaaccccagggaggggctgtcatagtcccagaggataagcaatacctatttctgactgagtctcccagcccagacccagggacccttggccccaagctcagctctaagaaccgccccaacccctccagctccaaatctgagcctccaccacatagactgaaactcccctggccccagccctctcctgcctggcctggcctgggacacctcctctctgccaggaggcaataaaagccagcgccggga

SEQ ID NO: 175122 - DNA, 1199 bp, Homo Sapiens
  misc_feature (909)..(1021): n is a, c, g, or t
ttgggccaacgcaccgtgccagccgggctgcagcggccgcgcaccaaggctgcgatggggctggagacggagaaggcggacgtacagctcttcatggacgacgactcctacagccaccacagcggcctcgagtacgccgaccccgagaagttcgcggactcggaccaggaccgggatccccaccggctcaactcgcatctcaagctgggcttcgaggatgtgatcgcagagccggtgactacgcactcctttgacaaagtgtggatctgcagccatgccctctttgaaatcagcaaatacgtaatgtacaagttcctgacggtgttcctggcgcattcccctggcgcttcattgcgggaattctctttgccaacctcagctgtctgcaaatcttggattttaatgccttttgtaaagacctgcctaatgggttcttgccttcagtgcagacaatatggaagagtgtgacagatgttatcattgctccattgtgtacgagcgtaggacgatgcttctcttctgtcagcctgcaactgagccaggattgaatacttggaccccaggtctggagattgggatactgtaatacttctttgttattataacataaaagcaccactgttctgttcatttcctagctgttctaattaagaaaactattaagatgagcaaccacatttagaaatgtttattgacaggtcttttcaaataatgcttttctaattaatagccaaagatttcatatctaactttgtaaccagaattatacagtaagttgacaccacttagatttaaaggcagacagttttgctttagtacaatagtatacattttataatgatgaacttataatgattaagggacatttctataaaaatactaaaatagttttatgcacaacttcccatnnnnnnnnnnnnnnnnnnnnnnnnnnnnnnnnnnnnnnnnnnnnnnnnnnnnnnnnnnnnnnnnnnnnnnnnnnnnnnnnnnnnnnnnnnnnnnnnnnnnnnnnnnnnnnnnntgtgtcggcctgcttcgaacctcaaaaagatttaaaaaagtttttgggggcccccccgcgccccagaaaaaaatttttcaaaaagcctttttttgtggggcccggcgccccacgtgggaaagtgaaaaaggggcttaaatgttttctcccaagaaaaaaaccccggcggcaaagcaaa

SEQ ID NO: 175123 - DNA, 339 bp, Homo Sapiens
gttgggccaacgcaccgtggggttggggagcattgaggggaagccttggtctggcccaaatggaatgctggttcataggccagaactcggaagattctctgaagcatcttgggaggtatgaaataagagtcacttagagagaggacagagctttcatgaaggaggatgactaggaggctgtcttgtccatcccttgcttctgtgccaagccccactatttctcgggaatgtttcctgctttcaggtctattgccatgctcatttcagcgtggaagtttgcataccttcacctcagaaattatacacactgtattaagacctagcggggcgtgcccagat

SEQ ID NO: 175124 - DNA, 748 bp, Homo Sapiens
gacccacgcgtccggtgcacgctgcactccctgactcagtggaatgggctcatcaacaagtacatcaactcccagctccgctccatcacccacagctttgcgggaaggccttctgaaggggcccagttagaggactacttccccaactccgagaaccctgaagtggggggcctcatggcggtcctggctgtgattggaggcatcgatggtcgcctgtgcctgggcggccaaattgtgcacgatgagtttggagaaggcaccgtgactggcatcaccccgaagggcaaaatcaccgtgcagttctctgacatgcggacgtgtcacatttgcccattgaatcagctgaaaccagtaggtgaacttgtgctcagttactgtatgataagggaaattggctttacactaggacccagcaccaacattagcacttgaaagaacttgattctggtacttcaagtttgccttctaggaagctgtgtgagcttgcgcttctgtggtgagcagggcctgtctcacagggcacctaaagcagttggttcctgtgtttttcagcctcagagacatgaacgagggctttagcaacctagaaggtaccgtgcgtctatgaggtagttctaattattttaaaatgtgaatttatgaacgtttacttttgtattgaacaactcaagtttaaaaaaactttttttaacgttgtgtatacctttattataatactttaaagttcagggtaaatgtgcacattgtg

SEQ ID NO: 175125 - DNA, 246 bp, Homo Sapiens
ccaacgcaccgtggctgagtctgtgagccagcagattttgcgccagaaccggggccgcaaggcctgtgaccggcctgtggccaagaccaagaagaagaaggctgagggcaccgtgttcaccgaggaagacttccagaagttccagcaggaatacttcggcagctaggctccctggagggcacggtgacggtgcgttggcccaacacggtgcgtgcccaacacggtgcgttgcccaccggtgcgtgg

SEQ ID NO: 175126 - DNA, 884 bp, Homo Sapiens
cacttccgcccatccccctccggatccctctgttcgggctcgggtttccgccgagacgacagggactgccaggtcggaagtagtgtgaggctcgtgggcggagccaagcgccgccatgtccgccgccctgctgcggcggggcctggagctgctggcggcgtccgaggccccccgggaccctccaggtcaggccaagccgagaggggctccggtgaaacggccccggaagacgaaggcaattcaggcccagaaactgcggaactcggccaagggaaaggtgcccaagtcggcactggacgagtaccggaagcgagagtgtcgagaccacctcagagtaaacctgaagtttctgaccaggacgagaagcaccgtggctgagtctgtgagccagcagattttgcgccagaaccggggccgcaaggcctgtgaccggcctgtggccaagaccaagaagaagaaggctgagggcaccgtgttcaccgaggaagacttccagaagttccagcaggaatacttcggcagctaggctccctggagggcacggtgaaaaggccttcaagccctgcagcctccgactcctgctggctccaggaaccggccgtgccgcgcggccagcagatggcgatgcaggaccagcctggctcgaggaagccgcggagctgagccgagtggaggctggaatggagctggtgggccggaagtcctggggaggatttacacacagaccggagctggcttccgcaggcctgggcagagcatctgcacctgccggaaaggaacgtatctgtttgtttgcttttgccccaggtggtgcctctgggctgtttgctgtggagcaggctaattcctgagcccttggggacgaacgtcccggagttggagaa

SEQ ID NO: 175127 - DNA, 405 bp, Homo Sapiens
aggcgttgaatggcccctacacccctcagactgtgcccactgggtggcaaggccctgagtgagaatgttccaaggctcgggtgcagccactgagacggccgaatcccgccgccgctcttcctctgacacagctgcctacccagcaggcaccactgcggtgggcactcctggcaacggcaccccctgctcccaggacacaagcttctccagcagccgacaagataccccatcttcctttggccagttcacacctcagtcctcccaaggaaccccctacacgtctcggggcagcaccccctactctcaggactctgcctactccagcagcaccacttcaacctccttcaagccccggcggtcagagaacagctaccaagatgccttttcccgccgccacttctctgc

SEQ ID NO: 175128 - DNA, 677 bp, Homo Sapiens
  misc_feature (478)..(478): n is a, c, g, or t
  misc_feature (510)..(510): n is a, c, g, or t
  misc_feature (575)..(575): n is a, c, g, or t
  misc_feature (648)..(648): n is a, c, g, or t
  misc_feature (657)..(657): n is a, c, g, or t
cgtgaggcgttgaatggcccacaaacaccaccccacatgtgccggctgagggacctgaggcaagtcgacccccgaagctgcaccctggcctcagagctgcaccaggccaggagcctcctgagcacatggcagagcttcagaggaatgagcaggagcagccgcttgggcagtggcacttgagcaagcgagacacaggggctgcattgctggctgagtccagggctgagaagaaccgcctctggggccctttggaggtcaggcgcgtgggccgcagctccaagcagctggtcgacatccctgagggccagctggaggcccaagctggacggggccgaggccagttggctgcaggtgctgggagggggcttctcttacctggacatcagcctctgtgtggggctctattccctgtccttcatgggcctgctggcatggtacacctacttccaggccaagataagggccctgaaggcattgnctggcagccctgcagcctgaaccacctggggnggaggcgggagagggagctgccatctctaggcacctcaagccccctgaccccattccctcctctnccaccccttgctccttgtctggcctagaagtgtggggaaatttcaggaaaacgagtttgcttccagttgaagnttgtttggnggttggttaggacagagaag

SEQ ID NO: 175129 - DNA, 1133 bp, Homo Sapiens
  misc_feature (393)..(419): n is a, c, g, or t
ggatcctgcaagtgatcagccgctccttcctctatgggagcaacgcggccttcctcacccttgctttcccttcagagcactttggcaagctctttgggctggtgatggccttgtcggctgtggtgtctctgctccagttccccatcttcaccctcatcaaaggctcccttcagaatgacccattttacgtgaatgtgatgttcatgcttgccattcttctgacattcttccacccctttttggtatatcgggaatgccgtacttggaaagaaagtccctctgcaattgcatagttcagaagccctcacttttcagccccgaggatggttttgttcatcttccaccacctttgaggacctcgtgtcccaaaagactttgcctatcccagcaaannnnnnnnnnnnnnnnnnnnnnnnnnnaaataaagacacacaaggacgtctgcgcagcaagaaaagaatctcagttgccaagcagattgatatcacacagactcaaagcaaaggcatgtggaacttctttatttcaaaacagaagtgtctccttgcacttagccttggcagacccttgactccaggggagatgacctggggggaggaaatgtgtcaactatttctttaggcctgtttggctccgaagcctatatgtgcctggatcctctgccacgggttaaattttcaggtgaagagtgaggttgtcatggccctcagctatgcttcctggctctccctcaagagtgcagccttggctagagaactcacagctctgggaaaaagaggagcagacagggttccctgggcccagtctcagcccagccactgatgctggatgaccttggcctgaccctggtctggtctcagaatcacttttcccatctgtaaaattgagatgaattttggtgttgaaagttcttcctggagcagatgtcctagaaggttttaggaatagtgacagagtcaggccaccccaagggccatgggagccagctgacctgcttgaccgaaggatttctgacagactatctttggggatgttttcaagaagggatataagttatttactttgggcatttaaaagaaaatttctctcgggaaataattttatagaaaaataaagcttctgtgtctaagagc

SEQ ID NO: 175130 - DNA, 1278 bp, Homo Sapiens
  misc_feature (192)..(200): n is a, c, g, or t
  misc_feature (311)..(323): n is a, c, g, or t
  misc_feature (375)..(375): n is a, c, g, or t
tctcagatagaattcctttgggtgagcccacagaaaaagagggcccgactgttatatggcgggggtataaattcccggggagtatgtaagggatgttgataaatctgcgggatgtactcgggccgattagaaaagtaaaaaaggagctccccaataagggagagcccggagaatatttccccccttttatcnnnnnnnnngggggtctggggaaacacggttagggcccaaagggccacttcaaaaaccctgtttttaccggcacccgggaagaaaaaagcccggagggagatggcagcacaccaaaagtnnnnnnnnnnnnntgtcgggagggagggaaaattgacgaggggcacggcgattaggttgtgcgtnggggcccgcaaacccaaaagggttaattgcagaaaatcttggccaacattccaattgcagggccccagcacagggggcgggccaggtgagatagggaaggggtggaggaagtaatctggcccagggccctcagaagctgtgagatgatattgggtgccagggctgcaaggtgaggccttgtaccatctggtttccacattacagggcctcaactatgccatcctgtaccaccatggagaacctcttgagacgtcggattcccaaagatggacaccagcgaatcatctagtaataagtctgtctcctccccaaaggccccagtgggatcagccaggagccgaaccttgccttccgccttgtgggctcggccccactcgccagtcacaaaggcatcattaacactcagacaggccaccacctggactcccttggccttcagagcctcagcctgctccacaaaccctggcaggtgtgtcttggaacatccaggggtgaaggccccaggaactccaaacagcacacccttcttgcccttgaacagctctgccaggttcaccttgttccctggctccccttcaaacacctccactgctgggatggcatctcccaccttgattggggccatggctgcagcggctctgctgaaactgcggaccccgccagacgcccactctccttcactgcaccgtcttgctgccgctgccgcagactgaccgccggccccaccgacgagtatatagcccgctgagcgtctcagggcgcacacgccagctagtcccatacccgccccacggccacttccactccgcctcctggctggtgccaccgcagcaggcggggcaccgctagcggcacagcggcgacaccctgcggaaggcgggcctgggccgcctccactgcccc

SEQ ID NO: 175131 - DNA, 646 bp, Homo Sapiens
  misc_feature (576)..(590): n is a, c, g, or t
gccggcggtcagtctgcggcagcggcagcaagacggtgcagtgaaggagagtgggcgtctggcggggtccgcagtttcagcagagccgctgcagccatggccccaatcaaggtgggagatgccatcccagcagtggaggtgtttgaaggggagccagggaacaaggtgaacctggcagagctgttcaagggcaagaagggtgtgctgtttggagttcctggggccttcacccctggatgttccaaggttcggctcctggctgatcccactggggcctttgggaaggagacagacttattactagatgattcgctggtgtccatctttgggaatcgacgtctcaagaggttctccatggtggtacaggatggcatagtgaaggccctgaatgtggaaccagatggcacaggcctcacctgcagcctggcacccaatatcatctcacagctctgaggccctgggccagattacttcctccacccctccctatctcacctgcccagccctgtgctggggccctgcaattggaatgttggccagatttctgcaataaacacttgtgggttttgcgggccnnnnnnnnnnnnnnnaatctcacctaaccccaaaaaaacctggtccgggcccggcccttcggccccctttc

SEQ ID NO: 175132 - DNA, 856 bp, Homo Sapiens
ggggcctgctgcggtggcaccagccaggaggcggagtggaagtggccgtggggcgggtatgggactagctggcgtgtgcgccctgagacgctcagcgggctatatactcgtcggtggggccggcggtcagtctgcggcagcggcagcaagacggtgcagtgaaggagagtgggcgtctggcggggtccgcagtttcagcagagccgctgcagccatggccccaatcaaggtgggagatgccatcccagcagtggaggtgtttgaaggggagccagggaacaaggtgaacctggcagagctgttcaagggcaagaagggtgtgctgtttggagttcctggggccttcacccctggatgttccaagacacacctgccagggtttgtggagcaggctgaggctctgaaggccaagggagtccaggtggtggcctgtctgagtgttaatgatgcctttgtgactggcgagtggggccgagcccacaaggcggaaggcaaggttcggctcctggctgatcccactggggcctttgggaaggagacagacttattactagatgattcgctggtgtccatctttgggaatcgacgtctcaagaggttctccatggtggtacaggatggcatagtgaaggccctgaatgtggaaccagatggcacaggcctcacctgcagcctggcacccaatatcatctcacagctctgaggccctgggccagattacttcctccacccctccctatctcacctgcccagccctgtgctggggccctgcaattggaatgttggccagatttctgcaataaacacttgtggttgccggccaaaacaccaacaacacaaaatcacacaccacaag

SEQ ID NO: 175133 - DNA, 554 bp, Homo Sapiens
tgcagagaacatgctttattgaggagtagatatagaagagcacattctaccacatgtggggaagggtttagcttctgtaaaaggcctttatcccttaagaaaacccctagtgaagttgctttttgataaattttaacagtgacactgaaactggaggggagctgccactgaacatgcttaaaattagctcccccaacccacagtgaatataagtagtgtacagagatgacaagagaaaggcacaaatggccggagtcagggattgtggtgagggctccacatgaagacagcatgttggaggagaccaagttgggaagggtgacatgtcatacatcaaaagttgccccaagatagcaggttataatgggctagagagaaattagagggaacatctcttccttcacttgaacaacaccaaaaatagaagaccagagaatagaaggatggtgacaaatcccaaaaaggaaactggaggaggagttcgtggaagggcagaagcactttaatcctagagggagggtgaggcactgttgaaaagagaagcgacttgcagc

SEQ ID NO: 175134 - DNA, 659 bp, Homo Sapiens
agggctacccacttcggccagaacttattgaaagcgcaatgtacctctaccgtgccacgggggatcccaccctcctagaactcggaagagatgctgtggaatccattgaaaaaatcagcaaggtggagtgcggatttgcaacaatcaaagatctgcgagaccacaagctggacaaccgcatggagtcgttcttcctggccgagactgtgaaatacctctaactcctgtttgacccaaccaacttcatccacaacaatgggtccaccttctgacacggtgatcaccccctatggggagtgcatccgtgggggcgtggggggtacatcttcaacacatgaagctcaccccatctgaccctgccgccctgcactgctgccagaggctgaaggaagagcagtgggaggtggaggacttgatgagggaattctactctctcaaacggagcaggtcgaaatttcagaaaaacactgttagttcggggccatgggaacctccagcaaggccaggaacactcttctcaccagaaaaccatgaccaggcaagggagaggaagcctgccaaacagaaggtcccacttctcagctgccccagtcagcccttcacctccaagttggcattactgggacaggttttcctagactcctcataaccactggata

SEQ ID NO: 175135 - DNA, 837 bp, Homo Sapiens
  misc_feature (680)..(680): n is a, c, g, or t
gggccttccggcccgtgttctatccgccgcctccaccttccatccggcgccggctttcggcgcgacggtcgccgcgttccatcgtcgcgcggcccttcgggcgcccgagcccgcaatgtcgggccccaacggagacctggggatgccggtggaggcgggagcggaaggcgaggaggacggcttcggggaagcagaatacgctgccatcaactccatgctggaccagatcaactcctgtctggaccacctggaggagaagaatgaccacctccacgcccgcctccaggagctgctggagtccaaccggcagacacgcctggagttccagcagcagctcggggaggcccccagtgatgccagcccctaggctccaagagcccccaaccgggacccaaccctgcctccctgggctaggctctggcctgggcactcaccccctggcttagacaccttctcaagggctggccttcaaggacccctggtgggtctgcctgcctgggccacccttcctgcctgggcctccccttggcctacctgggccagcccccaccacctggcatgcactcctggggccaagagtgggccttgcaacccacccacttgcctgcccacccaaatcctgggcgctcccccctctgcccagggccttgaatgtccacattaatggggtctcccaccantacaccactcccacttgcgcccttttggcctttccaaatacgcttaccatccaacccctgttgggcgccttcggcccttaaaaaattttcaaaaaccctctttttgggccgcgggcccccatagggaacgggacaagggctaaaaccgtgttcccca

SEQ ID NO: 175136 - DNA, 714 bp, Homo Sapiens
  misc_feature (601)..(601): n is a, c, g, or t
ggtctccctgcttcaggcttgggaaggttcgggagatgcttccttctgtaacaccagaaccatttggccttaattccaatgtgagagacagaatccctggggtgctggactggccctccagagggtaagccatgtccggagtctcgggcccaaggaacgatttggagggtgcttgttagggcctcccgtgttgggtagaaatttggtggatctgttggctgaaaagacggacttgcttgcctctcctacagcatggagaggctgaccccatggctctgccaccgttggggcagggttagcagatggcagcccttctctgtggctgacaggtcactgagtgataagcatggttggttccggtgagtgtagggatggcacgataccagggcagcctccttgaaaacggcctcgggagacgggagctgcgagcaggtgggcagatgagggccctatgcgcactcaggggtgaagggcgtccgctggccactctgcaggggcccctgcaggattccaggcacctcccgtttgtccttgaggactgctggctgtaaccagggcacatcacccacctcaagacaagcccacgcccttgtcagcttanggggagcccagtcctgagggctgcatctctgttgtaggcccagccaccggcacaaagctggattcatgctccctgcccctaccccaccctgctcctcaccctggggcattcga

SEQ ID NO: 175137 - DNA, 1349 bp, Homo Sapiens
  misc_feature (67)..(67): n is a, c, g, or t
  misc_feature (83)..(83): n is a, c, g, or t
  misc_feature (94)..(95): n is a, c, g, or t
  misc_feature (97)..(100): n is a, c, g, or t
  misc_feature (102)..(102): n is a, c, g, or t
  misc_feature (105)..(105): n is a, c, g, or t
  misc_feature (107)..(109): n is a, c, g, or t
  misc_feature (111)..(112): n is a, c, g, or t
  misc_feature (114)..(123): n is a, c, g, or t
  misc_feature (125)..(128): n is a, c, g, or t
  misc_feature (130)..(131): n is a, c, g, or t
  misc_feature (133)..(143): n is a, c, g, or t
  misc_feature (145)..(192): n is a, c, g, or t
  misc_feature (194)..(507): n is a, c, g, or t
  misc_feature (509)..(517): n is a, c, g, or t
  misc_feature (519)..(526): n is a, c, g, or t
  misc_feature (528)..(531): n is a, c, g, or t
  misc_feature (533)..(534): n is a, c, g, or t
  misc_feature (536)..(553): n is a, c, g, or t
aggattgtgtagtatggtttttatgaggagaaagtggattttaggtagtaatggagagagtggtatntaggaggtggtttttnatgagtttttnntnnnntntanannntnntnnnnnnnnnngnnnntnngnnnnnnnnnnntnnnnnnnnnnnnnnnnnnnnnnnnnnnnnnnnnnnnnnnnnnnnnnnngnnnnnnnnnnnnnnnnnnnnnnnnnnnnnnnnnnnnnnnnnnnnnnnnnnnnnnnnnnnnnnnnnnnnnnnnnnnnnnnnnnnnnnnnnnnnnnnnnnnnnnnnnnnnnnnnnnnnnnnnnnnnnnnnnnnnnnnnnnnnnnnnnnnnnnnnnnnnnnnnnnnnnnnnnnnnnnnnnnnnnnnnnnnnnnnnnnnnnnnnnnnnnnnnnnnnnnnnnnnnnnnnnnnnnnnnnnnnnnnnnnnnnnnnnnnnnnnnnnnnnnnnnnnnnnnnnnnnnnnnnnnnnnnnnnnnnnnnnnnnnnnnnnnnnnnnnntnnnnnnnnngnnnnnnnngnnnnanncnnnnnnnnnnnnnnnnnnaatcccctccccacaccgacgtgctgaggagcagatgtgtgtgagacagacacaaggggcaaagataaggacaagagggtgccctctccttggaatctggttatgagggctgagggtgtccccgtccagctcctggactctgggggatcttgggtgagatgggggccggaatgggctggggcaggggtgagactgggcgctcagcctaagaagccatcggggtcatcatcctcaaagtggccttgctgaagcaccttgatgtggtgctcgtagattttcagggctggcccgaggcggatggacaggccggtgagcacatctgtgcgctgcatgagcagcaaagatttgccatcaatttcctgctcttggaaagctgtcgcctgctccgggaatccagcctcagtaaaatattcgacgacatccatcacggtccactcgacgggatcagatggcttctctttgcgcccgggaggacagccaaagggggtcccgtcggccccaggtagggctggtttgcctgggggcaaaggcacgggggacggggagtctggcccggtggcaacagaagctgttcccccttccttgttcatggctgccatggagaacacctggcgggtgccgctgcccggggctggcccccgcccttcatcctggcctggtgcggtccgcagggggtccactccttgaccctctccttggcactctgaggtccccgctcgccgttaagctggtggtgctgggcacctgcaggacggtcactctcgggcacttcagagccctctgacacatcatcttc

SEQ ID NO: 175138 - DNA, 1099 bp, Homo Sapiens
  misc_feature (273)..(325): n is a, c, g, or t
  misc_feature (494)..(625): n is a, c, g, or t
  misc_feature (629)..(637): n is a, c, g, or t
cggagaacggctccagctgttctagctctctttcagttcttgaaccttcccaccttagggtctataaggttccctctgcccaaatgttctactctcccttcttcttcaacacatccttcagtttaagcacttgcttctctcagtttaaactccacttccttagggatgtctctgtgacctccctgtgctggattagcttccctactctatgctcttgtaaaacactatctacttcctttgtcataaactcatcattttcctataaacattaannnnnnnnnnnnnnnnnnnnnnnnnnnnnnnnnnnnnnnnnnnnnnnnnnnnnaccctgtacctccaatgtctggcacttgtaggtgctcaaatattcgttgaatgaatgaaaaatccatattgtaattgatgtcctctggccacatagttttaaaattaggtgattgattatatgaccgaatagaactatcaaatgttttcctaataaagtcaatatttcnnnnnnnnnnnnnnnnnnnnnnnnnnnnnnnnnnnnnnnnnnnnnnnnnnnnnnnnnnnnnnnnnnnnnnnnnnnnnnnnnnnnnnnnnnnnnnnnnnnnnnnnnnnnnnnnnnnnnnnnnnnnnnnnnnnngaannnnnnnnncggcgatgaattaatctatacggcaccgagagaaggagacaaagaatccaacccgaacacccagctataaagaagaaagagagcgcgacaccaatggagagggaagtaaaatataaggaggcagagagagcgcgactgataaaacaacaccgcacagcatgaagggcaaaacaaacacgcgagatagacgaagtaaaaggaagaagaaaacacaaacaccacaaccagcttgggagcgtgccaattacaagaagaagagaacaacacaccacacctacaacagaaagaacacgaccaccaaagtcagagaaacaacaaagaaccaaacggcagacgcctacggacgggagcgaacagcacacaagactagtagacgccaggacgagagagacaaacatcaccgccaccacacagaacaagaagaaaacacaacacaaacgggcacaagacataaaacaccgt

SEQ ID NO: 175139 - DNA, 1099 bp, Homo Sapiens; identical to SEQ ID NO: 175138
  misc_feature (273)..(325): n is a, c, g, or t
  misc_feature (494)..(625): n is a, c, g, or t
  misc_feature (629)..(637): n is a, c, g, or t

SEQ ID NO: 175140 - DNA, 710 bp, Homo Sapiens
gaccccagagtcccctgggtctggaaagcgttaggagaggtcaagaaaggagcagtaaggaggctgaaggttacagggcatgtggaatccaaatcactgctctgggctagggaatagagccagcagaccaaggtgggaaggattctggaagggggacattttagtctcctaaccccaaagctcagggtggaagaggggagaacaaggaagcagagtgtataattattttttccttttatttttggaatctaacagtacctggcagcagggaggggaaagtacagtggggaaaagcatctgacaaggccagttagaacagaggatgggaaggatggagactcccgggcttggaaggctaggaagcaggcagagactggttgccatttcaagtcactagctaggcccattcattcctcccacaaccctgacccattctcctctggactcactgtgcctcagtttcttcccctcaatggaatgagaaatgacagcacccgccacagccaagagatgaattctgagcacttaccacgggcactttatggacataaaatacctctcgctgtgggacagataaccagggcaccagagtagtggtgaagagatgtgaggcttaagaggagtcacaggcttcagagtacaagttcccctctgctcccagctggacagtgcctagaagccaaggagttgagaatctcctgatccaaacc

SEQ ID NO: 175141 - DNA, 223 bp, Homo Sapiens
  misc_feature (155)..(155): n is a, c, g, or t
cattggataagatgaggggaagagcgcgagagacctggccagggttgggatgggtgggacaggctgagaaagtccattaggtgaaatcctaggaggcagcaggctggaaaaggttccagcgaaggtcgcaaggaaccccacaggggaaaacgtgntgggagctcagggtctgccaagcaacctgccgccctcatccgcttatccaatgggggatcctcggaga

SEQ ID NO: 175142 - DNA, 861 bp, Homo Sapiens
cattggataagcggatgagggcctgagtgctccagtagccaccgcatctggagaaccagctggataccatggaggggatcagtatatacacttcagataactacaccgaggaaatgggctcaggggactatgactccatgaaggaaccctgtttccgtgaagaaaatgctaatttcaataaaatcttcctgcccaccatctactccatcatcttcttaactggcattgtgggcaatggattggtcatcctggtcatgggttaccagaagaaactgagaagcatgacggacaagtacaggctgcacctgtcagtggccgacctcctctttgtcatcacgcttcccttctgggcagttgatgccgtggcaaactggtactttgggaacttcctatgcaaggcagtccatgtcatctacacagtcaacctctacagcagtgtcctcatcctggccttcatcagtctggaccgctacctggccatcgtccacgccaccaacagtcagaggccaaggaagctgttggctgaaaaggtggtctatgttggcgtctggatccctgccctcctgctgactattcccgacttcatctttgccaacgtcagtgaggcagatgacagatatatctgtgaccgcttctaccccaatgacttgtggggtggttgtgttccagttttcaacacatcatggttgggccttatcctgcctgggattgtcatcctgtccctgctattgcattatcatctcccagctgtcaccctccaagggcccaccagaagggcaagggccctcaagaaccaccggccatcccccatcctgggctttccttcgcccggttggcctggccttacctaaattggggaac

SEQ ID NO: 175143 - DNA, 960 bp, Homo Sapiens
  misc_feature (389)..(389): n is a, c, g, or t
cattggataagcggatgagggattcattgtgaggtctactggatgaggcccatagttgagacttgtagacatttatttatactgtgtcatgttttataatttatacataaaatgtctggttgactgtataccttgtttttgaagaaatttattcgtgaaaggaagagcagttgttatttattgtgaggtctcttgcttgtaaagtaaaagctttttttccttgtaaaccatttaagtccattccttactattcactcactcatctgtctcccttcatttcactgttagactcttttccactttcaacaaacttgcatgtcagtttctgtcatgtttatttattggattctctgctgcctgatctgtacatacatgatccctcgggtttngtttacaaggaaccttgactgaccaaaaggcattataactctgactcaaatacaaggtacagaagataagcatctttgaggaaactcctacttcagttcttttgttatgatgaagacatttgtgagagaggagatgattagaattctagtaatgtacttttaagatgttacagatacaaagaaatgatgtgggtgtcaggagactaaaggatgttgaaggctacacattcaaccttttgttaggtgtttcctttaagctactcagctgtaccttttaaattagttctttttcaaccagtatatcactaaaagttatatcaaagctttatcagttcaagtttcttgcttttcataatactttttctggatgcaattttatattttcaaacatgggcaaggttaaaactatcaaattccatttcagcttatattagtttggtacttttctaccattggtaacatgtggccagggtatattcaccaggttcatcactcgtgtcttcggtcaacttaactcgactgagtgaaaccacttcaacaactttcgagaaagccccaaagacaaccactg

SEQ ID NO: 175144 - DNA, 611 bp, Homo Sapiens
tcccctcgctatcatcggcaccaacgaatggcaagttaaacatacagtcgcctctgacaagccacgtatgcactacagtggttcgggtgatcttcagccttcaccgagtatgtcttgctactcaagttgggccacgtgtctctacctgtatcattgctataaagccacttgagatctgttctttctctagacgtgctcattgcttctagcacaaatcaaaatagatctggaaacacctacacgagacagcctctgcctcccacattgatctgtttggaagatttaaatcaagagtggatgtcaggcagggtatactcctaaagcacaattttgtgtgaagtctaaataaccacctcagcagttgctgaggtcttggcttgaggctttcccagcgagcataccaggcaggcttgcccttgtatttaagcatgtactcgtctgcctctgatcactctcagtaccacctacaaaataaagtggtcgagatggtgtgtgagtagccgcgtttatgttggctgtgtttcatttaattgttgataggatcattagctcagctgggactcctggctttgctttgttcacttttttcttgggtgataagtgtccgatga

SEQ ID NO: 175145 - DNA, 311 bp, Homo Sapiens
ctctttatggtcagagagtctctggctaaggattgtgtgggatattaagtggggcttcctatggagccaggcggggcctaagctatcgggctgtcttgggtcactccctgtcccgccccggcctcgggagttggtgtggtttatgtctcctctttcttcatggatcatagtgcatgaggctgggagccacaccggctgattaggctcctcctgcactcccaggccacctgcaggttcacaggggctgatgaagccgtgaatcgcgatggctctgtttgaaatgctcgttccccggtgccgatgaatagcga

SEQ ID NO: 175146 - DNA, 1075 bp, Homo Sapiens
gctatctcagaccctgcgtggccctggccctcaggcacctgcgtggcagctccacgggccaggcccactgtccagttgctcctgccctggagttggggccgtggggagggaaagcgcagtaatagctgagtgttcagaggaggggctgggctgcaggcattgctggttcagattggtgctctccacctggctgagtgaggcggcaggaagcagcggccggaagattcctagagcttagcagagaaggatgcgaaatccggcacccctgtgacaccgttttgggaacgtcaaccaagcccacccatcggccaccagcacggcccccgtcacgtaggaagccagagggctggccaggtagagcacgctgtgggcgatctcggtcttgttccccagcctctgcagcgggctggcagtgaccttggtgctcaggctggcctgagggccacccagtcgccggagcccctctgtgccactgatggggccaggggcgaggctgttgacgcggatgttttggggaccccacgtccacagccaagtgccgtcgtcatcgcgtccacagcggccttggcggagcctgcatgcacctggagcgcctgcccccggttccccagggtggcagtgatgttcacgatcacccctccgtggtcccggaagaacttctcatagagcacacgagacacattgaaggtgccgctggtatcgatgtccatcacggtcttgaaggcgttgaaggacaaggcgccagcggggcacaggaagttcccggccgcacagttaatgagaatgtcgattctgccaaactccgttcagagcctggtccacggcggccatgacagctgggggcgctcggacgtccatagagagagggaggcagcgccggccggtggccccagccagcttcctggcggccgtcagcactcgcggcaggctcctactggcaatcaccgtatggcagccgtgccgcatgaaaatctcagcaatccggaacccaatcccagagccgcctcctgtgatgaaggccactttgtcccgcagcaggtccgggcagaagaggtggcggtacgcggggagacag

SEQ ID NO: 175147 - DNA, 1508 bp, Homo Sapiens
  misc_feature (1399)..(1399): n is a, c, g, or t
  misc_feature (1404)..(1404): n is a, c, g, or t
  misc_feature (1422)..(1422): n is a, c, g, or t
ccagggtccagttagcatcagtagaaggatgtcactaggaaaggcccaggtatctggtaagtgactgtgaggtgtcacagtacctgtgacaggagagtgtcctgatgtgcttgggagaaaggccgtatgggggccagggatggaagagacagtgtgtggccacagaaattcctgtccatccaccaccagtgctgctccctgtgtgggctctagggcgagtggccccgaaccttggcccagtgctttgtcccaggccagagtcttggcaatgccacatgctggcagctttctcactgagaaggtcctagcttacccctgtgtgctggccttggattcagccccgagagaggggagagaccattcctcctgtggagtgggttccttatcaccagaccggccactctcagaactggcgtccactgtaaatccaggtgccttacgtgtggctctgtcccttatgctgcaggggaaagctgcattgccattgttcccacctcctcactggcagaaagatgccagggctgttagcactgtctcctcaccttctgtttctcattgtggctcctcaaatgggatttgcatgttcctgtcaagcgtaacaacaatcccttctctctttgacagaggcccaggtgggacagtttctactatttgatatttgagtattatctgggatgtggttctggagctgcccagagctgtgcttagtagagtgtgtcttggaaacatgcccctgggcacactgtatctgctacattagtgggctatctcttatctgcagtgttcgcttttgctagaaagaggatgtggaggaaggaggaggtgggcaatctggcttgagttgtgctgtatcctcttccttgttagcttgccttagtctcactggagaccatttgcggatagtgcttggtccatgcccagcaggacagggctttgctgcttctgaaaagctggtgttctgtatctggggctggggggttcctgtggcctagctgctcaggaaatcttggagaagcatttccactctggggtgtaaacccagtatgagtttgaaattcaagcgtttgtacctgagttggggagagaattgcaaggcatactttctctgaaagtaacagaaccattcaggctgccatgttattaaggaatctgaactgttgatagcagttaccttgtgggtgatacaatgggaggcggcaaaaaaactacctgcataggagaccctgccctttgtcaagagctgggagcacatttcatcagagtagcaggcccacctggtgccagagggcctgcccctcctgcttctgttcttttgccttgcagtctcctggagagagcctctcttttcctgtacagcctttgggcccaaatgccccttctagctttctcaaagaagatncaagntttatttcattcctatgnttttaaagaggttaaaagggacttaacaaagtggaaaagaaagtttttggggccttaaataaaggcctaatgttctccctttaagg

SEQ ID NO: 175148 - DNA, 973 bp, Homo Sapiens
  misc_feature (778)..(778): n is a, c, g, or t
  misc_feature (869)..(869): n is a, c, g, or t
  misc_feature (899)..(899): n is a, c, g, or t
gaatcccatttctggtgggatatgccttccagtgccacagggccactcaccccatgcatctctgtcctgcccgtcagtgctgggacggacagcaagggcaagcccagtgtctggcggataggtgggtgggaacagagaggggagaatgccgtcctaagcttctgcttggggatcccccacacgacctgggtactgcctgggaaacctgtcctaagtaaaactatggacctcgcctcgcccaccggcctgcaaagccagcatctccgtgaaggtggatggaagcgcctttgtcctcattttgagctgcaagctgggtcagcggctctgaagccctcgagtgactttctaacccaagacccagcccctggcaggaggaggggtgggtgcagggctggtgggacaaaaagaggcctcagcaggcctggaagacccttccagtacatcccacagcgtgtcgagcagctgggagaacctgtgtcaagctcgagccgtcataggtccccatgaggtgtctgaagccccttcttggtgatgggaggcagaggtactgacgttctggagcatggacgtgagtctctcagctggctccgcgtgggcccttggagggtgccaggtgtgtggtgaccttctggatgcctttaacttcatggctgcgtcattcctgatttagaactttaaccggagcttcatctagtgattgcaaaactggaccaatgggaggacggcggcgcagcccgctccctccgtggaatggagctcagctcttcggaggcatcanagcacctgtcgcctccgtggtccccctgccgagggagtgcggccttctgcaaggttcggggggtggcttccttttgcctggagtggccggnccctggcttgtgccatgtgggatgtttgtngagcctcgggtcctacaggcactggtgtaaggctggcatctggttttccgcctgggtcctgattggacttggtc

SEQ ID NO: 175149 - DNA, 184 bp, Homo Sapiens
tgggaatgatttaaaagtcggcaccagcattctagtcctgacccaggctaaaaggggtcacatggagcagagctgtgcaaagagcttttgggtgaggagtcactccgagaaaagcgagaagactctgaccccgggacttcccgtggtgagttaggaaagcatttctggagagcctgttatgtgc

SEQ ID NO: 175150 - DNA, 1066 bp, Homo Sapiens
cacccctacatcctcaactcaacccgtacaacctttgctgctgcaccctacatctgccagctgcccctgaggggccctcatcgtcaagcaacaacaaactgggacccctgccccctgacattcggcaaccctgggaagcctgcgacagcctgacgtgaccaacaacgagctccaatcccctggccctcggaaccttgtgtggccctctccttcccttgcgggacctcaaatgtccggaggaaccagctcagtacgctgcccgaagagctgggggacctccctctggtccgcctggatttctcctgtaaccgcgtctcccgaatcccagtctccttctgccgcctgagcgacctgcaggtcattctgctggacagcaaccctctgcagagtccacctgcccaggtctgcctgaaggggaaacttcacatcttcaagtatttgtccacagagaccgggcagcgtgggtcggcactgggggacctgccccttctcggcccccgagtttcagtccctgccctgcagagaatctatttccgggacatcggtacgatggtgggctggactcaggcttccacagcgttgatagtggcagcaagaggtggtctggaaatgagtcaacagatgaatcttcagagctgtcattccggatatcagagctggcccggaagccccggggacccagagaacgcaaggaggatggctcagcggacggagaccctgtgcagattgacttcatcgacagccatgtccccggggaggatgaagagcgaggcactgtggaggagcagcgaccacccgaattaagccctggggcagggggacagggagagggcaccaagcagcaggcgggaggagccgggcaggggaggagcggcgggccccggacaccttgcagctgtggcaatggagcgggaacggcggcagcagcagcaagagcggggcgtggggggccccgaggcagggatagcctcttgaagccagggctcagggcctgtagttgggaaggggccgcggccgtcgtccatcaaagccatgcaccacggctcgctaagtccagtggcctcca

SEQ ID NO: 175151 - DNA, 621 bp, Homo Sapiens
  misc_feature (502)..(502): n is a, c, g, or t
  misc_feature (505)..(505): n is a, c, g, or t
  misc_feature (520)..(520): n is a, c, g, or t
  misc_feature (535)..(535): n is a, c, g, or t
  misc_feature (553)..(553): n is a, c, g, or t
tatgtccacatcatgaaagaggggctctgctctcgagtgagcacactgggactctacatggaagcaaacagacaggtgcccaaattgctgtctgctctctgtccagaagaaccaccagtccattcgtcagcccagattgtcagcaaacacctggttggagttgacagcctcattgggccagagacacagattggagaaaagtcatccattaagcgctcagtcattggctcatcctgtctcataaaagatagagtgactattaccaattgccttctcatgaactcagtcactgtggaggaaggaagcaatatccaaggcagtgtcatctgcaacaatgctgtgatcgagaagggtgcagacatcaaggactgcttgattggaagtggccagaggattgaagccaaagctaaacgagtgaatgaggtgatcgtggggaatgaccagctcatggagatttgagttttgagcaagtcagactccttccttttggcctccaaagccncanatgttggccggcccncctgtttaactctgnatttatttcccaataaanaagggcttccaaaggcatgctggagacttgtggagcagtccaaagctccatgtcaggtgggctccagg

SEQ ID NO: 175152 - DNA, 548 bp, Homo Sapiens
gtatcgacggctttcgaagatttcattgacagtggagacgaccctcggatgcatggcgggacgttggggtggtcgtccatagcctactggcccgggaacttgccggcaattcatccagcgctggaacttcaccaagagcaacaaggccaagtacaagactcccacataaccctacctgcttcccaagtctaccagcacggccaatcagctccccttcacacttccaggaggagcagtgcaccaccgtacacggtcgtgcgatcagtggaccgctggtcagcagggactctggagaactccatcctcaatgcctacctgcacaccatcagggagagccagcacttcctctacattgagaatcagttcttcatgagctgctcagatcggcggacggttctgaacaaggtgagcgatgagattgtggacagaatcctgaaggcccacaatacaggggtggtgttaccgagtctacgtgctcttgcccttactcctggcttcgagggtgacatctccacgggcggtggcaactccatccagccattctcaat

SEQ ID NO: 175153 - DNA, 811 bp, Homo Sapiens
gggaattcgtcgtatgtctcgtggggtgaatccctccttggtgagctggctgaccactatgatgggactgaggcttcaggtggcactggagcacatgcctgtaggccctgatgccattctcagatacgttcgcagggttggtgatcccccccagccacttcctgaggagccaatggaagttcagggagcagaaagagcttcccctgagcctcagcgggagaatgcttccccagcccctggaacaacagcagaagaggccatgtcccgaggtccacctcctgctcctgaggggggctcccgggatgaacaggatggagcttcagctgagacagaaccttgggcagctgcagtccccccagaatgggtccctattatccagcaggacattcagagccagcggaaggtgaaaccgcagccccctctgagtgatgcctacctcagtggtatgcctgccaagagacgcaagacgatgcagggtgagggcccccagctgcttctctcagaggctgtgagccgggcagctaaggcagccggagctcggcccctgacgagccccgagagcctgagccgggacctggaggcaccagaggttcaggagagctacaggcagcagctccggtctgatatacaaaaacgactgcaggaagaccccaactacagtccccagcgcttccccaatgcccagcgggcctttgctgatgatccttagctctttgctctatggcccttcctcatcaggggaccgtttcccccctcttccttcacagtatttaagaaataaaagtcggatttttctggctgctttctctct

SEQ ID NO: 175154 - DNA, 924 bp, Homo Sapiens
tgcttctccatgggcatttccagccactacaacggctccagccccagctgcgatccttcttccaccagcactacctgggtggtcaggagcccacacccagtaacatccggatggcaacccacacattgatcacggggctagaagagtatgtgcgggagagtttttccttggtgcaggttcagccaggtgtggacatcatccggacaaacctggaatttctccaagagcagtttaatagcattgctgcgcatgtgctgcattgcacagatagtggatttggggcccggttgctggagttgtgtaaccaaggcctgtttgaatgcctggccctaaacctgcactgcttggggggacagcagatggagcttgctgctgttatcaatggccgaattcgtcgtatgtctcgtggggtgaatccctccttggtgagctggctgaccactatgatgggactgaggcttcaggtggtactggagcacatgcctgtaggccctgatgccattctcagatacgttcgcagggttggtgatcccccccagccacttcctgaggagccaatggaagttcagggagcagaaagagcttcccctgagcctcagcgggagaatgcttccccagcccctggaacaacagcagaagaggccatgtcccgaggtccacctcctgctcctgaggggggctccgggatgaacaggatggagcttcagctgagacagaaccttgggcaagctgcagtccccccagaatgggtcctattatccagcaggacattccagagcccagcggaggtgaaaccgagcccctctgagtgatgctagctcagtggtatgcctgccagagacgcaagacgagcaggtgaggggcccactgttctttcaaggctgggaaccgggcagtaggcagcggagtctggcctgaaaagcg

SEQ ID NO: 175155 - DNA, 484 bp, Homo Sapiens
  misc_feature (471)..(471): n is a, c, g, or t
gtcctcctctccgtgtatatcagtgaagagctgtcccagctcctgcaggacgagtccagctacgagaaggatttgacagaccccatctccaaggaacggctgagctacaaggaggccatgggccgctgccgcaaagaccccctgagcggcctgctgctcctgccagcggcactggaggggtaccgctgctaccgctccgcctcccccaccgtcccgcgctccctccgctgacacgggccaaggagccaagtggggaagtgcgtgtgttgggccaggtaggatacgtaaacctcttgcctcagagcagcctcatcccaggcagtgggtcttccctctgtccaaccactgttttattattttactaacatggtgatgggctccctcccctaaccttggtgcctgatccatccccagaccaggacagcagccactcagttcttcctccacctccacccagtgatcccaataaanaaattctgtctcc

SEQ ID NO: 175156 - DNA, 526 bp, Homo Sapiens
  misc_feature (300)..(300): n is a, c, g, or t
  misc_feature (308)..(308): n is a, c, g, or t
ttacaaccccacgatcacctgattcagcaggaagcatctcagacaccaaccactatgctgtcagcagttgcccggggctaccagggctggtttcatccctgtgctaggctttctgtgaggatgagcagcaccgggatagacaggaagggcgtcctggctaaccgggtagccgtggtcacggggtccaccagtgggatcggctttgccatcgcccgacgtctggcccgggacggggcccacgtggtcatcagcagccggaagcagcagaacgtggaccgggccatggccaagctggcaggngggagggngctgagtgtggccgggcattgtgtgcaacgtgggggaaggctgaggaccgggagcagctggtggccaaggccctgggagcactggtgggggcgtcgactttctggtggtgcagccgcaggggtcaacccctcctggtaagggagcacctctgggggaccagttggagcaagatcttgggaacaagaatccctaaagtggtgaaaacgtgaagctcccc

SEQ ID NO: 175157 - DNA, 1774 bp, Homo Sapiens
  misc_feature (1712)..(1712): n is a, c, g, or t
  misc_feature (1727)..(1727): n is a, c, g, or t
  misc_feature (1729)..(1733): n is a, c, g, or t
cggaagaacagcgctcccgaggccgcgggagcctgcagagaggacagccggcctgcgccgggacatgcggccccaggagctccccaggctcgcgttcccgttgctgctgttgctgttgctgctgctgccgccgccgccgtgccctgcccacagcgccacgcgcttcgaccccacctgggagtccctggacgcccgccagctgcccgcgtggtttgaccaggccaagttcggcatcttcatccactggggagtgttttccgtgcccagcttcggtagcgagtggttctggtggtattggcaaaaggaagaagataccgaagtatgtggaatttatgaaagataattaccctcctaggtttcaaatatgaagatttgggaccactagtgttacagcaaaattttgttaatgccaaccagtgggcagatatttttcaggcctctggtgccaaatacattgtcttaacttccaaacatcatgaaggctttaccttgtgggggtcagaatattcgtggaactggaatgccatagatgaggggcccaagagggacattgtcaaggaacttgaggtagccattaggaacagaactgacctgcgttttggactgtactattccctttttgaatggtttcatccgctcttccttgaggatgaatccagttcattccataagcggcaatttccagtttctaagacattgccagagctctatgagttagtgaacaactatcagcctgaggttctgtggtcggatggtgacggaggagaaccggatcaatactggaacagcacaggcttcttggcctggttatataatgaaagcccagttcggggcacagtagtcaccaatgatcgttggggagctggtagcatctgtaagcatggtggcttctatacctgcagtgatcgttataacccaggacatcttttgccacataaatgggaaaactgcatgacaatagacaaactgtcctggggctataggagggaagctggaatctctgactatcttacaattgaagaattggtgaagcaacttgtagagacagtttcatgtggaggaaatcttttgatgaatattgggcccacactagatggcaccatttctgtagtttttgaggagcgactgaggcaaatggggtcctggctaaaagtcaatggagaagctatttatgaaacccatacctggcgatcccagaatgacactgtcaccccagatgtgtggtacacatccaagcctaaagaaaaattagtctatgccatttttcttaaatggcccacatcaggacagctgttccttggccatcccaaagctattctgggggcaacagaggtgaaactactgggccatggacagccacttaactggatttctttggagcaaaatggcattatggtagaactgccacagctaaccattcatcagatgccgtgtaaatggggctgggctctagccctgactaatgtgatctaaagtgcagcagagtggctgatgctgcaagttatgtctaaggctaggaactatcaggtgtctataattgtagcacatggagaaagcaaatgtaaaactggataagaaaattattttggcagttcagcccctttcctttttcccactaaattttttcttaaattacccatgtaaccatttttaactctcccaggcactttgccattaaagtctctttcccattgatttgttttccaaacggnagaaggagggagagnannnnncccctgtccggccgcctccgcccttcgagaaacttttctaa

SEQ ID NO: 175158 - DNA, 407 bp, Homo Sapiens
ttacaaccccacgatcactcagtcccagggtgactccatgtctgagaggagaatgcccctgttgtgagggggtgacatgatgttgtagatcattactgaggggaggtagggagatcaggtggcacaggtggggcaacaggaaggcagtgacagggagaaatacattctgagctcatcccttctggttttcttgtggcaggaattttgagtctagaggaggaagcgggaagatgtacaccaggggaggggaaagctgcagtcttccttgcccacagtctgctttgattgattcagtcattgatgttaaagcagaatttgggttctagcttcctacagagaaaactcctgtttcactgaagtgatcaaatgtcgggtaaaattctggtgatcgtggatagtaagggccg

SEQ ID NO: 175159 - DNA, 603 bp, Homo Sapiens
tcggccttacttcccacgatcacatagcatagttcactgcatcctcaactcctgagctcaagcagttctcctgcctcaggcctctcagtgttgggattacaggtgtgaaccaccatgcctggcccatatcaaaatttatttgaggggcagagattgctactagagtcaggagtactaatagtaaattgtaagggacactttactacctgctagcagagagaaatataatgggaaagccacagatttggtgttggagagaattccagagccattaagttagagaagacagcctcactagcacctagagggcatctttgtacagtaaaatacttgaaatggttcaattggaggtacatggttcaagaaagcaaagatgtctataagacattttagggcaattcataacacaattattaaaataagaccgttttggcacttttaaaagcggtgacctattcaagaactagaaaaccggaatttttcattatattcaatttttgcccaaaagtttaagaggaagtattatactagtttcagtatatatttgccctaatttatcaaggtgtaatatattttcgtgatcgtgaatgtaaggtccggctc

SEQ ID NO: 175160 - DNA, 317 bp, Homo Sapiens
ggcccttactaccacgatcacccatgaactgaagtccacattccttagtagggcactcaggccctccctcggcagccctgcctgtacccctgcaacgccctttcctcttcacatgcaacacaccaggaactggactcctgcatctctcccgaatgactaatgccctctcatttctgggcctctgtatttgttactcctattgatcaatatcctctcttgtcctcagtacaaccaactctgaagccaagggaccacctttgcacatgagagacagtcatcaggaagcccaactgatcaatatgaaatcagtcatccac

SEQ ID NO: 175161 - DNA, 450 bp, Homo Sapiens
ttatcacccacgatcacagagactcagtgggagccctgagcttgttttcctgcaactagacagccccatctgggggtgacgggagacagtgacagatcatcaggcatcagattctcataaggagcgtgcaacctacatccctcgtgtgtgcagttcacaatagggctcgtgctgctatgagaatctaatgcccaccgctgatgtgacaggaggcggagctcgggtggtaacgccagcgacggggagtggctataaatacagatgaagcttcgctggcttgccggcccctaacctgctgtgcaccccacttcctaataggccatggaccactactggtctgtgtccggagtgttggaatccctgttctagagactgcttgcaatccttgactagtggtacctccttccatctccaaaaacaagcaaggcagactctctctggacagcaggg

SEQ ID NO: 175162 - DNA, 677 bp, Homo Sapiens
  misc_feature (47)..(146): n is a, c, g, or t
ttacaatccccacgatcaccagtgaagtcacgtcagtagacagtgannnnnnnnnnnnnnnnnnnnnnnnnnnnnnnnnnnnnnnnnnnnnnnnnnnnnnnnnnnnnnnnnnnnnnnnnnnnnnnnnnnnnnnnnnnnnnnnnnnncatctctaaaatgagaataatgctgatgtctatctcatagagttattgtgaagatacagggaatacaggtaaagctgtcttgcatgtactgagtgctcagtgaatgtgagctgtgataaggatgacgattcattcaactacaatgttttgagtatctactatgtaccaagccctcttttaagtgctaggacacccagtgaaaaagcatacaaactccctcttatcctgacgcctgaggcttccattctagtgaggagagaaaaataaatgaagaaaagaaaagataacatcagttcatgatcaatgctatgaagagaaagaaaggagaatgaagggattagagagctctggcaattgttctttaatgtagtcaggaaaggcacatatttaccaaatcctactatgttctgggtactgttctaagattaggattcagaaagcagatcaggaatccctgccctctatagctgacctgctcatggaaggagaaacacaaaaaataaataagagagtgtgatcgtggggttgtaa

SEQ ID NO: 175163 - DNA, 471 bp, Homo Sapiens
  misc_feature (66)..(178): n is a, c, g, or t
tacctttcacccacgatcaccctcccacctcagcctctgagtaactgcgactacagacaggctctnnnnnnnnnnnnnnnnnnnnnnnnnnnnnnnnnnnnnnnnnnnnnnnnnnnnnnnnnnnnnnnnnnnnnnnnnnnnnnnnnnnnnnnnnnnnnnnnnnnnnnnnnnnnnnnnngtgtgagccaccatgcctggcctagattctttactttgacatgtcgttattagtgataatgattttttaattctctagaaaagtacaaataatttgaaaatggagtaattaaaagatcatttcatcttcagcttaggtagtgaaaaagtatttttgtgttttatgtgtgaatgtctagttctataaaataatgccattaatctttaatcaagaataaaaaagttggctgggcatgtaaaacataaaacagtgttgagaatgaaatatttctgtgtgatcgtgggtagaaggag

SEQ ID NO: 175164 - DNA, 632 bp, Homo Sapiens
agatcgagtcggcacctttaaccccagatcacggaaggtgaagatggctgcctctgcctttgctggtgcagtgagagcagcttcaggaatcctacggtccctgaatatttctggcatcttcaacctaccgcaactgtgtcaagaatgcctctcttatttctgcattgtccactggacgttttagtcatattcagacaccagttgtttcctccactcccagacttaccacatctgagagaaacctgacatgtgggcatacctcagtgatccttaataggctggctataagaaaaaattatggaaaaagacacctgcaaggaagaagcgattgagggaatttgtattctgcaataaaacccagagtaaactcttagataaaatgacgacgtccttctggaagaggcgaaactggtacgttgatgatccttatcagaagtatcatgatcgaacaaacctgaaagtatagatcagaagtttcacttgtttctcagttattggatatgtatctttgtgtacatatctttgcaaaaatggataagtacaaaacttgatgtaaattgtaccaatgaatatgtaaacatacagtgacaacattaaacttagaaaagttttaaaacccaaaaaccgacacg

SEQ ID NO: 175165 - DNA, 738 bp, Homo Sapiens
ggggaaggtgaagatggctgcctctgcctttgctggtgcagtgagagcagcttcaggaatcctacggcccctgaatattttggcatcttcaacctaccgcaactgtgtcaagaatgcctctcttatttctgcattgtccactggacgttttagtcatattcagacaccagttgtttcctccactcccagacttaccacatctgagagaaacctgacatgtgggcatacctcagtgatccttaatagaatggcccccgtgcttccaagtgtcctgaagctgccagtcagatctctaacatacttcagtgcaagaaaaggcaagagaaagaccgtgaaagctgtcatcgataggtttcttcgacttcattgtggcctttgggtgaggagaaaggctggctataagaaaaaaatttatgggaaaaagacacctgcaaggaagaagcgattgacggaatttgtattctgcaataaaacccagagtaaactcttagataaaatgacgacgtccttctggaagaggcgaaactggtacgttgatgatccttatcagaagtatcatgatcgaacaaacctgaaagtatagatcagaagtttcacttgtttctcagttattggatatgtatctttgtgtacatatctttgcaaaaatggataagtacaaaacttgatgtaaattgtaccaatgaatatgtaaacataccgtgacaacattaaacttagaaaaggttttaaaacgaa

SEQ ID NO: 175166 - DNA, 1117 bp, Homo Sapiens
atcctgcaccatgactcaacagccacttcgaggagtgaccagcctgcgtttcaaccaagaccaaagctgcttttgctgcgccatggagacaggtgtgcgcatctacaacgtggagcccttgatggagaaggggcatctggaccacgagcaggtgggcagcatgggcttggtggagatgctgcaccgctccaaccttctggccttggtgggcggtggtagtagtcccaagttctcagagatctcagtgctgatctgggacgatgcccgggagggcaaggactccaaggagaagctggtgctggagttcaccttcaccaagccagtgctttctgtgcgcatgcgccatgacaagatcgtgatcgtgctgaagaaccgcatctatgtgtactccttccccgacaatccccgaaagctgtttgagtttgatacccgggacaaccccaaggggctctgtgacctctgccccagcctggagaagcaactgctagtgttcccgggacacaagtgtgggagtctgcaacttgtggacctggcgagcacaaagcctggcacctcgtctgctccattcacgatcaatgcacatcagagtgacatagcctgtgtgtctctaaaccagccaggcactgtagtggcctcagcctcccagaagggtacccttatgcgcctctttgacacacaatccaaggagaaactggttggagctgcgcccgaggcactgaccctgccaccctctactgcattaacttcagccacgactcctccttcctctgagcttccagtgataaggggtactgtccatatcctttgctctcaaggatacccgactcaaccgccgctccgcgctggctcgcgtgggcaaggtggggcctatgattgggcagtacgtggactctcagtggagcctggcgagcttcacttgtgcctgctgagtcagcttgcatctgcgccttcggtcgcaatacttccaagaacgtcaactctgtcattgccatctgcgtagatgggaccttccacaaatatgtctttcactcctggatggaaaacttgcaacagagaggctttcgaccgtgtaccttgacatctgtgatgatgatgacttttaaaggaccctgggggc

SEQ ID NO: 175167 - DNA, 441 bp, Homo Sapiens
ttacaccccacgatcaccatgttattaatattccaaaactggcaggggatgttcgattggtccccctcccttgccctaaggagctttctagaacctgagttatcattaccatactgtactgccttgagtaagacagttagaaggaatgggaaggatggtggcaggtggaggaaggcggattggtcatcacctccttgcagctcgaaacatccccagatcgtgggaaaactacagacctgctagacagactagcgagcaaaagctggggctttaagaatccccagagaggttctcctgagagagtagccagtacgattttgtaagcagagatttggttggggaggaggtgacgacgtaacggagcagaggggcaaacctgtcgggaatcctgccttgagggcacgggatgtgtgatcgtggggttgtaagggtaccgagctc

SEQ ID NO: 175168 - DNA, 467 bp, Homo Sapiens
ttacaaccccacgatcacacgaactccttgtctaccgccctgattctctcttgacatccagccctggctgtccagcaggcctccccctgcatctcatactagtgaggcacacttctgtttccaggatcagtctctatcctgattgtcagacctggctgaccagcagcctcctggacacctcccatgtgctctggacagcgcctccctgtcttcccacaaacctactcctctacccatggtgccatctcagggaaagccacactatactcaactcccacaggtcaaagagaaaggcctcatcctggataccaccctctcctcacttcctcatagcccaccagtccaattccaggcacaatcgcacacctttctccaaaaccgttacaagaacatggctaggtccagaggagcagagcccagaacaagaaaaaaacagataagatgcccgtggtgatctggggatgtaa

SEQ ID NO: 175169 - DNA, 727 bp, Homo Sapiens
gacttaggcagcccaaattcagcgcctggggcataagttcctggaggggtggccaccttcagcccccacggtaaggtcctgaggaaccttccccttagacaagggatcatggaggaggtctcttccggagcctggagggaggcctcaagtggtccttccacctcggcatcccaaagtgctaggattataagcatgagccactgcacctggccccaacatcatttattgaacagactgtcgtttccacattgtgtttcttggcatttctgtcaaaaatcagttgactgtaaatgcatggattcacttccgggctctctattctgtttcattggtctgtttgtttttatgccaataccatgctgttttgattattatagctttatagtatattttgaagttaggtagtgtattgtctccagctttgttctttttgcttaagattgctttggctatttaggggtctttgtggccattactgacagttaaaatggccctggctcatgtctcctgggcctctacagtactttaaggtggggaagtactgtggcccacatgtcccaacaagctgtgtgtggcacctgacaaggctttgtgccactgtggagcaggtgttactccctcatacgaattttaggattatttcatttatttcagtgaaaaatgtcaatgaaatttgatagggattgcattgaatctgtgatcgtgggaattaaggtccgagctgata

SEQ ID NO: 175170 - DNA, 878 bp, Homo Sapiens
  misc_feature (599)..(599): n is a, c, g, or t
ggggcaggcggacggggcgcggcgggggacacggcggccgccgcggggctcgatcgggcaacggcggcgacggcggcagcgacggatcctcctcctcccttattcccttgctcctctttcttccttttcttttcctttccggccgggcctcgtccactttccctaacggcggcctcgatcctacgtaaaggcatgacttcctggcaccacagggaaaatcgggtgcaagcccagaaactatttccccaccaccacttgttgaaaaactgatttgaaggcatctccggggttgaacaaacggaaagtgccaggatttgatgcgtctctggtttcgctctggagaccattccctgctaagtatcaagacgaaaaaaactggaaactaatccgaaccatatttatttagagtcagaatggagcgatttgtagtaacagcaccacctgctcgaaaccgttctaagactgctttgtatgtgactcccctggatcgagtcactgagtttggaggtgagctgcatgaagatggaggaaaactcttctgcacttcttgcaatgtggttctgaatcatgttcgcaagtctgccattagtgaccacctncagtcaaagactcataccaagaggaaggcagaattttgaagagcagaatggtgagaaagaagcagaaggcccctaactgcatctcttcagtgcaacaggactgcgccaacagagaaagtcagtggtatccaggacttttgggaaaatgtggccgggaagccaacatcccaccttgaggaaggctggatccccccacaaggtccgtggctttcctatctccgccatgtggaagaatgggagggcctcacttactctaaggtcagaaccaaacttccgggg

SEQ ID NO: 175171 - DNA, 202 bp, Homo Sapiens
aactcaggggcgagctgctgaagtttcccttcatccgggaccagcccacggagcggcaggtccgcatccagcttaaggaccacattgaccgatcccggaagaagcggggtgagaaagaggagacagaatagtgagtacagcggcagcgaggaggaagatgtcagccatggagaggaaggagagccaagctccatcatgaacg

SEQ ID NO: 175172 - DNA, 573 bp, Homo Sapiens
ccaactcaggggcgagctgccacgtacaatggctccatggacagcccagtgcccttgtaccctaccgattgccccccttcgtatgaggcagtcatgggactacgaggagacagccaggccactctctttgaccctcagcttcacgatggctcgtgcatctgtgaacgagtggcctccattgtagacgtgtccatggacagcgggtctctggtgctgtcagccattggtgacctccctgggggctctagcccgtcggaggactcgtgcctgctggagctgcagggctccgtgcgctccgtggactacgttctctttcgctccatccagcgcagccgtgccggctactgcctcagcctggactgtggcctgcggggccccttcgaggaaagccccctgccacggcgccccccacgggctgcccgctcctattcctgctctgcccctgaagctccacccccactgggtgcccccacagctgcccgcagctgccaccggttggagggctggccgccctgggtgggaccctgcttccccgagctgaggcggcgggtcccccggggagggggccgccca

SEQ ID NO: 175173 - DNA, 1125 bp, Homo Sapiens
  misc_feature (1044)..(1044): n is a, c, g, or t
cgcccgagctgagcagtctagaggcctgaggttctgggtcctggtgacggggctggcatgaccccgggggtcggtccatgccagtccgcctcagtcgcagagggtccctcggcaagcgccctgtgagtgggccattcggaacattggacagaagcccaaagagccaaattgtcacaattgtggaacccacattggcctgagatccaaaacgcttcgagggcaccccaaattacctgcccattcgtcagggacacccacccacccagtgttatattctgcctcgccggagtggggtgttcccgggggcacttgccgaccagccccttgcgtccccaggtttgcagctctcccctgggccactaaccatcctggcccgggctgcctgtctgacctccgtgcctagtcgtggctctccatcttgtctcctccccgtgtccccaatgtcttcagtggggggccccctcttgggtcccctcctctgccatcacctgaagacccccacgccaaacactgaatgtcacctgtgcctgccgcctcggtccacttgcggcccgtgtttgactcaactcagctcctttaacgctaatatttccggcaaaatcccatgcttgggttttgtctttaaccttgtaacgcttgcaatcccaataaagcattaacagccctctcctccacagccccacccatcacactacttgccggccgccctcggtcctcgaaaaactccttaaaccctttcatttgggcccgcggtgcccgcttacgtaagggacactggcacatactttgtttcccaactgaaaacctgggccatgaactaaggcctggggatttttccccacaaaaaataacgtcccgggccggacaaccgcacgcgctttgtaaaaaaattccgaaatgtgaatcccctgaaggcccattcactggggatctcttcaacaagggcccttcccacggttcaagcctcacacatataaatattaacgacccacggcgcgctgggccgcctctcagtgcaaaagagcctgtgttgatagatgtccnatctgaccattcttctgcggccgacattttgtggaaactcgcctcttatcgaaaccccacctcatggcgccaatcccgccg

SEQ ID NO: 175174 - DNA, 629 bp, Homo Sapiens
  misc_feature (137)..(137): n is a, c, g, or t
  misc_feature (476)..(476): n is a, c, g, or t
  misc_feature (486)..(486): n is a, c, g, or t
  misc_feature (590)..(590): n is a, c, g, or t
ggccgccttccgcacacttgaggaaccctcccctctccctcggtgacatcttgcccgcccctcagcaccctgccttgtctccaggaggtccgaagctctgtgggacctcttgggggcaaggtggggtgaggccgggnagtagggaggtcaggcgggtctgagcccacagagcaggagagctgccaggtctgcccatcgaccaggttgcttgggccccggagcccacgggtctggtgatgccatagcagccaccaccgcggcgcctagggctgcggcagggactcggcctctgggaggtttacctcgcccccacttgtgcccccagctcagcccccctgcacgcagcccgactagcagtctagaggcctgaggcttctgggtcctgggtgacggggctggcatgaccccgggggtcgtgccattgccagtccgcctcagttcgcagagggtccctcggcaaagcgccctgttgagtngggccattcnggaacatttggacagaagcccaaagagccaaattgttcacaattgtgggaacccacattgggcttgagattccaaaacggtttcgagggcaccccaaatttacntgcccattttgttcagggaacaacccaacccacccagtt

SEQ ID NO: 175175 - DNA, 504 bp, Homo Sapiens
ggggaaaggttgtgatggcggctatagctgcatccgaggtgctggtggacagcgcggaggaggggtccctcgctgcggcggcggagctggccgctcagaagcgcgaacagagactgcgcaaattccgggagctgcacctgatgcggaatgaagctcgtaaattaaatcaccaggaagtagcagagaaagggaaaaaaagtggggatgaggaaggtagaggaaaagagaaagcggccaaacaatggtttggttgggctgtgtttcagagtataccaccctttaaaattctgatcaaatactcttgacccataaacccttagcccttgttctgatggggtagccacaggagtccaccagctgggaatcatccactgagctctggatcagagcattctagaggctggaatgtcgggggagttttaggggtagttttccggtcattcctaaaaccatccgtcctaactcccaggcaggtttaaatagtgcaaactcttaggcagagag

SEQ ID NO: 175176 - DNA, 310 bp, Homo Sapiens
actcaggggcgagctgcagcagagagggatgagggatttagccctctgccctaaggtgccattgaaaagggacaggacccttcggaggtgcctgtgaggagaggggagcaggacctctccctcctccagatccctgcctcctagtgccagcccctcacacgccttcatcctgaaacaggaagagtacggcaccaagttgggggtgctggatgaaagagacgaggggtgatctgtgagtcccatgtaaactttgtacattggaatatttatgtttgtgtacatagtattgtggtgtgttgaattcaatacg

SEQ ID NO: 175177 - DNA, 521 bp, Homo Sapiens
tgcccccctctcctggactccatcaagacaatccagggccacggcctgcttggcccccccaagtccgaacgcggccgcaaaaagatcaaggcggagaacccggggggtccgcctgtccttttagtcccctatcccatcctggcctcgggcgagactgccaaggagggcaagacgtacaggtgtaaggtatgcccactgacctttttcaccaagtcagagatgcagatccactccaagtcgcacacagaggcaaagccccacaagtgcccgcactgctccaagtcctttgccaacgcctcctacctggcccagcacctgcgcatccacctgggcgtcaagccctaccactgctcctactgtgataagtccttccggcagctctcccacctccagcagcacaccagaatccacacaggcgacagaccctacaagtgcccacatcctgcctgcgagaaggctttcactcagctctccaacctccagacccggcatctatcgcaataccatatttaacacgttca

SEQ ID NO: 175178 - DNA, 420 bp, Homo Sapiens
acggataaccggatctgcaaagaagcggagtccgaataggcccggtagcagttgggacacttgtagggcttgtccttgttgtgctggcgctggtgagactggaggttggagagctgagtgaaagccttctcgcagccaggatgtgggcacttgtagggtctgtcgcctgtgtggattctggtgtgctgctggaggtgggagagctgccggaaggacttatcacagtaggagcagtggtagggcttgacgcccaggtggatgcgcaggtgctgggccaggtaggaggcgttggcaaaggacttggagcagtgcgggcacttgtggggcttggcctctgtgtgcgacttggagtggatctgcatctctgacttggtgaaaaagtcagtggtgcagatccgctatccgtcggggatcctctag

SEQ ID NO: 175179 - DNA, 853 bp, Homo Sapiens
  misc_feature (578)..(578): n is a, c, g, or t
cggcgtcttgcacagctgctaaaccaggtgctgaaccgggtgacagctgagaggaacctgtttgatcgtgtggtcaccctacggctgcctggcctagagagcgtggaccactatcccattctggtggcagtgacgggcatcctggtgcagctcctggtgcgtggcccagcctcagagagagagcaagccacatcagtgctcctggcagatccctgcttccagctacgctcaatatgctatctcctgggacagccagagcccccagcacctggcactgctctgccagcccctgaccggaagcgcttctccctgcagagctatgcggattatatcagtgccgatgagctggcccaagtggaacagatgctggcgcacctgacctctgcatctgcccaggcagcagctgcctccctgcccaccagtgaggaggacctctgccccatctgctatgcccacccccatctctgctgtgttccagccctgtggcccacaagtcctgcaaagcctgtatcaaccagcacctgatgaacaacaaggactgcttcttctgcaaaaccaccatcgtgtctgtagagganctgggagaagggagccaatacgagtactacctcctcagctgcctagccctcacagcctgtgccatcctggaacctccacctttgaacccagagccaggctgggccctatttatgagctccctttgcccttctcctgtatcccacaccaccacatccaacctccttgcctgcctgtatcctcattggtgggagcccagccatggccctaattgtgcctgagcttgactttcagtcagggccacagttgagcattaaattattattccataacaaaa

SEQ ID NO: 175180 - DNA, 632 bp, Homo Sapiens
cgtgggttccttgcagagtggaagtttaatgggaccatcaccgtgataccccatcacagcagtcccaggctggaggcccaggctctggccgcctctcccagcatggtgggcctggagagagcaccagcaccacctcccactttccctggggtattgctttgcccctgtgcctcccaccccaggaagctacaagagacaggctgtcctgtccccacactctccctgggtcctgggactccctgttctgaggggctaaggttgcctggggccagagggccccccccagggacaaccatcctctccctgtgtcccctgccccccacactgagggaatgtctgtgtccttgttcctctgccaggggccaactgaggctgccaaccctaggggcggggtgcagggctgtgcggggagggtggctcagatccctgcaaggaggcgtgctgcagggacagcacagcctgggcccccggcagacattaaggcacagtgtggcggtcaccatagggctgctggggcccttgccccggggcggcacctggcaggtgctggcatccggggctaggcacagctgtcagtgttgagacaggaggcatggtgtgtgcgggctggccccagggcctgcagtgcaaga

SEQ ID NO: 175181 - DNA, 684 bp, Homo Sapiens
  misc_feature (327)..(327): n is a, c, g, or t
  misc_feature (355)..(355): n is a, c, g, or t
  misc_feature (365)..(365): n is a, c, g, or t
  misc_feature (367)..(367): n is a, c, g, or t
  misc_feature (383)..(383): n is a, c, g, or t
  misc_feature (414)..(414): n is a, c, g, or t
cgtgggttccttgcagagctatagtgcagaatacgcagtctttgagacgggtgcccggcacccatttgcccaggcagtgggcaggaatatagccaatcccacggccatgctgctgtcggcttccaacatgctgcggcatcttaatcttgagtatcactccagcatgatcgcagatgcggtgaagaaggtgatcaaagttggcaaggtgcggactcgagacatgggcggctacagcaccacaaccgacttcatcaaatctgtcaacggtcacctgcagactaaagggagctagagccctttatttcttccaaccttgcaaggacccanactcccccatacccttcagtgcagtgtncccagggaananaccttgtgcctctaancagtggaccatggtcaccttgctgggtagancctaggttgtccttgggccggcttccttaggggacagactgttgggtggtgatggggattgttaggatggagcccaggccacatggatgatgatgattctcccccacaggttcgaacctctgacatgggtggctatgctacttgccatgacttcactgaggctgtcattgctgccttgccccacccataggccctgtccatacccatgtaaggtgttcaataaagaacatgaaccgcacaaataaaacacccaaaacccaaaaaccttgt

SEQ ID NO: 175182 - DNA, 515 bp, Homo Sapiens
  misc_feature (231)..(231): n is a, c, g, or t
ctggagcaggtgcagaatccttaccagtttgatgtgcttgtgatgcccaatctctatgggaacattattgacaatctggctgctggcctggttgggggagctggtgtggtccctggtgagagctatagtgcagaatacgcagtctttgagacgggtgcccggcacccatttgcccaggcagtgggcaggaatatagccaatcccacggccatgctgctgtcggcttccaancatgctgcggcatcttaatcttgagtatcactccagcatgatcgcagatgcggtgaagaaggtgatcaaagttggcaaggtgcggactcgagacatgggcggctacagcaccacaaccgacttcatcaagtctgtcatcggtcacctgcagactaaaggttcgaacctctgacatgggtggctatgctacttgccatgacttcactgaggctgtcattgctgccttgccccacccataggccctgtccatacccatgtaaggtgttcaataaagaacatgaacc

SEQ ID NO: 175183 - DNA, 452 bp, Homo Sapiens
  misc_feature (24)..(24): n is a, c, g, or t
  misc_feature (34)..(34): n is a, c, g, or t
attcccctttttaaaactcattcncccccgggcnatggggtaatgtcagtcggactgcacagggaacacggtttcccagtggctttggccccctactcgggaaacgtctgcctgttctcgatggtgatggggtggctgccattcccttggttttcctaagccctttctaacgagagtctcaaacaagcggaggcgagggccaattcaaccccattctttccagcgccccgcaccatagcacctgcccacctgagaaccaggaacgcaccctctctgtggagctctgactggtgtagctggaaacaaacagcaacttgcaaacggacgaagagcctgccgtgtgttaatcatttgccttacaagatgtaccagacggtttccagtactaacaaagggaataaaaatacctcacgccacaatccagcatattgatgttttaaggcaaaacaacc

SEQ ID NO: 175184 - DNA, 552 bp, Homo Sapiens
aatcatggtacctattccccgccactgtcgttattcctatatcctcctgcaactgtggtttgaaactgcgcattctctagtagtatatatcgtgcctgtcttcaaaaacatttccctttttatactcattccccccaggcatgggctagtgtcagtcggactgcacagggaacacggtttccagtggctttggcccctactcgggaaacgtctgcctgttctcgatggtgatggggtggctgccattcccttggttttcctaagccctttctaacgagagtctcaaacaagcggaggcgatgggccaattcaaccccattctttccagcgccccgcaccatagcacctgcccacctgagaaccaggaacgcaccctctctgtggagctctgactggtgtagctggaaacaaacagcaacttgcaaacggacgaagagcctgccgtgtgttaatcatttgccttacaagatgtaccagacggtttccagtactaacaaagggaataaaaatacctcacgccacaatccagcatattgatgttttaaggcaaaa

SEQ ID NO: 175185 - DNA, 437 bp, Homo Sapiens
  misc_feature (408)..(408): n is a, c, g, or t
cctcctagccctcttaccccacaggacaccattaagccagggctgggtaacaacatatgctcaatgcatcttctcaggtgagaaccaaactcgagccacaacagcaaagggggaaaaaggtagcaaagtaattatgtgctcccaaggcagtcatttagttgaatccataactggaaataaaaaggcatttatgaagtgtagtccgcagtctgaatgtggaaggtggaagatcacacatttactaagaaacactcaaaacatattttggttcagaattctaaaaaatcccgaattttccatgatcttcccaagacaaccaatgacccacttaaatttaaggcaaaaacacccttgaatcaaggaatgtgcacatatgcaacagctaacatctggtaactctaataatgntccttatatgtggtaagagggctaggagg

SEQ ID NO: 175186 - DNA, 493 bp, Homo Sapiens
  misc_feature (12)..(12): n is a, c, g, or t
  misc_feature (27)..(27): n is a, c, g, or t
  misc_feature (35)..(35): n is a, c, g, or t
  misc_feature (41)..(41): n is a, c, g, or t
atgcgtttaccntgtcgctcgcgatgngaaaaccntggcgnttaccaaaaactaaaattaaggggaccctataaacaagtcaggcagccaacatgataagggcaattttggcaaaatatgactgggctgagtagagaggtatctcagagacagctagcatctttgttggtcaaaccctagtatgaataattcagtgctcttcatcagatgaaaggccttcaatttcatctctgtctcccccgattgccatccagaatgctttggccaccttttctgcatgcacttttctttgctcatgaggaagcgtcgcagccttgtctttcatttcctttaactttgaaaagagtctttcaaaattctccacatctcctcctccagtggtaagactggctaattcttgaatatccagatctaacatgggatccacaatgctatcaacctgggcatctgttgtgttagatgcaccaccccgatgggtaagagggctaggagg

SEQ ID NO: 175187 - DNA, 1107 bp, Homo Sapiens
gatatagatctaggctcatgctgacctccttgtaaattctgtatttaacttaaaagttaatacaaattcatatgtttcattttaaattaattactgattttgcttggctatccccgcccctttacccccctacttcatatatttttaaggacaagatttttcctgcataccactacctgtctcctctccaccccacccccatcatagatgttttcaaataagaacccctgcgatcagcagaagcatctctaatctaacatgcttgtccttgctagggcaggctaaaagctttaaaaagcaaccggatgctcttctctggttgaggtgaggggaaggcgctcgggtaccaaccccagcacaccccaacagcctttcctcggcccctcctcaggcctcctaattactctttctcagcctggagtgtggggccgttaccgtcctcttcccccttctccttccatactgcacttaaccttgctggaagacttaatgatggagatttagggcaactgtggctgcttggacccttgccctggaccaaaggaacttaaaacccaaacctgacactggaatgaaatccaagtttttaaatatcacctttcaatcactcacagatctcactctatcttaaaatactcagcctcactccttaatgagtgcttgctgaagggagaaaattccattttaaaaacgtattcactttactgattactgtgcaatttgaattaagtcacgattctttagtaaatggaggtgagaatctcagattcaaattgtcagagaccatgatttagaagtctaccaaacacccagtttccttccactgttttagggtaacaggaaaacatgagattggggtggtgtccgctattaaatggaaccacacatcatgaaattcaattctcatgttaagacattctgtattgtgggatgtcaaaagtatttcccaaactttcgtttgacctgcagagttggagatggcttacctccctataacttcaagtttggttcacaaagctttgaaaagtaaaaacagataatttcattttcagataataaaaaatctgaatagcaaaataattgcttttaaatgtagtgtgccactct

SEQ ID NO: 175188 - DNA, 672 bp, Homo Sapiens
  misc_feature (559)..(559): n is a, c, g, or t
  misc_feature (579)..(579): n is a, c, g, or t
  misc_feature (627)..(627): n is a, c, g, or t
cctcctagccctcttaccatgagatatgcgtttgtctcacatgagcctcagcgagatgactgaattctggctgtccttcatccacaaggaatttccatgtgggcaaattgtgagggaggcatgtaactttttaaaaaatgtttgtagctatcttgtttaggaataaaatgggaggcaggcctgcctgacatagtccccagcttgactttttccttggcttagtgatgttggggttccgagatttttttcctttcacaggatttacagccaaggaacagagcgagtggatcagtggatggaaaattattcatggagacatcaagggcacggaaagtcttgccatactgactcaacaggatttttgctgaaggcaggtcaaggacttagagtgttaatggaaaaagcaaactgtaaaatatttaaagaggtttattcagagccaatatgaacgactatggcccgatgaacagtctcaagaagtcctgagaaagtgtgtgtgaagtggtttgggttataatttgggttttatacattttaggaaggcaggaattacaggccnaagacataatacgtgggaangtattatattggattctggctctgccttgaaactgggaaatctcgaantggggggggtggtggaatggggagcttatgggtcataggtggaat

SEQ ID NO: 175189 - DNA, 565 bp, Homo Sapiens
ccatcattgattctataaaaaagtgccaggccaagaaccaatagttagagtaattcttcctttaagttctttcagcagtcttgccaagcaagcatgtatcattcctgatgtacttctaccattgacagcaagaagaatatcaccacatctaattcttccatcattgtatgctggtgttccttcaacaatggatttgatgaaaaaaggtttgtttccattgtattcttcataacctcctacaatgcagaagcccagacttccagctgtgtttcttcgtaatacaatatctttacagttatacaagcaccgtggtaattccagccacatgacccaggatggggaccagtcactgggtggggccatgttgtggttggagtccagggctgctgggctgctgcagtcttcctggggctcatactctttgacttccaaagctttgagtactatcgaggatgatgttcttttcaataatgccactgcctcactccggctgacctctgtcagttcgaccccatccacattcaacaaaatgtcacctgtttttattggtaagagggctaggagg

SEQ ID NO: 175190 - DNA, 257 bp, Homo Sapiens
cctcctagccctcttaccaaagataggcagcttatgaatgtttggactgaccatgaaaaggagatctttaacgacaagtttatccagccatccaaaaaactttggactaattgcatcatacttggagaggaacagtgttcctgactgtggtttgtatcactatttaaccaacaaaaatgagaattataaagccctcgtcagaaggaattatgggaaacgcagaggcagaaaccagcagcaaattgctcgaccctcgc

SEQ ID NO: 175191 - DNA, 693 bp, Homo Sapiens
  misc_feature (19)..(19): n is a, c, g, or t
attccggatccaaggcttnttgaaaaggtagtaaaccaggcctgtcaccagctaattgcccagagtgaccgtgtgaatctgaagaagtctttgctgatgaagaaagcagctctccccactttcgattctgggcattgcacagctgaagaggtgtttgcatctgaagatgaatctgaagaaagctcctcactcagtgcagaggaagaagactcagaaaatgaagaggctattagaaaaaagctttcaaagccttctcaagtgagcagtggtcagaaactggggccacagaacttcattgatgagaccagtgatatagaaaatttactcaaagagggaagaagattacaagggaagaaaataatgattcccaaagaaacgtcaggtgccctcaagtggaaggaagacctttccagaaaggcagctgaggcctttctgaggcagcagcaagcagctccaaacctccgaaagcttatttatgggacagtgacagaagataatgaagaagaagatgatgatactctagaagagcttggagggttgtttcgtgtcaaccagcctgacagagagtgtaagcacaaggctgactctttggactgctccagatttcttgtggaggccccccatgactgggatttagaggaggttatgaacagtatcagagattgcttcgtgactggtaagagggctaggagg

SEQ ID NO: 175192 - DNA, 1341 bp, Homo Sapiens
aggttactttgatagcgccgctttttccgaggagtgggttggtggggaaagggacccatattttccgtggttttgtgggtttaaagaggccccacccctgggaagggtttaagggagttttccgcccatttccctttttctggccgttttcccccaggccccagattcgggggcggtactgccatgggaggaacatgggccttttcggattaggcttccatcttggtggcatctccaaagcttaaaaactcttaccttagttttggagtacttgttggtgagttctgtgggctgtttttccccatgaagaaaaatgacacagaatataccatccagcacagccaggcacaagtaagtgttatttgaagtcttttctgaagcaacgattttccactcatgcttagggctttgtactgtagcatttggagaagagagacatccagttgaactgctacttatctgcttatggccattctcacgtggtggctttttctgcacaaactgaatgtggtcatcatcactgccaaacacctcagcctgtccatctagtaggttcccatcaagcagcttgtgatcagctgagtagtacaaggtttgaacctcttccatcagctcttccagactgtctccattctcccagatgctacgctgcacccagttgattacctttgtatataatttgccattgctgggcaagcaaacattatcttcaagcattacctccaactttagccttggaagcttaagaaactcctcctcttcagaaatttgtaacaaatgctcctgaatataagcatcaaccttattcaacaaacgggagtctcccatacaacttgcaaaatttcggtaagagatgcagctggtaacatccattctagacagtaaataatcaccgcaaacctgctttactcgatccatcttcagcttttttgctgcagaataaacatcttttaccaattccttatctgctttcaactgagcagtgtaggcataattcaacaagacttcaacagcttctggattgagatcatcaaatttaacgtgagaaattccatgaggatcactatcactattaaagatttcaaataaatagggactgcagcaagctagcactgctctgtgtgctaacatttcatggccacagacctgaagtcgaacatcacagaactggccacttttcctcagggcatttaatttggcaacagaagactcaataaaattttcatcctcaaacatcaaatatccattgggaatcatttttccttataaatttggctctctgtggtggcaaatgtatttctgggaactcttaagtaatccaaggacaaaggagtgttaaaa

SEQ ID NO: 175193 - DNA, 698 bp, Homo Sapiens
  misc_feature (555)..(555): n is a, c, g, or t
  misc_feature (611)..(611): n is a, c, g, or t
cctcctagccctcttaccgaacaatgaaaacaaagcagatttgcctgtgatttttgttggttgttaaacactttagacacccaaggaccagggagcccagtggctttttcgaggcaaattggcagggtaagaactcagcagggcaagagtccaggacttcccccaccttcaggaagtctgtacactgtggtctcccttgggtgggctgaaagttctattagtctctccacaactagattctgattagggctgcaggctacaccgcattcctatttcccagaccatcccagaaacgggtgcctaattacttgggcacatggtatgtgctcaataaataccaactgatggctgatttatcatcatgctcaaaaacaacttcaaaggccaccagtttgaggaggactggatggagtgacgtcaccagcagcccagtcccagatgtcaaaccacttcagagttcacacgggctcctgggggctttgggatccaaaagtatggatcacaacagccaacttttgtcagtcccatcatcatatctcattatgtcttctccantggtgtgtgagtacaaagctcttcattgcgctaatattctacaaagttcatggcanaacttgaaaaatgagctattccacacatatgaatgctctggatgacatttttaaaagctcaaaccttctggtcacaagctctatcct

SEQ ID NO: 175194 - DNA, 662 bp, Homo Sapiens
  misc_feature (577)..(577): n is a, c, g, or t
cctcctagccctcttaccgtggaagtgctctgtagcacttctctatatgctacctgctcatgccttttgtttcaggtgctgagctgggcagatgtcaggcatgaatgcaaagtgccaagttggtactggggtatgctcagatatattctcatctttgtaccatccttgtttgaacttctaagtctcatctcttcctattctatttgcagccaaagtgatagtttagcttttcacctcctagtctaaaaatgcatgccaccaaaattttcaggcagttggaagccaagcaaagaagaaagcaaggatattcagaccaaggctgggggcccttgcacctctgaattaaaatgttagttccatgtggctctgttggctaatgttgaatatgaatgtgactctagcatgacagggtgaagaggttcagtatcagaaatctgagaagttgctaaaggaggccatgagttttctggaaatgcaatatgaataatcaggaatccccagataactgtgtaccatcataggaggtggaatgtaatgtaataaataatctttcaatcagatacatttagttatatcnagtcagcagatttgaaaaaggaccctagaggccaggcacagtgataaacctgtaatcccagcactttggtaagagggctaggagg

SEQ ID NO: 175195 - DNA, 599 bp, Homo Sapiens
  misc_feature (563)..(563): n is a, c, g, or t
  misc_feature (571)..(571): n is a, c, g, or t
cctcctagccctcttacctgtgtccaggaataacctttgctactaggcagtcctctgaaagatttgtagaaggttaaagtggaaagggacttggaagctcatagaatccatgcctcttcttttagcatcaaggaattagaagtcctgagagatgaagaatgttgtcttccaactcaaaccatttctgaagccatttccctgttactgcattgcccacaacccttccccattgctatcctcatcctgctaatgctgtttttaatgactgacagtctgatttgtctttggcagcaaacattttgcttcacagattcctacttaaggaagagaggggctcctcattgtcactgtacagagcaggctggtcagctttacacaggtgtcagatgaaccgtcacagccagatttgcatgttggcctcaggagggcttcaaggtccaacatctcgacgtaaggagcgtttccagttctttcatgctcagataacagtgctaactgcagctgtttcatcccaaatccctatttgaggtcttaacatctattccattttgccaacaaggggntatgctgntaaccctctgcccagatttaaaagctga

SEQ ID NO: 175196 - DNA, 479 bp, Homo Sapiens
cctcctagccctcttaccaagacacagatccctattaactgagctctttctaggacctgtttcccaatcatccctgcctatcccactttctggaatgaaggcctccagtggcccccccctccaaaccttcttcccttcccttgacagacagaccaatgtcctaccttctctctacagcagacataaacgtgacccaaaaaaagcttcaattttgccaagaagttctccctgcccctgtatttcgtctcggctgctgatggtaccaatgttgtgaaggtgtggttgacagcagaggtagctagcaaggtcagggcgctaggtggtaaagggaagctgtgaagagaagggcttactgcaggtgtgatggagagaaccgggacagtgcatgggcatgggtggcagggaggggaggagctgatgggcctggacttgatgaggcagaagtccattgaccatacataggtaagagggctaggagg

SEQ ID NO: 175197 - DNA, 905 bp, Homo Sapiens
ggtgatgatggtgatggtggtggtgatcacgtgcctgctgagccactacaagctgtctgcacggtccttcatcagccggcacagccaggggcggaggagagaagatgccctgtcctcagaaggatgcctgtggccctcggagagcacagtgtcaggcaacggaatcccagagccgcaggtctacgccccgcctcggcccaccgaccgcctggccgtgccgcccttcgcccagcgggaccgcttccaccgcttccagcccacctatccgtacctgcagcacgagatcgacctgccgcccaccatctcgctgtcggacggggaggagcccccaccctaccagggcccctgcaccctccagcttcgggaccccgagcagcagctggaactgaaccgggagtcggtgcgcgcacccccaaacagaaccatcttcgacagtgacctgatggatagtgccaggctgggcggcccctgcccccccagcagtaactcgggcatcagcgccacgtgctacggcagcggcgggcgcatggaggggccgccgcccacctacagcgaggtcatcggccactacccggggtcctccttccagcaccagcagagcagtgggccgccctccttgctggaggggacccggctccaccacacacacatcgcgcccctagagagcgcagccatctggagcaaagagaaggataaacagaaaggacaccctctctagggtccccaggggggccgggctggggctgcgtaggtgaaaaggcagaacactccgcgcttcttagaagaggagtgagaggaaggcggggggcgcagcaacgcatcgtgtggccctcccctcccacctccctgtgtataaatatttacatgtgatgtctggtctgaatgcacaagctaagagagcttgc

SEQ ID NO: 175198 - DNA, 665 bp, Homo Sapiens
cctcctagccctcttaccaataatatggcattgcaaacccttctatcccatcccttttcagttaaaagagagaatattaacagagatttagtaatagtgaccaaaataagaaatcagtatagtcaagaaagatatgtaattattcaacatcatttggtacggatagatcaatgcaactcactaagtggacaacattgtgaggggagtgggtaacatgattcagagtcctgtgggtaaattcatatgcaataatcttattccaatcaatctgtaaagtaaaagcactacatccacattaacattataacatcttacagtaatataaaagccaaatcattgttggtaccgtcattttcttttaaagggaacaatttaagaaaacctccacaaggagtctgcacttgggaaagatacgatcagagtacacagtagagacaaaacaggcatcttcattgtaattttttttaataaataaaagcacattaacaaaaaaggaaggtaagcagcaccggaagcctttgacgtttgtaactaaatgctggtactcaaatggtctagctggttaagtttcactaggaggcgcaaaaaaggagcccgttttgacttaacattttaattctagtagagataagaagaacttgtgtgggcttcaagtcctttaactg

SEQ ID NO: 175199 - DNA, 522 bp, Homo Sapiens
gtatgagccaccgcgcccagcctaatgaggtattttctacctaatgaggtagcaccttcagcttgccttcatctttgtatgtagtgtttcaattatataatatcccagctttaaaatttttaataattttgtgtttattttcatttgataaaggaacaaggttgacttaaaactctggtcttaatttatgttagtttttgtttagaatttagattacgtatctttttacacaattaattatgccaacacatttctctgtagggaaattcgtctgtaggaataacagttttaactgaagtgggctgacttgggagcctttgagagttagcgcagtggagtggaaaaaccgcttggaaaaaattagactaaagataccaacatcagaggttggtggagaaaaacaactgaaatccattcttgggtagtgttcatagcaggctaaccttaacccccatgtgggctctggtgaccctctctactcaccacacccactcactgtggggggaagggcctgaaacttgg

SEQ ID NO: 175200 - DNA, 387 bp, Homo Sapiens
gggaaacttgtaaatcaatcacatattctttagaaaataagacctactcatctgtgagaacagaagctttatctgtgatagaattgctgcttaaaaaacttgaagaatctaaacagtgggaatgtttgacatctgaatgcagagtgctcctaattgagtctttagctactatggagccagacagcagacctgaactgcaggagaaagcagcgttactgaagaaaacacttgaaaatctggaataaattagaaggggaagaaacaaacaagtgccatgttcattgggggttgaagtggtggtgttctttgaaaaaccaagtgggaaaaagtaaagattaatctgtagcatgcatcattccttggctgaaataaaaagaaaaagcctta

SEQ ID NO: 175201 - DNA, 379 bp, Homo Sapiens
  misc_feature (89)..(89): n is a, c, g, or t
cggcaagaggccgactagaggtgactcaccacaccagggtgatgctcacagtaactggtgttgccccggccaaggggaggcaagagagncagcctagcaagcgcgagaacttacctttttggcaacaaaagggaagcccttggtgctcagaaagatggtcacaaccgctggtccctaaaatccccaggccccagacttggcaactagtgtccaaataccgggcccctggaaactgggaatgagtctcagccatacacgcgacgggtcccgtggaaactcgctggcaaccaggagctcgccctgagcaacaggtctggctctccttggtcaacaggggcaccgccttagcctcttgccgcgggatctctagaaaagggca

SEQ ID NO: 175202 - DNA, 629 bp, Homo Sapiens
  misc_feature (389)..(389): n is a, c, g, or t
  misc_feature (574)..(574): n is a, c, g, or t
gggaaaaaatcccttaacctcaaagcaaaaaaatgaaacaacaaatatctttaaggcttgaaaggtaatatgaaaataatgtcaactaacatcggaacagcgcctctgcttgcaacacctatgggaatctgcagctgtgaacacgtaagaagttggcccacatcccaggtcggtggctcccaaagtgggcggccacacgcacaccctcgtgcaacgtgaagctcacctgatgacccaccatggccagcaggctgcggaggtaacgctcccgaagggcggctcgtgcccgcttgctcctgggattccagggattcttgagctatgggacactcctggatttcaggaacctctggcctcaagggggctctgcgtccatcagggcaaagccnacggctgaagccatcagggccccggggcagccggagcacaggcacgggaatgttcactggagtttgcattgtcttggctgttgagtgaagaaaaagagcaggaagtcattacatggctcttcctgtctctgcacctgaactgtagccccttgcaagacaggaccctgcagatagaccgaggatgnaaccagggctactcagtctggacactatttacatttgggctgaggggatcctcta

SEQ ID NO: 175203 - DNA, 829 bp, Homo Sapiens
  misc_feature (803)..(803): n is a, c, g, or t
ttccctctccccggccccagctctggacgctcaccccagtgcaacgccctgagtgacggaaagagccaagacaatgcaaactccagtgaacattcccgtgcctgtgctccggctgccccggggccctgatggcttcagccgtggctttgcccctgatggacgcagagcccccttgaggccagaggttcctgaaatccaggagtgtcccatagctcaagaatccctggaatcccaggagcagcgggcacgagccgcccttcgggagcgttacctccgcagcctgctggccatggtgggtcatcaggtgagcttcacgttgcacgagggtgtgcgtgtggccgcccactttggagccaccgacctggatgtggccaacttctacgtgtcacagctgcagactcccataggtgtgcaagcagaggcgctgctccgatgtagtgacattatttcatataccttcaagccataaagatattgtgttcacttttctgcttgaggctaaggcactgtatcccaggcctcccaatgttcccgagccaggaactctgggccccatggagttatgagctcccttggaaattttgagccaagctttaaccaagtctggactcctgagaactcctggggtctagtcagtaaaattctgcaactctaggaattctaagatcccattggaaggaatgctctacctcacagaactctgaaccctacagaaatatgggcctgctgccatttcctgaagaccggggcatcggggtgggggtgataaaaggatacacacctgcacaagggggaaagttatnttaaagagggctgccaaaagtccaac

SEQ ID NO: 175204 - DNA, 422 bp, Homo Sapiens
aatgcagtccctggaagaagaatgcctgctgcaacagccagcaccacccaggagctgcacaaggacacctcccgcctgtacaactttaactgggaccactgcggcaagatggagcccgcctgcaagcgccacttcatcccaggacacctgtctctatgagtgctcacccaacctggggccctggatccagcaggtgaatcagaagtggcgcaaagaacgcttcctggatgtgcccttatgcaaagaggactgtcagcgctggtgggaggattgtcacacctcccacacgtgcaagagcaactggcacagaggatgggactggacctcaggagttaacaagtgcccagctggggctctctgccgcacctttgagtcctacttccccactccagctgccctttgtgaaggcctctggaatcact

SEQ ID NO: 175205 - DNA, 403 bp, Homo Sapiens
gccaagcacagaggctgtggggacagctaggggcctggatctattgcctacttagagagaggccaactcagacacagccgtgtatgctcccagcagcaacggaggttcagggacagaaagacatggtctggaaatggatgccacttctgctgcttctggtctgtgtagccaccatgtgcagtgcccagggacaggactgatctcctcaatgtctgtatggatgccaagcaccacaagacaaagccagggtcctgaggacaagctgcatgaccaatgcagttccctgggaaggaaggaatgcctgcttgcacagcccagcaccagccagggagcttgcacaagggacacctcccgccttgtaacaattttaattggggaccattgcgggcaagttgggagcccg

SEQ ID NO: 175206 - DNA, 466 bp, Homo Sapiens
tcagcatttccagcagcggactcgggccaactccatggaagggcttgatgccgcgctgggttcctgatcgtgccttctcccggaccaaggactccaaggccttccgccagatgggcattgatgattccagcaaagacaaccggggcacccaagatgccctgaaccctgaggatgaggtggatgagttcctgagccgtgccatcgatgcccgcagcattgatcagctgcggaaggaccatgtgcgccggtttctgctcaccttccagagagaggatcttgagaagaagtactccaaaaaggtggatccccgcttcggagcctacgttgcctgtgccctgttggtcttctgcttcatctgcttcatccagcttctcatcttcccacactccaccctgatgcttgggatctatgccagcatcttcccgctgctggaaatgctgacggggtcctctagagtcgacctgcg

SEQ ID NO: 175207 - DNA, 466 bp, Homo Sapiens
  misc_feature (15)..(15): n is a, c, g, or t
  misc_feature (139)..(139): n is a, c, g, or t
gtcgactctagaggntcccgtcagcatttccagcagcgcccattcatcagaccaagacattctagatatgaaacaaccaaaaaaactgctgggccaaggattgggctaaacaccttctagtcaaaggtgtctcatctantagatcatggcactgtgtaaaagatttgtgctaaaaatgctcatggaagcataagcagccacttcaacataagcctcatcaatgaagacagtcttaaaacaggagtatgggtaacgacatgtaagaatttcttcataaaattcaaagacttcatgaaggtatgatgtggtatgtttcagcaatggaagaagttggggcaaacaaaaatgagtaacctcatgcatgtatggatctaccagtatttcaaatggtccaatggccaagagatattgcgcttctggaatcctaccggaccggctcgaatcgcaacatggcatagctgttctg

SEQ ID NO: 175208 - DNA, 705 bp, Homo Sapiens
  misc_feature (1)..(1): n is a, c, g, or t
  misc_feature (3)..(3): n is a, c, g, or t
  misc_feature (5)..(5): n is a, c, g, or t
  misc_feature (7)..(7): n is a, c, g, or t
  misc_feature (195)..(195): n is a, c, g, or t
ngntncngtaagcatttccagcagcgattcagacagtgaagtttactgtgattctatggaacaattttggacaagaaaagtctttagacagctttacgtccaacaatggaccatttcagtattactttgggtggtcattccagtcaacccatggaaaattctggatttcgtgaagatattcaagtacctcctggnaaatggcaacattgggaatatgcaggtggttgcagttgaaggaaaaggtgaagtcaagcatggaggagaagatggcaggaataacagcggagcaccacaccgggagaagcgaggcggagaaactgacgaattctctaatgttagaagaggaagaggacataggatgcaacacttgagcgaaggaaccaagggccggcaggtgggaagtggaggtgatggggagcgctggggctccgacagagggtcccgaggcagcctcaatgagcagatcgccctcgtgctgatgagactgcaggaggacatgcagaatgtccttcagagactgcagaaactggaaacgctgactgctttgcaggcaaaatcatcaacatcaacattgcagactgctcctcagcccacctcacagagaccatcttggtggcccttcgagatgtctcctggtgtgctaacgtttgccatcatatggccttttattgcacagtggttggtgtatttatactatcaaaaaaa

SEQ ID NO: 175209 - DNA, 226 bp, Homo Sapiens
caatcaccttggagcctttcgtgtcgaagggagtgaggagtgaattaaggaagagagcaagtgagtgtgtgtccctggaggggttgggcgccctctggtgttaccacctcgagacttgtctcatgcctccatgcttgccgatggaggacagactgcaggaacttggcccatgtgggaacctagcctgttttggggggtaggacccacagatgtcttggacagtttt

SEQ ID NO: 175210 - DNA, 789 bp, Homo Sapiens
  misc_feature (43)..(43): n is a, c, g, or t
  misc_feature (46)..(46): n is a, c, g, or t
  misc_feature (281)..(330): n is a, c, g, or t
  misc_feature (766)..(766): n is a, c, g, or t
  misc_feature (778)..(778): n is a, c, g, or t
atgccttaatatttgcatgataagctagttttattggtttagnatnctggtgtttacgcatggaatcactattcctggttatctcaccaacgaaggctaggaggcggcgtcagaggtgctgggtgacagagccatgagccagccattttataagcactctgatttctaaaagttaaaaaaaatatatgaaatctctgtagcctttagttatcagtacagatttattaaatttcggcccttaacccagccttttccagtgtgtaacccagtttgaaatcttnnnnnnnnnnnnnnnnnnnnnnnnnnnnnnnnnnnnnnnnnnnnnnnnnncagtttgaacacaaaggctctatggaagaaatgcctctatgtaggtgaagtgttctctctgcatgcaacagtaaaaattaatataatattttccccacaaaagaaacacttaacagaggcaagtgcaatttataaatttatatctaaaggggaatcatgattataagtccttcagcccttggactctaaattgaggggattaaaaagaatttaaaataattttgaacgaatttattttcccctcagtttttgagggcattaaaaaggcattaaatcaagacaaatcatgtgcttgagaaaaataaaattaatgaaaacacagcacttatgttggtttagctcgcagcctccttggaggtagaatttatttatttaaaattactggttgcatcaagaacccatagggtgtacaaaaggtctataaaatctgcttatngagacaagagcngccaatcatgt

SEQ ID NO: 175211 - DNA, 798 bp, Homo Sapiens
  misc_feature (692)..(724): n is a, c, g, or t
gggcatcagacacgctcacaggaatctgaagattggctatttcagccagcaccatgtggagcagctggacctaaacgtcagtgctgtggaactgctggcacgcaagtttcctggcggcctgaggaggagtaccgtcaccagctgggtcggtatggcatctccggagaactggccatgcgtcctcttgccagcctgtctgggggccagaagagccgagtggcctttgctcagatgactatgccctgccccaacttctacattctggatgaacccacaaaccacctggacatggagaccattgaggctctgggccgtgccctcaacaatttcaggggtggtgtgattctggtgtcccacgatgagcgctttatcaggctggtgtgccgggagttgtgggtatgcgaaggaggcggcgtcacccgtgtggaaggaggatttgaccagtaccgcgccctcctccaggaacagttccgccgcgaaggcttcctctagggccaccaggctgaggactcgcccaggacatggactggtctctcagacccctgggccaccatgtaggccaccactccaggccgtggacttcccccaacttggggacagccttattcccaaatgtctctatccttttgactggagcatcttctgcacaaccttgggagcccatccaagggttggtgaggactggtctcccnnnnnnnnnnnnnnnnnnnnnnnnnnnnnnnnntatagattcccccactgccccagctctgactggaccccaagtggctgctatgtaaattaaatctctccccgcgt

SEQ ID NO: 175212 - DNA, 804 bp, Homo Sapiens
gaggctggtacggtccggagttccgggatatcgtcgacccacgcgtccgcgagaaggatttcagaagatcaagttacagtctgtttttaaaaccataggtgggacagctatggccaataggctataaagagacatttagcacttttttctatttaaaggaacaagcggggaagggtgctaaaagataatacgtttatttattcacacttgaattgcatttgtgatcaaaataaatgtttaaatcgctaaaggaaaatacagtaagtgcttgaaagatgaaggaccaaaaggccaaaaaacagtgaaatatgatcatcaatcaccttgcggacttctctgcctagtattgtgtgatctgttattcaaaaaataaaaagctggtggaacttactctttcttttaagataagttgtagacttcgatgtttcatgctcatgtacttcaaataatgcatgttttatagttagtccctcatcacttgaagtgacttctgagaattatgcagagtcaacatggatcatttcacagtgagatgctttatggattgaaggatatggtaaaatgtttatagtttactttgaaagtaaaatatactatgtcttggttttgaggatattggatacaaaactctcttcctttagggctactgagtcttgattcctgatcatcagaaatttcaccagaaacaacttgcttccaatatacccaattctatatgaagaattcatggagagtgtactggcactggaagagtttagtgtttcttgtatgcttgaaaataaagtatgtactgttttgaatgtg

SEQ ID NO: 175213 - DNA, 928 bp, Homo Sapiens
gggggcatcactcgcggcattggagtcaagatggaggagtacgcgcgagagccttgcccatggcgaattgtggatgactgtggtggggcctttacgatgggtaccattggtggtggtatctttcaagcaatcaaaggttttcgcaattctccagtgggagtaaaccacagactacgagggagtttgacagctattaaaaccagggctccacagttaggaggtagctttgcagtttggggagggctgttttccatgattgactgtagtatggttcaagtcagaggaaaggaagatccctggaactccatcacaagtggtgccttaacgggagccatactggcagcaagaaatggaccagtggccatggttgggtcagccgcaatgggtggcattctcctagctttaattgaaggagctggtatcttgttgacaagatttgcctctgcacagtttcccaatggtcctcagtttgcagaagacccctcccagttgccttcaactcagttaccttcctcaccttttggagactatcgacaatatcagtaggacttctttcctaggatttctttaacagaacgagttgtggttcgagaaggatttcagaagatcaagttacagtctgtttttaaaaccataggtgggacagctatggccaataggctataaagagacatttagcacttttttctatttaaaggaacaagcgggggaagggtgctaaaagataatacgtttatttattcacacttgaattgcatttgtgatcaaaataaatgtttaaatcgctaaaggaaaatacagtaagtgcttgaaagatgaaggaccaaaaggccaaaaaacagtgaaatatgatcatcatctccttgcggacttctctgcctggttttgtgtgttctgttattcaaacaataaaaagctggtggaactt

SEQ ID NO: 175214 - DNA, 683 bp, Homo Sapiens
atgtgggcacctgggcttcctagggctgcttctgagggttctttcacggtgtgtgtccatagctttagtcttcctaaataagatccacccacacctaagtcacagaatttctaagttccccaactactctcacaccctttcaaagataaagtatgttgtaaccaggatgtcttaaatgattctttgtgtaccttttctgtcatattcagaaaccgttttgtgcctgctgggagtaattcctttagcaattaagtatttggtagctgaataaggggtcagaacttctgaaaccagagatctgtaatcatctctattggcctggggtgcctgtgctataaatgagtttcttcacatgaaaaacacagccagcccaagatgacttatctgggtttaggattcaatagtattcactaactgcttattacatgagcaatttcatcaaatctccaaactcttaaaggatgctttcggaaaacacgctgtatacctagatgatgactaaatgcaaaatccttgggctttggtttttttctagtaaggattttaaataactgccgacttcaaaagtgttcttaaaacgaaagataatgttaagaaaaatttgaaagctttggaaaaccaaatttgtaatatcattgtattttttattaaaagttttgtaataaatttctaaattatcgaaa

SEQ ID NO: 175215 - DNA, 586 bp, Homo Sapiens
  misc_feature (391)..(391): n is a, c, g, or t
  misc_feature (404)..(404): n is a, c, g, or t
  misc_feature (407)..(407): n is a, c, g, or t
  misc_feature (420)..(420): n is a, c, g, or t
  misc_feature (460)..(460): n is a, c, g, or t
  misc_feature (473)..(473): n is a, c, g, or t
  misc_feature (529)..(529): n is a, c, g, or t
  misc_feature (541)..(541): n is a, c, g, or t
  misc_feature (545)..(545): n is a, c, g, or t
  misc_feature (557)..(557): n is a, c, g, or t
tcgtcttttgtttcaatggaaacatcctttccacccctccgctttattgtgcctgtgtcaccttctgagtcttctccccagtaacctgtggaagacgcccagcttgctcgggactgggcttgttcaaggctctctctactttgattttgcctgttatactttgtgctatgatcagaaaacataatttggtccatatggctgcttgatgcccataaacctgcaggatcccctgaataatcaaagtgagtatgcccgaatggaagagtctcccagcttctctggtgctggatcgtctgtatattatcatgggagccacttgagcatgacgtccaagctccacggccactggcagcaagcatcaagtgacgccgccgatcccctgatcctgggnaaagttcttctgngcnttggagaagaaantactggaacttgagcatataagccttgggcctttggacantggggcataggancccaagctttactggacaaggttcaatcatgggccggcttttccattctggccatncctaggtttggnttcncgaagctttccnaaaagcctttggggccttttaattggcca

SEQ ID NO: 175216 - DNA, 938 bp, Homo Sapiens
  misc_feature (524)..(696): n is a, c, g, or t
aatgccccccaccaaagacagagaatgagttgctgcagatgttctaccggcaacaggaggagatccgaaggctccgggagctgttgacccagcgagaggtccaggccaaacagttggaactggagatcaaaaacttgcggatgggctcagagcagctctgagcagagacctctgccctcctcaccctcagggacaccactaggctccatggggaggtttagaaccaaaccacaagtcccctcaaggacaaccactatttctatattttttaccagaaaacaaaactctccatcgctgaaagagattccagtgggacatggtgccgtttttctgtttgccttcttgcaacaacagtttctgaattgactttgttttcagatgatgccttctgttgaattctgttattaagggcccatgatgagctgtaacttctcaagaggaaagaacacagtagaaaactagagctggaaggatctaggttgacctgtctgtgattttcaaactgtggtccagagaataggggnnnnnnnnnnnnnnnnnnnnnnnnnnnnnnnnnnnnnnnnnnnnnnnnnnnnnnnnnnnnnnnnnnnnnnnnnnnnnnnnnnnnnnnnnnnnnnnnnnnnnnnnnnnnnnnnnnnnnnnnnnnnnnnnnnnnnnnnnnnnnnnnnnnnnnnnnnnnnnnnnnnnnnnnnnnnncaggttcaagaccaagccctggaccaacatgggggaaaacccattctcttcctaaacaaacatggcccgggtaaatcctgtcatccttggtcgggccgcccttcgggcccttcgaaaaagacttttttagaaccctttcgcttttgggcgcccgcgggtcccccgtaagggtaaggtggaactgggtcactaaccggtgtttccctaaggaagaaccttgggcccaggcaataaggggctgg

SEQ ID NO: 175217 - DNA, 467 bp, Homo Sapiens
  misc_feature (32)..(32): n is a, c, g, or t
  misc_feature (74)..(74): n is a, c, g, or t
  misc_feature (77)..(77): n is a, c, g, or t
  misc_feature (84)..(84): n is a, c, g, or t
  misc_feature (144)..(145): n is a, c, g, or t
  misc_feature (176)..(176): n is a, c, g, or t
  misc_feature (310)..(311): n is a, c, g, or t
  misc_feature (318)..(318): n is a, c, g, or t
aactccctgaatggaaactgacacacaggaantgagagaaagtaggcttcggaacagtgatggagtcctctganganatagatnagcgatggagacgcgctgtcccagaagaggtctgagaagccgcccgcaggctccatctgnncagggctgaacctgaggctggtgaggagcangcaggtgacgacagggacagtggcggccccgttctccagtttgactacgaggcagttgctaacaggctgtttgaaatggccagccgccagagcaccccttctcagaacagaaagcgtctctacaaagtgatccnngaaagcntgcaggacctggcaggaggcatatttccctgaagatgagatcccagagaaggcctgcaggcgcctgcgtgaacggaggcggcagaagaaaacgaagaagcagaagcgtctgctcttggttgcagctaggagggacccgaaaggtgttgc

SEQ ID NO: 175218 - DNA, 592 bp, Homo Sapiens
  misc_feature (117)..(117): n is a, c, g, or t
  misc_feature (247)..(247): n is a, c, g, or t
  misc_feature (254)..(254): n is a, c, g, or t
gacaacaccccaggaaccctgaaggttcaatcgaccccttctgcagaatcgctgcccggaccaaggattccttggttttgaacaacatcactcgaggcatctttagagacgattgtngagcaggccccgcttgccattgaagacctcctgatgaactggacacacaggatgaggaggtggcgtcggacagtgatgagtcctctgagggtggtgagcgtggagacgcgctgtcccagaagaggtctanagaagcncgcccgcaggctccatctgcagggctgaacctgaggctggtgaggagcaggcaggtgacgacagggacagtggcggccccgttctccagtttgactacgaggcagttgctaacaggctgtttgaaatggccagccgccagagcaccccttctcagaacagaaagcgtctctacaaagtgatccggaagctgcaggacctggcaggaggcattttccctgaagatgagatcccagagaaggcctgtcagcgcctgcttgaagggaggcggcagaagaagacgaagaagcagaagcgtctgcttgttgcagcaggagggacgaaagtgttgcaacgttga

SEQ ID NO: 175219 - DNA, 1115 bp, Homo Sapiens
  misc_feature (1100)..(1100): n is a, c, g, or t
cctcgggacactagcgtcgggtcatgtttcgcgcgtgcagtccgctgagatcagctgctcagcgcctggggggaatgagcaggtgacccgggaccgggcggtgaggaagctccggaaatacatcgtcgccaggactcagcgggccgcaggtggttttacgcacgacgagctgctgaaggtgtggaaaggactgttttattgcatgtggatgcaggacaagccactcctccaggaagaattaggaaggactaatttcccagctcgttcatgcttttcagaccacggaggcgcagaacctgttccttcaggccttctggcagaaccaatgaaatcgcgagtgcacgggcattgacagggctgcgcctggaataaattctacatgctcatgcggatggtccttgaacgagtcctttgaaggttctgaagatgcaaggctgggaagaaagacagatcgaggagctgctagagctgctgatgactgagatcctgcaccccagcagccaggcccccaacggtgtgaagagccacttcatcgagatcttcctggaggagctgaccaaagtgggcgccgaggagcttacggcagaccagaacctgaagttcatcgaccccttctgcagaattgctgcccggaccaaggattccttggttttgaacaacatcactcgaggcatctttgagacgattgtggagcaggccccgcttgccattgaagacctcctgaatgaactggacacacaggatgaggaggtggcgtcggacagtgatgagtcctctgagggtggtgagcgtggagacgcgctgtcccagaagaggtctgagaagccgcccgcaggctccatctgcagggctgaacctgaggctggtgaggagcaggcaggtgacgacagggacagtggcggccccgttctccagtttgactacgaggcagttgctaacagactgtttgaaatggccagccgccagagcaccccttctcagaacagaaagcgtctctaccaagtgatccgggaagctgcaaggacctggcagggaggcattttcccttgaagatgagatccccagaaaaagggcctgcagggcgccttgctttgaaaagngaggccggccaacag

SEQ ID NO: 175220 - DNA, 1116 bp, Homo Sapiens
  misc_feature (897)..(905): n is a, c, g, or t
  misc_feature (941)..(941): n is a, c, g, or t
ggcctgggtggcgaattcggcacgaggatctgcagggctgaacctgaggctggtgaggagcaggcaggtgacgacagggacagtggcggccccgttctccagtttgactacgaggcagttgctaacagactgtttgaaatggccagccgccagagcaccccttctcagaacagaaagcgtctctacaaagtgatccggaagctgcaggacctggcaggaggcattttccctgaagatgagatcccagagaaggcctgcaggcgcctgcttgaagggaggcggcagaagaagacgaagaagcagaagcgtctgctcaggttgcagcaggagagaggcaaaggtgagaaggagcccccgagcccgggcatggagaggaagaggagcaggaggaggggtgtaggggccgaccccgaggcgcgggcagaggctggtgagcagccaggcacagctgagcgggccctgctccgagatcagcccaggggccgtggccagagaggggctcgccagagaaggaggacacctcggcccctgaccagtgcccgagcaaaggcggccaatgtccaggagccggagaagaagaagaaacgcagggagtgatgtggccgggccaaggacaggcagggagggaggccaggcctcgcttgcaccgcgggacgaggctgaccggggctgttctggtagactcaggaccgtggctccagaactcctgggccaggcggggagggaaaggcggcacttggagagatgggcccctcattaggggccagcatccccaggacctgggacctttccccgaagcctccgcctgtgggctggggatgacctttgggccagaaagggcaaactcccgaagattgaaactctgccctgcagcagggatgggccgccccctgcttnnnnnnnnnttccgaaaaataaattgccggcccagcccttggccnaaaagtataaccaaaagacgagaataccagatatacccagagacagaaatccccccggggcttctttggtgcggggggggaaaaaagggattttgaaagggcccctggggcaaaactgtttccctgaacccactttttttgggacaaaagggtggaaaattttgccgggttctcc

SEQ ID NO: 175221 - DNA, 854 bp, Homo Sapiens
gaatcggaagccagtagggtgcgcacggaggggcccacccggcgcgttaatatgccgcggggtgggggtcccgatgtccccttttcgggggagggttttttacaaatggccacaagcgggggcccttgtttcccccaattgtttttcaaaagaaagccctcgaaggggatgttgtttcaaaacccaagggatccctggtcccggccagcaattcttcagaaggggttcgatgaactccaggttctggtctgccgtaagctcctcggcgcccactttggtcagctcctccaggaagatctcgatgaagtggctcttcacaccgttgggggcctggctgctggggtgcaggatctcagtcatcagcagctctagcagctcctcgatctgtctttcttcccagccttgcatcttcagaaccttcaaggactcgttcaggaccatccgcatgagcatgtagaatttatccaggcgcagcctgtcaatgcccgtccactcgcgattcatggtctgccagaaggcctgaaggaacaggtgctgcgcctccgtggtctgaaaagcatgaacgagctgggaaatagtccttcctaattcttcctggaggagtggcttgtcctgcatccacatgcaataaaacagtcctttccacaccttcagcagctcgtcgtgcgtaaaaccacctgcggcccgctgagtcctggcgacgatgtatttccggagcttcctcaccgcccggtcccgggtcacctgctcattccccgccagggcgctgagccagctggatctcaaggcgggagctgcacgcgcgaaaccatgacgccgacggccgagaccccctgtcccggagtcgcctggta

SEQ ID NO: 175222 - DNA, 187 bp, Homo Sapiens
  misc_feature (23)..(24): n is a, c, g, or t
cctgacaacaccagacatggtgnngaattggagggaaagattgtgggaaatccctaaagggtcattgttcatgacgttattttgaattgtaaaattgtgagccactcacatttcaattacaaaaagaacagaactctatcacgttgtgaagggtggggcagacgttgaaggaattgcagcgtttggt

SEQ ID NO: 175223 - DNA, 407 bp, Homo Sapiens
gccatactgggaatttgaaacgagaccctaaatgacattctaagaaaggccagtgttcaattcccaggtattaggtgaggatgggattctaaggacatcagtgggaggcagggagccaccttcagacctcagcatggaagcttccaagatccagaggaagaggcaacagcactgagagtcataggtagaagaatcatcaccagccctgctaacccaggcagctgatgcccctctcccctggctccctgtgtccaaatcctacaggggcatctgttggctgaactcaacctgaagccaaagagaagatgagtggagagaggcaacatttatagagctcaggtttctagggctggagagggatctggagggacacacaggagacacctggcataaccaaaaaatgatta

SEQ ID NO: 175224 - DNA, 329 bp, Homo Sapiens
  misc_feature (318)..(318): n is a, c, g, or t
gagttgcttgcaggagaagcttactactaggttctacttctccaacctcattggtggctatgcaggcactgtctccagactgtctatattcaacccagtatccaagaatttctttaccaccatcacattcgggtttctcccactgtagagtgacactatctttggatattgaaagaatctcaagttctcctggctggcttggtttgtctgaaatattttaaaataatgaaagagggagtcagctttactggtgaagataagaaggaccaaacatggcttgcttctttaatttaaccccttcttctgaattccttaccnaatggatcgtt

SEQ ID NO: 175225 - DNA, 760 bp, Homo Sapiens
  misc_feature (715)..(715): n is a, c, g, or t
  misc_feature (732)..(732): n is a, c, g, or t
atttcactgtgagcgcagaggcactagagtctcaagagctgtgtgggactgaggtgccttcagttcctgaacacggaaggaaagacacagtcatcaagcctctgttggttgaacctgaaggactagagaaggaaacaattcaactccctactttgtccatcaggtggtgaggtttctgaagaattatccctgaaactgccaccaaatgtggtagaagaatctgcccgagcttctgtctcagttttgggagacatattaggctctgccatgcaaaacacacaaaatcttctccagatgccctatggctgtggagagcagaatatggtcctctttgctcctaacatctatgtactggattatctaaatgaaacacagcagcttactccagaggtcaagtccaaggccattggctatctcaacactggttaccagagacagctgaactacaaacactatgatggctcctacagcacctttggggagcgatatggcaggaaccagggcaacacctggctcacagcctttgttctgaagacttttgcccaagctcgagcctacatcttcatcgatgaagcacacattacccaagccctcatatggctctcccagaggcagaaggacaatggctgtttcaagagctctgggtcactgctcaacaatgccataaagggaggagtagaaagatgaagtgacccttttcggctatatcaccatnggcctttttggagaatncctttaacagtcacttaaccctggttgg

SEQ ID NO: 175226 - DNA, 737 bp, Homo Sapiens
atgtgtcagcagcaaacgaaacctgtggtgaagggatttgcgtgctggcactgcagactgcaggcaggaagggctagggcccaggggctgggacatgcatgaggtgctcggaggagcctggctaaatccaagcaccagcacctgtgagtctgctctcttctcagctggctcccaagtaaacctgtagctttgcctcttctcccagctctcgtgcctcctgaaggtagtccagggaactggaatctacccacctttcccccaaaagtggagatgtttgtgcagataaatctgcagcgttgttttgagggaaaccaaggccatgaccaattgctcctccattatcttctttgctatctgcttagggtatagatctcttcctcctggaatggaactccttgagcacagagagggacaatgaaggtagaagccttggctctggacacctcttttgggttacatgcggggaggggtgatgcccatgcagattgtccagcagtaagtctatacttcagttggtcagtaaagaggcctctgtaaggacacctcttcttcttgccagagcagtcaggtcaatctcaaagacaggaaaagagatggacgtgcagcaaggaagaataagaagggaggcagccccaaaggcagcctgaatgcatagaaacgaccaccacctcttctcccactgcctcactcctcccatcccacaggggcacttggcagagggcccaggcccagatgag

SEQ ID NO: 175227 - DNA, 648 bp, Homo Sapiens
tgtagaaattatataaaccctatcaaatccactactaggtaaatttttaaaccatgcagctttattactctcctcccccaaagaatgtagtttgaaattttctcatttccatagtagaggccctaactgccattgtattactaataatgcaacatgaaattgaaggtgcctaactgctcaaaaaacaaaatcagccatcatactgtaactctgagaggaatgagaggtggcacaggcacgagtgggctcagcccgtgtgagtgaggagaactgaggaatcctagggtgcgcatcctgcatcctggctgcacgtttgctgcagagtatgtttttctttcttgcctcccttcagttttcttcagttgcgttcagtgtatcttctggaaccaatagtgccctgtgttctcaagtctctaaaatgctaagatctgagcaaagtcaagcagcttacactaggcttttttacagctgtgcttgagaacatttccgagtggaccagggccttgaggagcctgtttttcagcaaattcaacagatgtgtgcagtgattccctccgttttgtatttgacaccttcatttaaaatgctaagatgcaatatcatttcacttcaaagtgggggaaaatgcaggattgtgtttccctttta

SEQ ID NO: 175228 - DNA, 242 bp, Homo Sapiens
actgagaaggacaagtatctaagcagcagagcccacagaggctcgttcctttgacccttgtctcctggtggctatacgaaaccttcacaatctgcatgctggactttattacagcttcccaagccccatcaataaagcccctgttcacgctgcactggtgcaatgaaggggaagtaaggaggcagctactccccccacaaataagaattcgtgcagcagcagattcactcctttaggaacca

SEQ ID NO: 175229 - DNA, 522 bp, Homo Sapiens
aaagaaagcagatctctgcactggctggcacaaaaagaaactgctgtataccccccaaagtgtccctttcccaattacctctggggtctcttgctgcttgcctctgctgctctggactgggagagcttctgtcctgtgctgcatgggtatttagactgtgggggagatgccccttcttatagcactggaggaggaaaacaaattcttgtccccctcagaatgagagtggctctttctgatttgcaagggcactatggtcagggcaaaggcatggcccaggtgtttaagtacagggtcacgtgtgcctatgcaatggggtggtaaggcaggcacgaagagtccaaaaaatctaggtggcctctcagctctgccacctctagctgcatgaccttgggcaagctatgtaaccccaattgcctgctccattaaagactgtgaaggtagaatgtttgtaaagctcttaacagtatgtaagccttcaataaatttcagttttccccttgttttcttgatcaaaaaaaa

SEQ ID NO: 175230 - DNA, 227 bp, Homo Sapiens
cttcactggggtgcggctttacttgccaccctccacaccagacttcagccgtctcagacgctactttgtggcattcgacggagacctggtacaggaatttgatatgacttcagccacgcacgtgctgggtagcagggacaagaaccctgcggcccagcaggtctccccagagtggatttgggcatgtatccggaaacggagactggtagctccctgctaggtttgct

SEQ ID NO: 175231 - DNA, 234 bp, Homo Sapiens
ggtcaaaaatccccagggtcattaagagcggtatgaaggtcacatcatgagccgcatagagatacagctctcatgatcttgtcgggggcagtggcagagtccatggctttcagcaggttgctctctaggatgtggaggaatgggcctactgccatctgaagacttaccctgtcttccttgggcagtatgtacaaggatgtgtccacagctctctatccgatcatccgtgcaaat

SEQ ID NO: 175232 - DNA, 535 bp, Homo Sapiens
aaagtgtctttaagtgtctttcctcctgagtccacctttggcaatggtccccaaagcctggccccttagagatgcagctccagatcctggccaccctcagggttcaaagagactggcccaggggtacacaattgctggaatattctctgcgagtcatgcacacgtgcgggggtgaggtgcagttaatatggtgaacacacacagtgttactgtgagctctcagggtgcacagagggcaggtgacaagggcatcagctaatctgtcccacctggtccagcccatccagttcaggggcatcaaaggggctgaggccccggtagccactgtagaccctgtgactatcactgacaccgtcactgggctccattgggcaaatgtagtccgtcgattcatcgaacttcttttttcttatgtttccgaagtgtgaaaatcctagtttccttggccggactttggctgtggtggtcagtggtgtgtaagctggtgaggccattttctctcgcttctcctgttcaagctccggaccaatcaagg

SEQ ID NO: 175233 - DNA, 488 bp, Homo Sapiens
ccagcttcatggcagcatagttcgggaaggcgtagatgaagatggccaggaacagcagcaggatgaagaggatgatgaagaggatgatggcccaccggaaacgccgccacaggatgaacttcatggtcttgtatggggagctaaaccacaggaaggaggtgtcggggcgccttgggtcctcaagcttagggttcatgttgggctcatcccggccctggccagcagaccgctcctcatgctcactctctgctacaatctccaaggtcatttccagcttgcccgccagtattttcttctcaccctcttctgctacacagggccaccagcccttcactgttttctgctcaaaaagggacacaaaccattctgggtggaaagcatcatccagctggtccaaggagcacttcttggctgtcttgactggcttgggcatgcggttgagatcgagctgcagggagcccagaaaatcatcaaaggagaacttgtca

SEQ ID NO: 175234 - DNA, 259 bp, Homo Sapiens
gcatccgtggtcaaaagtcagctgccagccctgcggaaccagagcctcaggctgggatggggaggcctccctgcttccacctggcatggtgggcatggcctggcttacacacaaaggctttgacaggtttctccaagtaaggatctgcaaatcttgaatcgtcctcaataatgacgaagcttgaattgtcctcaagatggatgtgaatcttacattccttttcatcatttcctttgtaaaaatgacgagtgctgggttt

SEQ ID NO: 175235 - DNA, 691 bp, Homo Sapiens
acagatgacacgtttgatgccaaatcagcaaccattgttgttatgatctgcagtcttcctggtgacactggaatctctctctctgccgcctcagtttgtctgctggtctcttggggggccaggccctgcacgtctctcctacccggcctcaaatggtgctgctgcccatgatggtaccacaccagggcctcagcctggcccctcaccacataccctttgccttttagaactcagtgccatcctgggtgccaagggcagagcaggctttgttcgaacctcatcctgctgcagaaccacatcctgaggagtctcagcttatcctggagggaattgggaacagtgtcactgcggaagtgaaggcctagcccatgtggcttccaccagtctcctcctggcagtgccacgtggtggcatttctcgcctcacaccaagaagcagcaagtggaaaatttcaggatacaaagcacataacaccccataagagatgattatgtttctagaagcaagagcaaaattatgaaacctctagagatttgggtcatgttactccatttgatgaagattctcactaccgcccgctcctcccataggagcctacactaagtccaagtgtgagccattaacagactagaacacaaggagggagagagactcttaaacgtaaatacaaatgcaattcactcacaactct

SEQ ID NO: 175236 - DNA, 951 bp, Homo Sapiens
  misc_feature (595)..(595): n is a, c, g, or t
ccgcgaccaatagccggacggggatctgagctggcaggatgaatgtgggggtggcacacagcgaagtaaaccccaacacccgagtgatgaatagccgaggcatctggctggcctacatcatcttggtaggattgctgcatatggttctactcagcatccccttcttcagcattcctgttgtctggaccctgaccaacgtcatccataacctggctacgtatgtcttccttcatacggtgaaagggacaccctttgagactcctgaccaaggaaaggctcggctactgacacactgggagcaaatggactatgggctccagtttacctcttcccgcaagttcctcagcatctctcctattgtgctctatctcctggccagcttctataccaagtatgatgctgcgcacttcctcatcaacacagcctcattgctaagtgtactgctgccgaagttgccccagttccatggggttcgtgtctttggcatcaacaaatactgagggatgggttttgggacagctccatgggcatggggaaggcactgaaacagaggactataaaacatccttctcttattctccatactgtcttctanacctttaaagcctgagaactatacaacctttcccagactcccaagaagagaagagattggcaaatggggctcctgggcccagtcctgctagtggcaagtttctttgaatcaggaaggcaggtgaggtaagggccaaatcactctcctccatagcaggaagccatttgggcagcttctttggtgattacatctttccatatcttttacacttaccaccttccagctctgttttgctgtgtatttttcttacaataatttttttcagctatagctgcagtttaatcaggatgggtagagagctgtcctcataaggctgggggtgggaagatggaatactgacctaatgtataaaactt

SEQ ID NO: 175237 - DNA, 1200 bp, Homo Sapiens
  misc_feature (691)..(709): n is a, c, g, or t
  misc_feature (957)..(966): n is a, c, g, or t
  misc_feature (1003)..(1012): n is a, c, g, or t
  misc_feature (1126)..(1136): n is a, c, g, or t
aaagagcgaggcctgggtggcgaattcggcacgaggctagctgccgtgctgctcgccgtgtactacggtctcatctgggtacccacgcggtctcccgcggcacccgccggcccacagcccagcgcgccgtcccctccgtgtgctgcccgcccgggcgtgccgcctgtcccggcgcccgccgatgcctccctctcctgcctcctgggagtccccggcgggccgcgaccccagctccagctgccgctgagccgccgacgccgctacagcgaccctgaccgcgcgtccgagccgccagacacccagagagacgccagaggccgcggaggggcgaagacccgggtaactctcccttccaccccaacccggatcgccagccctcgagagctctgtgctccacgccgaggatgcaccgtctctggattggtccggccttcttcctaatgacatcgctcagcgtctctggagccgtcatcccgcggaatgggggcccagggggtgtcagctcggggccttgcctcttgcagctactctgtggtcaggccgggtcctccaccatcaggaagatcccatcctgagctctgtctcctgcccctcctgctgtgggatgctgagcacagagcccacagcccatctgcctcttcacctccctgaatccgtgtccatctgcaataaacgacagcctcggctgccnnnnnnnnnnnnnnnnnnnctccaagcgatctatgtccgggtgcgggagaaagaggtaatggaaagggcacatgggtcatagcttgttttcctggaccccaccttttcttgtacaaagggggtaggatctgccgggtcctcccctataggggagtccggattaaattttccaataaaaccaagggttaaacctggcccattaatggaatccggcctggcagttacacccggggaaatttaaccccgcccttaaatggagccgggccnnnnnnnnnnggtgagaccccaagggatctttctgtggagaatcccnnnnnnnnnnccgccgaagaaaaacctggcgtgccttggccaaacaaaagaaaaaacccccggtgtatccagaggggtgtggtttgtgtttgcgccgggaactcagagaggttatccgacttcnnnnnnnnnnnccaaaaggggaacatgggggctttctcccccaaaagcgcgccaataatcacgccatatactggt

SEQ ID NO: 175238 - DNA, 606 bp, Homo Sapiens
  misc_feature (447)..(447): n is a, c, g, or t
  misc_feature (450)..(450): n is a, c, g, or t
  misc_feature (453)..(454): n is a, c, g, or t
  misc_feature (466)..(466): n is a, c, g, or t
  misc_feature (487)..(487): n is a, c, g, or t
  misc_feature (497)..(497): n is a, c, g, or t
  misc_feature (501)..(501): n is a, c, g, or t
  misc_feature (509)..(509): n is a, c, g, or t
  misc_feature (511)..(511): n is a, c, g, or t
  misc_feature (544)..(544): n is a, c, g, or t
  misc_feature (558)..(558): n is a, c, g, or t
  misc_feature (564)..(564): n is a, c, g, or t
  misc_feature (581)..(581): n is a, c, g, or t
cccaagggctagaggagcagctgggacccagaactgagcctgggagggatccgacagaaaagctcagggcgggtcttctccttgtgcccgggattgggctatgctgggtaccaccatgtactcaggcatggtgggttttgaacccataaaccaaaggcccttgtcatcagctcttaacaagtatatttggtattttaatctctctaaacatattgaagttttagggccctaagcaaccttagtgatcttctattgggtctttctgaggtccagagagggtaagtaacttcctccaggtcacacagcaagtctgtgggtggcagaagcaagctagcgctgggcattcagtacataccacgatgtgctccctctcttgatgcttggcccctggggccttcaaggctttgagacatcttgtcctcaacccttttccttaaaataagctgnganggnnccctgtagatanttgggacaccatgcccatgtntttacaagtncccncagatgtncncacagatgtacccatgctccaacccaagttttnatacttgacctggncccaanctttggccctgcctggnttgggcttaaagaaaaactctttta

SEQ ID NO: 175239 - DNA, 1250 bp, Homo Sapiens
gggagacaacctactttaagaagtttcctggatactatgttacaggagatggctgccagcgggaccaggatggctattactggatcactggcaggattgatgacatgctcaatgtatctggacacctgctgagtacagcagaggtggagtcagcacttgtggaacatgaggctgttgcagaggcagctgtggtgggccaccctcatcctgtgaagggtgaatgcctctactgctttgtcaccttgtgtgatggccacaccttcagccccaagctcaccgaggagctcaagaagcagattagagaaaagattggccccattgccacaccagactacatccagaatgcacctggcttgcctaaaacccgctcagggaaaatcatgaggcgagtgcttcggaagattgctcagaatgaccatgacctcggggacatgtctactgtggctgacccatctgtcatcagtcacctcttcagccaccgctgcctgaccatccagtgaacatgatcctgacctttacctaggattcctcctgctccaaactttgcccatcctctttgccccctcaggagtgctgagggccagtgttgacccacactaccctcccttgaccagctgtctgggaccggaaaccagctttgtctccaggtagagacaacatcctgtgactgccaggcagaaaggacagggcccaggtcagcctcagtctgctgtgcctccagactgcagagctctcagaacccagaacagagacgaaaaggctacctctcctacccaagttaagtgttcaaaggggatgtgagggcctccactgaagcagggaggcagctgtgtaatcctatgtcagctctcttaggaagccccagtacttatattggggcatgcacttgccctttaaaaacaatgatttgtgagtccaggaacaatttactatttttaaacatattttgctgcttctgttctgggtctgaattcccttttgtgccagatgccagtactgtctgcccattggctccaggggctgtatgggcagattcagtctccagagggtattcagatcatctgcttctttgaaggagtaaatgtgttttgttcctagggccagaggagcttgtcttccttgtcctctgttcccaccctcccctgaacagaacccagcccataagagacattctcagatgaaactctgttttcttgccccagtcaggctcaagccctgtggttgtaggaataaagcctgtgatctcaata

SEQ ID NO: 175240 - DNA, 959 bp, Homo Sapiens
  misc_feature (551)..(598): n is a, c, g, or t
ctttagcggcgagcactgccaacaagagaatccgtgcctgggacaagtagtccgagaggtgatccgccgccagaaaggttatgcatcatgtgccacagcctccaaggtgcccatcatggaatgtcgtgggggctgtgggccccagtgctgccagcccacccgcagcaagcggcggaaatacgtcttccagtgcacggacggctcctcgtttgtagaagaggtggagagacacttagagtgcggctgcctcgcgtgttcctaagcccctgcccgcctgcctgccacctctcggactccagcttgatggagttgggacagccatgtgggaccccctggtgattcagcatgaaggaaatgaagctggagaggaaggtaaagaagaagagaatattaagtatattgtaaaataaacaaaaaatagaacttatttttattatggaaagtgactattttcatcttttattatataaatatattacaccatctgcgtatatgtaccatatagtgagttatttttaccaagttttgtgctgcgcatttgctgcgtcttnnnnnnnnnnnnnnnnnnnnnnnnnnnnnnnnnnnnnnnnnnnnnnnngctttccctatccacaaacccaataccacaccgaccatgccggccgccctcggaccctcgaaaaacctttctaaaccattccgtttggccccggggctccccctaagtaaattgaacatggctcctaacctgctttccttaggaacaaccgggccaatggacaagggggcttcggattccccaccccataaaaaaacgcccccgcggggcaacccgagcctgttttgacaccaaattccaaaatggaaattcttgcaacgcccctttatgtggcgaccctatcaacaagggaaacccccaagcccagggttcgcaatatcaaaatctatcgctccccggcatctggcatactgaattccga

SEQ ID NO: 175241 - DNA, 499 bp, Homo Sapiens
  misc_feature (20)..(20): n is a, c, g, or t
tccagatgctccagcgtcanctacccagcaaagcagcattatgacaaagtattcatacaccagtgaaggatttaagtaagggctctgcaacatgggtcaacacggatggtatttttggtttaagaatagttttctagttcctgtgaaagtgcatagggagtgggaaactgccagcagagcaaggatcctctcacagtattaaggcctgtccacatgggaatggtcagttgagagtcagccggtgaacactaggcaatgatttctgcccctgggcacaaccctctgggcttcttcaatatgacttttcttttactcaaactgtcgctattcctcttcatctgcctcttcaattacctgaatctcatctgcttgaggtaaggaggaattctccacctgcaggttattcccatcagctttacatttttcttcttcctctacgaattcattccatatcttgtgggtttcagtgagctgagcatctgacgggatcctcaaaatc

SEQ ID NO: 175242 - DNA, 812 bp, Homo Sapiens
  misc_feature (738)..(738): n is a, c, g, or t
gtcagatgctcagctcacaattgctctacaactcagaacagcaactgctaaggctgccttgggaagaggatgatcctaaacaaagctctgatgctgggggcccttgccctgaccaccgtgatgagcccctgtggaggtgaagacattgtggctgaccacgtcgcctcttatggtgtaaacttgtaccagtcttacggtccctctggccagtacacccatgaatttgatggagatgagcagttctacgtggacctggggaggaaggagactgtctggtgtttgcctgttctcagacaatttagatttgacccgcaatttgcactgacaaacatcgctgtcctaaaacataacttgaacagtctgattaaacgctccaactctaccgctgctaccaatgaggttcctgaggtcacagtgttttccaagtctcccgtgacactgggtcagcccaacatcctcatctgtcttgtggacaacatctttcctcctgtggtcaacatcacatggctgagcaatgggcactcagtcacagaaggtgtttctgagaccagcttcctctccaagagtgatcattccttcttcaagatcagttacctcaccctcctcccttctgctgaggagagttatgactgcaaggtggagcactggggcctggacaagcctcttctgaaacactgggagcctgagattccagcccctatgtcagagctcacagagactgggggtctgccgccctgngattgtcctgtgggcctcgtgggccattgtgggtgggcactgtcttcatcaatccgaggccctgccgttcaggt

SEQ ID NO: 175243 - DNA, 590 bp, Homo Sapiens
tgccgggtaaccccggtccagatgctccagctcacgccgaggacattgttcaaaggagcagcggctccagatcttcaatctcatgaagtttgatagctacactcgctttctgaagtcccgctgtaccaggaatgcatcctgcggaagtgaggccgtgcactcccgactcgcagcaggtccccagcagcccggcttccaagcacagcctcggttcagaccactccagtgtgtccacgccaaaaaagttaagtggaaaatcaaaatccggccgatccctgaatgaagagctgggggatgaggacagcgagaagaagcggaaaggcgcgtttttctcgtggtcgcggaccaggagcaccgggaggtcccagaaaaagagggagcacggggaccacgcagacgacgccctgcatgccaatggaggcctgtgtcgccgagagtcgcagggctctgtgtcctctgcggggagcctggacctgtcggaggcctgcaggactttggcacccgagaaggacaaggccaccaagcactgctgcattcatctcccggatgggacatcctgcgtggtggctgtcaaggcgggcttctccatc

SEQ ID NO: 175244 - DNA, 611 bp, Homo Sapiens
tccagatgctccagctcaccaattccacttcctgccccaactgcaggaatgctgacaatgctgccatgcccaccatcgggtgtaggtgaaaggcatctttctgaatttcattctcttgaaggtgctgccaccccttggcactgtggaactgccaccttgggtctgtgtcacttgtaggtttctctgcctccaggttgcctcaacagcaggaggcacagcagtttcaccatctttgaggtgagggtgggtgccccagctaggaagcaagatcgctgtgctaggtctgaccaaaaccagagggcagtctagtcctggggggtaaagccctcagatcccagggtacactcttctccattccctccacccacttgcctgtcacccccagtcacctaagcaatcactgggcccagaggagaggagacagacacacactggctcctggacctaaagggtatgagctggagctaaggccagctagagcttccactgtcagccctcactgtcagccccactgcaccccacctgtgcctgctgggcactgggcactagctagatgctttaggttgcttcagctgatccttaactctgtgaggtggataccaatattctat

SEQ ID NO: 175245 - DNA, 393 bp, Homo Sapiens
ggtggtgttcaagtggcctaaaattcagtgatgatattttctttcactcaattacgtagcaaagaatgaggtttgaaacagggtgccataattagtttgaatgagggtactatgctgaaaaaatatatgtctatatacacacacgtatctacatgcgtgggtgtgtatataaaatcttaccgaattgtacatgaggagccttctcagtttcagttatttgtaacattatctattatcattaaatattattcacttgacaaatacttatttaaggactagtggaaagactgtaggcaggggtgtcttccagaagaaattggtatttaaactgatacctagagggtaagaaaagttattagagcaaccaaaaggggaaagggtagttcaagcaag

SEQ ID NO: 175246 - DNA, 425 bp, Homo Sapiens
  misc_feature (14)..(14): n is a, c, g, or t
  misc_feature (298)..(298): n is a, c, g, or t
  misc_feature (380)..(380): n is a, c, g, or t
  misc_feature (399)..(399): n is a, c, g, or t
  misc_feature (409)..(409): n is a, c, g, or t
ccactcccacaccntctacctggtggtggcagttggcctcggtgtcgtcgctcttcctcttctcggtgctcctgttcgtggcggtgcggctgtgcaggaggagcagggcgacctcggtgggccgctgctcgatgcccgagggcccctttccagggcatctggtggacagtaagcggcaccgggaccctgtcccagagctaccaatacgaggtgtgtctgacaggaggttccgggacaaatgagttcaaatttctgaagccgattatccccaattttcaagttcatgacactggtaggnaatatggggggaaatcgagaactttcgaaatagctttgggactttaacattcaataaaacaatttattttgaaatgtctaanttttttggttattcttggncaagcttgangggtacttttttggca

SEQ ID NO: 175247 - DNA, 716 bp, Homo Sapiens
  misc_feature (74)..(74): n is a, c, g, or t
  misc_feature (77)..(77): n is a, c, g, or t
  misc_feature (157)..(157): n is a, c, g, or t
  misc_feature (515)..(535): n is a, c, g, or t
ctgtccacaaccagggctctcaagcctgggctaaataaataatattttgcttcattacatggccaaaggagagnagnagatagaaaagatgatattactacctctgtgggctggaagaacttcacctgttggttgaaaggggattaaaggaagatancaggaaaacctggtctggagaagacataaatgaaagctcctggaggccacttttctctgattagaaatctatcctcacactctgcccctagtagactttagcctttggagttcttagggaaaactggctttaagcagcagccagatcaccaaaaacattttccatctggtacaggacccggagctgaagccaaagtagattttggaggaacagctggacaagcaggatgtgtatgtcttacactaagaaactggtccctgtatcagggacttaactcttacttgagatgtacaaagtagatcctactaaattgccctttggaagagaacaatgggcggaggttgggtaggggaaggcnnnnnnnnnnnnnnnnnnnnnaaactgtaagagaatggttttttaatggaggtagcaggccaagtaaaaaaaagattctgccccctgccttcctgggagattgggagttggcagccatcattcccaagctgatgagtggcatatgactcaccaaggtggtacaacatgggtgggatttttcaaggacaattgccagacctcc

SEQ ID NO: 175248 - DNA, 505 bp, Homo Sapiens
gaagctctggggggtgaggcctcagtgctgacattcggggcgaaggctgaaggctgaggctgaggcggaggtctagaggcgccctggagatttgggggggtacctcctttggggctccctgaggctggctccccgtcagatcctcccagccccttccggccccccaggctccactttccactggggccctcagaactgaggagacccgggccagggggccgtgaggtccggggaccctctgtggggataggcgatgcagggggtggtccagggagccgagggggaggccactgcagcagaggtgggggccgcccatcaccagagccactcagggaggaccgcggcccccagccagggcctggtgggaggggttggtcaccattgcctgccgtgttctcaggtgtggggtgtgccacgggggggttattgctgagggaggtcaggccaccgcccccactacagtctgaatcatccacgttcccgccactattgcagccggcgcccc

SEQ ID NO: 175249 - DNA, 449 bp, Homo Sapiens
ggggctccactaatctctttagtaaattaacttcaaaactcacaaggagtcgcaatgtatctgctgagcaaaaagatgaaaacaaagaagcaaagcctcgatccctacgcttcacctggagcatgaaaaccactagttcaatggatcccggggacatgatgcgggaaatccgcaaagtgttggacgccaataactgcgactatgagcagagggagcgcttcttgctcttctgcgtccacggagatgggcacgcggagaacctcgtgcagtgggaaatggaagtgtgcaagctgccaagactgtctctgaacggggtccggtttaagcggatatcggggacatccatagccttcaaaaatattgcttccaaaattgccaatgagctaaagctgtaacccagtgattatgatgtaaattaagtagcaattaaagtgttttcctgaacactg

SEQ ID NO: 175250 - DNA, 313 bp, Homo Sapiens
gtggacgtgccctgttttaggttccctggggtgaagaaggtataggcggtacccttgttggtgctacgggctgttcggccaatacggtgcacataatcctctgagctgtttggatagtcatagttgatcacaaacttgacatcttccacatcttccacgtcaatgatgagtcagtgtgtaggttgatgtggcagggaaagagaaggtaaaggacatgccaacaacaggtgggaagcacgaatgcagatgacagcaagaggaaagaaggtgaagcgtcgacgcggccgcgaattagtagtagtagtagtagacc

SEQ ID NO: 175251 - DNA, 404 bp, Homo Sapiens
cccttcccagggcctggtagtagccgcacccagcagccttcgctaacaccctctgtctactattaaggcctttgccactcagtcgggctcccaggacctgaaggccctcaataccagctaccagtcccagctcatcaaacccagccgcatgcgcaagtaccccaaccggcccagcaagacgcccccccacgaacgcccttacgcttgcccagtggagtcctgtgatcgccgcttctcccgctccgacgagctcacccgccacatccgcatccacacaggccagaagcccttccagtgccgcatctgcatgcgcaacttcagccgcagcgaccacctcaccacccacatccgcacccacacaggcgaaaagcccttcgcctgcgacatctgtggaagaaagtttg

SEQ ID NO: 175252 - DNA, 830 bp, Homo Sapiens
  misc_feature (758)..(758): n is a, c, g, or t
gggagtccgacgccgactgaggcacgagcgggtgacgctgggcctgcagcgcggagcagaaagcagaacccgcagagtcctccctgctgctgtgtggacgacacgtgggcacaggcagaagtgggccctgtgaccagctgcactggtttcgtggaaggaagctccaggactggcgggatgagctcagcctgtatcaaagtcaccaaatactttctcttcctcttcaacttgatcttctttatcctgggcgcagtgatcctgggcttcggggtgtggatcctggccgacaagagcagtttcatctctgtcctgcaaacctcctccagctcgcttaggatgggggcctatgtcttcatcggcgtgggggcagtcactatgctcatgggcttcctgggctgcatcggcgccgtcaacgaggtccgctgcctgctggggctgtactttgctttcctgctcctgatcctcattgcccaggtgacggccggggccctcttctacttcaacatgggcaagctgaagcaggagatgggcggcatcgtgactgagctcattcgagactacaacagcagtcgcgaggacagcctgcaggatgcctgggactacgtgcaggctcaggtgaagtgctgcggctgggtcagcttctacaactggacagacaacgctgagctcatgaatcgccttgaggtcacctacccctgttccctgcgaagtcaagggggaagaggacaaccgccctttctgtgaggaaggcttctggnaggcccccgggcaacaggaccccgagtgccaaccccccctgagggactggcctggggtaccaaggagggctg

SEQ ID NO: 175253 - DNA, 792 bp, Homo Sapiens
gggggcggcggcaccgcgaagggaggagtggcaacatggcgtcttcgggagctggtgaccctctggattctaagcgtggagaggccccgttcgctcagcgtatcgacccgactcgggagaagctgacacccgagcaactgcattccatgcggcaggcggagcttgcccagtggcagaaggtcctaccacggcggcgaacccggaacatcgtgaccggcctaggcatcggggccctggtgttggctatttatggttacaccttctactcgatttcccaggagcgtttcctagatgagctagaagacgaggccaaagctgcccgagcccgagctctggcaagggcgtcagggtcctaatctggatgggtattgatcatgtccaacctgctggagccccttcacatggtggatgatgccccatgaccctgtagaaattgaatcctgctcacaacattgttggccttcttactaaccttggaccgtgattgagcccaagaaaccagggacttacgcatttggccaatgtcaaaagaacagaactttgcccactgcacacttgctgtgtacaatgactgagccctttcttgtagtttgtttccttgtttgagaggtgtgcatgcgaccgtggcttttcccaaagtttctgactttgtggtttacccccttcaccttccagggacgcagttgttacgaggttagacgtggcagctctgtgcagtgtttgagcctacagtgggatacatagggtcaaattgagaataataaactgagtcattcccctggagtcaagtga

SEQ ID NO: 175254 - DNA, 203 bp, Homo Sapiens
  misc_feature (20)..(20): n is a, c, g, or t
  misc_feature (90)..(90): n is a, c, g, or t
  misc_feature (100)..(100): n is a, c, g, or t
  misc_feature (168)..(168): n is a, c, g, or t
gaggcaagctctggagcccncctcagggcatccaggagtctctaaacaaccctacccctggggacctagaggaaattgtcaaaatagaancctgagacancccagactgacaaagaggtagcaatttggggacaaagagaagcacagaaagaggcccacagagaagcnggagtggcatcgagagacacaccacggaactcagc

SEQ ID NO: 175255 - DNA, 946 bp, Homo Sapiens
  misc_feature (707)..(707): n is a, c, g, or t
  misc_feature (767)..(767): n is a, c, g, or t
ccccccctttcagtttgcgctaccccccccattgcccgcagatgagactctcccttcgtccgctgggtccctgagcccttgccgactgcattcctttccccaatgccgcagccccagccccttccggggagtcactgcacacagttccaaagtagtccctgctggtgtcctgccccagccctgtccccactgccccctccatctgttccccagcaccgctgacctcattctcccacctgtccggtgagacctttctccccactgcctccctccaccattcaaggctcctttctttcagacaaggagggggcgtcggtcagaggaggctggtcagatgaggagaaggctggtctgacactgagatggggacagcttcaaagagggggcacggagatgaaggggaacggagaactgaggcaggctgggggagacatggtgaggagaaggggcacaggcgggagccccctcacctgccacatccctcgccctgtatcctgcttgcccttagtttcccctgccctgcctgggactgggaaattcttggcacattttgggagtctttccgctcaaatccacctacccagtttggcacggatgagcaatgctctgaggcctggggaaaaggctgtcctcggaccacaatgagggctttggtcaaacatgcgtggcctctgcggggggcacgttgccacaccccctccccccanactcgggagcaagggccgggcctccctcggggtttgttcaccctcctcagctcctgccanctagaagtctgtgctcacctgccatgtgaggaggaactgggtgctgggcctgaggcctgggggaggcagggaagtgctgggaagagaggggccgtctgcctggggaaacacacatccacatgcaagaacctgtttccaactcagagaaatgcgtcctggccacgggaaaataagcttcc

SEQ ID NO: 175256 - DNA, 225 bp, Homo Sapiens
  misc_feature (171)..(171): n is a, c, g, or t
cctgaagaatctggagtgtatcctctgtggcttttgatggaaaaggtgatgtcaccagagttgtgggtcaagaactgtgtaagcagtgcacagaacatgttagaaataggagtaatggaggtgaacaaatcaattaaaatcattgcaacagtgaccagctgaaaagcaacnaaatgtctgaaccagcacgctgtctgacagcaagaatggggaggggaccccgga

SEQ ID NO: 175257 - DNA, 520 bp, Homo Sapiens
gcaagagctcacgaggcctacaagatctatggccatggagatctcagacaaccctggggagcatgaactgggggagcccgagttccgctacactgctgggatccatggcaacgaggtgctgggccgagagctgttgctgctgctcatgcagtacctgtgccgagagtaccgcgatgggaacccacgtgtgcgcagcctggtgcaggacacacgcatccacctggtgccctcactgaaccctgatggctacgaggtggcagcgcagatgggctcagagtttgggaactgggcgctgggactgtggactgaggagggctttgacatctttgaagatttcccggatctcaactctgtgctctgcggagctgaggagaggaaatgggtcccctaccgggtccccaacaataacttgcccatccctgaacgctacctttcgccagatgccacggtatccacggaggtccgggccatcattgcctggatggagaagaaccccttcgtgctgggagcggcacatgcg

SEQ ID NO: 175258 - DNA, 679 bp, Homo Sapiens
  misc_feature (21)..(21): n is a, c, g, or t
  misc_feature (39)..(39): n is a, c, g, or t
  misc_feature (44)..(44): n is a, c, g, or t
  misc_feature (119)..(119): n is a, c, g, or t
  misc_feature (543)..(543): n is a, c, g, or t
  misc_feature (580)..(580): n is a, c, g, or t
  misc_feature (595)..(595): n is a, c, g, or t
  misc_feature (603)..(603): n is a, c, g, or t
  misc_feature (610)..(610): n is a, c, g, or t
  misc_feature (617)..(617): n is a, c, g, or t
  misc_feature (641)..(641): n is a, c, g, or t
  misc_feature (647)..(647): n is a, c, g, or t
  misc_feature (657)..(657): n is a, c, g, or t
gagagaagacatagttaaggnattggtcttcatgtatcnatacngactgttgagcatctggtaagctttcatctcccatgaactcatttccgccataaatgaaatgggtaaataatgcncccatttgtagaagtgggccactcatgactgaggtagcttccagataggccagagtagagtgtagagtgtgccccgtgacatccctccatcttctcctccattatcatctagcagggtcagactgggaaacctggttggccacgcacaccatgaccgaggagccaactgggacttctggctgtttgacatcctcatgttcccgttggtcttccggagaatagtgctaccctcacatcccctggagcacagccttcctgaaatgccctcaccccatgcctttgccattgtgtgctctcagatttcttccactgtttgacaccctctttagagggctgctcttttttttccagagataatcctaggccatcctctccactcccacgggctgggggacaatgggccacttactaactgtgcaatttngccaattgggaaaactgggatgggtttctgttaaggnatttttgccaacttnctttcttnaatgggnaatttgnttgttgggaaaaaggcttgggttnggcttnggttgggggnttgttgtgaattttttccaggg

SEQ ID NO: 175259 - DNA, 229 bp, Homo Sapiens
cattggataagcggatgagggctgattacgaaaaattaatacgtcattgaatttagtattactaaactcatagcatttgtccagatttgtaaacactattgattctaatgtgaaagatggaaaagcagtcccagaattggcttagcacagagactctaaatgatagtaaaacaacatattcaactttaattcctgtcttattgttaatgggaagttagttatggttcta

SEQ ID NO: 175260 - DNA, 386 bp, Homo Sapiens
  misc_feature (375)..(375): n is a, c, g, or t
aaaatttgagagtaaattggtcttgaatggaatggattgtcttgactcacacattgcggaagaggcccgccctgaagaaaggtgttgctgtggtgggatcttcccacgagggtccttgcctgttctcctaggggatggttgctgggtgccctgggctactggggagagcgtacggggctggagaagatggccattcctgggctgtttcctagggaatgagttgtacatctcatgggctggattttgtaaaatcagtttttaaaataccgcatatatctgttttcttactggaacacctttttcttggtctgttgtgcacagcccaggtttggggggtactggtcattgactgtttcagaagccgctgtgtttggngaactgccctg

SEQ ID NO: 175261 - DNA, 608 bp, Homo Sapiens
  misc_feature (506)..(506): n is a, c, g, or t
  misc_feature (566)..(567): n is a, c, g, or t
  misc_feature (574)..(574): n is a, c, g, or t
  misc_feature (596)..(596): n is a, c, g, or t
aacgcatgtgccgctccagaagctcatggaaaagaagaaccaagagctggaagttgtgaggcaacagcgggagcgtctgcaggaggagctaagccaggcagagagcaccattgatgagctcaaggagcaggtggatgctgctctgggtgctgaggagatggtggagatgctgacagatcggaacctgaatctggaagagaaagtgcgcgagttgagggagactgtgggagacttggaagcgatgaatgagatgaacgatgagctgcaggagaatgcacgtgagacagaactggagctgcgggagcagctggacatggcaggcgcgcgggttcgtgaggcccagaagcgtgtggaggcagcccaagagacggttgcagactaccagcagaccatcaagaagtaccgccagctgaccgcccatctacaggatgtgaatcgggaactgacaaaccagcaggaagcatctgtggagaggcaacagcaaccacctccagaaacctttgaanttcaaaatcaagtttgctgaaactaaggcccatgccaaggcaattaaatggaattaggcnntgggggnggccagccaattgaaaattttnctttttgaaaac

SEQ ID NO: 175262 - DNA, 893 bp, Homo Sapiens
  misc_feature (805)..(805): n is a, c, g, or t
ctacctcaacaaggagatcgaggaggcgccggacatccgcaagatcgtgccggagctcaagagcaaggtgctggcagacgtggccataattttcagtgggctacacccgacaaacttcccgatagagaagacgcgggagcattaccacgccacggcgctgggagcgaagatcctcactcggctggtgctgagccccgacgcccctgacagggccacgcacctgatcgccgcgcgagctggcacagagaaggtgctgcaggcacaggagtgcggacacctgcacgtggtcaaccctgactggctgtggagctgcctggagcgctgggacaaggtggaggagcagctcttcccgctcagggacgatcacaccaaggcacagagggagaacagccctgcggcctttcccgaccgggagggtgtgccccccaccgccttgttccacccgatgccggttcttcccaaggcccagcctggccccgaggttcggatctacgactccaacacggggaagctcatcaggacgggcgcccgggggcccccagcaccctccagctccctacccatccgccaggagccctcttccttcaggtggacgacatccttggagaaggcagcgacgacagcgacagcgagaagaggaggcctgaggagcaggaggaggagccccagccccggaagccagggacccgcagggagcggacgctcggggcacctgcgtccagcgagaggagcgcggcagggggcccgggggcccagaagccacaagaggaaactgaatgaagaggacgccgccagcgagtcccgncagggagtccagcaacgaaggacgagggcagcagctcccaaggccgaacagatggccaaaggcgctggagggcggacctccacgacct

SEQ ID NO: 175263 - DNA, 381 bp, Homo Sapiens
  misc_feature (20)..(20): n is a, c, g, or t
  misc_feature (280)..(280): n is a, c, g, or t
  misc_feature (305)..(305): n is a, c, g, or t
  misc_feature (360)..(360): n is a, c, g, or t
cgctcttgtgaatcgaacanggcagacctcgcaggcaaaaaggcttctgctgtgtgggtctcatggggcgaggcagtttccctgcccaatggatgataatgtggcagacagggcactcctgaggcatctgggagcggcgtttgcgcaccagcttgtcttggctgtccaggcctggtgccaggttgtcctgctgcagggagcttaccgtaggccatcaggtcaggatcgatggcatcctcatctgagcccagctcctctggggacagcgggggcccgccanccctgcgccagccataggctggggngatataccagctcctcttcttcttcctcaccctcatagggttcgtagctctgggngaccctcatggaggggacggc

SEQ ID NO: 175264 - DNA, 1166 bp, Homo Sapiens
ggcatacttagaatgtttctagttaaggtaataaattaggcaacccaagtgtgactccactcaagtgtccttttctgtaggcaggaagggcccacaacatggcttaaaatgtagtccatggttctggcccacagtacagtgtgtatctataccaggtcacctgtgttcaatctgggagccttcctggccagtctgagtggcagccagaagggagctcatagtgtctaggagtctcaggcaaggtaggtcagggtactgtgggcaggggggatgtgtgtgataggagagggtaccctaaaccccataccttccctccctgacctgaaaagctgatctcaacagggattcacacagaattaggctgtgtttttgcattagctggtaggtgactttctcaaaattcttaaattcagaaagtatttagtaaacttgaggaaggtatgaaatctggaggaggcatccaggacccaggggtttgatagctttacaggtaggatcataccacaccaaaagagcagtggacaataagactatatgagctatatgaagcttttaggaatcatttaagacagacagagccctaaacaacccattcatgacttaagttgttggctcaatgtatgctgggggacaaagaaaaactaacaagccgacctgcctttatgataaattctagtgtgcttacaagggatgacttcctgaggtgtgatctgtccaccttgaagaactccacaactgaagaaggggagctgtgagaacgtggattgttctacaacttgcacagggtaacagaggaagtggctgaggcctagagtcacgttttccagttcccttcgcaaactatatttcttggaacgcgaaaggaagctttacctatttcatagaagacctggaatccataacctcagaaggcaatattattgatagaaaatgtggaaggatcaggaagttcttagattcttggatgacagatgcatgttgatgccctatggagatgtccttgtgttttgaggtcactgaggtaggaagacctgtctactcttggtttcaccactagaacagtcttgggctggatgggttatagagctgagcggctgtgatggttctgtttttacattaacaaaaacaattaaaaacaccaaaaacaacatttggattgcttcagg

SEQ ID NO: 175265 - DNA, 846 bp, Homo Sapiens
  misc_feature (11)..(11): n is a, c, g, or t
  misc_feature (619)..(619): n is a, c, g, or t
acggatagcgnatctgcctgggctctgggtgagtaattggaccacagaggtggactgttgaaatatttgctgtggagaagccacatctctcacagtgttggggcagtgtctgtaaggaggtagcccaggtccaggctacagctctccatgcatttgggattgttggctttctgctaagatagcagggccctctcttttgctgaatgctgtactgaaacaagtggccttaattctcttcaagagatctctaccgcctcttttatctaccacacattgaggaagaacggggtcgtgtgtctgcctggcaggcgggcacccactctggctctgtgaagaatcaatggacttgtggtcaagtctcacttctcgcctcaagtggctgcataagtcccaggccaatcacttgaaccctctgactcttgtttccccacctggaatcttgtaggcccatctcttggtgttgctgtgaagaggtacatagagctcttggcagcatggccacagtcggtaagatgggtaatgctgtgcttctcgaatcttctagcactagtgttgctgaagtggctgcatcctgctcgcgggtgtgaggaggagagtttctttagaggcatagacctancaaaatgtcccacttccctggaggtcaaagaggcggcaggaggagagcagaagttgtgagtcataaaggcactgctttcaagaggcagaattgccatcctcagggtgggggtggggttacggcaggaactacccattttgcaggcttgtaggtgaccacggaggtaccttgccatggtcaccctccatgctggctctcacccacatcacagcagatccgctatccgt

SEQ ID NO: 175266 - DNA, 1075 bp, Homo Sapiens
  misc_feature (998)..(998): n is a, c, g, or t
gagcgaggcctgggtggcgaattcggcacgaggctttcctcacccttccccccgccaccgtgggttccagacttgggataagtaaacagcgggtggagcgaggcctacggacccaggccaggtgggagtctgcactcttcaaggggcctgggctgctgctcacgggtattaaagaactccgcgttgttcatggctgaggcgatgcattaggaagatcctggacctagagaacaagtcccccgaacgctgagttggaggcgggacttcgggtgcgcgttggcgggagcatgctggggctctgggggcagcggctccccgcggcgtgggtcctgcttctgttgcctttcctgccgctgctgctgcttgcagcccccgcgccccaccgcgcgtcctacaagccggtcatcgtggtgcatgggctcttcgacagctcgtacagcttccgccacctgctggaatacatcaatgagacacaccccgggactgtggtgacagtgctcgatctcttcgatgggagagagagcttgcgacccctgtgggaacaggtgcaagggttccgagaggctgtggtccccatcatggcaaaggcccctcaaggggtgcatctcatctgctactcgcaggggggccttgtgtgccgggctctgctttctgtcatggatgatcacaacgtggattctttcatctccctctcctctccacagatgggacagtatggagacacggactacttgaaggggctgttccccacctccatgcgggtctaacctctatcggatctgctatagcccctggggccaggaaattctccatctgcaactactggcatgatcccccaccacgatgacttgtacctcaatgccagcagcttcctggccctgatcaatggggaaagagaccatcccaatgccacagtatgggcgggaagaactttctgcgtgtgggccacctgggtgctgattgggggccctgaataatggtggttattactccctggncagtcccaccttccttggtttctatggatgccaatgagaccctccctggagatggaaggacccactgggtttatctg

SEQ ID NO: 175267 - DNA, 231 bp, Homo Sapiens
acggatagcggatctgcatcatccagttggttggcatccctggcctgggggacagcggttggattgcagccctgtctacactggataatcattccctggccatatcagtcatcatgatggtggtggctggcttcttcaccctctgtgccgtgctctcagtcttcctcctgcagcgggtgcactccctctaccgacggacaggggccagcttccagcagatccgctatccgt

SEQ ID NO: 175268 - DNA, 484 bp, Homo Sapiens
acggatagcggatctgcatcaaaaacttggcaaagcaattgaattggaagcaataaaaccgacttatcaagtcctaaatgtacaagagaagaagagaaaaccacttgacaatgaagttgaaaagacagcaaatcttgtcattagcaaccggaatcagcaaattaaggccaagaagaaattaatggttagtaccaagaaacatgaagcacttttccagcttgtagaaagctccaagcaatctatgactgagaaggagaagcggaagctcctcaataaactgacaaaatcaactgaaaagttggaaaaggaagatgaaaattactaccaaaaaaacatggcgggttattctaccagactgaaatgggaaaacacactagagaactgctaccagagcattctggagctggagaaggaaagaattcaacttttatgcaataacttaaaccagtacagccaacatatttctctttttggccaaaccctg

SEQ ID NO: 175269 - DNA, 450 bp, Homo Sapiens
  misc_feature (415)..(415): n is a, c, g, or t
acggatagccgatctgccagggaatccttgctgatccagaatgccacacctaggtcttctccattcttggagaaggaaagttctacttcttcagtctcaaaattagcaaagcagccaataacatcattctccccaaaagtctggccaaattcctcaaattgtccattttctgccttgagtcctcgtccatcgaaaccgtaagagaattcatcttcaccaagctgtggacgggaaaaatcaacagaccacccaactcgaaggagagagacctctgtgcagccttctttcattgggagattctgggttacctttgcctcaaagcagacttttccctttgtcactccgtaagtactccttgccccagaccaaagggtggggaacttctctgagaaaagtggctgccctccatagcggnctttgctcacttgaaaatgcagatccgctatccgt

SEQ ID NO: 175270 - DNA, 1166 bp, Homo Sapiens
ggggactttgactatgtctgctcccgagacgagccctcagtggctgccatggtctaccctttcactggggaccacaagcagaagttttactgggggcacaaagagatcctgatccctgtcttcaagaacatggctgatgccatgaggaagcacccggaggtagatgtgctcatcaactttgcctctctccgctctgcctatgacagcaccatggagaccatgaactatgcccagatccggaccatcgccatcatagctgaaggcatccctgaggccctcacgagaaagctgatcaagaaggcggaccagaagggagtgaccatcatcggacctgccactgttggaggcatcaagcctgggtgctttaagattggcaacacaggtgggatgctggacaacatcctggcctccaaactgtaccgcccaggcagcgtggcctatgtctcacgttccggaggcatgtccaacgagctcaacaatatcatctctcggaccacggatggcgtctatgagggcgtggccattggtggggacaggtacccgggctccacattcatggatcatgtgttacgctatcaggacactccaggagtcaaaatgattgtggttcttggagagattgggggcactgaggaatataagatttgccggggcatcaaggagggccgcctcactaagcccatcgtctgctggtgcatcgggacgtgtgccaccatgttctcctctgaggtccagttttggccatgctcgagcttgtgccaacccaggcttctgaaactgcagtagccaagaaccaggctttgaaggaaagcaggagtgtttgtgccccggagcttttgatgagcttgggagagatcatccagtctggataccaagatctcgtgggcaaatggagtcattgtaccttgcccaggaggtgccgccccccaaccggggcccatggaactactccctggggccaaggaactttgggtttgattccgccaaccctgccctcgttcatgaaccagcaatctgccaatgaacgaggaacaggaagctccatcttacggcgggcatggcccatcaccttaaggtctttcaagggaaaaagatgggccattggcgggggtcccccgcgcccccctctgggttccaaaaaaaggggggcctaaagaacttctgtg

SEQ ID NO: 175271 - DNA, 681 bp, Homo Sapiens
gggagaaatgtcgaggaatcatcggaggcaagagtcagcgtgtgaatggactcaccagcagcaaaaacagccagcccatggccacacacaaaaaatctggacggtcaaaagagaagagaaagtctaagcacaagctgaagaaaaggagaggccatctctctgaggaacccagtgaaaatatcaacaccccaactagattgaccccccaattacagatgaagccaatgtccaatcgtgaaaggaactttgtgttaaagcatcatgtattcttggtccgaaactgggagaagattcgtcaaaaacaggaggaagtaaagcacaccagtgataatattcactcagcatcattatatacccgttggaatgggatctgccgagatgatgggaatatcaagtctgatgtcttcatgacccagttctctgccctgcagacagctcgatctgttcgaacaagacggctggcagctgcagaggaaaatattgaagtggctcgggcagcccgcctagcccagatcttcaaagaaatttgtgatggtatcatctcttataaagattcttcccggcaagcactggcagctccacttttgaaccttcccccaaagaaaaagaatgctgattattatgagaagatctctgatcccctagatcttatcaccatagagaagcagatccgctatccgt

SEQ ID NO: 175272 - DNA, 394 bp, Homo Sapiens
tgatggcgctgatgacacccttgaggcaggacttgccgttgcaggcgccacatcgtttgtccccttcgccggttgggccgcagcggcccttgtcctcgtaggcgtcgccatcatgggagggggcctctacctccatgccaaagcacatgaacaccttcacagcccaattgagttatgggcagcacgtagtatcttcggcaatcgcaataatgatggagagataccgtacaggtattatcttggattatcagaagaaactgcctgtgttcgcctcgctgcaaacggaagtcaaagcttggcacaatgagcattacgggccaaaactactatccgccgagcaagccctatcactcggcgtaactcatgtcgacactaggtgtcatcagcgccatca

SEQ ID NO: 175273 - DNA, 777 bp, Homo Sapiens
  misc_feature (383)..(391): n is a, c, g, or t
ggacgcgtgggtcgacccacgcgtcgaaatcaaaaagggtttgtaactttttactgcccaactcttagatccttcattgaactgcctaaaaatgtcttgttgttttatgagccctcactagaaggctgagtttgacatgttgatattacgtagctatagtttgcagtttctgggaagcaattgaaacactattaaccctgtgtatagtgtcaacagttaaagcagacgaaacgaagtaagctatatttctggactgaacaaagctctgctgtttagagcatttaagtttgtttagtggatccatactcaacaggaaagcataagcaaattttcctttacaatgcaaacatgccactggtggcagcacatggtaatttgtggannnnnnnnncatactcaagtaatggaggctagaaatgaagagaaccttctttttctcttgactttgacagcacatgctaaaaatctctgccaagaagtatgctaaagcttttcatttggttcctgttaaagttgttctcactgaccagcatggactcaggcaactggtaatgataagctatgagctccagtgcttttgccaaaattctcttgacagcacacctcctctctttccatgttatacaaaggacttctggcaaaatgattgagtccttcaagtttaaactaacacttggcaacagcaaattacacgttttaaagatgtacagaaaggggttaccgcttgctaaggacttcagacaccatgtccgaaacctgttcctctcaagtgccctt

SEQ ID NO: 175274 - DNA, 546 bp, Homo Sapiens
accctaaaccattcaaatatccacatgaagcaatgttacaacaatattctatatgaaaatgtgcaggtaacaaaggtgcaattacaagcaagttaagcagcagagtataaggtgctttaatttaatagttaatgttgccatcaacaaacatttaaatgctcaatttacttcactgaatacagacacaacaaatatgaaaatctaaattcatacacatgctacttaatatgaaagtgctttctcttttttaaaaaaatacaccaaatggacactttttacatagatcaaatgtgctcttacaatgcaaaattaaccttcattttcaggttatacattttaaaactgtagctatcaacaccaatctaggaactctaatgctaagagtgctaaaaactatttcatttcttgtaaggaggactctaatacaatatccaatgtaaagaatacatctatatataatcttaacatgttttctgtaaagataaaaaatgttttctttccccttggtgatctttgttcatcctgggtggatatttgaatggttta

SEQ ID NO: 175275 - DNA, 449 bp, Homo Sapiens
  misc_feature (47)..(47): n is a, c, g, or t
  misc_feature (76)..(76): n is a, c, g, or t
  misc_feature (101)..(101): n is a, c, g, or t
ttgggggaattcggcggatcttggacccgaagtaacccgatgggcantggtgttcgggtgccctcctttccctgcnaggaatgctcggggtcaagctggtnttcaagagcgatgcctattacttgcactggggacggtcactgccttggaccaagtgtatggtcaagacacagacacccaaccggaaggagtgggtaaccccaaaggaattccgagaaatctcttacctcaagaaattgaaggttaaaaaccaggaccgtatattccccccagaaaccagcgcctccgtggcggccacgcctccgccctccacagcctcggctcctgctgctgtgaactcctctgcttcagcagataagccattatccaacatgaagatcctgactctcgggaagctgtcccggaacaaggatgaagtgaaggccatgatcttgactcgggggatcctg

SEQ ID NO: 175276 - DNA, 763 bp, Homo Sapiens
ggggcttaggtaccagttagcgtcaggggagctgggtcaggcggtcgccgggacaccccgtgtgtggcaggcggcgaagcgctctggagaatcccggacagccctgctccctgcagccaggtgtagtttcgggagccactggggccaaagtgagagtccagcggtcttccagcgcttgggccacggcggcggccctgggagcagaggtggagcgaccccattacgctaaagatgaaaggctggggttggctggccctgcttctgggggccctgctgggaaccgcctgggctcggaggagccaggatctccactgtggagcatgcagggctctggtggatgaactagaatgggaaattgcccaggtggaccccaagaagaccattcagatgggatctttccggatcaatccagatggcagccagtcagtggtggaggtaactgttactgttcccccaaacaaagtagctcactctggctttggatgaaattcgactgcttaaaaaggaccttggtttaatagaaatgaagaaaacagactcagaaaaaagatttgggctctgtctcatttggaaaaagctgcaaggcttattccccatgcactttgcttcctggcttgcaaaccttaatactttgtttctgctgtagaatttgttagcaaacagggagtcctgatcagcacccttctccacatccacatgactggtttttaatgtagcactgtggtatacatgcaaacatccgttcaaaatctgagtcggagct

SEQ ID NO: 175277 - DNA, 933 bp, Homo Sapiens
ggggcaccgcagcacgctggagtcccgcttacgtaccagttagcgtcacgggagctgggtcaggcggtcgccgggacaccccgtgtgtggcaggcggcgaagcgctctggagaatcccggacagccctgctccctgcagccaggtgtagtttcgggagccactggggccaaagtgagagtccagcggtcttccagcgcttgggccacggcggcggccctgggagcagaggtggagcgaccccattacgctaaagatgaaaggctggggttggctggccctgcttctgggggccctgctgggaaccgcctgggctcggaggagccaggatctccactgtggagcatgcagggctctggtggatgaactagaatgggaaattgcccaggtggaccccaagaagaccattcagatgggatctttccggatcaatccagatggcagccagtcagtggtggaggtgccttatgcccgctcagaggcccacctcacagagctgctggaggagatatgtgaccggatgaaggagtatggggaacagattgatccttccacccatcgcaagaactacgtacgtgtagtgggccggaatggagaatccagtgaactggacctacaaggcatccgaatcgactcagatattagcggcaccctcaagtttgcgtgtgagagcattgtggaggaatacgaggatgaactcattgaattcttttcccgagaggctgacaatgttaaagacaaactttgcagtaagcgaacagatctttgtgaccatgccctgcacatatcgcatgatgagctatgaaccactggagcagcccacactggcttgatggatcacccccaggaggggaaaatggtggcaatgccttttatatattatgtttttactgaaattaactgaaaaaatatgaaaccaaaagtaccacacaaac

SEQ ID NO: 175278 - DNA, 257 bp, Homo Sapiens
cattggataagcggatgagggaaagggctgctatacggttgacaacgaggtgcagccatcagggccggaggacaatgtggtcatcatctacctcagccgtgctgggaaccctgaggctgcagtcgcagaaggggtccctgggcagctgcccccaggcctgctcctgctgggccaaagcctcctcctcttcttcttcctcacctccttctagccccacccagggcttccctaactcctcctcatccgcttatccaatg

SEQ ID NO: 175279 - DNA, 441 bp, Homo Sapiens
  misc_feature (372)..(372): n is a, c, g, or t
gatgagaacagagccctggagaaaagagccttgcaagggccctgcaggagagagtccctgggaaaggaaaggaaggggcagaagagtggggtgatgctcttattggtaagtgggagtaaggggcaagcagcaggatcagctatggagacattagggatttgtaattaaataacaatttatgtcttagttatgaagtgcataacaatttatattgacctgagagtgcatataggcgttttagaaaatgctttcattagtcagttcccagggcttaactttagagcagtaacttacctctgccattgttcattacatttcttaagccttgccctctgtgcccagtacagtgctggggagcatcagggatgagtnggatggggggccttcccccgttaaggacttccttactgcggcttattgcaccaagcacacacccggggt

SEQ ID NO: 175280 - DNA, 924 bp, Homo Sapiens
gcatgttggagagcatgctcaatcgcatcctggctgtgcgcgagatttatgaggaactgggtcgtcctggggaggaagacctggactgagctcgtgtgccatccatatccatctttcacatcaatgtctgtcctgtggccatgtccctcagggtgacaggcccaggaaccaatgctactcattctgaagggccctgactgctcctttccgctcacccattccctgccttctctaggaaccctggcttttatcttcttccgtaccacttgacaaccatggggccctggtcttctgtactcaggggctggtctcccagtgatgggcaaaagccagcttgcccgttttctttatgcttcagagtaaacccctccttctgggtccagactctgggtggagtgttaatagctctggtgatcctgttggctttgggtttcctgacccatcccgcataggtagagcctcttgttcctaggcatgacctagggaaaaacccagctgccttctctgccctgtgcccactcccttctctactcttccccagcaccatgccaaaaggtcttatctgaaaggtaagaaataaacaatgaaagcgatgaggggaccatttacataaaacacagagcttagacactcttcccctcctatgaaataattggttgttggcaccatctcaccaccgcatatccctcaccccctcggcaagcaccaatccttggtgctgccgtttttaaaatcttccaaatgcctttttttcctcacaggcaaagaatgactaagtacggggagcagactcctgttgtgcaaactcctgtcccccttggtttctggggttgtctcccctggccatcttaaggttgccatgaaaccatgggtgtcaaccatggcttaacccccccttctggaaacctgcgctcccccttttaa

SEQ ID NO: 175281 - DNA, 975 bp, Homo Sapiens
  misc_feature (700)..(700): n is a, c, g, or t
gcccgagcggggtctcatcagtgacgcccagtccctctacgtggagctgctgtcagagacacctgccaatcccctgctgttaagccttcgatttgaagcctttgaggaggatcgctgcttcgcccccttcctggcacatggaaatgtcactaccacggaccctgagtatcgcccaggggcactggcaaccttctcgtgcctcccaggatatgccctggagccccctgggccccccaatgccatcgaatgtgtggatcccacagaaccccactggaacgacacagagccggcctgcaaagccatgtgtggaggggagctgtcggaaccagctggcgtggtcctctctcccgactggccccagagctatagcccgggccaagactgcgtgtggggcgtgcacgtccaggaagagaagcgcatcttgctccaagttgagatattgaatgtgcgggaaggggacatgctgacgctgttcgacggggacggtcccagcgcccgagtcttggcccagctgcggggacctcagccgcgccgccgccttctctcctctgggcccgacctcacactggagtcttcaagcaccgccccggccccccaaatccaggcctgggcccaggggcctccctatggccacttccaaaaaaggctccccaagggaatcgaaatcccttgccccccaaagctggccacccttcccggnagtggggggtcctggcacaaaacgggtaattccccaggccccggaccctgggtttcccgcgggggaccgcctggcgcccccccctctatccaacggcccgaacccctttggctccacaaaccccggctttaaggccctcccaaaacattcccacactttgtgcccagagaggaacaccttgccttccgatagaaagagacaagccttcgctgccccctgtccccggtgacgataaagacccctctctccgcgctcttgggagactagctccactg

SEQ ID NO: 175282 - DNA, 155 bp, Homo Sapiens
ggtcaaggcagaaggagaagctgttgaaatgagggccgtgaaatcagcttctgttggtttgcggttgtgtttggttttgtttgtttctgtataaaaaattcaatcgggcagctcccttttccacaagcctctttgtgactgtagaactattgtag

SEQ ID NO: 175283 - DNA, 738 bp, Homo Sapiens
ggggcgcaccgcagacggcgcggatcgcagggagccggtccgccgccggaacgggagcctgggtgtgcgtgtggagtccggactcgtgggagacgatcgcgatgaacacggtgctgtcgcgggcgaactcactgttcgccttctcgctgagcgtgatggcggcgctcaccttcggctgcttcatcaccaccgccttcaaagacaggagcgtcccggtgcggctgcacgtctcgcggatcatgctaaaaaatgtagaagatttcactggacctagagaaagaagtgatctgggatttatcacatttgatataactgctgatctagagaatatatttgattggaatgttaagcagttgtttctttatttatcagcagaatattcaacaaaaaataatgctctgaaccaagttgtcctatgggacaagattgttttgagaggtgataatccgaagctgctgctgaaagatatgaaaacaaaatattttttctttgacgatggaaatggtctcaagggaaacaggaatgtcactttgaccctgtcttggaacgtcgtaccaaatgctggaattctacctcttgtgacaggatcaggacacgtatctgtcccatttcccgatacctttgaaataaccgaagagttattaaatttattctggaatttggaaccaacctaattttttatacccttatgaaattgtatcctcggttaattctctttcccttacactctttctggta

SEQ ID NO: 175284 - DNA, 171 bp, Homo Sapiens
tcattctcctgctgtgggggtatgcccacctcttacccccttgacaccatagggctgctgtggctgggcctcaccagcactgtcttttgtgtgactcatggcatcctcgttcatccccaccgtgcctagcaggccttccttttcaccacctcggaatcgcctcagttgatg

SEQ ID NO: 175285 - DNA, 1431 bp, Homo Sapiens
  misc_feature (1288)..(1288): n is a, c, g, or t
  misc_feature (1303)..(1303): n is a, c, g, or t
gggaagatctgagttcatgtagctggtgttggcttagggtctgggaggaaggcttttgggaagatgtaaataagaacaaaatctgcagccacctgggaagcctggcctcagtgtggaagagaaggcagcaggattattacagaaccttgtgaagccaacgcgggcagccgccaggagctgcagaccgagaggatctcgtcctttcttgcggcccagggagaccaggcctttcattctgggctcgagaccaacaattcgaattccgaactccccctgcgtgtgggactcaaggttgcccagggctcacctctgatgggcgggcaggtgagcgcttccaacagcttctcgaggctgcactgcagaaatgccaacgaggactggatgtcggcactgtgtccccggctctgggatgtgcccctccaccacctctccatcccagggagccacgacacgatgacgtactgcctgaacaagaagtcccccatttcgcacgaggagtcccggctgctgcagctgctgaacaaggccttgccctgcatcacgcgccctgtcgtgctgaaatggtccgtcacccaggcactggacgtcacagagcagctggatgccggggtgcggtacctggacctgcggatagcccacatgctggagggctcggagaagaacctgcactttgtccatatggtgtacacaacggcgctggtggaggacacactcacggaaatctcggagtggctggagcggcatccacgcgaggtggtcatcctggcctgcagaaacttcgaggggctgagcgaggacctgcacgagtacctggtcgcctgtatcaagaacatcttcggggacatgctgtgtcctcgtggggaggtgccgacactgcggcagctgtggtcccggggccaacaggtcatcgtctcctatgaagacgagagctccttgcgccggcaccacgagctgtggccaggagtcccctactggtggggaaacagggtgaagaccgaggccctcatccgatacctggagaccatgaagagctgcggccgcccaggagggttgttcgtggccggcatcaacctcacggagaacctgcagtacgttctggcgcacccgtccgagtccctggagaagatgacgctgcccaaccttccgcggctgagcgcgtgggtccgagagcagtgcccggggccgggttcacggtgcaccaacatcatcgcgggggacttcatcggcgcagacggcttcgtcagtgacgtcatcgcgctcaatcaaaagctgctgtggtgctgacggngacccttctgaagtntcgggacgcgggcggctgcagtttccacccccgaatttccaagtattgtgactttgtttgggccaaatgttggtgatcataggaccgatgataatacgttttcattttctttaaaatagagatggggt

SEQ ID NO: 175286 - DNA, 152 bp, Homo Sapiens
cattggataagcggatgaggggcctgttgtgctccgcagcaaagacggcagagaacgagagcgagaaaaacgcttcagcttctttaagaagaacaagtagttgggggcaaggtcccaggccaactccctccctccgctgctggaaatgctga

SEQ ID NO: 175287 - DNA, 1089 bp, Homo Sapiens
tggtaccggtccggaattctcgggatatcgtcgacccacgcgtccggaaaaaagaaaaggtaaaattgagagactttgttagaggagctatttggaatgaaccaacatttcagattttccaaaatgtaagttaggaagtctccattgtctctgcattaacaaaatacactgttactatcttaatctcaagagtgtcattacagtgagaatctcatttaaaagcataccagtgaaattaatagcagtgcttatcaaagaacactgaaatctgtgagaatctttctaggagcattcttttcttcttttagttccaagttccagggtatttttcattcctagtaggtttatatgactcacagaatgtggacttttttcctgtttggagtatttttgtaatgtaagtatcggatagctgcaccacagcatgcataaattgcacattttgttttactttctttatagaatatttaatttcaaaaatataatttatgccaaaaaaagcatacctttcaattttgctacttggttgatttagcacaaaatgcaaagtcttggggcagagagggggagtgaaaaaaaattttataggtaattgttacaaaaatacctgtcagaaaccctaaagctgcattgtaaaacaaatggtgtaaactagttttgaaaagtggtaaggaattgtgaaaagaaatctcagacttaaatgctctctaaccacatgagtttcttctttttgatttagtaatacgctgtacatatttggaggtcctggtgtggtaggtcactgaagcagacattgaatctgatttatatgtatactgtacttgaaagaaaagtattatattttctgtagaatattcatgagtgggtataattcaatagaatttgtccccaaatgggttggtaccttgaattttgtgggaaaaccagtaggaaaggggatgaaatggaagagaataaagactgaaaatattaagggaatgtgaagagttaagttgtaaaagaaagaaaagtatatgtatgaaaaaagagggtatagatgcacaatagagataatgacggaggaatgataacatttattatgatatatgg

SEQ ID NO: 175288 - DNA, 271 bp, Homo Sapiens
caggggccgagggggtgcttggtgccaaactgaaattcagtttcttgtgtggggccttgcggttcagagctcttggcgagggtggagggaggagtgtcatttctatgtgtaatttctgagccattgtactgtctgggctgggggggacactgtccaagggagtggcccctatgagtttatattttaaccactgcttcaaatctcgatttcactttttttatttatccagttatatctacatatctgtcatctaaataaatggctttcaaac

SEQ ID NO: 175289 - DNA, 1049 bp, Homo Sapiens
  misc_feature (401)..(435): n is a, c, g, or t
  misc_feature (530)..(551): n is a, c, g, or t
  misc_feature (754)..(871): n is a, c, g, or t
  misc_feature (892)..(918): n is a, c, g, or t
acggatagcggatctgcccacacataggctactggaatagtttaacccagcaactttcctttttataaaacaacaaatggttcaactctgtctgcaaattaacagctgaacacctgcaactgcaaatgttttttgatccgacgtactgaaataggaagtcatgctcttcccaccctccacccaccagagtggaacccgctgcaaaatccccagccttaattcttgcttcaggacccagaccggtgtcttgctctagggcaacccagggcagaggggccaggtctgcccagcgtttaccactgctgtcaagccacagcccttggccaccatacgggccatcctcagtgaggcagccccccataggcttccgccaagctctggtcccgaagaggctgtgcgannnnnnnnnnnnnnnnnnnnnnnnnnnnnnnnnnntcctctgcctgctgcgtggaggcagccatgggaaggagcccaggggagctggcctgggggagcgaagcccatgttcgcttcctgacttaaagctnnnnnnnnnnnnnnnnnnnnnncttgttcccctgcagtatctgttctgtgaagtttgttaaatgtaaggaaagcttaaattcttgtatctttaaaagagaaaatcttatttaacccttttgtgttctagatttacttacacacatagcctagagctcagttttagttttaacattgtgaaaatattaaaagaatcttgtaactttattcttttttctcctgctgnnnnnnnnnnnnnnnnnnnnnnnnnnnnnnnnnnnnnnnnnnnnnnnnnnnnnnnnnnnnnnnnnnnnnnnnnnnnnnnnnnnnnnnnnnnnnnnnnnnnnnnnnnnnnnnnnnnnnntcctaagttcagaatgttttnnnnnnnnnnnnnnnnnnnnnnnnnnngttttttggggcccgccccccccacaaaaaaattttttacaactttttgttggggccggggccccccaagagaaaagaaaaaacgagcccatcctttttcccccaaaaaaccccgtggcctacataaaagg

SEQ ID NO: 175290 - DNA, 472 bp, Homo Sapiens
  misc_feature (118)..(119): n is a, c, g, or t
  misc_feature (122)..(122): n is a, c, g, or t
  misc_feature (417)..(417): n is a, c, g, or t
  misc_feature (427)..(427): n is a, c, g, or t
  misc_feature (438)..(438): n is a, c, g, or t
ggcggccatggcggcaccgcggcaaatccccagccacatagtgcgcctcaagcccagctgctctacagactcgtcgttcacccggacgccggtgcccaccgtgtctctcgcgtcccgnnctngcctgtctcgtcgtggcaggtcaccgagccgtcaagcaagaatctgtgggagcagatctgcaaggagtatgaagctgagcagcctccctttccagaaggatataaagtcaaacaggagcctgtgattacggttgcgccagtagaggaaatgctttttcatggcttcagtgcagagcactatttttccggtttcccattttcaccatgatcttcacgttacaccctgttcctcaagataaatcgggaaacaatcaacccaaaaacatcccacggccgccaatcccattttcgttcntgttgacagnagggggaggcngccttttactttcattctttttggagagctttgt

SEQ ID NO: 175291 - DNA, 390 bp, Homo Sapiens
  misc_feature (63)..(63): n is a, c, g, or t
  misc_feature (97)..(97): n is a, c, g, or t
  misc_feature (215)..(215): n is a, c, g, or t
atctttcccaacgcagggcccccaagcaccttaacacagtgcttgaacatctgtagttgctcnattaaacatcaactgaatggatacatgaaaaganaggaacaaagaggtgagaaggcaagagggacagaagctgaccccaggggccccatcacagacccctggagaaccagtgtgaccagcacatgcttccgtggggaggatgggcagggganaggggcactgcagaggaggctgggccaggggggaaccacacgtgttccagcacgtgcacctgcaggtcttccatgcacagctgtgcatgtggtgggcgcagagtgccctgtcttcacttggggcagggagggaaaaggccagtattaaagctagagcaagaggcagtaaggaaat

SEQ ID NO: 175292 - DNA, 1009 bp, Homo Sapiens
  misc_feature (538)..(818): n is a, c, g, or t
gtagatttgttatgaaaattgctttggggctctaataacctaccttttaagaatgagaaactgctgggcttaagggagttcagtatgaatcaagattgaaccattcaaatgtggctgtgatttctgcatatatcatagatgggatccttctgagaatactggaatagggaattaggacaccaagccaattcagctgtgaaccttattcttgtacttttctttcttgctggtaattttagtggagcaggttaagaaggctgctctgtgttaggataaactgtataccaataatgttgacaacctgtaatgagtgttgcattttacttcttgtatcttttccttcctaccttgatgccagtaatctataagggatctttatagtttgaatgtatttgaataacttcagtatactttagttctacttttttatttgactcacaaccattcttaggtctcaagtattcccatgtgttttaaaagcctgaagtcagtgagatgaaattcaacatcaagaatttgaagtaacttgtaaggaaannnnnnnnnnnnnnnnnnnnnnnnnnnnnnnnnnnnnnnnnnnnnnnnnnnnnnnnnnnnnnnnnnnnnnnnnnnnnnnnnnnnnnnnnnnnnnnnnnnnnnnnnnnnnnnnnnnnnnnnnnnnnnnnnnnnnnnnnnnnnnnnnnnnnnnnnnnnnnnnnnnnnnnnnnnnnnnnnnnnnnnnnnnnnnnnnnnnnnnnnnnnnnnnnnnnnnnnnnnnnnnnnnnnnnnnnnnnnnnnnnnnnnnnnnnnnnnnnnnnnnnnnnnnnnnnnnnnnnnnnaaaagaaaaagaaaacattacataatttggctagagcataataatttgattttcttggttttggaaaatttgagttgcaataaaaggatatttcagtgtgcgatttcaattttcccgtagcaaatgtatatattagaacaaactgttcaaacatagatgtattgaatacccttaaaaatacaagaaagtgg

SEQ ID NO: 175293 - DNA, 358 bp, Homo Sapiens
tataattggcctctttggaaagagcctcatggcctccttactctgaggcaggacagtggggctaactgtagaccaggcgagggcacgggctgctggggtggccctgcttccccagtgtacatattgtatctgtgtaacattttgtatattcccaggggtagggccgccccctgtatcatacctagcagaggttggagctggcacatggggaggaggttctaataattatttggggctgggaaacttatttattgatagcataggacagaagaaggaggcggggatggggtcgtggcgccctggtgatgcgactcctgtttattttgctttttatttcggaataaatggatttagccat

SEQ ID NO: 175294 - DNA, 402 bp, Homo Sapiens
  misc_feature (23)..(23): n is a, c, g, or t
  misc_feature (36)..(36): n is a, c, g, or t
  misc_feature (72)..(72): n is a, c, g, or t
tagcccctcattccccctcctgnggtacagtggggncaaaattatttgtatttaaggcaaccatttatgggnaaacaaccccggctccccgaaaacggagccccccaagtaaagcacaaccctgaaagattatgaactatgaattgtctctagtagagataaatttctgcaaacatatctcagtcttccctctgtttctctggtgattaagaagttcctttttggtaaggaaaaggatttttaaccatagagttaggcatcatggaaattcaaaccagatttcttaatacctggtcttcctcaaagagaaataataacagtaatagtggtgctgggaacaatatggcagattattgaatgaaattgattaacttgaataaaatgctgtgaattttctctaat

SEQ ID NO: 175295 - DNA, 174 bp, Homo Sapiens
ctcggtaccccgtttcttcattgccagactacaagccctggtgaagtcagggtgtgggagtggtggcattgagaagactacctaaaagagacaaagactgcagtaaacaaagctcctctttaaagttggaaggggcctcaggttccttcttggactggaatgaaaagaacgggg

SEQ ID NO: 175296 - DNA, 563 bp, Homo Sapiens
cacattcacataacttttattatagtatgttatcattgttctattacattattattaatctcttgctatgcttaatttatacattatactttatcataggtatatatatatggaaaaaacagtgtataaaggtttggtactgtttgaggtttcaggagttcactgggggccttggaatgtatctcccgaagataagggggaactactgtaagcaaaatcgaaagctatacaacaatcagaaatgggaagagagcaaatccaagtataagtgaagacattcctctgaattcccagcattcatcgagcatcaaaaacgaccaatcttttagtccttttcttgtacattattctgtatccacattctctgcatctgattggatccctagattttatttcattttctgtgtgacactctccacagatatatatcattggttgctgctttggaggttgaacgtccttctgggtgtccattgttagcccctacacagcacggaaaaactcactccgcgtttccaaatacaacccggctagtccaggtgtcgagaccaacttccggcccc

SEQ ID NO: 175297 - DNA, 408 bp, Homo Sapiens; identical to SEQ ID NO: 15254

SEQ ID NO: 175298 - DNA, 840 bp, Homo Sapiens
  misc_feature (647)..(655): n is a, c, g, or t
tttataacaaactagtggcggcttgtgccctcacagtaattgctgtaaaaaggtcaaaatcgctacatatttgtcaaaagcagtcgtaagaaagaggtcccaatcccccactctttccgccctaatggaggtctccagtttcggtaaaagttttcatttgatctgaatagtattaaaataaaatacctggatgaggaagatgaagaggtgctggaagcccaggaagcacacatcaaggctcccttgccagcagggtgctgccaataaaaggtagtcacgtggaatttggaatgtggaaaggaggtagaagccatcctttcctcccctgtagcagcaggcgtgcaggctctggtggccagctggactccatactcccccatcagtcaccagcctggggaccgcgggggctgcaaggacctcagcagcggtgtcccaagtttcctgacttcttccaccctctggaaatcacctgggtttgctgccgataatggcctccacatccccctgtgttccctacaaagagacgcccccggttccccctttaggactggacacccccctggctcttaccctttggcccctttcacctgggccccccgacacaaggacctcctaaacccccttggaaattcttttgcatggcaagnnnnnnnnnttttcttttcatcggggcgtaccttttggtgggtcttcctttaccccgggggaatgcgctcttcaaacatagcgttccctttgggttggcaacctctaagtgttttgagggcccaggtcccgaatcctatgttggcgggcgaaactatcgcgtgggcctttttattctttctccccgggacaata

SEQ ID NO: 175299 - DNA, 804 bp, Homo Sapiens
  misc_feature (744)..(744): n is a, c, g, or t
gggagctgaactgagctgaaatcctaaaggccgcggagtcggcggtgttgtaggtagcggtaccttgagtggcaacagaattcgattaaattacaatgggaaacatttttgaaaagctctttaaaagtctacttgggaaaaaaaagatgcggattcttatattgagtttggatacagctggaaaaaccaccatcttgtataaattgaagctgggggagactgtgcctgccgtccctacagtaggtttctgtgtggagacagtagaatataaaaataacaccttcgctgtctgggatgttggcagccacttcaaaatcagacctctgtggcagcattttttccagaacacaaaaggtgccagaagcccaggaagcacacatcaaggctcacttgccagcggggtgctgccaataaaatgtagtcacgtggaatttggaatgtggaaaggaggtagaagtcatcctttcctcccccatagcagcaggtgtgcaggctctggtggtcagctggactccatactcccccaccagtcaccagcctggggaccgtggggctgcaaggacctcagcagcggtctcccaagtttcctgacttcttccatcctctggaaatcaactgtggtaaagtagcctgaaagccagtggtgcaaccccatccccacaaccttcaccaacctctagcacctccagtgattagcactaattgcctatatacaaccccttttttgtttggaatatctagaanaaatttctgttttccctatctgggggtaatggtacctttaggagaaaatttttatttggg

SEQ ID NO: 175300 - DNA, 200 bp, Homo Sapiens
catgttgcaaaggtgatgagattgattgtgatcatttgacttgtcccatttcctgctctgactactttctttaataaatagaagctgggaaaataataaacagagctgtggaacatatctttgggcatagagtgttggaaaaggaccttcttgagagtatatttctggcaataagaagaaacggggacagagctggttgg

SEQ ID NO: 175301 - DNA, 730 bp, Homo Sapiens
  misc_feature (28)..(28): n is a, c, g, or t
acaccacatcctttggtaacaatccgtnggccatttttccctggaaatatttaaaatacaggggacacaatggtttcccaaaatgacataatctaccatccttcttagataatactaaaaaagaaagattaccttacataggaaacaacttaaagccctttttaaaaacaggaggaaaatgcttgtcaaaggacctaacattttgctctcatttgtttctcacaattataatgccacacaattaatatgctgtcaactcttgacagtgtggaagttacttcactcacaaaccacctatcactgagtctttctcttatctgcagccagaccatcaacttaacttgtaaaactaccaactgttgctacacacaggcaaaggaattaaacttggtagctgatcatttgattacatctatcagtctactggagggcttcaacgcagagtaggtggaattcatggttcaaatcagagtattaatgggatctgtttgcacaccaatacctgatctccttggcacaaatacagagctgattcttaaagcatgtccccacaataaaagttttcttaatcattcgcacctgctccaataattctggcacttacacaaacttatcaaggagtatgtctttaatttctgggggaggttcctcgtgccggttctagacttttatttcaattggattttatttttcttcacatgaaacaaaatctggtagcacttgaaatgaa

SEQ ID NO: 175302 - DNA, 197 bp, Homo Sapiens
atggcaaataatcccccagccatggctggggaccgatagggttcagttttatgttttcttttggccttttccttgtggcttagaggaatacgtttccatagtaaactccagtcccaggcccctctggcaaaaccatcttcatccccaccttgctgtggttcaatggaataatcattcccatctacggagcggcacat

SEQ ID NO: 175303 - DNA, 864 bp, Homo Sapiens
  misc_feature (32)..(32): n is a, c, g, or t
  misc_feature (64)..(64): n is a, c, g, or t
  misc_feature (96)..(96): n is a, c, g, or t
ttccgggccttggttaagccgggtggtctcanacctgtatgtgtcctgctctatgtccagcagntcatacgccatggcctggaacgtgagctcatncagtagtgggacacgggtcaagttgccggtccattatcagcagctggaacgggttttctctgggcccctcgcccagactggaagtgtctgccttgaaggcgttcagttggcaggacggcgtgggccaactgggctgtgtcctctgggcccttgcggtagcggatggccgggtactcctgcagggtggcgcacagcgtggcaatctgctgggccagcacctcgagctgccgcgtgcgctcctctgcccggaaggggcagtagaggttgtaggtgctgtggggagcatcgagggagaacacctgggcctcgtaggggaggaaggcaaggtgaatctccttcaacgtcttcaccacctttgccagacgagagcggcctagctcactgaacaggggctcggggcaggtgtcggtgaagaagatatgggccgctttgtaggtgaaagtcggggtcccctggaagtctttgatcagggcctgaaccgacttctccgtggggctcagcaaataaatggcctccagactgggaatgggttcccgccgtttgttgatgtcttcaacaatggtgatgccctcagccaggatatctgacattttgcagcaggaagacaagatgcgcatgcttgggtgatccatgataagcaccttccactccccatccttcttgacactccgaataactccgctcagaattttttcccccaccaccgccttcagccccgagggcgccatcttccccgaggggcgccgccgccgcttccgggtgtgtccc

SEQ ID NO: 175304 - DNA, 307 bp, Homo Sapiens
ccgctcccttgaatgccaaactctaaaaaagatcaactcacttgacatttctgtttggatgtctgacaggcatctcaaatttaacatactgaaaaccaacttcctggttaatgacaccccaaacctgccccttccacattttctgtgtctgttcacggcagctacatccctccagctgctctggccaagaactcctggttcacctaacagagaatgatgtaacattgtatttttaaaattaaatccagtggcatggcaccattagggttgactagaaaagctgggagaggctgggcgtggtggctca

SEQ ID NO: 175305 - DNA, 308 bp, Homo Sapiens
ttggggtcagactgcctgggttcaaatcctggctccatcacttactggctgtgtatccttggaggagtcacataccttctctgggcttatgtctcctcatctctgaaatgaggatattacagtactcacttcagagggctactgggaggatttcacagatgaatagaggtaaagtgctgagatcagtgctcgtgtttcagggaagagaggaactggtggttgcagggagctcaggcttccgcagtggctgaccaagttctccacacccagaaggtgaggcagagagactgggagcggcacatgcgttg

SEQ ID NO: 175306 - DNA, 115 bp, Homo Sapiens
  misc_feature (32)..(32): n is a, c, g, or t
aatgcagacattttattagggggataaggagnccaaggtaaagcttatggaactgagtgttagtgactttggcatttgtgtagctgagcacagcaagggagcggcacatgcgttg

SEQ ID NO: 175307 - DNA, 179 bp, Homo Sapiens
tgtgccgctcccaacgcatgtgccgctcccctggtccctttgctgtcactattacataatggacttgcacttttcctccctgcacttatcactttctgggcttgaccttaattgtaagtgtggtatgagtctgtttccatttaaagcagacagaaagaaactactctggacctgaaaca

SEQ ID NO: 175308 - DNA, 716 bp, Homo Sapiens
  misc_feature (594)..(594): n is a, c, g, or t
  misc_feature (603)..(603): n is a, c, g, or t
  misc_feature (634)..(634): n is a, c, g, or t
caacgcagtgccgctccctctccccaccccctttattccaatttcaggtagcttggcactgagtaattgaacattaaaaaatcgagtttgtagacttcgtacagctgcgtttggtgctctgagctgatgttctggaagaattctgtggtcatttcatcagtagttctcgtagactttgcataggtggggaacttcaggtagctgcccactcctgccagctgcaggacgtaattagaatcctcttccagtgtctcgtacttgcccacgaggtcatagtggatgtggcagggatggcagagtgagtagacggtttgccagcgttcgttgaaaggctcctcccgctgggtgtgtgggtcgatgagataggccacaaactcctcgaatttgacatcgtcccctttgcgcagggcctcctgggtgggcgttcttccgctggcgtttgatgatcttggtgccgtaccgcttgtggaaggagatgttgtacttctgggtgaacttgttgcggtaggcggacactagcctctcgaaagggctcccggacaaacaggaacttcatgtagcttttcaagcggtggttgatttctgggatgctgnctgggtcanggtcttcaggttggcggaaacgtgtgccttngttgccgggatctcatggggtcgctgtacttccccgcccggcagaccatatggccctttcagttggtgcagccaccttggcc

SEQ ID NO: 175309 - DNA, 629 bp, Homo Sapiens
  misc_feature (577)..(577): n is a, c, g, or t
  misc_feature (610)..(610): n is a, c, g, or t
caacgcatgtgccgctcccatgtgccgctccagctgatgaggcggccgctgtcatcatcccatggagaggatgtctccgtgtcactgagccactcggcgttccccggcatagtgggtaggggcagcgagcaggggctgggcggagaaggccaccaggtcccgtggccagaagtgtgccttgtactgctcgttggggtgctggtcgaacatgatgggcaggaactcgtccacgggcagcatgcggcgcagaggctgtgaggccagcagcttgcgggcacccgccagacgcagggcataggccagcgtccagtaggagtacccagccaccaccagggcccggcagcccctccacggccgtctccttctcaagggttcacctgctttccgtcccgaggtagatcaggtcccaagacaagtttctctgcctccacatcctccatcagccgctccagccgcccctggaagttgcttcaaagtggcaccgtcatcctcaaacaccaggacccgggccaggcccctggcaacacctcttccaatgggaagtaatggctgaggaagcagcccacctcgccttgtnaagagtgcgccccgataagggtcctggtacccnggagcggacaattgccgtt

SEQ ID NO: 175310 - DNA, 1013 bp, Homo Sapiens
cctgggtggcgaattcggcacgagggtcgggctggaagacgagagggtcaacttcatccacctgatcttagaagcactagtggacggcccccgcatgcaggcctcagctcatgtgactcggccctctaagaggcccagcaagatagggtttgacgaggtctttgtcatcagcctggctcgcaggcctgaccgtcgggaacgcatgctcgcctcgctctgggagatggagatctctgggagggtggtggacgctgtggatggctggatgctcaacagcagtgccatcaggaacctcggcgtagacctgctcccgggctaccaggacccttactcgggccgcactctgaccaagggcgaggtgggctgcttcctcagccattactccatctgggaagaggtggttgccaggggcctggcccgggtcctggtgtttgaggatgacgtgcgctttgagagcaacttcagggggcggctggagcggctgatggaggatgtggaggcagagaaactgtcttgggacctgatctacctcggacggaagcaggtgaaccctgagaaggagacggccgtggaggggctgccgggcctggtggtggctgggtactcctactggacgctggcctatgccctgcgtctggcgggtgcccgcaagctgctggcctcacagcctctgcgccgcatgctgcccgtggacgagttcctgcccatcatgttcgaccagcaccccaacgagcagtacaaggcacacttctggccacgggacctggtggccttctccgcccagcccctgctcgctgcccctacccactatgccggggacgccgagtggctcagtgacacggagacatcctctccatgggatgatgacagcgggccggcctcatcagcttggagcgggctcccaaaaagaacctgggccaagcccccggcctggaaccctgaacctggccaaaaaggcgggggcaaaggcctctccaaacccccaagcccccgaagaaaggaagcttctaaaa

SEQ ID NO: 175311 - DNA, 964 bp, Homo Sapiens
  misc_feature (769)..(769): n is a, c, g, or t
  misc_feature (779)..(779): n is a, c, g, or t
  misc_feature (868)..(868): n is a, c, g, or t
  misc_feature (948)..(948): n is a, c, g, or t
tgggatcaccccccagggctactaccgccgcacagccgagtacttccccaccaagaaccgccagcgccggggctgcttccgtgtccccatggtccactccaccttccttgcatccctgcgggctgaaggggcagaccagcttgctttctacccgccacatcccaactacacttggcctttcgacgacatcatcgtcttcgcctatgcctgccaggctgctggggtctccgtccacgtgtgcaatgagcaccgttatgggtacatgaatgtgccggtgaaatcccaccaggggctggaagacgagagggtcaacttcatccacctgatcttagaagcactagtggacggcccccgcatgcaggcctcagctcatgtgactcggccctctaagaggcccagcaagatagggtttgacgaggtctttgtcatcagcctggctcgcaggcctgaccgtcgggaacgcatgctcgcctcgctctgggagatggagatctctgggagggtggtggacgctgtggatggctggatgcttcaacagcagtgccattcaggaacctcggcgtagacctgctcccgggctaccagggacccttactcgggccgcactctgaccaagggcgaggttgggctgcttcctcagccattactccatctgggaagaggtggttgccaggggcctggcccgggtcctggtgtttgaggatgacgtgcgctttgagagcaacttcaggggggcggctggagcggctgatggaggatgtggaagcanaaaaactgtnctgggacctgatctaccttggacgggaacaggtgaaccctgaaaaggagacggccctggaagggctgccgggcctggtggtggctgggntactccctactggacgctggcctatgccctgcggctgggggggtgccccgcaagctgctgggcctcacaggcttctgggnccggcatgcttgcccc

SEQ ID NO: 175312 - DNA, 416 bp, Homo Sapiens
  misc_feature (21)..(21): n is a, c, g, or t
  misc_feature (31)..(31): n is a, c, g, or t
  misc_feature (38)..(38): n is a, c, g, or t
  misc_feature (43)..(43): n is a, c, g, or t
  misc_feature (72)..(72): n is a, c, g, or t
  misc_feature (80)..(80): n is a, c, g, or t
  misc_feature (107)..(107): n is a, c, g, or t
  misc_feature (189)..(189): n is a, c, g, or t
cccaaaaaaaatttctctgcntccaaaatcntcccatnaagcngctccaaaccgccccctgaaattgctctnaaaaacgnaacgtcatcctcaaaacacccaggacncgggccaggcccctggcaaccacctcttcccagatggagtaatggctgaggaagcagcccacctcgcccttggtcagagtgnggcccgagtaagggtccctggtagcccgggagcaggtctacgccgaggttcctgatggaactgctgttgagcatccagccatccacagcgtccaccaccctcccagagatctccatctcccagagcgaggcgagcatgcgttcccgacggtcaggcctgcgagccaggctgatgacaaagacctcgtcaaaccctatcttgctgggcctcttagagggccgagtcac

SEQ ID NO: 175313 - DNA, 513 bp, Homo Sapiens
  misc_feature (29)..(29): n is a, c, g, or t
  misc_feature (58)..(58): n is a, c, g, or t
  misc_feature (93)..(93): n is a, c, g, or t
  misc_feature (155)..(155): n is a, c, g, or t
  misc_feature (316)..(316): n is a, c, g, or t
  misc_feature (327)..(327): n is a, c, g, or t
  misc_feature (357)..(357): n is a, c, g, or t
aaaatcttaaccaaaagccaaattggctncttccctaaaccaaataatcccaactggnaaaaaagtggtttccccaaggccctggccccgggnccctggtgttttaaggaatgaacgtgcgcttttaaaaacaaacttcaaggggcggctgaaancggctgaatggaagaatgtggaaggcaaaagaaactgtcttgggacctgatctaccttggacggaaacaggtgaaccctgagaaggagacggccgtggaggggctgccgggcctggtggtggctgggtactcctactggacgctggcctatgccctgcgtnctgggggtgcncgcaagctgctggcctcacagcctctgcgnccgcatgctgcccgtggacgagttcctgcccatcatgttcgaccagcaccccaacgagcagtacaaggcacacttctggccacgggacctggtggccttctccgcccagcccctgctcgctgcccctacccactatgccggggacgccgagtggct

SEQ ID NO: 175314 - DNA, 520 bp, Homo Sapiens
  misc_feature (374)..(382): n is a, c, g, or t
  misc_feature (481)..(481): n is a, c, g, or t
  misc_feature (496)..(496): n is a, c, g, or t
gatgaggggctaaaagagagaaacttcactctgttgagccacacgcacgtgccgctcccccatttgtgtcggtgagagttaggggagaggtgccttgagacagagcaggagtctggctgggctagcttttatcttgtgctccctggaaccctgactggatgatttctgaagtcgagctggagcccatctagagggaaggtgaaacttctcctcagcatgcagggcctcctgcacccacactgccacagccaccgcattaccagctcctgccagtctgaggagcaagaggctggcatgaagaatcagttccattctttcctccctaaatttagaaaaagcctgttttgcaaagctttcttcagtgtttcaagacnnnnnnnnnccaattaagcagttgcacaacatgcatatcttaacctggcctgcagctccaggatatgcagctgggagcggcacatgggttggtggatctaaagagtcngctgctgctaacggnagtaaagtcatcaaagcagaacca

SEQ ID NO: 175315 - DNA, 531 bp, Homo Sapiens
  misc_feature (20)..(20): n is a, c, g, or t
  misc_feature (25)..(25): n is a, c, g, or t
agggatcagctctcttgacngctcngaccctacgtatgagccgactcatagggtcacccaatccatgtgccgctcccccatttgtgtcggtgagagttaggggagagttgccttgagacagagcaggagtctggctggggtagcttttatcttgtgctccctgggaccctgactggatgatttctgaagtcgagctggagcccatctagagggaaggtgaaacttctcctcagcatgcagggcctcctgcacccacactgccacagccaccgcattaccagctcctgccagtctgaggagcaagaggctggcatgaagaatcagttccattctttcctccctaaatttagaaaaagcctgtttcgcaaagctttcttcagtgtttcaagacaaaaaaaatcaacattaagcagttgcacaacatgcatatctaaacactggcctgcagctccaggatatgcagctgggagcggcacatgggttgggtgatccgaagagacgaagtataacgtcaagaactaaattcattaa

SEQ ID NO: 175316 - DNA, 634 bp, Homo Sapiens
  misc_feature (224)..(343): n is a, c, g, or t
  misc_feature (412)..(459): n is a, c, g, or t
  misc_feature (484)..(541): n is a, c, g, or t
ggatcgtttcttgatttagctctgatgtatgactcgactcttaggatcacccacccatgtgccgcccccaacgcatgtgccgctcccccggagtcctgcaatgagacacaggactcccagcaacctgtcctcctcaccaggcccctccagaggctccctggcccccagtgcgtctcccttttccctgcacaagaagtgggaggctgagtccggtggctcacacnnnnnnnnnnnnnnnnnnnnnnnnnnnnnnnnnnnnnnnnnnnnnnnnnnnnnnnnnnnnnnnnnnnnnnnnnnnnnnnnnnnnnnnnnnnnnnnnnnnnnnnnnnnnnnnnnnnnnnnncatggtggtgcacacctgtagtccagctactcaggaggctgaggtgggagcattgcttgagcccagagnnnnnnnnnnnnnnnnnnnnnnnnnnnnnnnnnnnnnnnnnnnnnnnnatgacccagtgagaaaactgtctcnnnnnnnnnnnnnnnnnnnnnnnnnnnnnnnnnnnnnnnnnnnnnnnnnnnnnnnnnntggtggggccctggcccaggagggagcggcacataggtgggtgaccaaaagagtcgagtcatgcgacggagctaagacaagaaacagaaccct

SEQ ID NO: 175317 - DNA, 711 bp, Homo Sapiens
  misc_feature (17)..(17): n is a, c, g, or t
  misc_feature (38)..(38): n is a, c, g, or t
  misc_feature (42)..(42): n is a, c, g, or t
  misc_feature (91)..(142): n is a, c, g, or t
  misc_feature (167)..(214): n is a, c, g, or t
  misc_feature (283)..(402): n is a, c, g, or t
gcttaatgactttcgtntctgacgtatgcagtatttcnctangtcaccaaccatgtgccgctccctcctgggccagggccccaccatttcnnnnnnnnnnnnnnnnnnnnnnnnnnnnnnnnnnnnnnnnnnnnnnnnnnnngagacagttctctcactgtgtcatnnnnnnnnnnnnnnnnnnnnnnnnnnnnnnnnnnnnnnnnnnnnnnnnctctgggctcaagcaatgctcccacctcagcctcctgagtagctggactacaggtgtgcaccaccatgnnnnnnnnnnnnnnnnnnnnnnnnnnnnnnnnnnnnnnnnnnnnnnnnnnnnnnnnnnnnnnnnnnnnnnnnnnnnnnnnnnnnnnnnnnnnnnnnnnnnnnnnnnnnnnnnnnnnnnnngtgtgagccaccgtacttagccttccactttttgggcaaggaaaagggagacacactgtgggccactgagcctctggaggggcctggtgaggaagacaagttgtgggaagcctgtgtctcattgcatgactccgggggaaaggcacattctttggggttaccagcctttaattagtaattctgggctaagctgattccagtggttaaaatgtttttccgtcaatatttccaactacatttttacccgaaagcttaaatattaaactctgggggtcctatagaatgtagtatctccccaattaatgtgcg

SEQ ID NO: 175318 - DNA, 370 bp, Homo Sapiens
gttaaatctgaatgatttatcacaaaacccaggttttgcctaaagcaaacagccaatcatttacctggaaaaagggcaaggtggagcataggtcaggaacaaatagcatttagaacttaaaaatggaatcgattactccaggatgatttcataggggaagaaaactttctggctggaccttcaaagacacgcaggattgaaatggctggaaaggaaaggaggaaaaattcaccaggaaacgaacagcaacatgaggagaggcataaacagatgcaggctccaaatgcagagttggggaacggcacatgggttgggggatccaaagagtcgagtgcatgcaataagcaataaattcatgagagcagaacct

SEQ ID NO: 175319 - DNA, 483 bp, Homo Sapiens
  misc_feature (33)..(33): n is a, c, g, or t
  misc_feature (77)..(99): n is a, c, g, or t
  misc_feature (441)..(441): n is a, c, g, or t
aggttgcgctctattgaacttatctccttatgnatgagcagactcataggatcaaccatgcgccgctccctgcctcnnnnnnnnnnnnnnnnnnnnnnngtaaaatttgaatgatttatcacaaaacccagtttttgcgtatagcaaacagccattcatttacctggaagaggggcagggtggagcataggtcagtaacaaatagcatttagaatttagaaatggattcgattactccaggatgatttcataggggaagaaaactttctggctggaccttcaaagacacgcaggattgagatggctggaaaggaagggaggagacattcacaaggagacgagcagcaacatgaggagaggcataaacagatgcaggctccagatgcagagttggggagcggcacatgcgatgggttatcctcaagagtcgaggagcatacntgatggtagtcaagcggagagtacagctacatgagataaaca

SEQ ID NO: 175320 - DNA, 865 bp, Homo Sapiens
  misc_feature (78)..(78): n is a, c, g, or t
  misc_feature (125)..(125): n is a, c, g, or t
  misc_feature (134)..(134): n is a, c, g, or t
  misc_feature (730)..(743): n is a, c, g, or t
aaaataaaccaccccttttgaaagttcggtttcaaaaagttggaggaaatccagaaaagcgggccccaaccctgcttntgggaaccaaacccaaaaagagcccaagccacagcagagaattcaanaaagccacntgcacaaaaggccagagcagccaagggaagctgggggccaaggccagtgagccctggggccaggtatcaggcccctcaaagagcagaaaacagattttttaggtgaagccgacggtctgaggaaatgagatgagctcacacacctgatgacagcttccctcagcaattccacccgcctccacaggactcagaccaagtcctggtgttagaataaatcactaggctacaagaaagctcaaacccccacaggttctagcactcctagccaccaacacaactctgttcaagatccacctatcaacaggggtggggtgggaaggcggtccccatcctcaggccattcttcctccgtgggttgcagccagggtttcctgtgggtcgtcttgtgcacgtcacggccctgcccacagcataaaaacatacaggtgtgagggagatgagcaagacagctagcttttcacaagagcaggaaaggctgggtgctgcgactcacgcctgtaatcacacagcgttgggaggcagaggaggaaggactgcttaaggccaggagttccaggccagtctgagcaacatagcaagatcctgttgtaccaaannnnnnnnnnnnnngaaaactggttgtcgtgttactaaaagtaaccattacaacactgaagtttagaatacagtattactagggagcggcacggtgatccaaagagtctgctcatgcatcagcagctgatcaacaa

SEQ ID NO: 175321 - DNA, 496 bp, Homo Sapiens
  misc_feature (29)..(29): n is a, c, g, or t
  misc_feature (100)..(100): n is a, c, g, or t
  misc_feature (103)..(103): n is a, c, g, or t
cctgcctcatcaatgagtgtgtccgagtnaaggaggaggtctttatacaacaaaggaacgtctcctgcccccagctggaggtccctgtctgcccctcggnttntcagctgagctgtaagacctcagcgtgctgcccaagctgtcgctgtgagcgcatggaggcctgcatgctcaatggcactgtcattgggcccgggaagactgtgatgatcgatgtgcgcacgacctgccgctgcatggtgcaggtggaagtcatctctggattcaagctggagtgcaggaagaccacctgcaacccctgccccctgggttacaaggaagaaaataacacaggtgaatgttgtggggagatgtttgcctacggtttgcaccattcagcttaagagggaggacagatcatgacactgaagcgtgattgagacgttccagggtggcttttgatattcacttctgcaaggtcattgagagaggagatatttttgggagaagaaggttt

SEQ ID NO: 175322 - DNA, 446 bp, Homo Sapiens
  misc_feature (366)..(366): n is a, c, g, or t
  misc_feature (384)..(384): n is a, c, g, or t
  misc_feature (397)..(397): n is a, c, g, or t
  misc_feature (405)..(405): n is a, c, g, or t
ttaatgatttagctcatgttagttgacttcgactcaatcggatcacccacgcatgtgccgctcccaggaaacaattagagaatgaaccaaatcaacatacactccccgagtgggttttctcagcaataaacaacaagacatgagctcagggaagggaacaagtgaagtctggagggagggcttcccagaagaggtgaatcttgagaaatgggtagttgaaagagatgggggagccagagcatgccaggcagggtgccgggcaccagcaaaggccctgaggtgagaatgaacgcggcttagggcaaagaagtcggaggaaattgctgagtgagatcaggatgagaattgggagggctggtggcctcncgcccttagggagcggcncatggccgggtgncgtatggnattaataaagacgtcagaaactaaatcaaaaagctgatacc

SEQ ID NO: 175323 - DNA, 511 bp, Homo Sapiens
  misc_feature (149)..(195): n is a, c, g, or t
  misc_feature (230)..(238): n is a, c, g, or t
taaataaccgcttccctgcgcacccccctcacttggacttaaccttggttaggttgccaacccccgtctcctgactccgggaagctagatgctctcctagcactcggaacttgcccatcgccacatttgcacacccgtggttactgggnnnnnnnnnnnnnnnnnnnnnnnnnnnnnnnnnnnnnnnnnnnnnnnaacggcagcaacggctcctccccgtttcttttggnnnnnnnnngccattacttttaatgactgctgcaccaacctattagaatcatttatatttatccatccatcatctgccttcccctctagaaaggaagctccatgagaatagaggccagatctactcaaatcactccacattcccagcacattgtttgtcaataatcatttaccaacaaactgatagagaaatgccttccctgttgctgggagcggcacatggattgggtgaccctaagagtctgagtgctgacgtcaagagctaagatcatcaaacagacct

SEQ ID NO: 175324 - DNA, 549 bp, Homo Sapiens
aggttgctgttgctcaacccagcaccgtacgtatgagcagactcataggatcaccaaccatgtgccgctcccagatagagggaaataaccaaaaaactaccaaacaacagaaacccacactctagactgaaaccccaaagtgggcttgatgggtgggtttgtgtttcaaggggaaagtgaggcagaggttctgaaaagggtctctgtttttgtgttcatgtagccataggcacatggagcagaatacttaagcctggcccccaaatgcccctgcacacacacgtgccacacctgcgctgattcttgtgtgtgctgcacccccaaggtgtgtgggtgctggctgagctttgggccgggaaggcagcctgggaatctgaggctggagacaggggtttgaggtgggggcctctctggaagcacatttggagggaaagacaagagagccatgagaaaagggctgaggagggcagaagggctaggcagggagcggcacatgggttgggggatccaaagagtctgctgctgcgtacggcagtaagttgagaaagc

SEQ ID NO: 175325 - DNA, 233 bp, Homo Sapiens
  misc_feature (15)..(15): n is a, c, g, or t
  misc_feature (22)..(22): n is a, c, g, or t
cctgatgactcttgnatgagcngactctttggatcacccaaccgatgtgccgctccgtgaactccacatcgttctcaaattctgggaaatgttccatctcaattccaaccatgaggtacatagccccagaagggcggactggccggagtccagggatggcagccaacgccccataacagagatcagcattggacttgaggaagctcagagtgttgtggtaaaactctcccggg

SEQ ID NO: 175326 - DNA, 476 bp, Homo Sapiens
tcccgctgatgccgtggcatgcacctcgactctgaggatcccccaacccatgtgccgctccccgctccagcacttctcccagcctgcatgcaccagctcctctgggaggtcctgaaccaggcggattggctttggagaacagggctggctctgattggaggtacctggggagtgactcagcagggacgcttcctcccgggggctgccgtgattctcattggccatctccacacccacacaggaccctctggggtctgcaacgttagcatgagaggcttttcttctccagccggatggacccccacagggtcccacagaggcaaggaaaggcctgcaggaagactcagcacaggcgaatgggctggtcagcagtggagtggacgggagcacaggggattccttgcatcagcagctgcccggagcggcacatccgatgggggatcctaagagtcgaggtgcgtgcaacaggcatcaga

SEQ ID NO: 175327 - DNA, 592 bp, Homo Sapiens
  misc_feature (418)..(418): n is a, c, g, or t
  misc_feature (507)..(507): n is a, c, g, or t
  misc_feature (545)..(545): n is a, c, g, or t
  misc_feature (553)..(553): n is a, c, g, or t
  misc_feature (567)..(567): n is a, c, g, or t
  misc_feature (578)..(578): n is a, c, g, or t
aggatccccgacggatagcggatctgcagcagggagccctcaggcaggtcccgagcaagagagagttcagggagaggctggtcatggtggcaaggaatggaggcgaactgatggcacctctctgcctgtgaaatgtcagaaacaagagcttcacaggcagggctgctgtggtaggggaaggccagtagggctctctctggtaagtcctcagggcagtagaggcacagctgccgacatcaggtcccgagtggcttgcatcttggctggcggggatctgcagccagtctctcccaaatactccaggctgatatgccttttaactctgagcttgatggaattaaccagatagccctggggatgtgtagaggaggccaggcctagtggctcatggaggtcaactcctgctcctggagaaccngctggtgccctcatacccctgggggcagcttttgctggatcttcatagtggagtctgcccctgtgggcactctgtggcatcctgctggnctgtgtgtgcacaaggcagatggaacaataggacctgnttgtatgntttcttgagaagtnaagagtgactnaagtatgtacagtc

SEQ ID NO: 175328 - DNA, 286 bp, Homo Sapiens
tacggataccggatctgcaccgccttgttgggtgcctgctgggtgctgtactctgggtttggctcactgaagttaggaacctcagaataaaccatacagaattctccaatcttctgcagatcacccccacggccagtatatagtgtcagacaacctttgaaaactgaagcgtaccctttggtgagccggataatgtccccaggctggatcagattgccaacatcgtcccagacagagatattgatgctgcctgttttgtccgccactttgcagatccgctatccgt

SEQ ID NO: 175329 - DNA, 511 bp, Homo Sapiens
  misc_feature (498)..(498): n is a, c, g, or t
acggatagcggatctgcatcgtagcgatctccaattccaatagggaacactgtcactctgttggacctggcggcatcagctgctgcatccactgaatccacagagacgtccgtgaccaggatgaccaccgcctttgaggctcccggcctggcaccatgcatttctgaagtcaagtatcgcacagcaaagcccaaggcatccccgatttggctggggcctccctcccgctgcatgacgtccacaaggctcagcaaatgggctttctccgggaccacgttccatggcacgtcaatggtggtgatgcttccatactgcagcactgacacctgagtgagacgaggccctatattggcttttgaaatgaaagccttggcgaaactcttcatttcatcaaaataagaagctgggaaactggaggagccatccaggagaaggatcacgtccaggggctggctgcagtcaggtgcaggggagagggtggggatctgcagccctctncggagcagcacct

SEQ ID NO: 175330 - DNA, 484 bp, Homo Sapiens
  misc_feature (12)..(12): n is a, c, g, or t
  misc_feature (193)..(320): n is a, c, g, or t
  misc_feature (338)..(338): n is a, c, g, or t
  misc_feature (349)..(350): n is a, c, g, or t
  misc_feature (365)..(365): n is a, c, g, or t
  misc_feature (419)..(419): n is a, c, g, or t
  misc_feature (444)..(444): n is a, c, g, or t
  misc_feature (451)..(451): n is a, c, g, or t
acggatagcggntctgcaaagtgagacaaaagaagatacttccccaaggaagaaaaagaaaaaattgaggcagagagaagagaaaagcccagatgatctgaaaaagaaaaaagcaaaggccgggaagctaaaagacaagtccaaaccagacctggagagctccttggaaagtttagtttttgatttaaggacnnnnnnnnnnnnnnnnnnnnnnnnnnnnnnnnnnnnnnnnnnnnnnnnnnnnnnnnnnnnnnnnnnnnnnnnnnnnnnnnnnnnnnnnnnnnnnnnnnnnnnnnnnnnnnnnnnnnnnnnnnnnnnnnacaagagaagatcccaangaaaatagaannacataaaaagaaaantttgtcgaatcccaggtggaatctgatcaagtgtacttaatgattctcctttcngaggatgacagtgaagggctacttncacgcanagaagagaactaccttaagtgcagagagagact

SEQ ID NO: 175331 - DNA, 594 bp, Homo Sapiens
  misc_feature (24)..(24): n is a, c, g, or t
tccatgcagatccgctatccgtgncggatacggatctgcacgatctcccttccctggttagcaccacccagttggggtcaatctgcgcgtcaccctccgggtccagcacgactgtctggaaggccctgaagtcggtagcgtgacttcagcgttctccggacacacgtcgatcttgtctaccaccttgtctgcatcaaagtcgtcctggcacacgtcgcccacgcccgtccctgtccgcgtcctcctggccggggttaggcaccaggcggcagttgtcccgactgtcagggactccgtcattgtcgtcgtcgtcgtcgcaggcatcaccctggccatcgtggtctgagtcctcctgggcactgttaggcaccgtgggacagttgtcccgagagtcctgatgtccgtctccatcctggtcttgatcgctgtcacaagcatctcccacaaagtcgtggtccacatccgcctgatccgggttgctcttctggggacagttgtcacaggcatcccctataccatcgccatcactgtccttctggtctgagttgggtaccctagggcagttgtcggcctggttgcagatccgctatccgt

SEQ ID NO: 175332 - DNA, 291 bp, Homo Sapiens
cacagttcagtgtagacatttttaaaagatttgttccttgtccttacaaatagctaagtgcaatgtgcacttctgtttaacttgccattttcctgctctgttttctctgtgacatgaagcaacagaaactgagatcaaagttaagattatatcctgtttgtagtatcagatatttttctgtgtacaattatagggttgtaatctaaactggaatttttaggcagtaagtcaccacaaaatgttttagataagacacaataaaattattataaataaaagcttaatgtttgt

SEQ ID NO: 175333 - DNA, 286 bp, Homo Sapiens
ttgcagtcatgaaatactgaacaattgccttaagtctttgcttgactcactgggatagactgaggctttgggtgtgtctgtattagcatttcattagtacttcacatgcttttgatgtactcttgagattgctttaaattttgtattgaaacaacaatacattttgcactgtagtaatgggagcactaactcttacaacaggtagtgaaatcgtttaaagaatcaggttaatggaaaccatttggaaaagaatgtttctgtgcttacaaatactagtgcaaggtcc

SEQ ID NO: 175334 - DNA, 285 bp, Homo Sapiens
tgcagtcatgaaatactgaacaattgccttaagtctttgcttgactcactgggatagactgaggctttgggtgtgtctgtattagcatttcattagtacttcacatgcttttgatgtactcttgagattgctttaaattttgtattgaaacaacaatacattttgcactgtagtaatgggagcactaactcttacaaccagtagtggatcgtttaaaggaatcagtcaaggtaacattttgaaaagatggttcctgtgcttacgatagctagtgcatgggcactg

SEQ ID NO: 175335 - DNA, 228 bp, Homo Sapiens
actgatagctgatctgctactgaacaaataaaaagtttttgatataacttcaattaattgtaccacatgctaatcctgaagagatgtgtagaattttggaaagggtctaattcatacatgcttaaagtataacctacgttagatagtttgttgtcaaagtctgttctagtaaagtgaagattcaagtcagttgttcagttacttgaagcaaaacgaaatctttcattt

SEQ ID NO: 175336 - DNA, 390 bp, Homo Sapiens
ctatcgtttatgcctggataaatgacgaaaaaacgcaacgaaaggaaggggataaaaacgatccatatgttcttttcgcaaaaggtttggaacgcggccagcctccagattgctttgttgcgttgctccaagcgtctgaagagctagatctgtaataatgggtgaaacaacgttgactagtctctcccgtccacatataagttgtagctgatcgccacgcaaaaaaccgattagagtcattttgcattctcttgccaggtcgatagccagactagagggtgctcctactgcggctatcactcttataccggcctggcaagccttttgtacgagcttaaaacttgctcgaccactcaccaataaaacatgcttcgttgagtggtctttgca

SEQ ID NO: 175337 - DNA, 274 bp, Homo Sapiens
aggaacaaggctagttcatattttacctagtgagcacagtttttgcaaaaatcctccctccaggactttgtctccttggagtgatttttaaaaatacatgcattactttatagggagctgttttcccactagtgtcaattaaaatcaccttaaaaggtgattatccacttattcctaaacccctgtgggttgttccccctttccctcagccaacaaaagcatagcctcaaaaaatatcaagttcggtatgttttgccaaatcaaatttcatgtg

SEQ ID NO: 175338 - DNA, 295 bp, Homo Sapiens
ccgcgctcggtactccgacggatacgcggatctgcccaagcgatcaccaatagcgctttggtcaaggacgagatcctcactgcggccctgtcttttgtggagccccagccactggcagtggtggcgagccatgctgccgatggcagtctgtggtcgtcggtactgtttggccggccggggtttgtgcgggctgtggatacgcatgaggtgcgcatcgatctgagtggtgcgcacctgataccgggagatccggtcctgcaaaatctccaggatgacccgagggtggggatgttga

SEQ ID NO: 175339 - DNA, 298 bp, Homo Sapiens
tcgtcaagatcgatgctcccgagatcgtgatcgctgtgcgagagtcttttcctttgtgtcccaaatacatccagcgacgcaaggtcagattgcctgcggatcaggatggcatggacgcctcggagaccggtgtgcctgttgttggtactgtacttggtgctgccgaaaaggcgatcatcacctccgccgacaccttgttttgtgccactgccaatccccacggtcatctggatatttcccaccgaggaggcaatcctggctttgcgcgcatcatgggcgatagagagctgcgcatccc

SEQ ID NO: 175340 - DNA, 946 bp, Homo Sapiens
  misc_feature (801)..(801): n is a, c, g, or t
gcctccagactccaccggggtgcgcttaagccgcaaatgtcttggaagctcatttccaaccacattaaggtggaccccctcttcacagagcttgctcaatggcatccgcgccatggaggacccaggtgtcagggacaccatgctgcaggccctgaggtttgtgattcagggagcaggggccaaagtggatgccgtcatccggaaaaacatcgtctcactcctgctgagcatgctgggacacgatgaggacaacactcgcatctcctcagccgggtgcctaggggaactgtgtgcctttttgactgaagaggagcttagtgccgttctacagcagtgcttgctggcggacgtgtccggcattgactggatggttcggcacgggcggagcctggcactttccgtggctgtgaatgtggctcctggcagactttgtgccggcagatatagcagtgatgttcaggaaatgatcctgagcagtgccacggcggacaggatccccattgcggtgagcggggtccggggcatgggctttctcatgagacaccacatcgagacaggcggagggcagttgccggccaaactttccagcctgttcgttaagtgtctgcagaaaccatccagcgacatcaggctggtggcttgaaagatgatctggtgggcaaataaggacccactgccctccctgggaccccaggccatcaagcccatcctgaaagctcttcttgacaccaccaagataacaacaccgtgggtcagggcctacagcgacccaagcaatttggcacctccctcagaagccgnaaggggtgaaaaagtggtttcagttccctctcccaggaacctgggatgggggcccagtttggaaagggcttaaacaagggttaacccaaaggcccctgaaaaaaacttggcccaaccagggcggactcccccgaaacagggggga

SEQ ID NO: 175341 - DNA, 1090 bp, Homo Sapiens
ccgagacactcagcctcttgttggctaaggttgggattgccctgaagcccttcctgccccagctgcagaccactttcaccaaagccctgcaggactccaaccggggggtgcgcctgaaggccgcagatgctctggggaagctcatttccatccacattaaggtggaccccctcttcacagagctgctcaatggcatccgcgccatggaggacccaggtgtcagggacaccatgctgcaggccctgaggtttgtgattcagggagcaggggccaaagtggatgccgtcatccggaaaaacatcgtctcactcctgctgagcatgctgggacacgatgaggacaacactcgcatctcctcagccgggtgcctaggggaactgtgtgcctttttgactgaagaggagcttagtgccgttctacagcagtgcttgctggcggacgtgtccggcattgactggatggttcggcacgggcggagcctggcactttccgtggctgtgaatgtggctcctggcagactttgtgccggcagatatagcagtgatgttcaggaaatgatcctgagcagtgccacggcggacaggatccccattgcggtgagcggggtccggggcatgggctttctcatgagacaccacatcgagacaggcggagggcagttgccggccaaactttccagcctgttcgttaagtgtctgcagaacccatccagcgacatcaggctggtggctgagaagatgatctggtgggcaaataaggacccactgcctcccctggacccccaggccatcaagcccatcctgaaggctcttcttgacaacaccaaggataagaacaccgtggtcagggcctacagcgaccaggcaattgtcaacctcctcaagatgcggcagggtgaaaaggtgtttcagtccctctccaagatcctggatgtggcccagttttggaaggtgctgaaacgaggtttaaccgaaaggtcccctgaagaaagctgggccaagccaggccgacctcccacggaaccagggtgggaccgacacccatcccctgaaccatgaaagaaggccctgggggcccaaggcaagcaaaa

SEQ ID NO: 175342 - DNA, 1087 bp, Homo Sapiens
  misc_feature (913)..(913): n is a, c, g, or t
gagcgaggcctgggtggcgaattcggcacgagggtgatgttcaggaaatgatcctgagcagtgccacggcggacaggatccccattgcggtgagcggggtccggggcatgggctttctcatgagacaccacatcgagacaggcggagggcagttgccggccaaactttccagcctgttcgttaagtgtctgcagaacccatccagcgacatcaggctggtggctgagaagatgatctggtgggcaaataaggacccactgcctcccctggacccccaggccatcaagcccatcctgaaggctcttcttgacaacaccaaggataagaacaccgtggtcagggcctacagcgaccaggcaattgtcaacctcctcaagatgcggcagggtgaagaggtgtttcagtccctctccaagatcctggatgtggccagtttggaggtgctgaacgaggttaaccgaaggcccctgaagaagctggccagccaggccgactccacggagcaggttggacgacaccatcctgacatgagaggcctgggccagcagcagcattgccgctccacatctttgctcaatgttttcatttttgaaaatacatttgttccaatggggagcttggaagatggcgttcccagaaagtattttaatatcaatagaccacagccaaagccttaaatcaaacccacacacaactgaaaattgcctcctccatctctcaccttttcctgtggagaagagaaggaaaagcacacgcatgcgcctcagcaaatggcagcccaggagctgtttgtccagtttagcatgggctaggtctgggactataatagcagggtcagactgtgggttcctcttctcctgtgcttgagctctggtttgagagctggcgctaccaacttttttctatatcccgnagtggggcacaaacgggggatctctggcccatgggggtgtgtctggcttgggcttttccatattgtggaggcctgaaatgaatctggacccctggtcaaatggaaaatgatttcccggttctgggcagttcccaaatcctgggggaagggtaaaagggtttgaaaaggctgttt

SEQ ID NO: 175343 - DNA, 1055 bp, Homo Sapiens
  misc_feature (489)..(502): n is a, c, g, or t
  misc_feature (640)..(706): n is a, c, g, or t
ctggggaagctcatttccatccacattaaggtggaccccctcttcacagagctgctcaatggcatccgcgccatggaggacccaggtgtcagggacaccatgctgcaggccctgaggtttgtgattcagggagcaggggccaaagtggatgccgtcatccggaaaaacatcgtctcactcctgctgagcatgctgggacacgatgaggacaacactcgcatctcctcagccgggtgcctaggggaactgtgtgcctttttgactgaagaggagcttagtgccgttctacagcagtgcttgctggcggacgtgtccggcattgactggatggttcggcacgggcggagcctggcactttccgtggctgtgaatgtggctcctgccagactttgtgccggcaaaatataacaacgatcgtccaggaaatgcacccgtaatccacgcgtttccctaaccattaacccctatgcctacgaatgtacccacaannnnnnnnnnnnnntttatccgtccggcacgtgttttgtacccgcatccaccgcccttccccgcctgacatgctttttatctaccccccaccccacccatttatcacacaccaccttgcccctaaaacaacccaaaaaacccacttctgggnnnnnnnnnnnnnnnnnnnnnnnnnnnnnnnnnnnnnnnnnnnnnnnnnnnnnnnnnnnnnnnnnnnatatctacacacccgcatacacgatcccgtcaatttgctcgccccgaacccatctccctatctctatcacccaccggtcacgcccccactattgtaatactgcgacccccgacagccttcgtgtcagccacccgcgttaccataattaaacaccaccagccgcccgcgtgaatttcatattacacccgcgcgcacttacgaagccactgatccctcccccatcaccaccgcgccgcccgattaattgccgcccgtggtgctcccactgtttatcatgcttgtcgcgcatcatacacccgcgacccttgtcagaacatatagccgccgactgtagctccgtactattatg

SEQ ID NO: 175344 - DNA, 587 bp, Homo Sapiens
  misc_feature (357)..(357): n is a, c, g, or t
ggtgagaggcctgggccagcagcagcattgccgctccacatctttgctcaatgttttcatttttgaaaatacatttgttccaatggggagcttggaagatggcgttcccagaaagtattttaatatcaatagaccacagccaaagccttaaatcaaacccacacacaactgaaaattgcctcctccatctctcaccttttcctgtggagaagagaaggaaaagcacacgcatgcgcctcagcaaatggcagcccaggagctgtttgtccagtttagcatggctaggtctggaaccataatagcagggtcagactgtgggttcctcttctcctgtgcttgagctctggtttgagagantggcgctaccaacctttttcctatatcccgagtggggcacagacggtggatctctgcccagtgtggtgtgtctggcttggcttttcaatattgtgaggtctgaatggatctgatccctgtcagatgaaaatgattcacagctctggcagttcccaagtctggggaggggtataggtttgaaaggctgtttgaaagaggaatgtttaataaaggctttgattttatcttgt

SEQ ID NO: 175345 - DNA, 277 bp, Homo Sapiens
cccagcggccgctgcgagacctcggcgccgacatcgcgacagcgaagcgctttgcacgccaggaaggtcccctctatgtgctgctgagccggtcctggacgcgacgagcccgccctcggtcttcggagcagaaatcgcaaaaacggaaggactggaaatggcagaccatatgatggccatgaaccacgggcgcttccccgacggcaccaatgggctgcaccatcaccctgcccaccgcatgggcatggggcagttcccgagcccccatcaccaccga

SEQ ID NO: 175346 - DNA, 883 bp, Homo Sapiens
  misc_feature (585)..(626): n is a, c, g, or t
ggggcggagcagcgcagggagccaggcgggctgccggcgggtgtgaagaaaaaaatgacactccaatggcctgcagtgccaacctttctatatgccgaaataggactcatattaatcttctgcctaccttttattcctcctcagagatggcagaagattttttcatttaatgtctggggtaaaattgcaactttttggaacaaggctttccttaccattatcatcctattgattgttctatttctagatgctgtgagagaagtaaggaaatattcctcagttcataccattgagaagagctccaccagcagacctgatgcctatgaacacacacagatgaaactttttaggtctcaaagaaatctttacatttctggattttccctatttttttggctagttttgagacgtctggttacgcttattactcaactggcaaaagaactgtcaaacaaaggtgtacttaaaactcaagcagaaaatactaacaaggctgccaaaaaaatttatggaagaaaacgaaaaactaaaaaggattttgaaaagcccctggcaaagatgaaagaaaggggtttgggaagcccnnnnnnnnnnnnnnnnnnnnnnnnnnnnnnnnnnnnnnnnnnctggaattaagggagaactttcagatggcccctttcttaagggcccaagagatgagggggatgggaaaatggaagatgcgcgtccaaagaggacgtttcccaagcgaatatggagccaacgtccctggagagaaaacctccgtgaaccttcaccgaccatcgtaggggtttataataacaagccacaggggggggatatttatccgcccgcgggaaaagaggggagaaaggccaccgttggacccgcccgaaggggg

SEQ ID NO: 175347 - DNA, 377 bp, Homo Sapiens
tctactaacttggaatcaatggacactagttagatgtttgttcaccatggggaccattacatatgaccatacaatgcactgaattgacaggttaatcataagacatggaaagagaagtgtctaaaagcttcaaaatgttccacttttttttccttcatggagactgtttgtttggctttcttccattgttgtttttgtagcatttatttcagaaatgtgtatttccataatccagaggtagtaaaaccactagtgttttagtggttacagcaacatttgaaatggaaactaaaagttaggattttatggagtatggagatagggtccagtatctatttaccctgtaatgtttaggattaaaatgttaaaatttagaa

SEQ ID NO: 175348 - DNA, 218 bp, Homo Sapiens
attagccaaattacggttcaagccccttggtgcttcagtgggagaaggtgggaagagtctgcctggtggcctggcacaaaggtgccacatgaaggggaagcccccagcagtgagaacgcgggcccatcccactgaaaacaaacatgacttgcttgagcattcttccctttccatgccttaaagaaacaatgcttatgaaaacctaccaatcaattaga

SEQ ID NO: 175349 - DNA, 814 bp, Homo Sapiens
  misc_feature (126)..(126): n is a, c, g, or t
  misc_feature (286)..(296): n is a, c, g, or t
tcctagtatctttcacacttgtccaaccgtcttatttttttaaaagttctgttgcttgtattaacacgaaactagagagaaatagtttctgaagccagtttattgtgaagatccccaagggggagngttcggtagagaaaaatagtaagctggtttagaaactgacgagggcaaacagccaggacgcattggagaggaatttgccaaagatctaccctgagataacgcctgtccagtgtcttcaccacgtgaataaccagcgctccaaagtgtttttctgctttgnnnnnnnnnnnttccacaagcttttaaaggtgcatttaagaatccatgtgactttagaatggaactgccggccctggcaactgtcacgtgtgctagaaggttcgatgcctctggaatgcatgtgatactcatctccattttgtttccttgattgcatttttgttcttttagcagatctgtccctgtgggtggtgtctaagaagtcggacaccttggtttttgtgttagattgagctgggcagctgcaatcagcttctttatatgcaaattaggcacgacccatctgtggttccctggttggtggctaatgaagtgaggggagggagggatgtcaccccaaaagtaggccctcccattggctttggccaggccagacacttcacatcgtttacatggttctgtgtaattttaaagtttatgtgtataaagcgaaggctgtttctgtgaaactgtatattttgtaaataaatatattgctactttgaggttcatgattcaaggttcaggcgattgcgttctgtgctgaaaa

SEQ ID NO: 175350 - DNA, 436 bp, Homo Sapiens
  misc_feature (94)..(94): n is a, c, g, or t
  misc_feature (179)..(179): n is a, c, g, or t
ccaaatttatcaagtcttcgattccggaatccgttgtggaatgaaacacggttacgcccccagtgacttgccggtcaaagcaaagcgcagcacnctacaactacagcctccccatcaccgtcaagaagacatccagccagcttgtcaccatgcatgacctgaagcagggcctgggcgtncggggacgagtggtgctcggaaaccagcttccagcaagtacaagctcaaggactctgtctacatcttccgggaaggggccttgccaccctattcggcagatgttctaccagttatgcgacttgaatgtgggaagagttgcagaagatcatttcaccgcaatgacgggggcagaggatttccttgcacaggaacggggatggggtgggtgccttccccaaggaccaggcgacgagtttcaggggacacctttttcctt

SEQ ID NO: 175351 - DNA, 760 bp, Homo Sapiens
aactacagcctccccatcaccgtcaagaagacatccagccagcttgtcaccatgcatgacctgaagcagggcctgggcccatcggggacgagtggtgctcggaaaccagcttccagcaagtacaagctcaaggactctgtctacatcttccgggaaggggccttgccaccctatcggcagatgttctaccagttatgcgacttgaatgtggaagagttgcagaagatcattcaccgcaatgacggggcagagaattcctgcacagaacgggatgggtggtgcctccccaagaccagcgacgagctcagggacaccatgtccctcatgatccggcagaccatccgctccaagaggcctgctctcttttccagctcagccaaggctgatggcggaaaagagcagctgacgtacgagtctggggaagacgaggaggatgagcgaggaggacggaccgagcgaggagcgacggacttcaaggccatccgacggcacgtgaaaacgaactggacgaccgagattctggactacgtgctgacagggcccaaggctgggccctccctgaccggcagactggtgtctggcctactgagggagccgtgggctccccattgcccacccacagtgcccggattggccctaggaggcctcttgacgagagctcgagtcccagtcaagggtgccagctgaccctcgcactggctgtgtaatgctgcttggtgctgctctggtctgacgggttcgggacatcccagaggcttcc

SEQ ID NO: 175352 - DNA, 368 bp, Homo Sapiens
  misc_feature (31)..(31): n is a, c, g, or t
  misc_feature (33)..(33): n is a, c, g, or t
  misc_feature (38)..(38): n is a, c, g, or t
  misc_feature (217)..(217): n is a, c, g, or t
  misc_feature (318)..(318): n is a, c, g, or t
  misc_feature (325)..(325): n is a, c, g, or t
  misc_feature (354)..(354): n is a, c, g, or t
gagccatggttcaccagaagcatgtgcagtngnaacanggccagcttcatgtgtgtgaggcggtccagggagcacacaggtttagggccccagctgggaacacacagcttgtgtttccagttcctctctgtagacttcgctcacggggctgcctttgatctcagtacagctctgcctctggaaaaaccaacactggcatctcttagcagagacccgncctgggactttatgtcccaaccctctccccacccccaggttgcagaagatcattcaccgcaatgacggggcagagaattcctgcacagaacgggatgggtngtgcctncccaagaccagcgacgagcttagggacancatgtcccttcatg

SEQ ID NO: 175353 - DNA, 342 bp, Homo Sapiens
cgggaaggcttctgaggggctgcccctagagcattcagttcacatgtcacagggtatggcgtgacagggtgcctgtggacacatgaatcacttctaacatgcctccctgtcagcctccaggctgccagctggctgaggccagggactgggtcaggctcatctgtggcgcctcagagggtcagcatcattggtgaacagatgcaggcgctgctggaccatctggggagagtgacagtccatgtcttcaccagggagccatttgagtgctgagcgacaagaggctcagagggcatgaccccatgggactggatgcggcctgagggctgattccgctgggcggtg

SEQ ID NO: 175354 - DNA, 211 bp, Homo Sapiens
taaacctactcatgcaaaattagtgtgcgcaacagggatattgttaattttcatacttaaaaatgataccttattatcttttaaaaattgccaaactctctgaaatggttaacaaatcttatatggatattcttgtctgccagctaaaaatcaatttatgttgctgaaaacaaaaagttatacaagaaaaagaaacatggttttttgtttg

SEQ ID NO: 175355 - DNA, 159 bp, Homo Sapiens
gtctgtaaagcagcatgtgcagattattcataatatagaagttaaaataagtattagtgcaattttcagatatttatttttgcacagaaaacacattatctggagagaaagaaaggagaatttttgagacttgggttttcttaatgccagtgtgaattt

SEQ ID NO: 175356 - DNA, 937 bp, Homo Sapiens
  misc_feature (17)..(17): n is a, c, g, or t
  misc_feature (692)..(759): n is a, c, g, or t
  misc_feature (855)..(855): n is a, c, g, or t
  misc_feature (877)..(877): n is a, c, g, or t
  misc_feature (906)..(906): n is a, c, g, or t
  misc_feature (918)..(918): n is a, c, g, or t
gcaacatccaacgcccnatgtctttgaatatgaatgtatttgtaaaataccacgtttcatgtgtgaatatgtgcttttactgtacatagtgctattgtgcaataggtcttatgctgttttcactcaatgtgtgctaagatctagccccattgactcttctagaaatgcagtattgctttgacctgccatgtggcactccacaatgtcaattgcagtttacacacattgcctaaattgggggacacctgggtgcccctgaccccttggcaccggatacaggccacgataaacatcctttcgtgtgttcccttctgtgcttgtgtggcatgtgtacccaggatgggcctataggtcacagaggtcaagtttctctttggttttccagattttctttaaaacggtgactgaccctcctacttgagggccgcccttttctccttatccttgccagcacttgtattgccagactacctaaattttgccagtctcatgggtagatagtggtgcagtgctttaacatacattcatctgatcagcattaatttggggaattttttcacttagcctttctggtttccctacctgtgcattgcccattttctcatggagtttcttatcttttttggtttattctcaggagttgcttgtacattcttgggcaattgcagataattccaagaatgcatatttannnnnnnnnnnnnnnnnnnnnnnnnnnnnnnnnnnnnnnnnnnnnnnnnnnnnnnnnnnnnnnnnnnnatgagccaccgtgcctgggctgatgctggagcttttatgtgacatgggtgactcttaaaactgggggagggacgtaggagatgaggagttttcacncaccagccccatagggtggggntgtcaagacccctccggaagttttcgttnggcttaaggagnaggggcactttattttttt

SEQ ID NO: 175357 - DNA, 713 bp, Homo Sapiens
ccaatcaacatccaaccagggtgctgagtatcttttcggttatttgttccccagagaggcagccagtggagaaagctcgatggcctattaccacctgagaacaacatccactcaagatgaagagcaaaagctcaaagcctcctctgttgctggaactttccccatgtttattcttctacttactctactctgcttaaattacgggccatttgacatgtacattactgtcaggcctttttcagacattgctgatgcttcagtccattttgaacggcattcaatggttctctgttggttaggtatcatccagcatacctttcagcacccagggtaactataaactggctaaaccgtatctaaacaatcaacaggcttataaagtacaagcagattggcaattctgttttcaatctcatttctcttacaggtagctgctttcttaaaacaggtttaaagaaaacatacaagggtatgacggagatatgattaggagagggaatgctttttgagggcagaacaaaacaacctagaattgaatcacattaaaaacagctttataataaaagagtattgaaaacacaatgcatacacacgtggatacgagtaacactggggaaatatgaataagatgagcagactgtatcaatgtcagtattgtggttgtgatactgtactgcagttctgcaaaatgttatgggttggatgttgattgg

SEQ ID NO: 175358 - DNA, 278 bp, Homo Sapiens
ccaatcaacatccaacccttaattaagggttggagaagaaacaattggtcaagtttggctaaactgtaaataatttctgtggatttgaagatttgaatgggatgggatcaatggtaatagtttgtgcctgataagataagaaagctccctcagattaaaacgggccttgaaagtcattttaaagggtttggactgagtgccaaaggaaatagttaaaaggctttttttatatttatgctttagaaactagcataggcagtaggttggatgttgattgg

SEQ ID NO: 175359 - DNA, 287 bp, Homo Sapiens
ccaatcaacatccaaccccatattgaaattgatccaaactctgatagtcctctagacttaagaggatgaagactttaagttgagtgatggatgactgaagaagaaaaggctaattcaggaggcattttgaatggagaaatagtaagtttggtgataatttcaatatggggtggatgacatgaaaattttgaaggtaacctgcatgataactatgttttggtattgcagaccagaaacaacaaattattgacagaaacagagcaggtccatggttggatgttgattgg

SEQ ID NO: 175360 - DNA, 667 bp, Homo Sapiens
ccatcaacatcccaccctgaatgggtgctttataatgagtttgttctaacaaccaaagaattacatcccggacatggtacagatatcaagccagaatggttggtgaaaattgcccctcaatattatgacatgagcaatttcccacagtgtgaagcaaagagacagttggaccgcatcattgccaaacttcaatccaaggaatattcacagtactgaattcagtgcttagaactgaagttattgagaggacagctttaaaagatgaatgaactcaaaagttcgagttgtgctcttcacgttggttcgataatggcctttatttgaaagctttttaatttttctttacagtaaatattccattctgatttcataaattaaacatttatgcctcccttttgtgttgacactgtagctcatactggaaaagtcgatcaatgttttgcagtttattgaaagtagttctatatataacaatgttataagcatttctttagaaatggttgaaaatgcttctaaaatgtgattatcgaccatggtatgcatgatcgttgtaattgttgacattccttttagaagttgtgaaatgttacaacttgtgcttatgtagacacaatcttctgtctcagtacagaggcactgacttcaataaagtctatttataccgggg

SEQ ID NO: 175361 - DNA, 716 bp, Homo Sapiens
  misc_feature (555)..(555): n is a, c, g, or t
  misc_feature (627)..(627): n is a, c, g, or t
  misc_feature (646)..(646): n is a, c, g, or t
  misc_feature (665)..(665): n is a, c, g, or t
  misc_feature (695)..(695): n is a, c, g, or t
gtacgcccgcgctttcctcgaattatggacagatttaatttgcctcgtcgaagtacgacttatcaagcaggacctttctattcatctaagaacagctctggttactgggtattttatgcaggtgcacatctagaacgaacagggcattacttaactgtgaaagatcaaccaggtggttcagttgcatccctctactgttcttgaccacaaacctgaatgggtgctttataatgagtttgttctaacaacaaagaattacatccggacatgtacagatatcaagccagaatggttggtgaaaattgcccctcaatattatgacatgagcaatttcccacagtgtgaagcaaagagacagttggaccgcatcattgccaaacttcaatccaaggaatattcacagtactgaattcagtgcttagaactgaagttattgagaggacagctttaaaagatgaatgaactcaaaagttcgagttgtgctcttcacgttggttcgataatggcctttatttgaaagctttttaatttttctttacagtaaatattccattnctggatttccataaaattaaacattttatggcctccccttttgtgttggacactgtaggctcataccggganaagtcgttcatgttttgcnggtttattggaagtggtcnatatataccatggtatagggctttcttggnatgggtggaaatgcttccaaa

SEQ ID NO: 175362 - DNA, 662 bp, Homo Sapiens
  misc_feature (430)..(430): n is a, c, g, or t
  misc_feature (455)..(455): n is a, c, g, or t
  misc_feature (462)..(462): n is a, c, g, or t
  misc_feature (510)..(510): n is a, c, g, or t
  misc_feature (521)..(521): n is a, c, g, or t
  misc_feature (528)..(528): n is a, c, g, or t
  misc_feature (530)..(531): n is a, c, g, or t
  misc_feature (543)..(543): n is a, c, g, or t
  misc_feature (552)..(552): n is a, c, g, or t
  misc_feature (555)..(555): n is a, c, g, or t
  misc_feature (565)..(565): n is a, c, g, or t
  misc_feature (582)..(582): n is a, c, g, or t
  misc_feature (588)..(588): n is a, c, g, or t
  misc_feature (606)..(606): n is a, c, g, or t
  misc_feature (645)..(645): n is a, c, g, or t
ccaatcaacatccaaccatactgacagtttgccatggagcaggtcagggcacttgagcaggaaccatccggcatgagcatatatccgttgagacagtagcacttgtagctgccgtaagtgttcatgcacctgtgcttacagggccggggcttcaggccacactcatttagatcttgattacaggtttttccagcataaccaggatgacacttgcacttgtttggcccgatacattcaccatgtttgcatcgtggttggcacacagctttgagctggcaccttatcctggctattcgctgccttaagacgtagaaagctgcaaaacaaatgtccaaaaaaagaaattccagatcttttctctgtaaggaggctggacttgggtatttatcaacttgttacattcccggagacttacacatattcaactttnagtgctttttcttgaaacaaaaaanaatctangacatgtttaaaataagtaatatttttagtcaccattttgttataaanaaaacatttcntaacaananntattaaccaatnattggaagnttntgcctattcnttttataggtcccaaanttttanaattttaaaatatttccngacctttttgtggatggcctgttatttttgcaaattccnatctttttcattttccc

SEQ ID NO: 175363 - DNA, 618 bp, Homo Sapiens
  misc_feature (444)..(444): n is a, c, g, or t
  misc_feature (501)..(501): n is a, c, g, or t
  misc_feature (526)..(526): n is a, c, g, or t
  misc_feature (529)..(529): n is a, c, g, or t
  misc_feature (580)..(580): n is a, c, g, or t
  misc_feature (597)..(597): n is a, c, g, or t
ccaatcaacatccaaccttaaaatatatctgtgggcttgagctaatcatatgcccctaaaacaggaggacgggagagagatatgaagcatgagaaagagcaggaaggctggtttgaagctggaggggaccacataagaaggaatgcaggcagccttgaggtgagagaggggcctccagctgagagccagcaaagaactgaattccgccaacaacctgaatgaacttagaagcagattcttccccagagcctccatgaaggaatgttgtcctgccaacccttatttcagcctttaagaccctgagcagagaatccagccacactgtgcccagactcatgagcctacagaactgcctatgggtattgttttttaaactgcctaaatttggggtaatttgtcacacagcaatagaaaactaatacactggcccaagggtaacttttncttaacctaattacatttggcagtttcctgtcttgggttcctgaatgcatttttttncctgtctgatctagtagtaatattnctncctttgcaggtcaacctttggaaacctttaatataaatcatactgttttgntattgcagtatccagtnattgtttgtttggtcctaagt

SEQ ID NO: 175364 - DNA, 739 bp, Homo Sapiens
  misc_feature (11)..(11): n is a, c, g, or t
  misc_feature (45)..(45): n is a, c, g, or t
  misc_feature (65)..(112): n is a, c, g, or t
  misc_feature (190)..(190): n is a, c, g, or t
gaaaacggggntccccgaaaaaacacctaggccagaactgagagntccttgaaaaccattccccnnnnnnnnnnnnnnnnnnnnnnnnnnnnnnnnnnnnnnnnnnnnnnnntgcattacctgacaccaaccttttctggctgacaatatttattcatgaaaacatatcagctgtctaccttttatatgnaaaccaagtcctgaggttaactaggggctgaagcaaactagcatttaggatgcaaacattcttggatttgtgatgtaaacttgccttgcacagggaagtttgctggtctatacagaatgagaaattcaagccctattttaacccctgccctctttagctttcacaaaacattggtccacgaattaaattttcaaaaagttcccagaccccaaaactaaaatagatgatcccctttcattttcaaagaaaacaatattggaaaaaatctccagcccgcttataaattaagcatttcatatttcttctagaatacaagtagttcttttttgtacaaaagaatacaatatgatttgtcaaaaaacatataaaaagacagctgctcttcctcaaatacatgagctaatgataaaagactttttcatgttaatgtctccaagttcttctttttacataaaaaagaacattatggtggcaaatgtgaattatccttttaatattgaacatggttggatgttgattggggggatcctctagagcgaccgcaggcag

SEQ ID NO: 175365 - DNA, 789 bp, Homo Sapiens
atttcttactttcccatattaggggtgatagccaaaggggttctggtaagagaaagggggacaaacagaactggtaaagaggcccccctggctccaggcctgtccatcaggaagtaaattttacagggcaccaagctttgccccctaaaatcccttaggtgttctttgttcatgcaggcaggtttctgccgcatttgatgtggaggcagtgaagggcttgccctgctggcctctcatcccccttcttcccacaacccttgggcagggctggactcagtaattttgaggaaattgaagatgccatcttcccctgtgagtgacatgtctttaattttttaaaaaactactatttgaaaattggagggggaagaatgggaaggggagttattgccaaatatgttaaatatgggtgggggtgcttgtatatgtatcttcctcaatttccccataaatgaggtatctttttgtcacaccaaaatcaaggggtagggagagggaggaggttgcaaaaagccagatgtgggggaaaagtaacatcaacactgtcccatcctcagccctgaactagctaccatctgatcccctcagacattctcaggattttacaagactgtcagagtggggaacccctcccattaaagatccgggcaggactggggacaggttggaagtgtgatgggtaggggggtggaaggcatggcccggggttagttctctcctcacttgtaaacttgtgtagtttcacagaataaaaacaaaatgcagttttaaataaagaaatttcttttt

SEQ ID NO: 175366 - DNA, 555 bp, Homo Sapiens
  misc_feature (239)..(251): n is a, c, g, or t
tactataagaacacattaattcaatggaaatacactttgctaatattttaatggtatagatctgctaatgaattctcttaaaaacatactgtattctgttgctgtgtgtttcattttaaattgagcattaagggaatgcagcatttaaatcagaactctgccaatgcttttatctagaggcgtgttgccatttttgtcttatatgaaatttctgtcccaagaaaggcaggattacatcnnnnnnnnnnnnnatagcagttggagtggggtggtaggggtattctggggttatcagaaatactcatatagcttggggatttggaatggggtaaatattcatgatggtggtggaaaaatcagtgatacatacgtgtacagtctcagtcccataaaatggggatgttgtgcctacaccacgaggatctagaagaatttgtcaaactataaacggcttggtgattgtgaatgacttggttcttggctgtgggtttttcaatttcctataatgccacatactaacttttaaaaaataaggggatattcttaaagaggccc

SEQ ID NO: 175367 - DNA, 798 bp, Homo Sapiens
  misc_feature (664)..(664): n is a, c, g, or t
  misc_feature (740)..(740): n is a, c, g, or t
aagcataagggtaaatccatccatggttactaaactcagagctaccttcctaaagcttgcctctgccctcgatctgccccttcttcgtattaatcaggcaaatagccccgacctgctcagcgtgtcacagtactattctggagagttggtatcctatgtgagaaaagttttgcagatcatcccggaaagcatgtttacatctcttctaaagatcataaagcttcagacccacgacattattgaagtgcctacccgcctggacaaagacaagctgagggactatgctcagctaggcccacgatacgaggttgccaagcttactcatgctatttccatttttactgaaggcatcttaatgatgaaaacgactttggttggcatcatcaaggtggatccaaagcagttgctggaagatggaataaggaaagagcttgtgaagcgcgttgcctttgccctgcataggggactgatattcaaccctcgagccaagccaagtgaattgatgcccaagctgaaagagttgggagcgaccatggatggattccatcgttcttttgaatacatacaggactatgtcaacatttatggtctgaagatttggcaggaagaaagtatctcgtatcataaattacaaccgtgggagcaagaagtgtaataactttcntaagaaccgaagaattcaagaattggcaaagcatgtaccagtccactcatattccaatacccaagtttacccctgngggatgaatctggaacggttattggtcgacttttgcaaaaaaatcctgggggtcacaa

SEQ ID NO: 175368 - DNA, 492 bp, Homo Sapiens
  misc_feature (479)..(479): n is a, c, g, or t
aatatatccggcctatccagcctaaacatttcactaaaccttttaaaaataatacatttgttttggattgtatagcacgaccatgtggtaccaatttggatgaattcttgatagatttaaatagtgtatgtaattttgtaatgcttagactcttgaagagctactttctgttttaatgttaagattcttgtgtcttagttttttttaacatggatgtaattccatgtaaacaggtatggaagtaggaaatgtttaggctggacttggtggattattaattgactttcgggggttcttgggagtcaacattactaaagcagtgtgaatccctgtttgcttcagggcgagatgtgtgacagaagtggcatcaagctcttacagtcccaaccctccaacggaaatgggcgaagatctcaggaatggcatcgggcacaggaaatcgatagtggctggctgctaccttgggcccttggggatangcccggtattatt

SEQ ID NO: 175369 - DNA, 692 bp, Homo Sapiens
  misc_feature (43)..(43): n is a, c, g, or t
  misc_feature (57)..(57): n is a, c, g, or t
cccaatatatccggcctatccctcattgactagcgataaagcntgttaggtaccccntgtttggagtaggcagagggatcagttcacaagaatcttttggagcagattcattttaaaacataaaaaattatgttaatagaaaggtgacaaaaagcatatttgagaggcaaaactatggctactactgtttgtgccaaaaattatcaaaagttatacttacatatgggtttctgtctgtcttctcacctatagctctgtgaaaaataagtgttgctcactgctgagtactcttacaagtgtgactgcctggggctggtgttgccggtggtaaaggaatttaccaagacagttgtaggggaagaaaaataaaggcaccatttattagagaaagtatgaaaattcattgcaagggtgcaatatgtagccactacagagaaggggctgtctgcaaagaggcaggggctggagggaagttttataaggtcttctggagggggctacatgctgatcgaggttgtgccatttgggctacctgtggagcaaggtcgttgtgtcagcgcgttgtttatggttacttgtctctcagaacaattgttctctcctaccttgggcccctccctggtggttatcaagactccacaaatatccagtgcctcttgcgctttaggatatatattaagaagtcactggct

SEQ ID NO: 175370 - DNA, 454 bp, Homo Sapiens
cccagagaaatgaatcctgtctttttctttctcacttttctaatcgagaattccaccacttcttaacaacctccaatactacaatcctgatctaatcatctcacctgaactacttcaattacctcctaattgattttctcttttactcttacactttattatctacactgtagccagaataattcattaaaaacctaattcagatgacatcactcctcagcacccatctcagcataaaacccaaagtccttacatgatctagcacccttaatatctctctccctttctctcctacaattctcctgcttttccactctgctccaggtatactgcctttactgctactttcttgaacatgccaagcactttcacagcccttgatgtctttgtacttgcctttcctccacctggaaaactccacatttatctccggaaggcggatatatggggatcg

SEQ ID NO: 175371 - DNA, 429 bp, Homo Sapiens
aaaagtgaaaaatgttagttaggcctgacaatatggtaaacagagaatggactctagtttcttctagagatagatacaaacatgcccaccaatatttatctttaatcctcacaacaattctgctaaaccagctcgctctctctaacccatgtcctctacaatcctttctcatccttttctcacaaccctgaaagattatcaagcttggctctttgaagtttgatgaagttacattgcctatgcatttcaaactccttggctccactgaaaatcactaagatcgtattcaaggcagttagttcttaaccctatgcttctgggatcagcagtgtgctcctgctgccaccaaatcccctaaccctcctcaatgaaggccatggcagaggcagagacaggaccagaactgacaggacggtattcagcaaagca

SEQ ID NO: 175372 - DNA, 491 bp, Homo Sapiens
gtttctgtatataaataacatacttagatatttgatatacctttcgtgtagtagtaattttttaacattatgtcatgatcatttccccagttaaaattcttcaagaaacttttcaatagtcatataatgtcttactgtatagctcaagcatactttatcattcccctattcctggatatctaggcatttccagttgtttaaccataatgaatgagactgtaataagcatccctgcacctaaatctgtttgaatgagaaatcatgtccttcagggagattcctagaagtaactcttaagtactaagaaaggttatactaacatatatttgaaagagaattctttggagaagatagaggtatatttttatgttagaaatcagatctgtgtttatcatgcatttctatcttcctattggaaagtctcctgtgtctggcacatgccgggttgacagtgtctgcagtctgccacccgccggtattcagcaaagcat

SEQ ID NO: 175373 - DNA, 123 bp, Homo Sapiens
ccttagatatttctactgtgaattctctgatatttacatagacttaattttggattaaattatttttatatttacttcacttgcaaaaatatattttagtatgaggcctccggtattcagcaa

SEQ ID NO: 175374 - DNA, 472 bp, Homo Sapiens
  misc_feature (80)..(80): n is a, c, g, or t
tgctttgctgaataccgtgcaatcatcatctccactgcattcctaatttcccgaacacgctcatcttttgcatttcgtancagcttctacattcctttccacttcttgaactaagctgatcagttccatgagacgccgacgaaatttggctacctcttcattcactttagtgacgtgttgctcataaatttctgccaaaggtttaaaggtatgtccgccatgcattcctccccaaagtgcacactgatggcagatacacttcttacaagtccagcaaaatacactaagtttttcatggtgattttcacatttgtccttttcattttcttcatgtttggtgagactgcagagttgaagagtatcaagctgttgtgttacttcttctgcccaacgacaatttactagttctcgtagctggagtggagcacggcaatgaggacattgagctctctgctctcggtattcagcaaag

SEQ ID NO: 175375 - DNA, 870 bp, Homo Sapiens
ctcgagagttatccagaaccaacagctggaaacagtatggacacgtttcttcaaaagtgctcttatcatcgtgcgacgaagtgtaggcccagaggaggtagcgggcttggcccgggcagctgtcgtgcagtccccgcggcgagccagcggcagcggcggcggcgatgagacagaagcactaccttgaggctgcagcgcggggactgcacgacagctgcccgggccaagcccgctacctcctctgggcctacacttcgtcgcacgatgataagagcacttttgaagaaacgtgtccatactgtttccagctgttggttctggataactctcgagtgcgtctcaaacccaaagccaggttgacacccaaaatacagaaacttcttaatcgagaagcgagaaactatacactcagttttaaagaagcaaaaatggtgaaaaagttcaaagactccaaaagtgtattgttgatcacttgtaaaacatgcaacagaacagtgaaacatcatggtaaaagtagaagctttgtgtcaacattgaagagcaatcctgccactcctacaagtaaactcagcctgaagacaccagagagaaggactgcaaacccaaatcatgacatgtctggctcgaaaggcaagagcccagcatcggttttcagaacacctacatctggacagtcagtatctacttgctcctcaaagaacaccagcaaaacaaagaaacacttctctcaactaaaaatgttacttagtcagaatgaatcccaaaagattccaaaggtggacttcagaaatttcttatcttctctgaagggtggacttttaaaataagaaatgcctgatgtcaattctgaaactaaagttggtaaaacca

SEQ ID NO: 175376 - DNA, 313 bp, Homo Sapiens
taaatagccagaatgagcccaacccccaaaaccctcccaaagacgattttggagccacccccactgggataatttaattttcccttttggaccgtgtgtttttagtttagaagtgcctgtattcccacaaggtttaagtcagtgaggttggaagatacccctatcttttttattcaaaaagcacaatcaatcttttgtttgaaaatctatataaagtacaacttgcttttagcatgattattttcctaaataaaaagacaaagaatttacttactttatgttaattacgggcatgaagcaaaaggttttcttt

SEQ ID NO: 175377 - DNA, 844 bp, Homo Sapiens
agtgacctgggcaagagagagccggccgccgccgcggacgagcggggcacgcagcagcgccgggcctgcgccaacgccacctggaacagcatccacaacggggtgatcgccgtcttccagcgcaaggggctgcccgaccaggagctcttcagcctcaacgagggcgtccgaaccagctgctgacaaaaggcatggtgatccttcgggacaagattcgcttctatgagggacagaagctgctggactcactggcagagacctgggactctttctcagtgacgtgctgcccatgctgcaaggcatcttctacccggggcagggcaagaacccatccggggccccaaactggcccttgctgacacttccgggaagggccatcaccccctcactggggaaaacctaaaaagaaatgcccctggcccgggcccatgcccgcgtgccccctgccatcgtgcagatgctgctggtgctgcagggggtacatgagtccaggggcgtgactgaggactacctgcgcctggagacgctggtccagaaggtggtgtcgccatacctgggcacctacggcctccactccagcgaggggcccttcacccattcctgcatcctggaaaagcgcctcctccgccgctcccgctcgggggacgtgctggccaaaaaccctggggggcgctccaagagctaccacacgccctctgctgaacccccttgcaggagcaccaaggcggaagggcccgtcggcccggcgggaacccgcattccgcagggactcttggtgccgaaaaagaacctcccggcccccgagaccttcaggggttttctcccaacccggcccgggaaaggg

SEQ ID NO: 175378 - DNA, 435 bp, Homo Sapiens
tgctttgctgaataccgggtgctggaatatgtggatctgggagacctcaagcagttcctgaggatttccaagagcaaggatgaaaaattgaagtcacagcccctcagcaccaagcagaaggtggccctatgcacccaggtagccctgggcatggagcacctgtccaacaaccgctttgtgcataaggacttggctgcgcgtaactgcctggtcagtgcccagagacaggtgaaggtgtctgccctgggcctcagcaaggatgtgtacaacagtgagtactaccacttccgccaggcctgggtgccgctgcgctggatgtcccccgaggccatcctggagggtgacttctctaccaagtctgatgtctgggccttcggtgtgctgatgtgggaagtgtttacacatggagagatgccccatggtgggcaggcagat

SEQ ID NO: 175379 - DNA, 408 bp, Homo Sapiens
cgactctagaggatccccgaatccagcaaaacattactgtgtacatatttatagagtacacagtgatgttttgatacatataatgcataatgatcagatcagggtaattagcccatccatcatctcaagcatcatttctttgtgttgggaacattcattaccctccttttagttatttgaaagtatgtaatatattattgttaactacagtcatcttacagtggtataaaacaccagaacttactcctccttatctagctataattttgtactggatttttaaaaatatggtaactagctgccatcctggggtatctcttttccaccttctcctcttttatgaggaaatgcctgcatgtcttccctggtttggtttggtttggtttggaatggtttgctggattcggg

SEQ ID NO: 175380 - DNA, 384 bp, Homo Sapiens
tgtattggtggtgctctcatactggagggatgagcacaaatggagggaactgtggatgtgcgctgcatgccctcccaagacaccacccagacaacaaatctgtcccccactggcccactgatgttcccacatggtccgccccctcagtctgacaccccaaccttggcgtagcagcgctccatgtggcgcaaggcaacacgtgggttgatggggtgcccacaggaaacacagaagatctgcaggtctgtgtcatcactgtcaccctcgttgctctcctcatcctcgcgcacagcctgctgcttggcacgtagaatgatggagagcaccaccaatacatgtattggtggtgctctcctggttatggaacgggctttggcgataaaa

SEQ ID NO: 175381 - DNA, 1259 bp, Homo Sapiens
  misc_feature (27)..(27): n is a, c, g, or t
  misc_feature (32)..(32): n is a, c, g, or t
  misc_feature (1133)..(1133): n is a, c, g, or t
tttatggggctgaccacctttaattanggaanaaccacccggcgtttgtggtgttttaaattaaacaaaatggcaggcggtacggtccggaattccgggatatcgtcgacccacgcgtcggatgccaaggaccctgcgtcactgccccagtgcctggggcccggctgtgtgcgccccgcccagcccagctccaagtattgctcagatgactgtggcatgaagctggcagccaaccgcatctacgagatcctcccccagcgcatccagcagtggcagcagagcccttgcattgctgaagagcacggcaagaagctgctcgaacgcattcgccgagagcagcagagtgcccgcactcgccttcaggaaatggaacgccgattccatgagcttgaggccatcattctacgtgccaagcagcaggctgtgcgcgaggatgaggagagcaacgagggtgacagtgatgacacagacctgcagatcttctgtgtttcctgtgggcaccccatcaacccacgtgttgccttgcgccacatggagcgctgctacgccaagtatgagagccagacgtcctttgggtccatgtaccccacacgcattgaaggggccacacgactcttctgtgatgtgtataatcctcagagcaaaacatactgtaagcggctccaggtgctgtgccccgagcactcacgggaccccaaagtgccagctgacgaggtatgcgggtgcccccttgtacgtgatgtctttgagctcacgggtgacttctgccgcctgcccaagcgccagtgcaatcgccattactgctgggagaagctgcggcgtgcgggatgggcttgtggcgcggtgttgctgtgtgtggtcacgcggtcggtggacgagcgtgtgagagcaggagcgcaatgtgcgcacagccatgacaaaccgcgcgggattgctggccctgatgctgcaccagacgatccagcacgatcccctcactaccgacctgcgctccagtgccgaccgctgagcctcctggcccggaccccttacaccctgcattccagatgggggagccgcccggtgcccgtgtgtccgttcctccactcatctgtttctccggttctccctgtgcccatccaccggtttgaccngccatctggcctttatcagagggactgtccccgtcgacatgttcagtgcctggtggggctgcgggaagtccactcatccttgctcctctccctgggttttgttaataaaattctgaagaaaccaag

SEQ ID NO: 175382 - DNA, 652 bp, Homo Sapiens
agcatcttcaggagatgaggatgcctctggcagggcagcaagtccagagtcggcctccagcacccctgagtctctccaggccaggcgacatcatcagtttcttgagccagccccagcgcctggtgctgcagtcttatcttcagagcctgcagagcctctgttggtcaggcatccccctaggccccggaccaccggccccaggccccggcaagatccccacaaggctggactgagccactatgtgaaactctttagcttctatgccaagatgcccatggagaggaaggctcttgagatggtggagaagtgcctagataaatatttccagcatctttgtgatgatctggaggtatttgctgctcatgctggccgcaagactgtgaagccagaggacctggagctgctgatgcggcggcagggcctggtcactgaccaagtctcactgcacgtgctagtggagcggcacctgcccctggagtaccggcagctgctcatcccctgtgcatacagtggcaactctgtcttccctgcccagtagtggccaggcttcaacactttccctgtccccacctggggactcttgcccccacatatttctccaggtctccttccccagaccccccaagcatcaataaaagtgtcataaaaccag

SEQ ID NO: 175383 - DNA, 288 bp, Homo Sapiens
gtacccccgcaattaaccctcactaaaggaaacgtgtttttattgccttgcggctgaaaatgtattctcgattctcccccttctctcttttgttgtgcattttttggatgtggtaaaactggcagtttatctgattatctggttttcagaactttgggcgatgtctctgagtgtcatcagttgctctctaggtttgacatagataattaagcaactacaaagcgtgataaagctttagtagggttaattgggggggatcctctagagtcgaaaggggcatccaaatgc

SEQ ID NO: 175384 - DNA, 637 bp, Homo Sapiens
gggtgccttgttcagatgccaggagccggcagacctgtcacccgcaggtggggtgagtctcggagctgccagaggggctcaccgaaatcggggttccatcacaagctatgtttaaaaagaaaattggtgtttgccaaacggaacagaacctttgataagagcgttcacagggacactgtctgggggtgcagtgcaagcccccggcctcttccctgggaacctctgaactcctccttcctctgggctctctgtaacatttcaccacacgtcagcatctaatcccaagacaaacattcccgctgctcgaagcagctgtatagcctgtgactctccgtgtgtcagctccttccacacctgattagaacattcataagccacatttagaaacagatttgctttcagctgtcacttgcacacatactgcctagttgtgaaccaaatgtgaaaaaacctccttcatcccattgtgtatctgatacctgccgagggccaagggtgtgtgttgacaacgccgctcccagccggccctggttgcgtccacgtcctgaacaagagccgcttccggatggctcttcccaagggaggaggagctcaagtgtcgggaactgtctaacttcaggttgtgtgagtgcgaaaa

SEQ ID NO: 175385 - DNA, 756 bp, Homo Sapiens
cattggcatcttggctgcaggtcattacgataatgagagctaggggtaaccatgtccatcagagggctgggacgtaagcattgtgtgaaaaggctagctgtgttgatcttttacatttccgcaaggtatgacagaacaagcattcaaggcggtggtctgaggtgagttagttacagtaataacaaaggcgctagtaacaataaggaaaggaagcaatatgaaggtacaggaaaattaagctttctttaactttaacttagtaggatggtcctagtacagtcatccatgattctgagagaaagatgttttcttgactggagtgtggtcgtttttttcttggctctgcggatggcagtctcagtggttaacagcataaaatagggttcttcccaggctggctcaagttttttctttctgtcttttgatgaggacgtggttttcaggctggtgctggtgtactggaaattctaggggtggtacctagaactaaaagtcttttagttctgagggaagggaaactggaagataaattaagtatatcatttttgctgcatatcctggggcttgaggccccatggtgatgcctcccgctccattcctgctcagcgccgcccaggggacactgcggccctgcctcctcttaagctcttggccttcttggggccttcactgcccctgtgcactgtggccttggacatgaggggccttgtgacttacctggccaccttcaggccttaagagagcaccaccaataca

SEQ ID NO: 175386 - DNA, 492 bp, Homo Sapiens
tttgtgggcgcaagtgctttattcaaagcgaggggtggggggtgagacccgccagcaggggcctggggcaagaggcggggccaagctcacacagggagaggggcaagaatcaattctgttcttcagggtcacaggcagcaggcaagagagttggggggccgggtccagcgcccactgtgccctcagggagcctccccagggcagcattgcatagtgaccagccgactggccttagcctgacctgcgctgagtgggggaggccctgcctccctgccgggcacctttggggaaggggtgcgtgaaggcattggcaggccctgcaatatgagccgaaagacccctggacccaagggggaggctggtcaggggcagggctggggctcaggcgtcctcaagagtccacagagaaaagacgcaagacaaagtcagacgaggcctatagcaaacccactcggtccgctacaaagaacatgagatgagggctgcaaagtg

SEQ ID NO: 175387 - DNA, 894 bp, Homo Sapiens
  misc_feature (18)..(18): n is a, c, g, or t
  misc_feature (523)..(523): n is a, c, g, or t
  misc_feature (549)..(549): n is a, c, g, or t
  misc_feature (582)..(582): n is a, c, g, or t
  misc_feature (592)..(592): n is a, c, g, or t
  misc_feature (608)..(608): n is a, c, g, or t
  misc_feature (691)..(691): n is a, c, g, or t
  misc_feature (697)..(697): n is a, c, g, or t
tgtattggtggtgctctngtggtcctgccagcacccagcaacttggcaaagcaaccagggtaggggagaaccacgagagaagcattaagtgactttcaaagactttcagagtacagccacttggttcctttttgtttgttttccttctcctctcctgcattttcctccatctccaggtacagttcggggtgtggatgcctcttcctccacaagggcacagtgttgtggagggctaagttggttctgtgactcattcctcataccctaactccatctcctttctttaaagtcaaatctcacctacctgtttgggtcagagagatgtgttttaaaagcccccaaggaaggaggctgggactgtgccctgacatgattcttggtgatggaataggtttgtgctctgattctagtttaagagaacgttgctgtatctcagtccaggagaggcagcccatcttggccctggatgaagaaggaaacccacagaggcccagggcttgtcattgggctgccagtgtctgcncagccagcattgagctaatcctgtgngaggatgagagctactgggccgttgtatgatangttggtaggngcttgttgatctgtcnaattccaggtgacaagatctatgcaccccatgcgtcctttgaggggcttcttccccgcaggctctggctggccgcaggctggnttctgntgtgaaaggttatactgccttttctttggttggttggttttttcctctaaaccaacccgcaaaagaccggctgaaaaaccaaaacttccccccggggggacgggaaaaaaattcttttcctgaaaaattaactttttgggggtctcttccccaaattgggcctttcaaaaaaccccttcccttgccttttaaacccc

SEQ ID NO: 175388 - DNA, 1168 bp, Homo Sapiens
  misc_feature (733)..(746): n is a, c, g, or t
  misc_feature (1036)..(1036): n is a, c, g, or t
cctatttcgagaaatataaatacaagacatttatacatgtagcaaacaaatgttaacgatgcaccatttctatgtacatgtataaatgtcttgtatgcttaattcactttttagcatgaatgtttaagggtaagccacaacatctagaaatcactcatagatattgaacaataaaggagaatggtaccgagtgcaggaggaagcagagcgtgtcttcccctgcagcacacagcgacttgcgttgacgaaaggaggaggcaaacgattactctgtaaacaaagttatccttactgtgggagattgccacagcctgctgctgagttgagttaccagacatcctccatgtgagaagcagcgaacatggaatctcagggatggcccacgaactgggtccacatgtaatgagccctgtttaataacgaaggggtcgggggagagcagtccgtctacaacctggaatcagatttgcaaaatttcctgcactgctgtctgacacttgtcctgttgatgccctttctgactgtgttctctgttttctctgtctgctgtctaaccctgtgccttgcctgggataaggacaatgatgaggttacgggtctcggattgtaacgtagaggacttttattaactcggtttagaggttcactgctgctttgtcactttctcaatcaaatgtggccacttaagaaataacagagctggtagaattgcatcctcagatgattattgacnnnnnnnnnnnnnnaaaacagacattccagtgccacccaaatatatatctgtaacgtgcccaagaaatcctagctgcgctcttgagagtgcatgccatggagactggtttagacaccgcgtggagcctagttgcctgttgtcacggcatcttgcactttaggagactaagaccgtcctggttcgtctgtgtgtggtgtgaccaatggtgtgcccagagcactactctcaaaatcactagtgttagcaagtcgtcccgggctggggagcgttcgccgtagtctttggaagctttggctttagatntacccagcccccgcctccccgctggcagtgccctgctctcccgttcggcttctttcctgtttctggggggaactttccccgggaaataacaccctcgttaaaataaaggttttccttttaaaactttaattt

SEQ ID NO: 175389 - DNA, 199 bp, Homo Sapiens
tgacaatcgtgacaacccagtagtttgtgaggggtggatttttctatgtagccgttgttgcgattgtcacctgttgtcacgattgtcaccggtgacaatcgtgacaatccaatcctgaaccacagaggcttgaagtagcagtaggttgtcacgattgtcaccgttgtcacgattgtcaccggggatcctctaggggcgt

SEQ ID NO: 175390 - DNA, 194 bp, Homo Sapiens
  misc_feature (66)..(66): n is a, c, g, or t
aggatccccaatcgtgacacccccagtagtttgtgatgggtggttgggtgggttgtcacgattgtnaccggtgacaatcgtgacaatccaatcctgaaccacagaggcttgaagtagcagtaggttgtcacgattgtcacctccaatcctgaaccacagaggcttgaagtagcagtaggttgtcacgattgtca

SEQ ID NO: 175391 - DNA, 683 bp, Homo Sapiens
  misc_feature (28)..(28): n is a, c, g, or t
  misc_feature (43)..(43): n is a, c, g, or t
  misc_feature (77)..(77): n is a, c, g, or t
  misc_feature (79)..(79): n is a, c, g, or t
  misc_feature (164)..(164): n is a, c, g, or t
  misc_feature (176)..(176): n is a, c, g, or t
  misc_feature (182)..(182): n is a, c, g, or t
tgacaatcgtgacaaccaaagccaatcnactgaaggattcagngacctgctccccaggaatggttagactctccgancncaaatcgacagttcataattccaggcccatcaaaacgggcaccaccttgcccgatgacatgatcacccagcgagaggacgcatanggggtggcagcngaggangagcaggagggagactccggtgagcaggagaccggtgccactgatgcccggcctcggaggcggaagccagccaggctgctggaggctacagcgaagccggagccagaggagaagtccagagccaagcggcagaaggactttgacatagcagaacaaaacgagtccagcgacgaggagagcctgagaaaagagagagctcggtctgcagaggagccctggactcaaaatcaacagaaacttctggaactggcgttgcagcagtacccaaggggatcctctgaccgctgggacaaaatagccagatgtgtcccgtccaagagcaaggaagactgtatcgctaggtacaagttgctggttgaactggtccaaaagaaaaaacaagctaaaagctgaatattctgggagatgatgttcaccttcattttccaaaatgaatatcttaaaaatcttatgcagaaatttgcattttgtacctcaatatttctacgtcatgtgccttag

SEQ ID NO: 175392 - DNA, 906 bp, Homo Sapiens
  misc_feature (114)..(114): n is a, c, g, or t
aagagggccagggttggggggttggcaagccagcggggacgtgggtcaccagccgggtaggggggtggctgcccccaaccaaggaaaggcccgggcgacacagctcccctgtcncccggagcaccctgggcagggagctttgcgcttggtttccggccagcagcattaatgctgagaatccagaggagggcgcaggccccaagccccacgtgttcagggaaggctccagggcccatgtgaagcggttgggccgggccgctcagtcctcccaagggcccctagagccatgatcaggcccaggccacggccccgaccagtggtggggatgacttcagcagcaaggagggtgctgaggatggcggcagcttgggaggagaagagcccaaggacagagaaagtggtgatggcagcctcgttcagataatcccacaggcccagcaggaccagggaagcaatgccggtaagggtcatggagagaagaaggatgccccggcggccaaatcggtccacggtgacccccaggaagacacaggccagggctgcggtgccgctggccagcagagagcacaggtagaagtccgatgggctccctcctcctcccacaggctggtagcagtggcgaatggcatgggcaatgaagttggtgaagcccaggataagcagatttttccagatgttgcggtagttgaggagggaagcaaaggaaaaggaggatgttgcagggagagggcaggtattctccaggtcctgcagggcctcctgggcctcctcccccagcatctgcccatggggccggtttcgctcagccaggatcctcagcacagactgagcctcctcaatctgccgcttcactatcagccaccgtgcggactccaggaacaaaccaggccagccataaaacaggaa

SEQ ID NO: 175393 - DNA, 169 bp, Homo Sapiens
cgccctgagctggcttcggaatgtgtgaggtgaactctgagaaggggatgggaaagggcattcagaggtactagcttgaccagaggcgcgcaaatgaggaatgctgaggcccaggaagcctcctgagtgcatgtcagggcgccagggcgctgacggggatcgggtaagt

SEQ ID NO: 175394 - DNA, 150 bp, Homo Sapiens
tcctacgagggcactctgtacaagaaggggggccttcatgaagccttggaaggcccgctggttcgtgctggacaagaccaagcaccagctgcgctactacgaccaccgtgtggacacagagtgcaagggtgtcatcgacttggcggaggt

SEQ ID NO: 175395 - DNA, 270 bp, Homo Sapiens
  misc_feature (58)..(126): n is a, c, g, or t
  misc_feature (135)..(150): n is a, c, g, or t
agtcagcgccctgcgatcccagcgactcagagaccaaggctcgagaatcactttaacnnnnnnnnnnnnnnnnnnnnnnnnnnnnnnnnnnnnnnnnnnnnnnnnnnnnnnnnnnnnnnnnnnnnntccacgttnnnnnnnnnnnnnnnngccatggcaatcctgctcctagctggtccttgaaccctgggaggattaattcatcttttcacacagcaaacaccaacgggccccctcccagggcgctgacggggatcctctagagtgacc

SEQ ID NO: 175396 - DNA, 888 bp, Homo Sapiens
agcttccagaaaagtgaataaaccacaaatggttgatttatttctgactctcagcccgtctctcacgaagacagagccttattgaccaaaaacttcaggatctgcatctgagcagatcccaaggaaggggaagtcaaaggccccaggtcagaggcccaagttcagacttcagcagcagactagggtcagactttaccaaagtcagaactcgaggttcatgtaagtccttagatcccgctcccaagccctgtctttctcctccctccttctctcctccctccagctcagtgtggccacccgagggggtctctccctcccagccacagctcgggtatcccaagctgggaaatgtgtcactcggggctggggtgctgatctgtagcctagtccttcctggtccctcttgaggacagtggggatgggattggcacggccctcaccccggggtcccagccccattcctggctcccagccccccctcagcagcagtttgaagcccgggctggagatgggcaccccaagtggaaggttgggaggctgaggaccctgcgacagtgacagcaggtgagcagtggatgtgcggtggttggaatcttggaagtgggtgtcacagttctcgcagtactggagggagggagtaggagaccgggtttccgggctccttgtctctccatggctctccctgaccatgcgggctacctcagggaaagcaagcttcttcagcgagcctgagccgcatccctgccacttcagctaacagacccccaaccaggcagccccacggcccaagaagatagctaacagctgccacctggcccgctcaagcagcacacaacagtgggggccaccaaaaggcatcccgggcgttgatattccccccagctcctc

SEQ ID NO: 175397 - DNA, 421 bp, Homo Sapiens
  misc_feature (213)..(213): n is a, c, g, or t
  misc_feature (380)..(380): n is a, c, g, or t
  misc_feature (396)..(396): n is a, c, g, or t
  misc_feature (401)..(401): n is a, c, g, or t
tcagcgccctggggtctgcccaggggagtcaaggccccgaggtgggggggcctattccaggaggagtgggatctcggccctgtccagagcgagttaatgtgtccatctgcccaaccctgtcctgagaaaggacctggttttggccaggacctgacaaatacccaatggcagcagtgtcaacagacgggagtccagccagggtgggtgcccttntcattgaggttagggacagctatccccaggttatgcctggccccacccagcagggagttggggtccccccacaggctgtgagctctgtgggccctggggatgtgatctagctcagatgccctctcatccttgatgtcatagttgagtgcacccaagttggcacccantggcggccaggggaanagctnggttggttggttggcaatag

SEQ ID NO: 175398 - DNA, 259 bp, Homo Sapiens
gatgatttctaaccctagcatcatgacatgtatatagtgtgttgtaagacatttgccagctaatagttacagtactgaagcttgtgaatacgttaattgagaaaactttaagcaggttcaaagttatcccatgatagtggcattcttatttgtatatatgtgctttccttttttatttgtatcaaggcatttaaaatgaatatatgtaacatgtacctaagttttaaaagcataataaaatgaacacatctgaaaccac

SEQ ID NO: 175399 - DNA, 801 bp, Homo Sapiens
ccacgcgtcgggagctctgagacgcctcctgtcccacgctctccggtgtccgtgtctacacaggggtccccatgatacccaccagccccagcagggcagaccggaccggggacgggcacggtgaagggctgcagcctggggtctgacgtggcccctagtgctgtctcaggagaaggctctggaggacttgaggcatgctgggcctggtgcagtgatggcgctaaggagacccggggaaagacagtatcgtggtcacgtatgcttaggaagcagcacagccgtgtccttagggatgttcgcgtccagtaaagacactggtaactgcggtttcagccaacactcttcatggcagtgtcgacctcgggttagcttctgttgtctttgtggatggttttcctggagcggcctgacgttgacgtgttctctggtcccatgtcttagcggggcatggtacggttcgtgcctgacgcgtgcattagggtgttctcttatactttcagtagcatctttccacagcaagggccaaaccctcctggttcccttcagagtctttttggcctgatgatgactcttgagtgataccctgtgatgcagacatgccccagatggattctactttctttaaaactagggactttcaagattaaaaaaaagattgtcactactaatttgacgcctaacttcagaagcttcactgtctacatgtgaacttttccagaaaaactgtgccatggacatttttcctctggggaattaacatctaaattctggtaactattaaaagacagatctggttaattt

SEQ ID NO: 175400 - DNA, 904 bp, Homo Sapiens
aaactgaaccccaagcaagtttctggggagaagtgactagtttcaaaatgtgccagggcttgaagcttcccaaaacacagcccactatttttctgttgtatatcttcatctcaatggtgacatggccactgcccaaggaacttgtggcagggatcccaaggtgaggcagcaacagatgtctgtgaacattgtgcgttaacagtgcctcagagcctctagattcacagctctgcatggtgggcttctgccttcaacaactcactgggcttcatgaagatgccttccatggctttccagtagttgttctgacttggctgggccatgccatgcacctctttttgcccactgataggtcgaccatattgttctcctgtgacagacagcagtacctcagtggaagagtgtttgaaccgcacctcaccatctctcacccagtagggtccattacagagcactgtccagtcatccagataatcaccttcaccttcctcaccaaaagcactcacttcctggtttccagaaagaggtgaagtgaagtggtgactatggaggtttcggccagtgttgacatgtgtcagccggatgggctggccacacttgatgggggttcccctctcacacactgtggcactcttcccccgtatcctccagtaactgttgctgtcatccacagaggttacacctgtcactgactgctgcccactacctgacccatagcgcacgtcgtgtgagtgcagtcggacgttgtggcgcgtattgagtagcttcaccacggagccgcaagtaacgacacccaggctggacgctcccacagcgctccacaaaccccccaacaacagcagaggtactacagccatcctaactgtatcgcggagccccaaatcttcgaagacactgacccact

SEQ ID NO: 175401 - DNA, 1422 bp, Homo Sapiens
  misc_feature (77)..(109): n is a, c, g, or t
cctcacaagcaacgtcatcatcatcgtcattgataaagcccttcaaagtgccttgcgcatcctgatcatctaggttnnnnnnnnnnnnnnnnnnnnnnnnnnnnnnnnnttccacaaatttcttggttgacaccggggtaacacctggccttcatcattgtattcttcctctgactcctcagctcgctttccacaaaatcagacattgctgcagcttctcactctgcctgaagataactgtcctgaaagcccgccgctcctccattgcgctaagcccccaccgaggaaaatggagtcgtcgaaccgagactgggaaaagatagtacggacccaccgcacggccactccaccgccaccaccgccactgctgcgtcaacgtgctacgtcatttccggctccctgtccccgggagtgggcgggccatttcttgttctctctcccgctctcggaagctttcagtctcgtgggtgcagaaaggtaaccgaagcggctcaggaaggcagctgtcactgagcccctggaacagagcgagagtatcgtagtgggcagcagtcagtgacaggtgtaacctctgtggatgacagcaacagttactggaggatacgggggaagagtgccacagtgtgtgagaggggaacccccatcaagtgtggccagcccatccggctgacacatgtcaacactggccgaaacctccatagtcaccacttcacttcacctctttctggaaaccaggaagtgagtgcttttggtgaggaaggtgaaggtgattatctggatgactggacagtgctctgtaatggaccctactgggtgagagatggtgaggtgcggttcaaacactcttccactgaggtactgctgtctgtcacaggagaacaatatggtcgacctatcagtgggcaaaaagaggtgcatggcatggcccagccaagtcagaacaactactggaaagccatggaaggcatcttcatgaagcccagtgagttgttgaaggcagaagcccaccatgcagagctgtgaatctagaggctctgagccactgttaacgcacaatgttcacagacatctgttgctgcctcaccttgggatccctgccacaagttccttgggcagtggccatgtcaccattgagatgaagatatacaacagaaaatagtggctgtgtttggaagcttcagccctgcacatttgaactagtcactctcccagacttgcgtgggtcagttctttctgagtagaggacttgctggtaaaggggcagatgctttttattagtactgataaaacaaactgagggaaacatccctcttagctgggaaacttttactcttcaggagcttggcatcatggactgttaatgtatgtgattttccccctattttctctctccaaaatgataaaaacaataatttcattatg

SEQ ID NO: 175402 - DNA, 287 bp, Homo Sapiens
aaatcaaaaacttttcatttcagattttaaaaagggtaacttgtttttattgcatttgctgttgtttctataaatgactattgtaatgccaatatgacacagcttgtgaatgtttagtgtgctgctgttctgtgtacataaagtcatcaaagtggggtacagtaaagaggcttccaagcattactttaacctcccttaacaaggtatacctcagttccacggttgctaaattataaaattgaaaacactaacaaaatttgaataataaatcgatccatgttttgtaa

SEQ ID NO: 175403 - DNA, 879 bp, Homo Sapiens
  misc_feature (644)..(644): n is a, c, g, or t
cagaagcgggcagaagtggggtctgctttcaggacttcatttcccccactcgttccggccccgcatgctccacgtctgccctttggtctgagttaaaactgcgatgctgaaaagtgcgagctctttccacgaggaggagccacacagggtggcctccgagggtgagtcgctctgctaagcaagggcagccgctgcacgtcagcccgcaggccaagggtccagcttatcctgggtgctctgtgatcagaaggtccttggatcccgaggactgcagctgctgccgtccacagcgcctcagcctctcttcctgtgtggaagcggggcaggcagggctgtggcagacaggcctggcatagcccaggttccaggtgtcctgggcagcctgaccggtttcctgagtagcctcaatgaaaatcacctgagaaaaagaacaatgtaaactaaggaagggttttcccacttaatccaacccagatttctattcaacttaaaggatttaattggcatttgtgagaaataatagtacctgtgtcactgagttgattgatttgggacatagacggttgactttcccagacagcagcttagcggaaagcagcatcccgaagacggtgtcgcatgtcctgagcctgcttgtcacctgngcctcacggtttctcgtcagccccgtcactgatgggaagcagcactgaagtgtgagggcagaaaggacaccgctggagtcaggcgctcccctgcctgtgacccttttccaacaagctgatgctgagccagcgggcctgctttgtccctcatactccctcccaacagtccaaaccccctacccagacaagaagccaccgtcgcctttctggcacacggtggttctgaagaagcgtt

SEQ ID NO: 175404 - DNA, 433 bp, Homo Sapiens
  misc_feature (406)..(406): n is a, c, g, or t
ctactgcagggatagcaacactgcaggatgtcatgaaaagcactttaacatcaggacagatggtaagttctgaggctctgttttcaactgctctacatacaaaatgccctacaagcaaagaaaggcttaaataaatagatggggatgaacatgatgcacgccgtggtgacatgagtggtgtgcaggggtcggacagtgcggaacccgggtgggcaggagcacatctgtggagacacaagtggaggcatctctgggatataggggaggatgtggggggctccttcaaggtggagctagcagaggccatggctcgggaggaagacaggacagggacagtttgtgggccagtgccacacgctctcctatggacttcatgggcctggggcagccctggtatggaaggacnaggccaggctctttctctggagaccaa

SEQ ID NO: 175405 - DNA, 274 bp, Homo Sapiens
  misc_feature (29)..(30): n is a, c, g, or t
gaaaacccgtttcaaattccagctcggtnnccccagtagtttgtgatgggtaatctagatcactattccgtctctgctggggaagcccatcacaaactactggacccatcacaaactactggacccatcacaaactactgcacccatcacaaactactggacccatcacaaactactggacccatcacaaactactggacccatcacaaactactggacccatcacaaactactggacccataccaaactactggacccatcacaaactactgg

SEQ ID NO: 175406 - DNA, 838 bp, Homo Sapiens
  misc_feature (439)..(439): n is a, c, g, or t
acgtgataccgaaagactaatgctatgtaggagctgacacagcacgggaggactatgaccacctaaggaacagtgagctgtgtcaggacagaaatgagcaagcttgagtctccgggcacatctcaggaaacagtaatgcaaggcgcacgtcagggctgtgactcactcctcagagcaggcttgggtccccagggtaagaatgaacagacaagccctcccacatcaagtaagtggaaatggtggggctgcagggcaatgtcgtgctcttgccggtgggctgccagagacatgtcagacccacttctttagtgagggcccattcatttcctctctgggtggcatttcatcataatcactcggtacccacgattcttcctgacaagcctgaaacaagcaggctttgcatccttttcaggcctggggtctggtcctaccccanggggcttctgttttcacccacaacagattcgcctccatgccaaaaacactgctgacagcagggagagaagcgaaaagaggggtccagcacagcccttctgcattcatatatcctattttccatccaacatcacaaactccttgtctcctgctcccaggaggaaccttgggtctcaggagtggtcaatgctgagatgacaaagccattgcaattctgatctccatagtcttgaggcctctagtgttgccaggaggctgtcaggaggagcttgagaagaaagaggcccacgatgtttcacaatgtttatcccaagtggagccaagggacagcctctgcacaccgaggtaattccagatgaattgctccacgctgttccctcctcctttcggtatcacgtgg

SEQ ID NO: 175407 - DNA, 338 bp, Homo Sapiens
tttgacccgttgcaaaaccgctcggtaccccagtctagtgattttaggcggtgggacaccgaatttattcttaatacatgtatttgtagtaaagaatccaaagcgccttattctaagaaatctgacagaagagtacaaggcacatctatatacccaccacctagaatcagccacggttaccattgccttgtattttgctctgtgagtataacatgtttgtacgttgcactattggaaaataggagcagaggtgccgaccttcacccctaataaatactccccctctgtctcctgcgaggaaggaaatcctctcattttcgcctaaaatcactagactg

SEQ ID NO: 175408 - DNA, 576 bp, Homo Sapiens
ccctgggccaaaaaattcccccaaggggcaaattggcctttgaaaggccccccaagagtctcccgacaaaaaggtccttatgaacaccccctatgttcagagctctgtggtgggtacttggatcaatgcccctgtttcagtctcatctgtactcacggcagccctgtggagtacggtgtactggcccagcttacagatgcagaaagcgagacgttctgccatcagataaagtcacgtggctctttagtaacacggacaaggctcctcgccaaggaactcgtggcagaagagggcagcagttggcagtagctgccgatgtctgtccccagctccaccattcctccctgtggctgtgccgtgctcgtggtttcagtgtccgtgtgtccatgtgtctgcccttcaggagctcgcagctggtgtgcttggcggtcccaggcctgtgtagtgtctctcccctgctgcgggcgcccccaccccgattcctctccccagaagcggtgggatgggcccccatgaactgcagcagcatgctgaggtgtccatgttgtctgcctttgtataaagaaacagcctctg

SEQ ID NO: 175409 - DNA, 1019 bp, Homo Sapiens
tctggcatctgtaaggctggggccagtaacacggtacttccacaggggctgccgtgagtacagatgagaatgaaaacagggggcattgatcaaagtaccccaccacagagctgggcccatagaggtgtttcaataagtaactttgtcaggagacttttagggaggaccttcagaaggccaagtgagatgacttccctagaaattctctcagggcatggggaccctggaggactccttggagcctgcagccccctggtgtgcccaaggccccagaatacaccgtgccagggctgttcacaggcgtggggggggctggatgccccagggaggtgcccgcagaagctgggtagacactggaggaggtggggtttggaccaaagtggttcttgcacatagcacaggccggaggcaggctggtacggaggcaaggtgggcatgtgcccgggggtgcaggagggccaggaggccagcttctgaccactggcgtgctgcgtctgggacacagggtggcttggggacaggtgagggtggcagctctgtgtggggtaggagccaggcaccgggttcagtttccggctctgggctgccctcctctcggctgaagaccctgagacgtacttgaacacggatatcctcctcatcaggctgaaggggaaggtctgatcgagcttcagcgccactcgctctgagaggtcgatggaatagcagtaggtgaggccataggccagcccgatggacagcccgcagacattactgaggaaagaggtctggggaatgagccacgaggcacccagcaggagccacggaaccaggactgagggcacaaccatgccaaacaccagggcccgcctcatccgagaacggacggtggtgactcccagcatggcaaaggccactggggtgaaacctctggcatcctccacttcccccagctttgacagtgatgacacagcctcgaatgacaggaagatgatagcggagaagatggcgaagatcacggtgaagaagcagtggcggcc

SEQ ID NO: 175410 - DNA, 938 bp, Homo Sapiens
  misc_feature (696)..(696): n is a, c, g, or t
  misc_feature (704)..(704): n is a, c, g, or t
gcgtcgaggcggggcgcgggaacgacggcggccatggcggcctcggggcccgggtgtcgcagctggtgcttgtgtcccgaggtgccatccgccaccttcttcactgcgctgctctcgctgctggtttccgggcctcgcctgttcctgctgcagcagcccctggcgccctcgggcctcacgctgaagtccgaggcccttcgcaactggcaagtttacaggctggtaacctacatctttgtctacgagaatcccatctccatgctctgcggcgctatcatcatctggcgctttgctggcaatttcgagagaaccgtgggcaccgtccgccacagcttcttcaccgtgatcttcgccatcttctccgctatcatcttcctgtcattcgaggctgtgtcatcactgtcaaagctgggggaagtgcaggatgccagaggtttcaccccagtggcctttgccatgctgggagtcaccaccgtccgttctcggatgaggcgggccctggtgtttggcatggttgtgccctcagtcctggttccgtggctcctgctgggtgcctcgtggctcattccccagacctctttcctcagtaatgtctgcgggctgtccatcgggctggcctatggcctcacctactgctatttcatcgacctctcaaagcgagtggcgctgaagctcgataaaaactttcccttcagnctgatgangaggatatccctgttcaagtacgtctcaaggtcttcaaccgagaaggaaggcaacccacaagcccggaaactgaaacccgcgggccctgggttcctaacccaaaaaagaagttggccaccctccacctggtcccccaaagcaacccctggggtccccaaaaacgcaaacacgccccagtgtggtcaaaaaaacttggccccttctgtggggccttcccctgggaacaccccggg

SEQ ID NO: 175411 - DNA, 969 bp, Homo Sapiens
  misc_feature (757)..(757): n is a, c, g, or t
cagtgcgttgtactatgacagcttgtgtaataaagcagggctggtaccggttcgggaattccgggatatcgtcgaccacgcgtcggaggatatcgtgttcaagtacgtctcagggtcttcagccgagaggagggcagcccagagccggaaactgaacccggtgcctggctcctaccccacacagagctgccaccctcacctgtccccaagccaccctgtgtcccagacgcagcacgccagtggtcagaagctggcctcctggccctcctgcacccccgggcacatgcccaccttgcctccgtaccagcctgcctccggcctgtgctatgtgcagaaccactttggtccaaaccccacctcctccagtgtctacccagcttctgcgggcacctccctgggcatccagccccccacgcctgtgaacagccctggcacggtgtattctggggccttgggcacaccaggggctgcaggctccaaggagtcctccagggtccccatgccctgagagaatttctagggaagtcatctcacttggccttctgaaggtcctccctaagagtctcctgacaaaagttacttattgaacacctctatgtgccaggctctgtgttgggtactttgatcaatgcccctgtttcagtctcatctgtactcacggcagccctgtggagtgacggtgtactggcccagcttgacagatgcagaaagcgagacgttctgccattcagatgaaagtcacgtggctcttttagtnaacacggacaaggctcctcgccaaggaactcgtggcagaagagggcagcagttggcagtagctgccgatgtctgtcccccagctccaccattcctccctgtggctgtgccgtgctcgtggtttccagttgtccgtgttgtccatgtgtctgcccttcaggagctcgcaggttggtgtgcttggcggtcccaggcctgtgtagtgtctctccg

SEQ ID NO: 175412 - DNA, 215 bp, Homo Sapiens
cagctggacaaggatggggatgagaatgaagaggatgacgaggacgaagacgacgacgaggatgacgatgaggatgaagataatgagtccgagggcagcagctccagctcctcctcctcaggggactcctcagactctgactccaactgaggaacagccccaccccagggcagccagggagagcccaggagctcccatccttgtccagcgggtac

SEQ ID NO: 175413 - DNA, 703 bp, Homo Sapiens
  misc_feature (438)..(438): n is a, c, g, or t
  misc_feature (674)..(674): n is a, c, g, or t
cagatgcctacgccgggaaggagtacattatccaggtggcagccaaggacaatgagattgggacatggagtgactggagcgtagccgcccacgctacgccctggactgaggaaccgcgacacctcaccacggaggcccaggctgcggagaccacgaccagcaccaccagctccctggcacccccacctaccacgaagatctgtgaccctggggagctgggcagcggcgggggaccctcggcacccttcttggtcagcgtccccatcactctggccctggctgccgctgccgccactgccagcagtctcttgatctgagcccggcaccccatgaggacatgcagagcacctgcagaggagcaggaggccggagcttgagccttgcagaccccggtttctattttgcacacgggcaggaggaccttttgcattctcttcnagacacaatttgtggagacccccggcgggcccgggcctgccgccccccagccctgtcgaccaagctggccctccttcctccctcaggggaggtgggccatgcagctaacccacccaccaaagaccccctcaccctggccccttgggctggaccctccaatgccagcgactcccaggagcccttgggggacgtgaggggagcctctcacatccgatttctcctcctgccccagcctnctgtctatcccagggtctctgttgccacc

SEQ ID NO: 175414 - DNA, 529 bp, Homo Sapiens
  misc_feature (367)..(367): n is a, c, g, or t
  misc_feature (441)..(441): n is a, c, g, or t
  misc_feature (487)..(487): n is a, c, g, or t
  misc_feature (516)..(516): n is a, c, g, or t
cggatgccagcatggcctgccggaagctggcggtggcgcacacgctgctgctgctcaggcacctgcccatgatcgcggcgctcctgcacggccgcacccacctcaacttccaggagttccggcagcagaaccacctgagctgcttcctgcacgtgctgggcctgctggagctgctgcagccgcacgtgttccgcagcgagcaccagggggcgctgtgggactgccttctgtccttcatccgcctgctgctgaattacaggaagtcctcccgccatctggctgccttcatcaacaagtttgtgcagttcatccataagtacattacctacaatgccccagcagccatctccttcctgcagaagcacgncgacccgttccacgacctgtccttcgacaacagtgacctggtgatgctgaaatccctccttgcagggcttcagnctgcccagcagggacggacaggaccgaccgaggcctgggacggagnaggggcgagggagggagagctcagccggnttcctttgcccct

SEQ ID NO: 175415 - DNA, 967 bp, Homo Sapiens
cctgggtggcgattccggcacgaggcttgggtccatctacatagttgcgtgtttcaacaatgtccatttatccttcaccccgaggcgtgttttgggggctgcaaacacctcccggtagaggctggacctgaggacccttcccacctgtgcccgtcccttcctgaagtcctagccacagcccatcctccataagtcccggcagctctgggtcatgcccttccctggtcacccatctgcccctcacctcgtcatccagggacccagaccctgcaccttccatgtgggcccacagatccttggcaggtacctgaggtgcaccattgagtgtcggatttggggttagcatccagaaagaagaatgcgcatgacgctctgtgaaggctggaactcaggtcttcagggagagaaaggaagactggattgcaccttgatgcctcctgaggaggcggcccccctcttgaggtgggcgtgggcccggcccagccttatccaagtcgctctgtccacctcccccttcctggcccccaccccactcctgtgcctcccaggagccctccctgtgctccaactgcctccgcagaaggaagcctctttctctgtttccctgggtgagggggctggcaggtggctaaccccatttagcatctccaggccctgccatcgtgtctcatcttgctgttatctctagctctttccctcctcccatttcctttagtagttgaattttgcaaagcttgtagcagtagctcagttgcctgcagcatccttgtgtgtagataaattagtcgacagaaactcagcactgggggacagggattgccaagtccggggacataggatgcaagacaagttgttgaggattttggggcaatagccggggcctttgtgaagcgggtgccccatcgacggtcctcaatctttgccggggtaatcctcctaaggttccttttcccccttccctccccca

SEQ ID NO: 175416 - DNA, 988 bp, Homo Sapiens
tgggtccatctacatagttgcgtgtttcaacaatgtccatttatccttcaccccgaggcgtgttttgggggctgcaaacacctcccggtagaggctggacctgaggacccttcccacctgtgcccgtcccttcctgaagtcctagccacagcccatcctccatgagtcccggcagctctgggtcatgcccttccctggtcacccatctgcccctcacctcgtcatccagggacccagaccctgcaccttccatgtgggcccacagatccttggcaggtacctgaggtgcaccattgagtgtcggatttggggttagcatccagaaagaagaatgcgcatgacgctctgtgaaggctggaactcaggtcttcagggagagaaaggaagactggattgcaccttgatgcctcctgaggaggcggcccccctcttgaggtgggcgtgggcccggcccagccttatccaagtcgctctgtccacctcccccttcctggcccccaccccactcctgtgcctcccaggagccctccctgtgctccacctgcctccgcagaaggaagcctctttctctgtttccctgggtgagggggctggcaggtggctaaccccatttagcatctccaggccctgccatggtgtctcatcttgctgttatctctagctctttccctcctcccatttcctttagtagttgaattttgcaaagcttgtagcagtagctcagttgcctgcagcatccttgtgtgtagataaattagtcgacagaaactcagcactggggacaggattgcaaagtcggggacatagatgcagacagttgttgagatttggggatagccgggcttgtgagcggtgcccatttccagatgaagcctttcagcccttctgagtccccggcccttggtgcgatgtctgtgagtttgacctgcccagcgtgtgggctggctcaatgctgaataaagtgggtttgtgtaacccaaacgctctg

SEQ ID NO: 175417 - DNA, 842 bp, Homo Sapiens
  misc_feature (759)..(759): n is a, c, g, or t
  misc_feature (774)..(777): n is a, c, g, or t
ggagcatcagatctttcctccccagagctggaagttggcgctggtggctgccatgatgagtggcattgcagttgtcttggccatggcaccctttgatgtggcctgcacaaggctctacaaccagcccacagatgcacagggcaagggcctcatgtaccgggggatactggacgctctgctgcagacagctcggaccgagggcatttttggcatgtacaagggtataggtgcctcctacttccgcctcggcccccacaccatcctctccctcttcttctgggaccagctgcgctccctctactacacagacactaaataacagccgctttcccagtctccaccaaatgagcactccttggccacttgtgcctccaccactatgtcctggtgactactgattaggtgacctttcatccatccatgggggacagccaaccccactccccatctgttctcagggttgaatcactacaagagatgagtttcccttctttccttgggtgttgctttaaaccttccctacccattcccctgggtaactcacacccctctctcagggctgaacgagtcatcccaaagtgtatttcctcccactcaccactggcaccccttgagtccctcctggctcccatgcacaggtttaaactcctccctccaaaaccaagggaattgagagacccatttcccaggcgtctgggaaccccggggtcctggtagattcaaaggcaccgagattatattgattataaagcggaaaancccgacgggggagannnnacatggcggccgcctcgggcccccagaaacctttctagaccttccctttgggcccgcggggccca

SEQ ID NO: 175418 - DNA, 247 bp, Homo Sapiens
atgggcacagcctctggctcccctggcaggcaggcccagtgggccaggggcactcgacacagtgggcagatgtggcagcaggggcaggagtagaggggtggcagtgcatggcaagggggagctggggccatcaagcagggacacggtggggtcaggccaggaccctgctggtgatggtagcaggcagagaggagacgcctctctagtgcatggacctgctgcggccagggttcgcagagtatccacg

SEQ ID NO: 175419 - DNA, 807 bp, Homo Sapiens
  misc_feature (650)..(650): n is a, c, g, or t
ctggatgggaaagccacagaaggtaccagttatccactcactgacttaggtgcctccactagaattctcagcacgtttttgcagaacctgggcaacaagagcgaaaccccatctcaaaaccacaacaacaacaacaggacaacagagatggacgacggatcgggaaagccaaccagacagcgtgaggccaggacggaaagaggcacagggagctctgctcagtgtcgctacaggggatctctcaggctcacaacgggccactcctctagggaagttctggtctcatcatgatccttgtttggtctcactccccatgtccttctctgtccctcctccaactgccatttatttatttaactgaaaaagtaccaatcacccacataggcatgacatactcatccatgtacccatttcttaaaattgatcattgttaacatttggtgtaatttgctttatttatttttaatgaaataaataaaactttacagaaaatgctttatttttctctttgttccctccccatcctatatttttctcctaaaaaaccctattatcagaaatattagtgtgtattcccagtttcgactttttattttattacacacacactcccacacatagctgtgacaatgaacttcacatagtatggntctgtattttctctttgtttttcaaacttacataagtattttactatttctcatggaaaaactcacttttcccatccaacgttatgtttccttaagatctctctatgttgatataaagaaatctagctcattctttttaatgaaaataaagtatatt

SEQ ID NO: 175420 - DNA, 446 bp, Homo Sapiens
  misc_feature (38)..(38): n is a, c, g, or t
atggctgcagcagcgatatgatgtgtacagcacgtccngtgtcaagcagcgagccaagatccacatgcgggaggtagacccgaggctacgacccccacccaacaccctgtccactgccttcaacaggccccctcgcacagggggtcccttctgctccgtcccgtcatgccatagccacgcttgcctggcacgctctctcctcctctgcttggaacatctgtgcctctgcccacctggctaattctgactcacttcccaggtctcagcttagagacctcttcctccaggaagctctccttgcgctcccaggccccttcccatatttcctgttgccttgaggcagggacttgctccagcgtgcagagctgtgagtgggcatagaccgcttgccattcctcagggccaatggagcccactgacctccacagggtcgtcccagtcctgtc

SEQ ID NO: 175421 - DNA, 199 bp, Homo Sapiens
gtgctcgtctttggccatggccatatctgttgtcccaggccaaagactaacaactgccttgggaatcccttccttgtgtccttaccaaatgatagctcataaaactctgataatgtaacaaatcactttcaaaggagttcccagaagtcttcagaaagactaaaattctgtctcttcctgcaaaagacgagcactccct

SEQ ID NO: 175422 - DNA, 481 bp, Homo Sapiens
  misc_feature (397)..(397): n is a, c, g, or t
  misc_feature (403)..(403): n is a, c, g, or t
  misc_feature (405)..(405): n is a, c, g, or t
  misc_feature (409)..(409): n is a, c, g, or t
  misc_feature (459)..(459): n is a, c, g, or t
gtgctcgtctttgggaatgaaacttctttgtcttaagtgtctaggattaaaacctgaacagtggattatttgaacagagaagctgaaaacaaaataatcttaaaacagcactccctagggagtgctcgtcttttggctacatgaggggccctgaatgacaacttcattctcaaagagtagcaagtgtggacagttttccaagcagcagtcacccaatgtcactcttcttcaagatgaagatcggagccatgacacatgttaactaagcacagactgaatggtttactcagaagataccactgcgaggtgaagtaaacatcagccgagcatcttctctttccaaaattttctgagtctgatcatcaggggaacttcagtacggtgggtatacttttgncatggncntagnctcacgaccatcatatctcaaaagccctttttcgcaaatctcaaatcggnagggtcttcaaagacaaccctt

SEQ ID NO: 175423 - DNA, 850 bp, Homo Sapiens
ttttatatagtaaataaactttatttatcggtttcccagagaggacactgccaacaatcacaggatttgcatacaatacagttaggtatgggctattcacaatttacagtagtgttttttcctctgaaaaatataagtacaaaagctaagtaaacaatgaggtactgccatttgggattttttacatgtcttagcttaaagaactggtctttagcaaatattcaacagatcaacctgaataaaatagtcaattaaatgctctaatttatcagaaaaaatccactaagtttcacctcaaaatgtattgcacaagtctttttaaaaaatcaccctaaaaataaataggaaaggtaagccgttctttaaaaagaatggatgaaaggaatattatgtaagcccataaagcaggttaagttatcaaaatatcttttaaacaacataaaactcttcccaagagaaaactgaagaaaaaactatcaccatttctccactgataaaatctattttaaaggcagtctgcaacttatctgtgggccagatttttcttggtcttttggctacatgaggggccctgaatgacaacttcattctcaaagagtagcaagtgtggacagttttccaagcagcagtcacccaatgtcactcttcttcaagatgaagatcggagccatgacatcagccgagcatcttctctttccaaaattttctgagtctgatcatcagggaacttcagtacggtggttataacttttgccatggtcttagtctcacgacccatcatatactcaaaaagcacttttcgcaaatactcaaattcggtaggttctccaaagagtgagacatccgtacc

SEQ ID NO: 175424 - DNA, 297 bp, Homo Sapiens
gatttagcagttttcttgggtcctttactcttctgttgccatcctccttttgtcctgttcttgttagtttcaccctgcccatcttctgctggctgttcctctgcagcacagatggactgctccttttcaaatacttcagccattgtttgccttgtcaacttaaccaacactgtaactaaggatcctactgtgatgttgttgctatcttcatcatctaacacctgtgattttatatccatggtcacatatggaaaactcccaaggacagccataacctcttcatatttttcatcttca

SEQ ID NO: 175425 - DNA, 331 bp, Homo Sapiens
acagaaaatcactgtgctgatcgggaagcccttcagtgccctgcctgtactcgagcggctccgggcggagaacaagtcggctgtggagatgcggaaagccctgacggacttcattcaagaggaattccagcatctgaagactcaggcagagcagctccacaaccacctccagcctgggagataggccttgcttgctgccttctggattcttggcccgcacagagctggggctgagggatggactgatgcttttagctcaaacgtggcttttagacagatttgttcatagaccctctcaagtgccctctccgagctggtaggcattccagct

SEQ ID NO: 175426 - DNA, 525 bp, Homo Sapiens
  misc_feature (289)..(297): n is a, c, g, or t
aaaacctccaacaggtgactataccacatgggccatggggccaatttttgggaacccccaacagtatgtccactatatgcacaatgggtggcaagtatccccttatggagtataggggccacctggaatcaacaagggtttggagtagatcaatcaccttctgctgcttggatgtggtggatttggtgctcaacctccccaaggacaagctcctccccctgtaatacctccttctaaccaagccggatatggtatggcaagttaccaaacacagtgagccgggactctnnnnnnnnnttgtaattcatgataggcttcgatttcctgtgacactctgaagacatgaaagtagacatcggaaaatgaaaatatttagtttaaaaattgaaatgtttggaacctttagcacagatttgctttggtgaaggacacgtgtcttctagttctgcctttttaagtttttgttcatgatggatatgaacatcatttttctttatgtacaaaaactaaaataaagtcaataaa

SEQ ID NO: 175427 - DNA, 415 bp, Homo Sapiens
  misc_feature (169)..(177): n is a, c, g, or t
acaaaaacttaaaaaggcagaactagaagacacgtgtccttcaccaaagcaaatctgtgctaaaggttccaaacatttcaatttttaaaataaatattttcattttccgatgtctactttcatgtcttcagagtgtcacaggaaatcgaagcctatcatgaattacaannnnnnnnnagagtcccggctcactgtgtttggtaacttgccataccatatccggcttggttaggaggaggtattacagggggaggagcttgtccttggggaggctgagcaccaaatccacccatccaagcagcagaaggtgattgatctactccaaatccttgttgattacatggttgaccgtatactccataaggcggtacttgccacacatttgacatatacggtacatactgtggtggggttc

SEQ ID NO: 175428 - DNA, 558 bp, Homo Sapiens
  misc_feature (532)..(532): n is a, c, g, or t
  misc_feature (534)..(534): n is a, c, g, or t
gggatcctttacggcaggcgtccgcgtcgctagctagtcgttctgaagcggcggccagagaagagtcaagggcacgagcatcggccatgcctttcttggacatccagaaaaggttcggccttaacatagatcgatggttgacaatccagagtggtgaacagccctacaagatggctggtcgatgccatgcttttgaaaaagaatggatagaatgtgcacatggaatcggttatactcgggcagagaaagagtgcaagatagaatatgatgatttcgtagagtgtttgcttcggcagaaaacgatgagacgtgcaggtaccatcaggaagcagcgggataagctgataaaggaaggaaagtacacccctccacctcaccacattggcaagggggagcctcggccctgaacagagcagctgctgatgtctggaggctgattttcctgttctctgttctccactggaaaggttgtttacgacaaacctccttgtcaaagtgtgtaaaaataaaggattgctccatcctacccgcncnctctcgtcaaaaaccaaaccttgt

SEQ ID NO: 175429 - DNA, 594 bp, Homo Sapiens
  misc_feature (28)..(28): n is a, c, g, or t
  misc_feature (34)..(34): n is a, c, g, or t
  misc_feature (55)..(55): n is a, c, g, or t
  misc_feature (61)..(61): n is a, c, g, or t
  misc_feature (99)..(99): n is a, c, g, or t
  misc_feature (162)..(162): n is a, c, g, or t
  misc_feature (174)..(174): n is a, c, g, or t
  misc_feature (204)..(204): n is a, c, g, or t
agtggcttaatacccttcccaggccctnttgagncaatgtcaattaaagtaattnggcatncatttttatttaagggaaaaaatataggtattgtaaantatttggctattcttatagaaaaggaaaaaatcccggttatttaaagggaaaagtaaatttancagttgcctttnttcttaatgtcagggcagatctttattttncagtacagtgggggaaatagaaacatgtgaaaggcaaaaggcaggctcctaaattaatgtcagtgaagttcagggtgggcaaatgagtgtgtgtgaggtataggaaatgctgatgacttctttaatgcttgaagtccgttcacaggtatctagccctagaatgcctagaacaggaagaggcagctggtgttctgcaaaacttggacaggggcaaagttgctgaaaaagttttggtttaacccgaagataagtggaaaagagcttgtccatgaacccaggttctcactctgtttacagaagtgtgttgagtacagttggtgaaggaagaggtaacaaaaaatgctaaatattttatccatgaaacaaaagacgcattgaaacaaaagacga

SEQ ID NO: 175430 - DNA, 749 bp, Homo Sapiens
atagaaacatgtgaaaggcaaaaggcaggctcctaaattaatgtcagtgaagttcagggtgggcaaatgagtgtgtgtgaggtataggaaatgctgatgacttctttaatgcttgaagtccgttcacaggtatctagccctagaatgcctagaacaggaagaggcagctggtgttctgcaaaacttggacaggggcaaagttgctgaaaaagtttggtttaacccgaagataagtggaaaagagcttgtccatgaacccaggttctcactctgtttacagaagtgtgttgagtacagttggtgaaggaagaggtaacaaaaaatgctaaatattttatccatgaaaatgacttccagaaaaggaagaatatgaaccccagaccgaaggggaaaagatagttaaatagtattatctaacctggttggtatttgtaatgaatggtgattttaattagtcattagccataatgatgtttatttacagtataactcctgaatgctacttaaataaaccaggattcaaactgcaagccagccaggccgttcattatttaaaacgttttaatcggggcttccgggtagaaggtggagcggcagggtgtaattgggttgatgggtgggacctgtcttgaccatcggagttttataatcgatggccaggagggcccgggtttgctctcctggttatgtatgtacttgtaacataaccacctaaagaatggtgaaataaatgttcttggaaaattcct

SEQ ID NO: 175431 - DNA, 395 bp, Homo Sapiens
tacggcacttgttagagctacggcgtgggcgaggccaccacatgatgtggtgacaagctcaaggtggagcgctcttttcttcctaccgtgcacatttggaatttcccataagaagtgaaattttcgaggccggggctctgaagatagacaatctggttcaaatcccagcctggcctcttactggcacagcgaggcctcgtgttctcacacggatgctacacctacgtcccagcactgctgtgacggtgggaggaaagcacgcttttggcagagctcctggacagcagtcgcggccccatgaaggctacctccggaaggcactcgcacggctgccgagaaggctcgtaggcatccacggggctggcattgaagacacaggctctaacagtgccgta

SEQ ID NO: 175432 - DNA, 1710 bp, Homo Sapiens
gggccggcgccgccatggcggccgtgtttgatttggatttggagacggaggaaggcagcgagggcgagggcgagccagagctcagccccgcggacgcatgtccccttgccgagttgagggcagctggcctagagcctgtgggacactatgaagaggtggagctgactgagaccagcgtgaacgttggcccagagcgcatcgggccccactgctttgagctgctgcgtgtgctgggcaaggggggctatggcaaggtgttccaggtgcgaaaggtgcaaggcaccaacttgggcaaaatatatgccatgaaagtcctaaggaaggccaaaattgtgcgcaatgccaaggacacagcacacacacgggctgagcggaacattctagagtcagtgaagcacccctttattgtggaactggcctatgccttccagactggtggcaaactctacctcatccttgagtgcctcagtggtggcgagctcttcacgcatctggagcgagagggcatcttcctggaagatacggcctgcttctacctggctgagatcacgctggccctgggccatctccactcccagggcatcatctaccgggacctcaagcccgagaacatcatgctcagcagccagggccacatcaaactgaccgactttggactctgcaaggagtctatccatgagggcgccgtcactcacaccttctgcggcaccattgagtacatggcccctgagattctggtgcgcagtggccacaaccggggctgtgggactggtggagcctgggggcccctgatgtacgacatggctcactgggatcgccggcccttcaccgcaagaaaaccggaagaaaaaccatgggataagatcatcaggggcaagctggcactgcccccctacctcaccccagatgcccgggaccttgtcaaaaagtttctgaaacggaatcccagccagcggattgggggtggcccaggggatgctgctgatgtgcagagacatccctttttccggcacatgaattgggacgaccttctggcctggcgtgtggacccccctttcaggccctgtctgcagtcagaggaggacgcgagccagtttgatacccgcttcacacggcagacgccggtggacagtcctgatgacacagccctcagcgagagtgccaaccaggccttcctgggcttcacatacgtggcgccgtctgtcctggacagcatcaaggagggcttctccttccagcccaagctgcgctcacccaggcgcctcaacagtagcccccgggcccccgtcagccccctcaagttctccccttttgaggggtttcggcccagccccagcctgccggagcccacggagctacctctacctccactcctgccaccgccgccgccctcgaccaccgcccctctccccatccgtcccccctcagggaccaagaagtccaagaggggccgtgggcgtccagggcgctaggaagccgggtgggggtgagggtagcccttgagccctgtccctgcggctgtgagagcagcaggaccctgggccagttccagagacctgggggtgtgtctgggggtggggtgtgagtgcgtatgaaagtgtgtgtctgctggggcagctgtgcccctgaatcatgggcacggagggccgcccgccacgccccgcgctcaactgctcccgtggaagattaaagggctgaatcatggtgctg

SEQ ID NO: 175433 - DNA, 1142 bp, Homo Sapiens
tacggcactgttagagcagggctcagctggcaaagtaactacagactatggagaaactgaaaaggaaaggcttgctcgtcaaaggcagctttataaattgcactatcagtgtgaagatttcaaaagacagttgagaacagtgacttttcggtggcaagaaaaccaaatgcagattaaaaagaaagacaaaattatcgcatctcttaatcaacaagttgcttttggaatcaataaggtttccaaattacagcgtcaaatccatgctaaagataatgaaatcaagaaccttaaagagcaactttctatgaaaagatctcagtgggaaatggaaaaacataatctggaaagcacaatgaaaacatacgtaagcaaactgaacgcagaaactagcagagctctaacagccgaggtgtatttcttacagtgtcgtagggattttggtttgcttcatctagagcagactgaaaaggaatgtctcaatcagcttgccagggtgactcacatggcagcaagcaacctagaatcacttcaattaaaggctgcggtagacagttggaatgccattgtggcagatgttagaaacaagattgcattcctcaggacacagtacaatgaacaaataaacaaagtcaagcaaggatttgccttgagtaccttgcctccagtccagcttcctcctccaccacccagtcctgagatactgatgcagcagttcttaggaagaccccttgtgaaagaatctttctttagacccatacttactgttcctcaaatgcctgcagtttgcccgggagtcgtctctgcaactggccaacctagagcccccctgatgactggcatagcctgggctctgccagcgcctgtgggagacgctgtgcctcccagtgcaggtctgcggagtgatccctccatcatgaattgggagagaattacagacaggctgaaaactgcctttccacagcaaaccagagaggaacttacaagatttcttacggacaattgaaggatgcttatggaaaatcctgtctgaactgacattgatgaaactggttgaagattcccagtttattgaccccaaaagtctccagagtcaggaaaatcaggtgtcaaatgtcactgtgtttcacctagtcattctccat

SEQ ID NO: 175434 - DNA, 397 bp, Homo Sapiens
tacggcactgttagagcctgagaaggccaagacggtcttccttgaagagaaacattcttagttagtgtcagtgaaagcagcgtagtctcatagaggaaactgcacagcgccggcatactgtgtgaggtgttccatagaggaaactgcaaagcgccggcatactgtgtgtggtgttccacagaggaaactgcaaagcgccggcatactgtgtgtggtgttccacagaggaaactgcaaagcgccagcatactgtgtgtggtgttccacagaggaaactgcaaagcgccggcatactgtgtgtggtgttctacagagcaaactgcaaagcgccggcatactgtgtgtggtgttcttctgtttgaggcttttagggctgttgtgctctaacagtgccgta

SEQ ID NO: 175435 - DNA, 950 bp, Homo Sapiens
gtgtgtgcgccgaatctttccatttagtgttttaaggacggccaaggaggtggggtgggggaaatcttcccaaaaggacggtgtttcatttttcccccagagggggaaagagtttgcactggggtgtggggtaaggggcaaaaagggcccaactgggggagtggcctaggggcctgggaagtggaacgtgtgttggcagatcccaggaggctacttgtgactctggaaggaggagttaaagttccatcattacctataaaccgccaaggttctgctgcagggcggataggtgggaggccagcaggggtaaagacggtcccccccaatgacacaatggtatttaaacgaaattagtggccagtaaattggcccaaaggttaggggaagatctcctttaatgcaaggaaagaagcaataatcagtcaaataaatagaagggccaggagcactggggagcctgagggcagggacagggctctccctcctccacaagctttggcagagaactgctgggttggaggcagagatgctctaaggctacatacacaatacacctcccctggggacaggaagggggctcagaatgaatgcagtgatttgaggtctcacctggggttctaaaccccaggtctcatcacccgcccctggtctctttgtggagggggttgtgggggttcctctttcttcagtgatcttatataagaacaataattctaggctcaaaagggtcgtagaaccaattatgaaaccttctggtctcaaaacaggcatctacttacttgaatcagctctttttacagtgctccaggagtaggacccaagcatgtcttgtccacagatgtattcccagcacctggcacccagcaggcacttcacccacatttgttgaataaatgcctggagagggtacaaccagctggacagtgcaagaaagggccctagagcaaaaa

SEQ ID NO: 175436 - DNA, 1345 bp, Homo Sapiens
  misc_feature (389)..(401): n is a, c, g, or t
tacggcactgttagagctgctcagagagggaggaagcagggaagaaatgagccagaagtgagcgctgggaacagggtggagtctccggtgtgtacctcagactgatggtgcccatgtgttcgcctccgccccccacccttgccaccacactcgcccacttgcccaccgggtcccgccggataaatgacaggcccgaggtcagaatggccatccccgggccccgtcctggggtctctgtccccacttccttctggcctgggaggtctgtaattcctgtctcctggactctcctgggaagttccctgctctgcagctctggcccaggagctgcaggctgggagggggcagccaagaagccggagctggcagcatacccagagatccggggnnnnnnnnnnnnnaaatcacgagtgcagctggagcttgctcccccttgttcggaagctggacgttcacttggtgactggtgcctctgcactgacggaggactctgggggtccttcttaccggctctgacctctctcttcgtgcctggtctgggactgggtcagccctgggggatcagaaggggccatctgggcccagctgtgtacagcgagggtgggcagccccctccactccactctgcttccacaaagtcggctcccgagagctcgaggctgcttctgtttatatgtgcagggcccgggcgggtgaagggtcagagagacggacacaaggagccggcaggagggcggagcgaggatgtcctttcccgggagacaagtcgggaaagcctggctggactgcctcagccccgcgcgcctcctggactcagggttccccgtcctgagctcgggagatgttcagagtcacactgccgcccggtctgccacgcagaggtccaacttgccacccgcgtccctggtacctgagaccaccgacatcctcaggttcctgaccgtggcgcccttctacccagcccagtgtgcggccgccgcgctgtctgcacagctgggggcctctgagcctggtgggcttcctggactcttggcctcactccttgccccctccccacgacacccatgagccgaaaggatgtcactaaggatggctgattccccaagggcacccgctctccctccctccctgctggaggaacacgtcatatcaaatgagaggaagatggcctctgatggacagaatttttctcttaactcagcttttgctactttggcaaaaactagcgaggggtaagcagaaacctgcacccagggattggtccctatgtcttgggcccctcctagagcgggtgcagactggatgattttatatgtaaaattcagactcacctcccctttccttg

SEQ ID NO: 175437 - DNA, 450 bp, Homo Sapiens
  misc_feature (306)..(315): n is a, c, g, or t
gctcctagagtcacccgccttggctggccccgtagccctggtgcttccacatctggcaagggttcccccgagcccccgtgagaagctgcgctgcctcagcctgactcctgctgtccacagtgggctctgccgccctgtgatctgcagaaaccactctcgttttctgtctccagatgggccatcccagctctctcacatcaaaacgccaatatggtcaccattcgttactgcgtttgaaatgtggccagtccatacagagacaagttgtaaatgtcaaacattcaccagatttcagacttgaggtgnnnnnnnnnngtgttaagtactcaataacttttatattgattacatgctgggatttgggtgatataaaatgtataacgaatggtgaccatattgaccagtgcgggtccagaagatgggcctgagatagtctctcacatcaaaacg

SEQ ID NO: 175438 - DNA, 456 bp, Homo Sapiens
tgccaggcttggagccagaccaggaggctttataggccaccgcaagcagcagggctccagatgacatcacagggaagatcaagagggtgtggaggggcatcgaagcctctccaggagacaggagacgctggtccagtagagccctaggggcgacgccactcccactcactgtctactctcctctcacctctgcaacactggggacactcacaagagtgtgatccaagtcggccgtcgtcttctgcagctctggagacctgatgctagggaagggcatgcctggcatcaccacacactggcctaggttgtcagagaagttgatgctctcactcatctttcctccaatctttcccctatgcctggttgtggtattaagttacatgcagacaacaggggccagaagatgaacaatggcccatcccactctaggcatggctcctctctcacatcaaaacg

SEQ ID NO: 175439 - DNA, 799 bp, Homo Sapiens
  misc_feature (88)..(108): n is a, c, g, or t
cgttttgatgtgagagatgccggctccagatctccacttcattcacaggtgattttggaaatcctgtaagttacacttcctgttctgnnnnnnnnnnnnnnnnnnnnncctttggctgattcctgctgagtgaggccagttcctcatcaggctcagggcaggtgccttttcaggcgtggcctcctttccatctagcacagcatctttgtctctgttctgtctcctccaaatccaagatgattttaattagtacagacatgtacagtctacaattaaagagtgatttgtactaatatgattttgattcttcctcctctttgctgtcctttcaagacacttgcctggaaaaagctttaatgcacttagttttcctttaggttttctatgactcagatgtaaaggactttctcctgtacagtatattatcccatgcatgtttgttctctctcctgatatattgaacaccccacagttgtgaagccgtgcagtggggatgccccacccccccacagaggcatctaccctcgggtataaggaaagaccttttttcctttgctgtactttgcttgaacagtgtttattggcctgtaaattgtgaacctgtgcgcgaaaagatgtgaaaacacttccaccgcaatgcacttttcctgcccccatgtataccgaattggccatcctgttacaagggatattgcatggtatgcaaacccaacaggcaccccattttttcaaacgggcctacctcttttcgctccacatccccaacactccaacctccccaacttccgccttgccggcg

SEQ ID NO: 175440 - DNA, 613 bp, Homo Sapiens
  misc_feature (13)..(13): n is a, c, g, or t
  misc_feature (29)..(29): n is a, c, g, or t
  misc_feature (46)..(46): n is a, c, g, or t
  misc_feature (68)..(68): n is a, c, g, or t
  misc_feature (92)..(92): n is a, c, g, or t
  misc_feature (112)..(112): n is a, c, g, or t
ctttccaaacatntcatttctccatcaantggatttgtcgtcccantaatcgactcgggttcatggcntctttcacgtcagtcctgttcagnatgtcgaaagagcgagatgnccgacgcaagttagtccgccccacaccgtgaccatcgcactgatcatcatgatgatcgctgaagtgctcatgacagggctccttcctcggtttcttggaagttttcgcaggccagctcctcctcgtgggtaagctcatgatgaatcgccgagcgatgtggccacgggatgagtgacagcactatcgccagaacgacgacgaggatggacattccccagccgaagatcccaacgaagtttctgggcatttcgccatatcccttactcgcgacagtgatgatctccgtgatccacaggctcagcaagaccagcggggcgacaacactgaccagggccatccacaccttgttgacctggaacgaggagtactcgttgaggtgatcgcgcaacaccggcagcttccgcagcgcacagaaaatcacgaggcatgcgagcagggcaaccccaacgatgccgatgttgttgatgaagtggtcgggtaacgtcgagcagattgagacca

SEQ ID NO: 175441 - DNA, 581 bp, Homo Sapiens
  misc_feature (78)..(78): n is a, c, g, or t
  misc_feature (547)..(547): n is a, c, g, or t
ccttccaacatctcatttcttgaagaccttggtattaaatgcatgagaaaccttttgccatctagaaatttctaagtngggttatgttataagactgtaaatttaattgatagggaatttgggatctcaatccggggctttttgaaatcagatcattaaatatctcgtcactttggggacttgttatttttaactatgatgtggatatcctgttttaattatgaagtctagaattggtacatatgttgtatgctttgtaaagaatttcacttggtctaatttattgcatatactagcttctgttggaaaatgactgacagctagaaagtttaaggtaatttctaagtatactacctataagtaactgataagaattaggcatcattcagtgatatagcagatgactaatgggtttttcaggccctgcacttctctttcccattttcctgttgcattcagcctcttcaatgcttagtcacacctccctatagtacaaacaaacaaacaaacagaagaaaggaaggatggtgaattttgcaacagagcngcaaaaaagtcagtcaaagcagaaatgagatgtt

SEQ ID NO: 175442 - DNA, 893 bp, Homo Sapiens
ggatggcctggagctgctgtccatgttgacagctgctctggcccctggagctgccaactctcctaccaccaacccggtgatattgatagtggacaaagtgctcgagacgcaggacctgaatggggatgggctcatgacccctgctgagctcatcaacttcccgggagtagccctcaggcacgtggagcccggagagccccttgctccatctcctcaggagccacaagctgttggaaggcagtccctattagctaaaagcccattaagacaagaaacacaggaagcccctggtcccagagaagaagcaaagggccaggtagaggccagaagggagtctttggatcctgtccaggagcctgggggccaggcagaggctgatggagatgttccagggcccagaggggaagctgagggccaggcagaggctaaaggagatgcccctgggcccagaggggaagctgggggccaggcagaggctgaaggagatgcccccgggcccagaggggaagctgggggccaggcagaggccagggagaatggagaggaggccaaggaacttccaggggaaacactggagtctaagaacacccaaaatgactttgaggtgcacattgttcaagtggagaatgatgagatctagatcttgaagatacaggtaccccacgaagtctcagtgccagaacataagccctgaagtgggcaggggaaatgtacgctgggacaaggaccatctctgtgccccctgtctggtcccagtaggtatcaggtctttctgggcagctcagggagaccctaagtaaaggggcagattaccaaataaagaactgaaattgaattcatcccccccgggccaccctctctacccgtccagccctgccccagaaccttctcaa

SEQ ID NO: 175443 - DNA, 634 bp, Homo Sapiens
  misc_feature (35)..(35): n is a, c, g, or t
tttgacctccccttcttcatctatttctttatttncctgcaactttgtaagagaaataaagaaagagatgaagaaagaccctctcaccaacaaagctccagaaaagcccctgcacgaagtgcccagtgggaaactctttgctgtcttctgaaacgattttaagaaccaataagagaggcgagcgacggaggcgccggtgccaggtggcattcagctacctgccccagaatgacgatgaacttgagctgaaagttggcgacatcatagaggtggtaggagaggtagaggaaggatggtgggaaggtgttctcaacgggaagactggaatgtttccttccaacttcatcaaggagctgtcaggggagtcggatgagcttggcatttcccaggatgagcagctatccaagtcaagtttaagggaaaccacaggctccgagagtgatgggggtgactcaagcagcaccaagtctggaggtgccaacgggacagtggcaactgcagcaatccagccccagaaagttaagggagtgggctttggagacattttcaaagacaagcccatcaaactaagaccaagtcaattggaagtagaaaatgactttctgccccggtagaaagactattgggaaagaag

SEQ ID NO: 175444 - DNA, 394 bp, Homo Sapiens
  misc_feature (361)..(361): n is a, c, g, or t
  misc_feature (367)..(368): n is a, c, g, or t
accctcatcccagaataaaccttgtgaaaatatacttgactctaatatgattatacaaaagagcatggatgcatttcaaatgttagatattgctactataatcaaatgatttcatattgatctttttatcatgatcctccctaccaagcactaaaaagttgaaccattatactttatatctgtaatgatactgattatgaaatgtcccctcaaactcattgcagcagataacttttttgagtcattgacttcattttatatttaaaaaattatggaatatcatctgtcattatattctaattaaaattgtgcataatgctttggaaaaatgggtcttttaaaggtttattctggaatgagnggatcnnctagaggcgaaaggggcagcaaaagc

SEQ ID NO: 175445 - DNA, 1331 bp, Homo Sapiens
ttgaaaatgtactaaaatttaatcatccataaaagctgtaatttaatctgacagtaaaacacaagaagcaatattagagttggtttagtatattatatattttagctttgaaagccatagaaatcagttatcccagtttttttcctataaaagacccatttttccaaagcattatgcacaattttaattagaatataatgacagatgatattccataattttttaaatataaaatgaagtcaatgactcaaaaaagttatctgctgcaatgagtgtgaggggacatttcataagcagtatcattacagatataaagtataatggttcaactttgtagtgcttgataggtaggatcatgataaaaagatcaatatgaaatcatttgattatagtagcaatatctaacatttgaaatgcatccatgctctcttgtataatcatattagagtcaagtatattttcacatctgttataactgctattgcaaaggagaaatactattgtcttattttccaagagatatacacagagcaatttttttctccagggaacttgtgcaaaccaatataagatctaaattcttcacataatatataaaacaggagaagcctcttcagattttttatttttgaagtctggaatgctggcactttccaaatgaggcaacagttcttcattcctgtaatctggctcagagctgctgctgactatgggcctagagcagcagacatgatttcttttaaggcttcttcttttccactggtgttttcctatttatctgtctgaccaggtcataaaatatctcattaacattgatctttgactttgcagaagattctaaaaaggcacagttacaccactgtcttgctaaattctggccctgctctttgccaactactcgctcatcttccaggtcacatttattgccaaccaaaatcattggaacatcttccgtgtccttaacccgtaaaatctgttccctcaggtcctgtaagtcgttaaacgtggactgagctgtaatagaatatactagtgcaaaaccttggccgttcttcatatacaaatccctcattgctgtaaattgctctgtccctgcagtatccaggatttcgagcatacactgttggcaatcgacttcaacttgctttctgtaggaatcttctatcgttgggtcatatttttcaacaaaaattccctgaacaaactgaactgtcagagcagacttcccaacgcctcctgaaccaaggaccactagcttgtactcacgcatgatgtgatctgtttaaatactgacgatccccccggtccggcgcctcctccacctcctcccc

SEQ ID NO: 175446 - DNA, 638 bp, Homo Sapiens
  misc_feature (455)..(455): n is a, c, g, or t
  misc_feature (477)..(477): n is a, c, g, or t
  misc_feature (543)..(544): n is a, c, g, or t
  misc_feature (547)..(547): n is a, c, g, or t
  misc_feature (577)..(577): n is a, c, g, or t
  misc_feature (585)..(585): n is a, c, g, or t
  misc_feature (594)..(594): n is a, c, g, or t
  misc_feature (605)..(605): n is a, c, g, or t
tcatcccagaataaaccttgatagagatattttctgttgtgttgggtgacctttggttgtgaatgtttttgcttggaaccccttttgaggtgggattgcctcttggagacatggaattgaagagcactagaaacaacttcctggacaaggaatgtaggaagtgagtgctgtgtcccaggaagctgctcacactcttaaaatggaagtgtccgttaagccctgggaagacgttctggatagttcttctttcccaaccagggctcatgtctgattctctaatgcgaaaagccttattctaagacccaaggtttggatctgctaccaccagactcctaacatagaaaacttgaattgtcacatacattttacagtttggacttttaagaaaacatggatactactggaacttccccagctgagttacatggtcactttttcagtgcaagccacatatnaacacaggtttttaggtggttncccttgctgcacagcgtgacctcgtggtcgcgcagatgccccgattcttgagcagtgtagactcannggnccctgtggaggtgctgaaacccacagtttncaccacanggcaagcangggagcgcaangcttcaaggtcaaggatgggacaccactcatgc

SEQ ID NO: 175447 - DNA, 585 bp, Homo Sapiens
  misc_feature (34)..(34): n is a, c, g, or t
  misc_feature (54)..(54): n is a, c, g, or t
  misc_feature (89)..(89): n is a, c, g, or t
  misc_feature (164)..(164): n is a, c, g, or t
  misc_feature (187)..(187): n is a, c, g, or t
  misc_feature (554)..(554): n is a, c, g, or t
  misc_feature (559)..(559): n is a, c, g, or t
ctggcctactgtcagttcaagcaaccagctgagnagcaacagtctaaaaagccncaaacagaacacctccatggattcaggaagggctnaggcactgcctttatagtatgtgccaaaaaaaacataactctgaaattggggccccagggaactttgagtttgtnatggggagggaaaaggagtgaancagttctcctcccctccccacaaccttaggccaacacaaactgcaaattggtaagcaagcaccttaatacctcttgtgacagttacggctgaagtggcagggtcaagcttgtaggtgttggcatccccctttttatatcggtcccggaagacatagatgctcccgttacagctggcaatcttccagagggatggggcagagctccaggcctcaggaaggcaaagccgggtgaagctgtctagcaagggattgtagcacaccagggagtccccttcagccacgatgaacaccagatctttatgcacagctgcgtgcatgcgggcctgcaaagggcagcacatagggctgcaaggtttttctgaatagnggatngctagttccaaagggctttaaaagca

SEQ ID NO: 175448 - DNA, 580 bp, Homo Sapiens
  misc_feature (25)..(25): n is a, c, g, or t
  misc_feature (564)..(564): n is a, c, g, or t
tcatcccaaaaaaacccttgagtgnatggtgtgtgaaaacatttcactgaacgatcatcccttacggtgcatcaggtcattcacactggagagaaaccttatgagtgcaatgaatgtggaaaggcattcagccagagtgcttaccttattgaacatcaaagaattcatactggtaagaaaccctatgaatgtgatcagtgtggaaaagccttcattaagaattcatcccttacagtgcatcagagaactcatacaggagagaaaccctatcagtgtaatgaatgcggaaaagccttcagccggagtacaaaccttacacgacatcaaagaactcatacgtgaggaatgttttcactggcccttacctcatgattaactcttcagtaataatcatatgagacatacaatgtagaaacctaataaatgtaatgattgtgggaatctttcagttgaagtacaatatgtcatatcagataataccactgcagagacatccatctaaaagtagagaaatcttgattcagaatgtataatttcctttatatcagaaggtttattctgggngaggggatcctaaaga

SEQ ID NO: 175449 - DNA, 465 bp, Homo Sapiens
catcccagaataaaccttgccagatggattgtggggaaggtgattgggacaaaaatgcaaaagactgctaaagtgagagtgaccaggcttgttctggatccctatttattaaagtattttaataagcggaaaacctactttgctcacgatgcccttcagcagtgcacagttggggatattgtgcttctcagagctttacctgttccacgagcaaagcatgtgaaacatgaactggctgagatcgttttcaaagttggaaaagtcatagatccagtgacaggaaagccctgtgctggaactacctacctggagagtccgttgagttcggaaaccacccagctaagcaaaaatctggaagaactcaatatctcttcagcacagtgaagcgggagtggaagaaggatctaaagggaaaaactgacatgtttatgttatggaaaaagaaatttttctaagtttcatcaa

SEQ ID NO: 175450 - DNA, 468 bp, Homo Sapiens
aaaccttaaaggtaccccgataactttgtgatgtttcgggaaagatttttttcccagagtgaaccctgtgggcgtctccccagtattaccccggatgataggaattgactccggcgtgcacacacgtacacaccccacacacatctatctatacataacggctgaagcccaaacttgtcttgcagatgtagaaattgttgctttgtttctctgataaaactggttttagacaaaaaatagggatgatcactcttagaccatgctaatgttactagagaagaagccttcttttctttcttctatgtgaaacttgaaatgaggaaaagcaattctagtgtaaatcatgcaagcgctctaattcctataaatacgaaactcgagaagattcaatcactgtatagaatggtaaaataccaactcatttcttatatcatattgttaaataaactgtgtgcaacagacaaaaaa

SEQ ID NO: 175451 - DNA, 721 bp, Homo Sapiens
  misc_feature (512)..(512): n is a, c, g, or t
  misc_feature (589)..(589): n is a, c, g, or t
  misc_feature (665)..(665): n is a, c, g, or t
tccccccacggtgtccataaagagcagggagtagcaagggagctgcctcggaacgagaggcccacagatggggccaacaaaccgcctggacttctggagcccacgtccactctggtccgtgtgaagaaaagtgcggccaccctgggcatcgccatcgagggtggcgccaacacccgccagcccctgcctaggattgtcactattcagagaggcggctcagctcacaactgtgggcagctcaaggtgggccacgtgattctggaagtgaatgggctgacgcttcggggcaaggagcaccgggaggccgcccgcattatcgccgaggccttcaagactaaggaccgtgactacattgactttctggtcactgagttcaatgtgatgctctagaggccaaggcctgagggcctcccaccactgcccagcccctggtcccagtccctttccaccgttggcttcatcaagctccttgcggggttggggctgcatggccagggtggcaggaagacatnccccctccatcccagcccactggaccagaactgggagaggaagagagcaggacaaggcagacagaaggtcaggtcangaactggtgcttgtactgggtacacaagtaggcgcccaggacaagtgggttgcaaggacaaggaagaaaggaaaanggaagggcagagtgctggtttcttcaggtttgggttgggggcacttgttgtcccct

SEQ ID NO: 175452 - DNA, 637 bp, Homo Sapiens
  misc_feature (619)..(619): n is a, c, g, or t
gtaaagcttcctctagatgatccccccacggtgtccataaatatttagcaaattcatttaacaaatattattgggcacctgttatgtgagacactgtcctaggcactgtgggataacaacagcaaacacttcacacaacagcctggccttcctgtgttttacaacagctcctaaagatagctgatatcaagacatttgagggacacagttcatgtagaatcaaaatattagtatttcagaataaggattttttttctgaaaagcatacagagaggaaacagcttaaaaataggtcaagacctaaaaacagaatataatcacggaataaactggataacccagacagtccccacagaatttctttcaggtcacagatttcttaaaactcacccccaaaatgtgcctgcttggttgtttgaatcttgcataattaatgtcacaggcgcaagccgctgaacttagttgagatgcagaaaacaaacaaatgcaatgacatatctgagaagcatttatgtaactccggttaagtggtgaggaggggtgtgtgaagacagtgtgcatgcatgagtgtgtattcatatatatgtgtatacatatgaatttcactgttattttccanggtttatggacaccgtgg

SEQ ID NO: 175453 - DNA, 984 bp, Homo Sapiens
ccacggtgtccataaagctggcagagtgggaaggcccttctgcctccctctgctgggtctccatcacgtgagcactcattccgggcaaccagattcagtccagtgaatgccaggttctgtgcttctctcagggctgagagggaaaatgacccatcataagaacctgtggtcctgaggcctgacattccagccaaggtactgccaaaccctggtggctgcaggggggtgccagcaggagactcagaactactactcaggaggtggcaaaggcttagggatgaccctgggatcaaaggctgcttcaggagcaggtttatcaaaatggaaccttgagtgtttgatctctgtctccagctgtcaacaaagcttttctgggcctcttcttgttttatggagtcacctctcagactgtggggcttactatcctctctgcccaccagaggcttgtatcctgactccgtctggcaggggtggggaagggacatgttagcactaaaagactcctttgtaggaaaagatgtttttccaaattgtggagaacatgcttctggctttataaccacagaagggtttttcctaggactgacatgggaaacagagggagcagccagtttatttgctcgttcactggtctggagctttgtccttaattcattcatctctgcatctttaaactggagttcagactgcaatgattggagctttttggagaattccttttccttgtcactgagtgcttgggttttctcttgctcaagaagaaaatgtgatcttctctgttcctctagaacggattccgtctgatgtagtgagtctcgcaaaattttaatttctccattcttaatgagaacttcttcttccattactttcatcttttctttaagttctttgtattgtgcctgaagtacctctaattcgaaattatctttaattggaacagtttctctgtttttccctgaaggattttttgacatgccatctaat

SEQ ID NO: 175454 - DNA, 163 bp, Homo Sapiens
  misc_feature (41)..(56): n is a, c, g, or t
cccgactcttttggatccccccacggtgtccataaattggnnnnnnnnnnnnnnnngaaacttttcttgttagactcagcccaccacatcaagaaggaacacaataggaactctgggatccttagccttttacctatttaactgtatttttaaaagatagggc

SEQ ID NO: 175455 - DNA, 496 bp, Homo Sapiens
ccacggtgtccataaagttgtggataataaaaaggtgatgaaggattcggctccggaactgaatgtgagtagttctgaaacagaggaggacaaggaagaagctaaaccagatggagaaaaagatccagattttaatcaaagcaatggtggaacaaagcggcaaaagatatcccatcaaaattatatagcctatcaaaagcaagttattcgccgaagtatgcgacatagaaaagttcgtggtgagaaagcacttctcgtttctgctaatcagacgttaaaagaattgaaaattcagatcatgcatgcattttcagttgctccttttgaccagaatttgtcaattgatggaaagattttaagtgatgactgtgccaccctaggcacccttggcgtcattcctgaatctgtcattttattgaaggctgatgaaccaattgcagattatgctgcaatggatgatgtcatgcaagtttgtatgccagaagaagggtttaaa

SEQ ID NO: 175456 - DNA, 1228 bp, Homo Sapiens
  misc_feature (26)..(26): n is a, c, g, or t
  misc_feature (190)..(199): n is a, c, g, or t
  misc_feature (1041)..(1044): n is a, c, g, or t
aattcggaacgaggcctcgtgccgtngtattgatgttagtgattgtcaaaataggtttatcatttaaaaaactaggaaattactaagtataaagaagaaaaaccagtattaattaagtgatgagacctgttcattttgttttccctgacttatttccattaccaaacatagtaaaggccagaaaagattnnnnnnnnnnttaacacagccattccattgttttttaccacatggagaaaggaccaggctggaagcatatgtccccccacccttatttatattcctttgagcattgccgttttctagacagacaatccgaaaataattgtgttgataggtctgtttaagcctgaactctgggtgtaaaatgttatccagaagctatagggagctgccttgctcaggtcattggaaatttcaaccctaagactcattggaatttctaagtccgttatgcaccattatgggcatatggagcatattcataccatgaggaggagtctttgtttatgatggactttttaatatggccataattaaactcacactcaaaaaggatgagctattgtcaaaagccaaaagaaaaacagacaaaatgaacatgaagcaaggagtccataaaacaagagttctttaccacgtttaagcaaatgtctctcaaaaaaaattgtatttctgtgcacattagctgagattcacacattttgcacctcagtagtatttcagatgagactcaatgtgtggagaaaactgctaacttgtttggttctactcttaccccctcttctgtggcaatgtggggtcagggccgtatcctaaagtatccacatggtcttaaatggaaatcatgggactctggaaagctggcatgagctggttggagcttttaaacagaagtgctttatgggtatcagatctcttctgacatcaattgtttcaaatcattgttgggctctgtcgtgttctgcaatcttccccattcccctcatgatctctggcttatcttttatccaatctgtatggactttttaggattgatannnncttatagtacaaataattttcagatcccagctttggtaaatgtgttaattctactttgtgaataaataaatgagtgatctgctaaaaatggcaattgtagaattatgttgtatgtaatgtacatatggagaaagaatgtattttgttcattttcttaataaaatgttatatatggacaccgtgg

SEQ ID NO: 175457 - DNA, 706 bp, Homo Sapiens
ccacggtgtccataaatagtatgtctgtacctggaaggtatttttttgagaactgatttatatgaaatatacttgagggtaatgtagcttgtcctttttagtttcaaattcttattcataggcagatactttgaagacaccttaactctttgttgtgtgtattttcccttgcatcagataactatacatggagaaatccattttgttttttggtttatcttctgttcttcctaccttgtgcttgtctgactagtatcacccctgagccagtatacagtaccatcctctccccctaccaagtttggcagaggtgtttatactgcattctcagatctatgaatatttttgtcatcctgcctgagaaagtacatcttccaggcaaaagtagggtatcttgaactcctttcttctgagttgagcagactcactggcttaagcatcccataagcctattatttagtgtgaatttgggacttttatttgtatgttgtcttaacttactgagcctgtgacttgtatttagctgtagtcaagcctcaccagccatatctcatctctgagaggaagactggatagtgagtttggttttggttttggttttaaacccttttaccttttcagtctggcagctcctactgctgctttcctaagttactcaaagcacctgcttcttggtccttggtttcttttgcctggactatcttgt

SEQ ID NO: 175458 - DNA, 705 bp, Homo Sapiens
  misc_feature (53)..(61): n is a, c, g, or t
  misc_feature (274)..(283): n is a, c, g, or t
  misc_feature (295)..(340): n is a, c, g, or t
  misc_feature (478)..(526): n is a, c, g, or t
  misc_feature (567)..(567): n is a, c, g, or t
ccacggtgtccataaatattcatattgctgcccaaaagtatgactgtggaggnnnnnnnnntactttaaaaatccacactttttgttaagaaggaaacatttagcatttatatatttgtgtatggaaaacacttgatattttatccctgttgcatctggctgcacagagcctctcctcaaagatgctacaaaacttgaatataacacattttggaaggctgactaacctcgattctgtgttgtgatgtgcaatactgtttctaatgtttgtatnnnnnnnnnncagtgtaaaccnnnnnnnnnnnnnnnnnnnnnnnnnnnnnnnnnnnnnnnnnnnnnnatccacagtgtcattttttactgtcagaaaagataccccttttgtcattgcaactattttttaaatccagaaatctttgtactgatgtaaatgattgtagttattttggatagtgttttgctaacaaaaggagagacnnnnnnnnnnnnnnnnnnnnnnnnnnnnnnnnnnnnnnnnnnnnnnnnnaatagtagtaaaatacttggaataatttttcatattcttgncattaatattaattttggatttttatgggggaaatatataatttatgacactaattgctaaagtttattttatgttgaattatttttggagctgaaatctttgtaatattaaaagcaactagttctaattcccatttc

SEQ ID NO: 175459 - DNA, 533 bp, Homo Sapiens
  misc_feature (321)..(321): n is a, c, g, or t
tgtgtccttagctcaacgaagcagatatctttggagacgcactgtgagctaggacacagggaggaatgcaagacagccccttccttcaaggaacaatgaagacagaaacagaaatgaagtggggcaggactgtacaaaggtaccgtgggtgccgggaatggtaaatgctgtgttactggtgtacacaaagtggtttgggaacatcgaggaagaaatgagttttcttaggaagatgagagaaaaccctcacaaagtatgtgacacttgagtgggccattctgaaaggttaaagagcgatgtaaaggaaggacaccattgtantaagggtatcaaggctgtgggccattcctgggggagaactgtggtgtggttagatgggtcgcctggctgtgcaggaggagtgctaagacatgaggctgtagagggagatgccggaaggaggtaaaaatgattggtggtttctgctgggagatggcatggatctaaattgggaagaaaagctaatttgaagtggagcctcccaaggtatgtag

SEQ ID NO: 175460 - DNA, 577 bp, Homo Sapiens
ttaaaatccagcaggaaccagcgataacagaagtagaagtgggtgtagtctccattctgatgcatcagctcaaacagctctgagtccaggatctggatgagggagcgcatgttggcaaagtgggtgtccatggcacccccgttggggaagttctggctcatcctcttcatgaggtggctgaagcagctgtaggccagctgatcattgtcgagggtgaccaggagaggcgccagaagatcgcacatgccctgaacatagcccacgtccaggtgctcccacacgtagctgcacatgacgtctctgagcctctcgaggttggggggcgtgaagtaccagtagttgcggtcacacctctgcacatccttgtctatgcggtgcaggtttaaggccacagtgtccagtaattctatagtgtaggcagccgcacacacagccgcaagctcctctcgggcctccagttctccggcctgaggcttctcctggctgcgatcctggggctccctcaaagtgtgagcttgcagggccggcgccattgtagccttcctccccagcggcgtcctcctcttcgaagccaagc

SEQ ID NO: 175461 - DNA, 901 bp, Homo Sapiens
  misc_feature (772)..(842): n is a, c, g, or t
aaaaaatgatttctggggctcccttgggactcccggtataaggggacccgggaaaaggcgcagaaaactcgcgtctgggggtggttacagaaccggtcgtagtgccacccgggcaattatgtattggggaaaaatcccaagccctagggcgtgaaccggaaggttctggggaaagcagggtgtgggcaaggttgggttaccctacgggggccggcgcccccaaacgagggggtttagaaagtttctcaaagggccgaggcggacgacaatatgaagggcgaaaaatggttacggggtggggggaggaaagatgagtgtttattataaattgtgctggcatgtaaacagcctgagcaacatagcaataccgtctcggcgaaaaaattaaaaagttagccaagtgtggtggcacacaactatggtcccagatactcgagaggctgagatgggaggatcgcatgagcctcgggaggtcgagactggaggctgcattgactcatgattgcaccgctgcgttctagcctggttgacagaacgagaccgtctcaaaagaaggaaggaaagaaaaaagctagcccccaagtatcacacaggaggtagaggctggggatgagtctttaaattcctcacgtattaccataactcagattttctttcagtctatttctagatgtttctatagccccctagcctgggcacaatgctggcacattacagatgctcaatacacacaaataagcaaataagtacaatgaattaatagaaaggatgnnnnnnnnnnnnnnnnnnnnnnnnnnnnnnnnnnnnnnnnnnnnnnnnnnnnnnnnnnnnnnnnnnnnnnntgtcgaagacccccggccgtaatggccgaattcccgggcatagtccggtaccgtcgact

SEQ ID NO: 175462 - DNA, 762 bp, Homo Sapiens
  misc_feature (70)..(136): n is a, c, g, or t
  misc_feature (144)..(191): n is a, c, g, or t
ctgctggtgggctgggtgtggtggctcactcctgtagtcccagcactctgggaggattgcatgagcccannnnnnnnnnnnnnnnnnnnnnnnnnnnnnnnnnnnnnnnnnnnnnnnnnnnnnnnnnnnnnnnnnnttatctcnnnnnnnnnnnnnnnnnnnnnnnnnnnnnnnnnnnnnnnnnnnnnnnngctggtggatgaacaacagcctcattcagttgacttctttttccttcaccaagactgactggagctctcccgtgtcagctcgtagcacagaaggtgaagagcctgctgtggggccagggcttcccagattacgtggccccttttggaaattcccaggcccaggacatgctggactgggtgcccatccacttcatcacccagtcattcaacaggaaggattcctgccagctcccaggggctttggttatagaagtgaagtggactaaatacggatccctgctgaatccacaggccaaaatagtcaatgtaactgcaaatctaatttcatcctcctttcctgaggccaactcaggaaatgaaaggacgattcttatttccactgcggttacttttgtggatgtgtctgcacctgcagaggcaggcttcagagctccaccagccatcaatgccaggctgccctttaacttcttcttcccgtttgtttgacaatgctcagatgcatcagttccttaatatacacgtgaaatttgaaaactgtacattcggtgagattaaattttatatacaacta

SEQ ID NO: 175463 - DNA, 671 bp, Homo Sapiens
taaaccattcaaatatccacagtctgatgggcaactttgaaaatgctgtggactacttccacacagcccttggtcttaggcgagatgatacattttctgttacaatgcttggtcattgcatcgaaatgtacattggtgattctgaagcttatattggagcagacattaaagacaaattaaaatgttatgactttgatgtgcatacaatgaagacactaaaaaacattatttcacctccgtgggatttcagggaatttgaagtagaaaaacagactgcagaagaaacggggcttacgccattggaaacctcaaggaaaactccagattccagaccttccttggaagaaacctttgaaattgaaatgaatgaaagtgacatgatgttagagacatctatgtcagaccacagcacgtgactccagtcagtggtcctggtcccactgtcccagtgtaggttagtattccttcacatcctctccatggcttaagaatgtcccacttcctaacgtgactccaaactgcatctctacatttaggaacagagacccgccttaagagactggatcgcacacctttgcaacagatgtgttctgattctctgaacctacaaaatagttatacatagtggatatttgaatgggttatccacgacgattaacatggatggcctt

SEQ ID NO: 175464 - DNA, 529 bp, Homo Sapiens
  misc_feature (15)..(15): n is a, c, g, or t
gctttgagctccttnggtcgctctagaggatccccgcattttcgtaatgatgtatatatgtatagtgaacatattgcttagtaacaaatgaaggacaagcatactacataatataatccatacaattctcttcagttagtgtaaactgcaaatactacagataattctgataataaaatgatatgcacgctgaatcctgctatggtcaccattctaatgtatgtagtatttcaaatttccttccttgtaactttcaaagaaagccatcttattcttgtaaaattttagatggtattatcacagatttaaaaaggttgtattacatattgtttaaactttgtaagtagaaatatatctgttataattatacaggctctgtggagaaataaagttcaaaatatattaatttgtaaaatcagctcgttttaaagtgtgcttgtgttgtcaaaaatatcagatagtaatacacagtgagcatttttaaacaaagggaaacctatatttatgtaactgtatactgaattctgac

SEQ ID NO: 175465 - DNA, 522 bp, Homo Sapiens
gcattttcgtaatgatgtatgtaaagaatttaaagcatatctggcacataataagtgccccataaatgttagaaaagacaagggggaggctgggcacggtggttcacgcctataataccagcactttgggaaatgctctcatttagaaaactgtgaagttaaattcattataaggcataacaataaaactaggtccgatatcactgcatttgattcagttttttcaatgtttacaggtaaataggtaaaatgaaagtagatgctagttcatagcccatctttgggaaagagtacaatctagcaaataaacaaattacatgtataacaatgttggctcgttagaacaaaatacattaaaaaccaatcagaaaaatatcatgaggaccaaaactgcataactcgcaaagctgcattatagaacacaataacaaaacagatgatggtctgtatacatggattagaatggtttgggtgttaaaggggtggatggtaagtgccacttgatacatcattacgaaaatg

SEQ ID NO: 175466 - DNA, 793 bp, Homo Sapiens
cattttcgtaatgatgtatccaaggtaaaaactaacagtaccaaaatttaacagaaactttaacacgttttgtactaagatcccagcaaccacacccatagtggtaggaagactggctgcacaaacaccttctcgtttcagagtcttttcatcaatatttgcagcaactacaagtggtggagcacacgcaaaacaagcagattctccaggaattataagctgtatatgccctgaaactgcattttcactgaccccagattccatccatgtttgtccaagttcattacaagctgtatttattgtcattcgagcttcaaaattgtccacacagctaagaactagatcaacaggttttccttctcctaacccaccattacttattctatccatgaaatgttgaaagttttccactgtggttatattatagttgtgtacttcaaaaagaacatcaggattaatgttcctcagagtatgttctgctgcttgaactttacttaatcctgcttgatgagggtggaagaaaagtctattcatattggctagttccaccttgtcataatcaaagagtagcaacttaccaatgccacatcttgtcagcatttcagcagtcacactacctactccaccaacacctactattgctacggcaaaggtacggattttctcatagtcgcttacaattcccattcgtttcaatgccatcaagcggcttaaaacaaagaaaaatatgttttaaagcttacagtcttttaggtattagtaatacaaatagacatacatcattacgaaaatg

SEQ ID NO: 175467 - DNA, 649 bp, Homo Sapiens
  misc_feature (106)..(114): n is a, c, g, or t
  misc_feature (481)..(481): n is a, c, g, or t
ggggttttaggataaaaatgcactggtgaagcaaatgtagtgccaacagaaggtgattttccagttgtaaatgtcatgcagcatttgaagggactgtgttttcttnnnnnnnnntcacagttacttctaaaccagatttcatttcttttattgttttatgtgccaaaccacgaagtgcattgggcttcaatctctgaacactgtagacccattagaagactgttccgattgttacaaattgtagtgcctgaaaacactcttaagctgattgtcttaacaaaatgaaagttctccaaagacaaaacagaacaattattataacaaaataattatggttgaaatgtctgtggttccttggaaatgctgcgctctttgtgtttttccatcattagtgcagttggaatgaatgtgtataggtcagaggtcttcgtggtcacattttaaaattaggtaaatgacctcatctttcaagcttgaattncattttaaattttaattttattttatacaatgtgtagacagttccctggtctctgcatttagaagtatacacatataaatctgttaattctgtaagtaattttaaaaatatgatggaactctatcttattctttaaacatttaaaattaaacccctttttgtgccaaa

SEQ ID NO: 175468 - DNA, 1005 bp, Homo Sapiens
  misc_feature (727)..(727): n is a, c, g, or t
  misc_feature (818)..(818): n is a, c, g, or t
  misc_feature (848)..(848): n is a, c, g, or t
  misc_feature (931)..(931): n is a, c, g, or t
tgatgtccccgccccggttcccaggcaagtttagggaagtgaaaggcgccaggtgccagtcctggcctctgatgtaacccagcgccccgcagtcccgacacagattcctggatctcagccccatagcagctatgatcccgctgctgctggcagcgctgctgtgcgtccccgccggggccctgacctgctacggggactccgggcagcctgtagactggttcgtggtctacaagctgccagctcttagagggtccggggaggcggcgcagagagggctgcagtacaagtatctggacgagagctccggaggctggcgggacggcagggcactcatcaacagcccggagggggccgtgggccgaagcctgcagccgctgtaccggagcaacaccagccagctcgccttcctgctctacaatgaccaaccgcctcaacccagcaaggctcaggactcttccatgcgtgggcacacgaagggtgtcctgctccttgaccacgatgggggcttctggctggtccacagtgtacctaacttccctccaccggcctcctctgctgcatacagctggcctcatagcgcctgtacctacgggcagaccctgctcttgtgtgtcttttcccttcgctcagttctcgaagatgggcaagcagctgacctacacctacccctgggtctataactaccagctggaagggatctttgcccaggaattccccgacttggaanaatgtggtcaagggccaccacgttaggccaagaaccctggaacagcagcatcacactcacatcccagggccgggggctggttttccagagnctttgccaagttcagcaaaatttggagatngacctgtactcccggctggggttggcagcagccccttggtaccaaccctgcagggtcccagtttctgggcacaaaactggtanggcatccctgcccctcctaactgcctcgggaatatcctgggcaagggtttctggaatggtgaaaccccagattg

SEQ ID NO: 175469 - DNA, 580 bp, Homo Sapiens
gatcccccattcaaatatccacacaatactcatatacattctgtggagtgactggtatatttacaccattaggaatgagttcaacctggcctccaccttcttctttacacaggtcaattgcaaatggccaaatccattgctgagaaaacagcatcagcatctgaactctgagacgcgaggattagttgccgcaaactctcatacattacaggatcaaaaaaagcaaaatcatgccaattgacttttctaccaagcaatactttaattacatgtctattcaatgtgataggacatagttcattctgtaacagacatagtccaagaatcctgccaatgtttctgaaacaattcaaccttgcttctgtgttcttgccaggccttggagtataaaatcctcttttcccaggttggtaaaacaaaggggcattgtcatcaccatcatctgtatcatctaaatccatatctactacacttcgactagagccatggcgctttcggttttcctgctgtaccttttctgaggagtctactaatccaagatccaggatactatcagctccattttcccgtccatgtgccc

SEQ ID NO: 175470 - DNA, 240 bp, Homo Sapiens
gggtcccaaatgactgactgcaccttctgtgcctcagccgttcttgacatcaagaatcttctgttccacatccacacagccaatacaattagtcaaaccactgttattaacagatgtagcaacatgagaaacgcttatgttacaggttacatgagagcaatcatgtaagtctatatgacttcagaaatgttaaaatagactaacctctaacaacaaattaaaagtgattgtttcaaggtg

SEQ ID NO: 175471 - DNA, 288 bp, Homo Sapiens
tggtttgaaacagcactccggcctgagtgctagagcaagaccgtatctctaaataaataacattttatctttacatactgcttgggctgcatcctataaattctgactcataataaatacagttgccacttagtcatttattatgtagtttccaagtagctaatggcatctaagcaccattttgtggtgagtttcacactgagttgcatttgcctgggcgcgtgttctgtggtatgttctttggcatgtctgtgactcagtttgtggcttgacccaaggctgtttcaa

SEQ ID NO: 175472 - DNA, 831 bp, Homo Sapiens
  misc_feature (628)..(628): n is a, c, g, or t
ggggccgaggagggtcgctgtccacccgggggcgtgggagtgaggtaccagattcagcccatttggccccgacgcctctgttctcggaatccgggtgctgcggattgaggtcccggttcctaacgaatctctgctggattggccgtaaccctgtccccgagcgggctcacagggtctgaaggccacgcatgaggcaaaggtaaagttctgagccacccggtgcctccttcccaggactgcaagatggaggaaggcgggaacctaggaggcctgattaagatggtccatctactggtcttgtcaggtgcctggggcatgcaaatgtgggtgaccttcgtctcaggcttcctgcttttccgaagccttccccgacataccttcggactagtgcagagcaaactcttccccttctacttccacatctccatgggctgtgccttcatcaacctctgcatcttggcttcacagcatgcttgggctcagctcacattctgggaggccagccagctttacctgctgttcctgagccttacgctagccactgtcaacgcccgctggctggaaccccgcaccacagctcccatgtgggccctgcaaaccgtggagaaagaacgaggcctgggttggngaggtaccaggcagcccacagggtcccgatccctaccgccagctgcgagagaaggacccccagtacagtgcttctccgccagaatttcttccgctaccttgggctgtcctctctttgcaatctgggctgcgtcctgaacaatggggttctggtctcgctggccctggccctggaaataaggagcccttctacatgggccctgc

SEQ ID NO: 175473 - DNA, 864 bp, Homo Sapiens
  misc_feature (793)..(797): n is a, c, g, or t
  misc_feature (801)..(801): n is a, c, g, or t
  misc_feature (803)..(804): n is a, c, g, or t
  misc_feature (807)..(808): n is a, c, g, or t
  misc_feature (816)..(819): n is a, c, g, or t
gggggctgggaggcgggacgaattattggttgggggaaacccacgaggggacgcggccgaggagggtcgctgtccacccgggggcgtgggagtgaggtaccagattcagcccatttggccccgacgcctctgttctcggaatccgggtgctgcggattgaggtcccggttcctaacggactgcaagatggaggaaggcgggaacctaggaggcctgattaagatggtccatctactggtcttgtcaggtgcctggggcatgcaaatgtgggtgaccttcgtctcaggcttcctgcttttccgaagccttccccgacataccttcggactagtgcagagcaaactcttccccttctacttccacatctccatgggctgtgccttcatcaacctctgcatcttggcttcacagcatgcttgggctcagctcacattctgggaggccagccagctttacctgctgttcctgagccttacgctggccactgtcaacgcccgctggctggaacccccgcaccacagctgccatgtgggccctgcaaaccgtggagaaggagcgaggcctgggtggggaggtaccaggcagccaccagggtcccgatccctaccgccagctgcgagagaaagaccccaagtacagtgctctccgccagaatttcttccgctaccatgggctgtcctctctttgcaatctgggctgcgtcctgagcaatgggctctgtctcgctggccttgccctggaaataaggagcctctagcatgggccctgcatgctaataaatgcttcttccaannnnnaaanannaannaaaaaaannnnccttggtggccgcctcgggccctccagaagctttcttaaaccttc

SEQ ID NO: 175474 - DNA, 683 bp, Homo Sapiens
  misc_feature (229)..(282): n is a, c, g, or t
ttgaaacagcatggtttgataagaaagcaattatttaaaaagtttaatacaaatacatgttaagtgtacaaattaggattcttttgggcaaacaagttgttatctaaagaagaagcaaaacctccttaacagttgtaataaaacctatgcctgaaaagttggtggctattacacggaaatatttatattgtgttcttctactcccaataactacttttaaagaatcagnnnnnnnnnnnnnnnnnnnnnnnnnnnnnnnnnnnnnnnnnnnnnnnnnnnnnnctgtacaagatttttattgaagacacatcagtgcataaatgcctaaatatgaggctataaatacagcaaaatattcaagaactatgttatctcaattttagaaaagggaacttttctgaagagaaatgtttgaagttaaggtactaagatttcactaatttcacacattgggtattaccaacaaattgcgattaaacagaaatcactcttttagacaaaaatatttcccgataatatgaaaaaactggagtttccaaattacaaaaatgttgaaacagaaaggtcagaaaaaacaatgtgaaattaagaaagtatttttgagggtttctttttcacatagctatgcttagtctgggtaaatcctgcacaggcatgttttttgtggcgtccagttggtcata

SEQ ID NO: 175475 - DNA, 280 bp, Homo Sapiens
ccgtcgactgtggtgtaccgtcgtactgtggtgttaccgtcgtactgtggtgttaccgtcgtactgtggtgttaccgtcgtactgtggtgttaccgtcgtactgtggtgttaccgtcgtactgtggtgttaccgtcgtactgtggtgttaccgtcgtactgtggtgttaccgtcgtactgtggtgttaccgtcgtactgtggtgttaccgtcgtactgtggtgttaccgtcgtactgtggtgttaccgtcgtactgtggtgttaccgtcgtactgtggtg

SEQ ID NO: 175476 - DNA, 426 bp, Homo Sapiens
tgcagccaatatgtggtctttaaataattatctaatggtgtttaaaaagatgtttattctgtttgtcaggtacaaagatatttatgatacatgtatgacttgtctaagttattaacattttctctagccttaggtaatgcatgaaagcacatgtttcagtgccactcacataagaagtgcccggtaagtgttagctattattgtctacttgagttactactttctaaaagtatgttgaagtctttttctgtaattgcagatttgttgattttgcatttgagtattttctatattttgaagctgttagatgcatagtcatgatttttggtggaatgttttatcaatttttgaaaattgcctttgtctcatataatgcttttcatattgaactatattttgtctgctattaaatacttccaagcctga

SEQ ID NO: 175477 - DNA, 783 bp, Homo Sapiens
  misc_feature (613)..(672): n is a, c, g, or t
ggggagatccacagcaagctgggcatctgctggagaatcccctccctgaagcgcagtggcgaggcgagtgtggaaggactcctgaaccagctcgtcctggagcacctgcagctggcgcctctgcagtgggatgtgctggtggacggacagccatgtgaccgcgaggctgtggcggcctgccaggtgggcgaccccgtgcgcctggaggtgcggctgaccaaccggagcccgcgcagcgtagggcccttcgccctcactgtggtccccttccaggaccaccagaacggcgtgcacaactacgacctgcacgacaccgtctccttcgtgggctccagcaccttctacctcgacgcggtgcagccgtccggccagtcggcctgcctcggggccctcctcttcctctacacgggagacttcttcctccacatccggttccacgaggacagcaccagcaaggagctgccaccctcttggttctgcctgcccagtgtgcacgtgtgtgccctggaggcgcaggcctgagcccgcctacttccgtccctctttctgcagggccagaggtgaccctgcctggcctcccacaccccctgcaatgagcaagggccttcactgnnnnnnnnnnnnnnnnnnnnnnnnnnnnnnnnnnnnnnnnnnnnnnnnnnnnnnnnnnnntgtagcatcttcctgggctacgcagaagccccggacatggcagcccccaccccattgccacgcccctttcctacactgtttccctggaccatacaccggcctgaaacagac

SEQ ID NO: 175478 - DNA, 256 bp, Homo Sapiens
acaatgagctcggtacccgccgcaattaaccctcactaaagattccttcttgagtgaggcaagcggcttgcagggcgagcctgcaggtgagccgcagtgtgtcggccgacgaatgaggtgatgacgctgtacattaggccaagcaataagcgacgggccggggcgaaaccccacatgcgccgcagactcctttttccctcctctgtcagcctctctgagcccgggcctgggaggctttagtgagggttaattgggg

SEQ ID NO: 175479 - DNA, 515 bp, Homo Sapiens
cccgcaattaaccctcactaaagaccttggcatccttccctctaagccgttggcacctctgtgccacctctcacactggctccagacacacagcctgtgcttttggagctgagatcactcgcttcaccctcctcatctttgttctccaagtaaagccacgaggtcggggcgagggcagaggtgatcacctgcgtgtcccatctacagacctgcggcttcataaaacttctgatttctcttcagctttgaaaagggttaccctgggcactggcctagagcctcacctcctaatagacttagccccatgagtttgccatgttgagcaggactatttctggcacttgcaagtcccatgatttcttcggtaattctgagggtggggggagggacatgaaatcatcttagcttagctttctgtctgtgaatgtctatatagtgtattgtgtgttttaacaaatgatttacactgactgttgctgtaaaagtgaatttggaaataaagttattactctgat

SEQ ID NO: 175480 - DNA, 563 bp, Homo Sapiens
  misc_feature (18)..(18): n is a, c, g, or t
  misc_feature (71)..(71): n is a, c, g, or t
gtaccccgcccaattaanctcactaaagtcgttcctgtcttgggcttaaattgactgaagactttagggtnaaagaatagtaaatgcatgcaaacaaatggggacacactgttcaggagaataatccgactggcatttgtggcagtttttgaaatgtaaatgtattcatgtgtgttcttgtaaatacgtgtcgctcagatgtcctttgaagtgggagggaatcaatccggggataatttcaaatggaatagagtattttgatatagttcattcagagggtgatgtgtacatatctatattgtatatatgtgatgaaaatgcattggctttttgtgcagatacaacctgctctctgtactgctgttggacagtcagtgttttaatgtttctacagttttgctattgcacgatttcatattttgcctctatgatgaacggcaaccattatttgtaactgtttagtgctgtaaagaaatattccaagtgtcattaggattgttgctgccagaactgatatgcatgaatggcacttaaaataaatatattatgttaactctgaaaaa

SEQ ID NO: 175481 - DNA, 323 bp, Homo Sapiens
tcggtacccaattaacctcactaaagccagggatataacccctgaacataaaatgcccagtaaaacccttccttgatcctataaactgggtcccaaaactcaatcacacaaaatgaagcgtcgtgttatcataaggttacttactgaaagcaatcacttttcagttggtctcaactgacacaaagagcaaaggggtaaattaaatttacacagcacacaacagactcaatcccaaatgataatcaggcgggtcacttccaatccacctgtaccatctgcccacccccaaccaaggtaagaactttagtgagggttaattcggg

SEQ ID NO: 175482 - DNA, 157 bp, Homo Sapiens
ccccaattaaccctcactaaaggaattaaccctcactaaggaccggagtagtccatggaatcgaaccacggaattaactctcactaaggaccggagtagtccatggaatcgaaccacgaccatttgtgaacagctttagtgagggttaattcgcggg

SEQ ID NO: 175483 - DNA, 1090 bp, Homo Sapiens
  misc_feature (35)..(35): n is a, c, g, or t
  misc_feature (866)..(914): n is a, c, g, or t
  misc_feature (1061)..(1061): n is a, c, g, or t
gtacccgcccgaattaaccctcatctaaagatagnaacactatagcagtgctagagatgcaaagacgtccctgcccttaaggggcttacaatcttactggagaatataacaggcacataagaagctggactacaaggaagcatgagctaacaaatgccagacttcggaaggcagcgtagtttgagaacatgggattcagagtcacaaaacccacatcctagtcccaacccagtatatcagttaacctctctgggttttttcccagctacaacattaaatagtaagactgagaggctgtctgcatgtttccatcatcattcagatcaaaagctgagatgagctttagggaggaggctgcacctgagcgggacactgaaggaaggcaaaggaggtgtttcagacaagcaaagcagtactgaggtagctgtaagcttggagtttggatgggagacgacagacaagtgtcacaaggagcaacggcagagaggtggttgggtggcaggaagcgccacaacactttccacacaggggtggctggtgtgcctcacatttacagccgatcatttacagcacataattccagagagtagaaaataccagaggataatggcggcattttttcaaacatttcacttgatttccataaagtataaaataatttaacattatacctctacatttcaaaattcacatcaataaaccatcctaattgttaaaatgcaaaccaattcaaagtttacattcttagtaaacataactaaatctcttaattcaaaaggacatttgatacaaattatattactccaataattccaacattcattttccaccatgttccaagcactgtgaaaataaaaatgactatnnnnnnnnnnnnnnnnnnnnnnnnnnnnnnnnnnnnnnnnnnnnnnnnngatcaactctgcctacctagaacggaattactgtgatgcacagcctgatcaaggtacgagccgtggagcacaaagacggattcatccttcccggacgcgtgggtcgacgatatcccggaactccggacctgtaccagcctgctttantagaccaggtgttctatagtgtcactagg

SEQ ID NO: 175484 - DNA, 575 bp, Homo Sapiens
  misc_feature (319)..(407): n is a, c, g, or t
  misc_feature (410)..(435): n is a, c, g, or t
  misc_feature (449)..(467): n is a, c, g, or t
cttgccaagttcggaattttagaggatccccccccgaattaaccctcactaaagaagcgcagactcattgctagattcagtgcccttgagtgtgccagaggtcctctgtgtttgagacaatcctgtgtgtgccaggaggctccgtgtgcaccaggggctctcagaatcccgcttacccagctggagaccatgcctctggcagccccatctcagccagccctgctctctccctcttccctccaggtgaggcaaacttcataggaatctgtacctgaatgtgagctcctgataataaaactctgaggctttggtgagcgcnnnnnnnnnnnnnnnnnnnnnnnnnnnnnnnnnnnnnnnnnnnnnnnnnnnnnnnnnnnnnnnnnnnnnnnnnnnnnnnnnnnnnnnnnccnnnnnnnnnnnnnnnnnnnnnnnnnnaaaaaatgtggggnnnnnnnnnnnnnnnnnnnaaaaagatttttataaacccttttttttgtgggggcgggggcccccccaaaagggaaagggaaaacagggggccaaaatgttgtttcccaaaaagaaaacccgggggc

SEQ ID NO: 175485 - DNA, 694 bp, Homo Sapiens
  misc_feature (183)..(195): n is a, c, g, or t
  misc_feature (221)..(476): n is a, c, g, or t
cggacgcgtgggtctctggtccaacgacaggagtaggcttgtatttaaaagcggcccctcctctcctgtggccacagaacacaggcgtgcttggattcttgacaagcagacctgctcctgcagaggagacagccacatttggaatcgggcaccgagaagacctgagaaaaacccactctctcnnnnnnnnnnnnnggagacggagctctggctcgtgtcannnnnnnnnnnnnnnnnnnnnnnnnnnnnnnnnnnnnnnnnnnnnnnnnnnnnnnnnnnnnnnnnnnnnnnnnnnnnnnnnnnnnnnnnnnnnnnnnnnnnnnnnnnnnnnnnnnnnnnnnnnnnnnnnnnnnnnnnnnnnnnnnnnnnnnnnnnnnnnnnnnnnnnnnnnnnnnnnnnnnnnnnnnnnnnnnnnnnnnnnnnnnnnnnnnnnnnnnnnnnnnnnnnnnnnnnnnnnnnnnnnnnnnnnnnnnnnngtggccgaaaaacccagtctcataacagaagtgcagactcatggctagattcagggcccttgagtgtgccagaggtcctcggggttgagagacaatcctgtgtgtgccaggaggctccgttgtgcacaaggggctctcagaatccgcgttacccagctggagaacatgcctcttggaagcccaatctcagccagccctggatctatccatcttacctc

SEQ ID NO: 175486 - DNA, 784 bp, Homo Sapiens
tcgactctagaggatcccccccaattaaccctactaaaggatcagatatccactgactcctacaagagatagtcaaatctcacaaactggtcggcctttagtgagggttaattcggggccccaattaaccctcactaaaggtgctctccctccccagaaccacacagaacagtttaaataaaccccagcccggtcctcgggctattccttcatttccggacggacacccgcccccacccccagcgggggtggggaggtcttagcggagctcctccgctgtggttcaggcccggtggaaggccgcagaaactggtgaaagtgggggcccagacgtacccaaatggacccccacaggcacccctggggctgggaggcggggtccagtaaaacaggacagcaccagagtaaccagggtcctcggtaaccatggcaactgaccttccgtcctgagcctaaaaggcgaggggcaggatgccctaattagggcattgcaaatgattgggcagcggggaatgcagatccccaataaataggcaccccaataaataggcagagagatactgccctgaccctcataacttttcaaccctggggccatagctgggccttggtagcagggaggggctctgagttcacagcttcgtggtgcctccgctatcacttgctgagctgcagggtgtccagaaggaggcgcttgtgagccgggtcctgcaccccagcctcctcaaagtcctcctcggtgatgtcactacctctgccaggtcttcctgcctcgtgccgaatt

SEQ ID NO: 175487 - DNA, 189 bp, Homo Sapiens
ccaattcctgcactttgccgatttgggatgggggatggaagcaagggcaagggagtgtggtatcctcaaaaaggaccaatgtctaaacaagtccttctgtacttctacccctttcctgttgtgttccaaattgtatctcacctgatgctcactagcaccagtgccaaatcggcaaagtgcaggaattgg

SEQ ID NO: 175488 - DNA, 573 bp, Homo Sapiens
ctcagactcaagaggcacgtgctttcctccttacctgtctgtttcatctttcaaccaataacaactcatggagtccttctcaagctcccaccttctctgacttcatcttctccaaccagccacacaaagctctgtcatgtatggagtgatgtgatttagatccagttcatgcggtaacctcaccatcttaaagtcatataactggcatataacaacatagtcacaggaatggtgtctcatcaccttaagaggctttagagacaagggtgtggcatgtttggggaccattttcagtaaattccatctaaccacagtaggatcactcacattcccccatctgcaaagtgcatttaccctctcccctgaggtttccagatttcatgtcattaaagcataagttcaacatgaaaaatgtcatgtagaccacaatcagatcaaaagtttaaaatcccatctaaaacatccacaccaggtggtgactgaggcttccgagagtgtccattaagtgcagatccttgacataattcccttacctctgtcgacctgtgaaactgaccaaacagttatctgccc

SEQ ID NO: 175489 - DNA, 215 bp, Homo Sapiens
gtcccgcattctgcactttgccgatttggtaggattgtaatttttccgacaaattgtatgatcgctacacacgttatccttcccattgtgtgtgattttcccagtacccaagggtaaaggaactggaaagaaagactcactcaagtgcattcacataaatgggaatctaatagtaatggtgccaaatcggcaaagtgcaggaattggcggggatc

SEQ ID NO: 175490 - DNA, 808 bp, Homo Sapiens
  misc_feature (24)..(24): n is a, c, g, or t
  misc_feature (36)..(36): n is a, c, g, or t
  misc_feature (48)..(48): n is a, c, g, or t
  misc_feature (54)..(54): n is a, c, g, or t
  misc_feature (62)..(62): n is a, c, g, or t
  misc_feature (64)..(64): n is a, c, g, or t
  misc_feature (76)..(76): n is a, c, g, or t
  misc_feature (79)..(79): n is a, c, g, or t
  misc_feature (99)..(99): n is a, c, g, or t
  misc_feature (103)..(103): n is a, c, g, or t
  misc_feature (144)..(144): n is a, c, g, or t
  misc_feature (149)..(149): n is a, c, g, or t
  misc_feature (153)..(153): n is a, c, g, or t
  misc_feature (186)..(186): n is a, c, g, or t
  misc_feature (189)..(189): n is a, c, g, or t
  misc_feature (232)..(232): n is a, c, g, or t
  misc_feature (238)..(238): n is a, c, g, or t
  misc_feature (271)..(271): n is a, c, g, or t
  misc_feature (287)..(287): n is a, c, g, or t
  misc_feature (351)..(352): n is a, c, g, or t
  misc_feature (367)..(367): n is a, c, g, or t
  misc_feature (378)..(378): n is a, c, g, or t
  misc_feature (397)..(397): n is a, c, g, or t
  misc_feature (409)..(409): n is a, c, g, or t
  misc_feature (416)..(416): n is a, c, g, or t
  misc_feature (487)..(487): n is a, c, g, or t
  misc_feature (619)..(619): n is a, c, g, or t
acgggtaaacgacgagcagagccnagctagcagccngaccaggtgaantctagnaggatccncncacaggagtccnacnaaaacggaacccaaaaagcnattncgagaagcgctctacaaagcaagaagaactcgtgaacgcanaagtnatcngacgcctcaggggagctaggtaaaaaaggcgcngcngcttggggtagaacggcgatactaggccgccattggcattaanagcatntgagcatggactgggcaaagaccgctcgcgganacctcttagccaagcnctagttttttacaaatcgtaagccatccatattggcaaaaaccaagcaggccaccgccagtagnnaacgcaccccgcganactgttttgcncaaaaggtttgggcctatnagcaaaccgcanaaacccnagggcgattatgctatcgcacagcatttttctagacgaacctgcctacaggatgctgggcgaaatatgccngtagttctttcatgcggaccgacccgtagatgataaacactaggccggaagaacacttggcgaagaattgattgggtttactggctgattcaggaaatacggaattaaacttccgtgggcgcgccgcatgangaagaacgggcgaaacgactggcggaaggatttgcttatgttgaagtattgccgaagatgagtctggaaggcgttgcccgcgtgctggccggggctaaatttgtagtgtcggtggatacggggttaagccatttaacggcggcactggatagacccaatatcacggtattatgacaccgtgggtaccga

SEQ ID NO: 175491 - DNA, 507 bp, Homo Sapiens
  misc_feature (32)..(32): n is a, c, g, or t
  misc_feature (37)..(37): n is a, c, g, or t
  misc_feature (78)..(79): n is a, c, g, or t
  misc_feature (118)..(118): n is a, c, g, or t
gtcacggcgtccattaacgcttccttcggtgntccantagggtcttgccttacgccggttaaagagttcttcagcgannggtgcgttgtgtggccgtggtgtgctgaggtggcgaatngtccggtcacgccggcacctagcagggctggggtattcggcatggcgcgcacaatcgcacaggtgtcgccaagccagtgtttgagtttgcaggtggtgatgcctgcagcgattgagataaccagtggtgtgttgggttgcactggaagtggcagggtggcacacacgtcaggcatcacttggggtttcacggccagcacccaggtgctggtgtcggtggccgcttctgtggctgtggtgacggccttgatgttgaagtcggcgataagtgcgtcgcgcagtgcggcgattggttcgatgacgcatattgacgtgctgggggcgccttggcgaatcatgcctgcgatcatgctgcgtgccatattgccgccgccgatgaatgcgatccta

SEQ ID NO: 175492 - DNA, 237 bp, Homo Sapiens
ttacgttttgagattgctctctcacatcaaaacgcgcgttttgatgtgagagacaggaagtgccatctaaagacgttacccttcacaatttggaaaaaatgtgatggcacccaaataatttttcatggtgaatttcacccagaggatccctgttaggactccacattatgttccctttgtccatgttttggtttgtttgtatgaaaacttgtatctgtgttctctcacatcaaaacg

SEQ ID NO: 175493 - DNA, 511 bp, Homo Sapiens
  misc_feature (131)..(131): n is a, c, g, or t
  misc_feature (137)..(137): n is a, c, g, or t
  misc_feature (171)..(171): n is a, c, g, or t
  misc_feature (240)..(240): n is a, c, g, or t
  misc_feature (301)..(301): n is a, c, g, or t
atccccgcgttttgatgtagagagatgatacaggagagcagtctcaggggtatgcctgcagctgcaggaagatatatggggaacagacacacaactcctcctttcccagataggcacaacaaggggacacngaaacnggtccaggtttccttggtatactcttccaccccngatcctgagaaactcttagtggtggtaagagacttgtctcctttgaactaactcggccagaaaacactntcaggtttgttttctttaaatcgcctgtccttgacgccaggccacctttggttttcttcanctcctcatttctacatttgggccaaaacctgtgactggtgttggagaagaggctgtcttgcaacccaggaagcagtgggcaatggcagctcatcctgagttaactcctgtatcctaaaagcctctggccacacgcccaatcttatctctcacatcaaaacgcctggcctcaccacctactttgtctctctgtctctctcacatcaaaacg

SEQ ID NO: 175494 - DNA, 248 bp, Homo Sapiens
cgttttgatgtgagagaccgaggattcctcagagctgtctctgaacaagaatgatggtcagactccatggagaatgcctcaaagataacatgaaaaagcagcgggggtctccttaaacggagagtgttactttggttcacaggatatccttgcgggcctgagagggcacctcaaagtccacatcgtgtcatgaaaaaaatataaaaggatttgggagaaggaaaacaaacttctctcacatcaaaacg

SEQ ID NO: 175495 - DNA, 427 bp, Homo Sapiens
  misc_feature (368)..(368): n is a, c, g, or t
cctggttgtttttatagctattttattatctctctgcattagtgctgccggctctggtttaaagcaagcgtttgcaggtaattggaaaaaagtgtttattgtttgtgagtgtgtgtgttctttatcgaatgatttaagtgcgtttaccaaggaatgtggctttgtactttcccgtttccttgtttactaattgccacgttagaacaaaaatctagatggaattttgatttatattgttaatcatgaataaattgatgcaaaacctgaagaaaaggtcaagttatatgatcggtggatgtatcttagggattgtctttattacccacccttggtttgttacctttttctcccttacataatgagaactntaagggttggtcttaaactgggtaaaattcatttgtggttcagttttacaaaacctggt

SEQ ID NO: 175496 - DNA, 299 bp, Homo Sapiens
  misc_feature (181)..(181): n is a, c, g, or t
tgggatgaggtgcgttcagaatcgttccgcttcgtgattattgatgaggcgttcgggccccgctcggacgagtcagcagagtacgggctgcgcctattccaaaagctcaacctgcaattgttgatcgtgacgccgctgcagaagattcacatcattgagcccgttcgtctccagcgtgggnttcgtgcaaacaagggcggggtgtgactcgcagctacgctgtctgtccgatttgaggagtaccaaaccggggcggcagcttgagactcatcgggggatccttctagaagtcgacctgg

SEQ ID NO: 175497 - DNA, 410 bp, Homo Sapiens
  misc_feature (31)..(31): n is a, c, g, or t
  misc_feature (36)..(36): n is a, c, g, or t
  misc_feature (42)..(42): n is a, c, g, or t
gtaggacgaacgacgcgaggagtgcatcccnggccntgcggncacatggcacagtgtcctgtggcagacacacgacaccagacgcacccgcggcaccgccttagccagccacagccgataccaccgcaagcgctggcaaccgcattgcgctgacagcacccgaccacgggaagacgcgccgcccaagcatcgtgctcactgcaacagattccctagcatccaggcctgaccgagatggaccatgccaccctgaccaccttgcgtgagaggcaccccgcctggcggttactgacctcaccgcatgcaccgctggtcgcaagctttctgcaccgcgtgttcgtcgcaccaaacgggcggcagcttgagactcatcgatgagtcccaaacgggcggcagcttgagactcatcg

SEQ ID NO: 175498 - DNA, 364 bp, Homo Sapiens
cgatgagtctcaagctgccgcccgtttggtacaacaatgccaaatttggcatcttcatccactggggcgccttctccgctcccgcctttggcagtgaatggtactcacgcaacatgtatcaacagggatcgaaagaatatcaacacaacctagccacctatggcccacaaaacacattcggctacaaagacttcatcccccagttcaccgcatccacattcgacccaaacgcctgggccacactcttcaaacaagcaggtgcccgctatgtcgtcccagtggccgaacaccatgatggatttgccttgtacgactcccatctctcggactggaccgcagtcaagaccggccccaaacggcgttt

SEQ ID NO: 175499 - DNA, 181 bp, Homo Sapiens
aatctggaaacaaaccactggtcccagtgaggcataatcgggcccgggttccaagcaaccacgctccaacacgcaagaaaacgcaaggccagcaccctcatgacacgcactgcactgacccaacgcgctcaccaacaacgcatcgccttcgccatcccgatgctgcatcgcaacgtagaca

SEQ ID NO: 175500 - DNA, 291 bp, Homo Sapiens
  misc_feature (184)..(185): n is a, c, g, or t
  misc_feature (207)..(207): n is a, c, g, or t
ctttcgttactgttaatgccgcgtctttcaaattgccgaaagtcgtgcgaacaaagacgaaagggccgaagaacatcgccgatgtgctcgacgcaaccgtggcgcgtattgagcagttgtttcagcagccacacgatggcgttaccggggtaaacaccggttatgacgatctcaacaaaaaaannccgctggcttgcagccgtcggncttgatcatcgtcgccgcgaatccgtcgatgggtaaaacaacatttgcgatgaacctcgtcgaaagacgcgacattagaccagt

SEQ ID NO: 175501 - DNA, 640 bp, Homo Sapiens
  misc_feature (459)..(459): n is a, c, g, or t
  misc_feature (522)..(522): n is a, c, g, or t
  misc_feature (543)..(543): n is a, c, g, or t
  misc_feature (564)..(564): n is a, c, g, or t
  misc_feature (579)..(579): n is a, c, g, or t
  misc_feature (586)..(586): n is a, c, g, or t
  misc_feature (620)..(620): n is a, c, g, or t
caggcaaaagctcctacggacgggagctagccctcagtccgcccgagctgtggttgtgggcgctggacaagtccaaggcgcctcctcccaatatggacagccgctacaacagcactgcgggcatcggggacttgaaccagctgagcgctgccatcccggccacgcgggtggaggtgtccgtgtcctgcagaaatcttcttgacagagacacattttctaaatctgatccaatttgtgtcttatatgtacaaggagttggaaataaagaatggagagagtttggaagaactgaagtaattgataatactttaaatcctgattttgtaaggaaagtttattctggactacttttttgaagaaagagagaatcttcgttttgacttgattgatgttgattcaaagagccccaacttatccaaacatgacttttggacaaagtgtttgtcttggagagatccnttggttacaggggaagtcgctggaaaccaatagtaggacttttgctgggtccgactcgaatcnaatatggcatagctgttctgntgaaatgtatccgtacaatcnccacatcgaccgagntaaaggnaactgggtgctaagagtgactactcatatgctgntatgccgttcatcggaactc

SEQ ID NO: 175502 - DNA, 147 bp, Homo Sapiens
aattgattagttgatttaagaaacatttagatttgggatgagctgttttggatgtttatcctcaatgaaactcatgttcaaacttaacctccaatgtggcagtactgagaggtggggcctctaagcgtggttggatgttgattaagg

SEQ ID NO: 175503 - DNA, 322 bp, Homo Sapiens
gggccccgcacccaggtcagacagttcatgaaggtgataatatatagagaacacacacctcagactcacagcctttctccactgcaagcgtaagagactggttttatttcaagaataactaagggtatattaacacatgtatctcaaagtaacattgaattattgaagacatactgttccaatactcaaacagttcacagagaggggacaggaaccaatgtactggaaaaacacacttgtattatatgtaaaaatcgatggccaatatttctcttattaagagaaaaatacccaacaaattaaaaggtgaaaagctgtgctc

SEQ ID NO: 175504 - DNA, 166 bp, Homo Sapiens
ccaatcaacatccaacccatggttggaacattcctacatctgttttgctgaatctcctagtaaaagtcatttttttaaagtaatattgtatgcttacaaaagctgtaaaaatgaacttttaaaactcccaccagcttttaacagtataatgttaaaaatatactgt

SEQ ID NO: 175505 - DNA, 271 bp, Homo Sapiens
ccaatcaacatccaaccaaaatcacatcctaatttttctgagccctttcttttcatgaaaaattacatattataaaacagaagtttggggggaaaaaaatctatgttttaccatacaataagttgacaaaaactggagaaactagaacaaacaaatccaactatgtagtactgaaaacaacaagaaaatggcttatttcattaaaaacagtataaccattcatttaaactgaatgaccagacttgctgtctttaaaaacccaaacttgaga

SEQ ID NO: 175506 - DNA, 694 bp, Homo Sapiens
cctgaggaccttctgtgagagcaagaggctgaccacggacaaggcgaacatcaaagacctatcccagatcctgaaaaagatgccgcagtaccagaaggagctgaataagtattctacgcacctgcatctagcagatgattgtatgaagcacttcaagggctcggtggagaagctgtgtagtgtggagcaggacctggccatgggctccgacgcagagggggagaagatcaaggactccatgaagctgatcgttccggtgctgctggacgcggcggtgcccgcctacgacaagatccgggtcctgctgctctacatcctccttcggaatggtgtgagtgaggagaacctggccaagctgatccagcatgccaatgtacaggcgcacagcagcctcatccgtaacctggagcagctgggaggcactgtcaccaaccccgggggctcggggacctccagccggctggagccgagagaacgcatggagcccacctatcagctgtcccgctggaccccggtcatcaaggatgtaatggaggacgccgtggaggaccggctggacaggaacctgtggcccttcgtatccgaccccgcccccacggccagctcccaggccgctgtcaggctcctcacacatcctcaccccgacccgcttcctggatgacctgaaggcactggacaagaagctggaggacat

SEQ ID NO: 175507 - DNA, 1294 bp, Homo Sapiens
  misc_feature (23)..(23): n is a, c, g, or t
  misc_feature (37)..(37): n is a, c, g, or t
  misc_feature (40)..(40): n is a, c, g, or t
  misc_feature (55)..(55): n is a, c, g, or t
  misc_feature (87)..(87): n is a, c, g, or t
  misc_feature (89)..(89): n is a, c, g, or t
  misc_feature (113)..(113): n is a, c, g, or t
  misc_feature (997)..(997): n is a, c, g, or t
  misc_feature (1006)..(1064): n is a, c, g, or t
  misc_feature (1141)..(1153): n is a, c, g, or t
  misc_feature (1214)..(1227): n is a, c, g, or t
  misc_feature (1234)..(1243): n is a, c, g, or t
acgcagaccattggcaaccgganctatcaccacccancantgactatcaaactancctcaaacaaattgtagtgccaatggtccttngnggaccgcaggccattggcgggaanccgggattcgccctccggggagcgattggtcctcgggaggggcggggaggtggacgcgggtaccggcggtcgtcgggtcggcagcctttggtcagttggcagcggcaagcgcgctgcggttccggtggcgccatgtcgttctgcagcttcttcgggggcgaggttttccagaatcactttgaacctggcgtttacgtgtgtgccaagtgtggctatgagctgttctccagccgctcgaagtatgcacactcgtctccatggccggcgttcaccgagaccattcacgccgacagcgtggcaagcgtccggagcacaatagatctgaagccttgaaggtgtcctgtggcaagtgtggcaatgggttgggccacgagttcctgaacgacggccccaagccggggcagtcacgattctgaatattcagcagctcgctgaagttagtccctaaaggcaaagaaacttctgcctcccagggtcactaggcgggcagaccaaacccaacccagacggcaccacactgaggccacacgttggccattccaccttggagttggaaccctgggcgtcgagacaggaaggcagggcgcagtggttgaaacatcaggacactcccaaggccccggctctgaacaagaccttttcgtttcttggaaaagagactcatttgctgatggttcatgccttctgctgggacaggcctgggctgtgcagccacactgtcggctgacttagccccctgctcactctaggtgcctccaggaggtgagccctgggtgcagctggtctctgaatgacgttacacccctcaccttcttttcctggccctgtctctggactctccccctgtggagggcccaatttcccaagaacagaacttcttccgntcccttcannnnnnnnnnnnnnnnnnnnnnnnnnnnnnnnnnnnnnnnnnnnnnnnnnnnnnnnnnnagtgaaaaggggggcccccttggaaaaaccccctgggccggggaaaatagaaaaactccttctggaaaaaccccttnnnnnnnnnnnnnaaaggggggggggtcctcccacccctttttgaaaaaaacacctttttttgggggccccccnnnnnnnnnnnnnncttcctnnnnnnnnnnagaaaaaaacccccctctttttttaaaaaattgtggggggaaaaaaaaaaa

SEQ ID NO: 175508 - DNA, 435 bp, Homo Sapiens
aatatatccggcctatccatgattttaatgatctagccacattaagaaacattctattaaaaaaactagcctgcaatttccaaaagtatacaaatcattaaaatcatggaaaggctaaggaactattggagattgatggaaacttaaagagatctgacaacaaaatacaaagtaccattctgaactggaaccttgggttttaaaatatgttttgggggcaactggaaaatctctaatggtattcaaacattagatagcagtaatttatctatatcaaattttttgatgttgagtgttgtggttagtagagaatgtcctttttatagaaaatactgaaatattcagaatgggacggcatcatatcaacaatgtactctcaaaggttcaggaggaaaacgttagtttactggcatatcaacatcttttgttagactg

SEQ ID NO: 175509 - DNA, 1101 bp, Homo Sapiens
  misc_feature (32)..(32): n is a, c, g, or t
  misc_feature (42)..(42): n is a, c, g, or t
  misc_feature (51)..(51): n is a, c, g, or t
  misc_feature (67)..(67): n is a, c, g, or t
tttataaacccccaaaaccgagtccaaccccnaattttggtntccctacanggagtagccataaaanccagtgtgtagggttaatggggaaatacctaagtacatgatggagaagagatcctgaagtggggcagaaagtttgtacattgtattttatgtattaaaattccctcaaatttaaatcattcagaaatacctatattccttaggaatgttaaagtcattatatatttgaggagaaaaggctgaactgtacttatcagctccaaagggggtccctagattactaacagtctgggcagaagagcatgtaaacaacaaaggcaggcatggacaattattgaagggcaagaaatggattgatttttagcacttaaatccttcaaatccgaataaatatttttagtgatttaaaaccaacctaaaaatgctgaaatgtctgtaacccagtaatagagcaaacattatttttaccaacccaaactctgctggtcctaacatagtaatgctatctcacagataatctaatgatattctatcctgacttcaaagttacaaattcactgtggtggacccatctagaaaggatggttctacaaagttacataatgagaatcaaacgaacttttgttgatagtttttttcctgggattaaaaccactgcatggtatcccgaaatcacaaacgctaattcttcagatttgaactttgaaatttaaaagtacaacaaactaaataatgtggactctacaccagaaataaaaaagtcatgataaacagatgaaaacaagttaaaaaagtccaatgctctgaatatgtgtttttgtttttaaacatgagtcaattttttaaaaacttcaaagaaatatttcagagacaactttatatacaacttttatatatagttttcctttttgaattatctctgtcatacataaactattgcagattgtgcttagggaaaaatacactgaaataacttcattgctcctttctagttgttgcacaataaacatgtccaagactctaagatttctttgctttccagtacatacataatactgttaaaagctgaatataatgcactgacccacgcgtccg

SEQ ID NO: 175510 - DNA, 542 bp, Homo Sapiens
ttttttccccatttgggcccttccagtagaagctttgggcttccggggcccctgagaccaaagaagaggggccaagtaccctgggaaatcagctgaaggtcaacaaaagactggttgtgagttgcagctgtcccgaaggccccagttgggaagccatgggcagtccagatcaagccaccacgtgccctacgatggcctaacaggagtgcccattggcagattacacatgtaaatatgacctcagacaaaaaggaaccagaggcccaagggcaataataaggtggaatttgcaggtcagcccaggaattggcagaggaagtaggtgtctgataaccctttgtggagaatgagattccccccacctgtgtgagaaaaataaacagctctggagtcttgttcctgactccagaggaacgagagcattccaggaaagagagattccctggaaaattgaaaatgtgaatcctagggggaaattggggattgtgtctttccctgttgaaaatgtttggatgggaataaatatcttcaggaaacataaa

SEQ ID NO: 175511 - DNA, 803 bp, Homo Sapiens
tcctccgggggcttacatgctttttgctacctttcctattagcagcttcagtttatatcacacagagtgcgtgggataatgttgaagtcgctgaagttacgggttattttatgtttttacatgggatttttctgtttttgattggaagaaggagacagaaattggaggaaatgggattattatcctagggaagggccgttggcaaggagttgagccggcccctctgagccctgggggctatctgacctgaagcctggacactgggcccttcaggtcgcaagaaaaagttccctcctaaattctattaggattttggagaatttttgcacagtaagaagctctgggttgctccttgggcttctcaaaagggaaaagttcaattcaaagattgtaaactacgaagtattccagccgtgttgctgatctagttggatagttgtacctcaaaaaagtaggtgagaactggcttcctcattgtcccagggatgtcaaatactaatgacataagagctcacttacgtgccaaaattcacttttatactagtttttcagtgctttaatatttgtaacttaaattttaaaactcgtatttacaaacactactgtaacttcagtgaaactgaattgtgcgattgaagctttttgcttatcatagtatttattacactacttaattcagtaaatatataaaagtagccttcaatttatttttatattattttacatgtttttacctgcagttgtgtatgtgaatttaccttggtaatcgagatgtcatgctaaggaccaataaactatcactg

SEQ ID NO: 175512 - DNA, 423 bp, Homo Sapiens
ttcaaatttccatgtattttctgccatttttcagggcctaagattggacatacattcccaatttactctcagttccagtcaagctggttgctctgaaagtaacccagcttgttgctctaaaatacctcagtagcctgagtgttatactagagatctaaagggttaacaggatagggataagcaaactgaatgggtggtggaattggcagaatggataccagttcctacattcctgaccccactaccataaaacaggatgtttcctgttgcaaagctaatgagaccccacccttcttgtctcagagcaggcaggagctcatctgtcttgttctgccttcctaattaccctggaagggccagaacgaagaacacctgagaatactgaaagtgcctaaaaacccctgctcctacgttgttttcccc

SEQ ID NO: 175513 - DNA, 152 bp, Homo Sapiens
ccacccttgaaagacattctgtgcctggttgagcacaatggaattcaagggtgggccacatgtctcactagggtggaccttctggctggacagacagggctttgaagttgtaacctctgacactcctacagaaaaaccttgctgtgaaggtg

SEQ ID NO: 175514 - DNA, 664 bp, Homo Sapiens
gggtgtttcccacgattgaattcccctgttgctccccaaggctttaggcttagccatagaatcacccagttccacagaatctagtgtctagctcttggaaatgctgcaagatcgctggaagaccataagcttgtagctgactgactgaaagaggtacctaacccagcatgtacccctgtgaaaccccagaattataagtgaaacatgattcactgttcccatgtaactcagagacctttggcggatgttctttatgctttcctagaaaagtgaactgacaggcctgtgttttctgttcaagtctcagaggaatgactcatagtatattcatgtactggggctcagctggtagttctaccaggagagagagagattattactgcaagtaagattctgagacctgttaggagctgtgattttgtgaccaatattaacccgggaggttctagtagggaatctgtatactgcctgtgtacctacaatacatcatggcagatgaaggaacaagtgactagggttctttctgaaagtgctgctatgtttctgcagacttggaccttatctaacctctgttcatcccacatgtaactgagtaacattctgcttccaacacctttactctaggtttaccccagaataatgtgaagcctccagaagccaatgc

SEQ ID NO: 175515 - DNA, 717 bp, Homo Sapiens
  misc_feature (38)..(38): n is a, c, g, or t
  misc_feature (66)..(66): n is a, c, g, or t
  misc_feature (82)..(82): n is a, c, g, or t
  misc_feature (163)..(463): n is a, c, g, or t
  misc_feature (474)..(514): n is a, c, g, or t
  misc_feature (676)..(677): n is a, c, g, or t
  misc_feature (696)..(697): n is a, c, g, or t
ggtcccctggaagcaaagccttgtcagcttgcctactngacaaagtagtaaaaagcactaatcagngttgagtcagatgtcnacagaaaaatacaatacctatgaggaatccagcaaaacattaccaaattgtgaccaatctttagcacacatgcacacgtgnnnnnnnnnnnnnnnnnnnnnnnnnnnnnnnnnnnnnnnnnnnnnnnnnnnnnnnnnnnnnnnnnnnnnnnnnnnnnnnnnnnnnnnnnnnnnnnnnnnnnnnnnnnnnnnnnnnnnnnnnnnnnnnnnnnnnnnnnnnnnnnnnnnnnnnnnnnnnnnnnnnnnnnnnnnnnnnnnnnnnnnnnnnnnnnnnnnnnnnnnnnnnnnnnnnnnnnnnnnnnnnnnnnnnnnnnnnnnnnnnnnnnnnnnnnnnnnnnnnnnnnnnnnnnnnnnnnnnnnnnnnnnnnnnnnnnnnnnnnnnggctgactgcnnnnnnnnnnnnnnnnnnnnnnnnnnnnnnnnnnnnnnnnncatacagacacacatatttctgaaatgtaagtattctcttttttaaaaaaattattatcacagctaaacaaattaccagtaattcttttatcctcatatacccggtgttcagattttctagattggctcctaatttttttacagattatttgaatctattcnnctacatgtactcgcaatgnnattagctgatatcaggacac

SEQ ID NO: 175516 - DNA, 742 bp, Homo Sapiens
  misc_feature (38)..(38): n is a, c, g, or t
  misc_feature (66)..(66): n is a, c, g, or t
  misc_feature (82)..(82): n is a, c, g, or t
  misc_feature (163)..(463): n is a, c, g, or t
  misc_feature (474)..(514): n is a, c, g, or t
  misc_feature (677)..(677): n is a, c, g, or t
  misc_feature (702)..(702): n is a, c, g, or t
  misc_feature (722)..(722): n is a, c, g, or t
  misc_feature (726)..(726): n is a, c, g, or t
ggtcccctggaagcaaagccttgtcagcttgcctactngacaaagtagtaaaaagcactaatcagngttgagtcagatgtcnacagaaaaatacaatacctatgaggaatccagcaaaacattaccaaattgtgaccaatctttagcacacatgcacacgtgnnnnnnnnnnnnnnnnnnnnnnnnnnnnnnnnnnnnnnnnnnnnnnnnnnnnnnnnnnnnnnnnnnnnnnnnnnnnnnnnnnnnnnnnnnnnnnnnnnnnnnnnnnnnnnnnnnnnnnnnnnnnnnnnnnnnnnnnnnnnnnnnnnnnnnnnnnnnnnnnnnnnnnnnnnnnnnnnnnnnnnnnnnnnnnnnnnnnnnnnnnnnnnnnnnnnnnnnnnnnnnnnnnnnnnnnnnnnnnnnnnnnnnnnnnnnnnnnnnnnnnnnnnnnnnnnnnnnnnnnnnnnnnnnnnnnnnnnnnnnnggctgactgcnnnnnnnnnnnnnnnnnnnnnnnnnnnnnnnnnnnnnnnnncatacagacacacatatttctgaaatgtaaatattctctttttaaaaaaattattatcacagctaaacaaattaccagtaattcttttatccctcatataccccgtgttcagattttctagattggctcctaatttttttacagattatttgaatctgattcnattcatgtactgtaatgttttgctngattcggggatcctctagancganatgggcatcaaaaagc

SEQ ID NO: 175517 - DNA, 426 bp, Homo Sapiens
ggtgcattatgcattaaagtggagcccagagcgcctctcggctcactgggtccccggccccccgagctgaggaggcttcgcaaggccggctgctacaaagtgccgagcttggctgcatagattttaatgagagcgtcaggcagagctgtgctgttgctctccgggacttgcagatcattaccaaaccaactgtaggatgagaacatagcacatcgaaaccctaggaggtcactgagctaatgatctaatcctaccttccgcaggcagtgcccctccccacctcctcctgcccccagccctttccacgatggactcagtccattccagaagccaggccaacaccgcccccttcaaggtcagagcagaatgacagtgagtggctctagctctcccttttccgggcaaggaggatgggggtaatttagt

SEQ ID NO: 175518 - DNA, 448 bp, Homo Sapiens
  misc_feature (380)..(388): n is a, c, g, or t
aaacattaactaggctgtataaagaacatttattccttcaaaagaaaaaaatttacttctggttgaaattacaatttacaatatacaacactatatgctacgaccataaaaggtgagaatatacactgaatgcacaggcctggctaattctcttttcttaccaaaaaacgtgtttatgttgattcaaacttctccacatttacattacaggtatacaaatgtacaattgtacaatcaaaagtatgttcgactactagggtacattatagatacagattagacatcaaaacaagaaaatactacaaatttgtatatatgcaaagtctacaccaagtatacactatatatttatagaagcaagaccaaaagcagagttggannnnnnnnnctcatgctaaataatcagattttacctttcaatgttaatagaaaaaaatccagtaggccc

SEQ ID NO: 175519 - DNA, 1146 bp, Homo Sapiens
  misc_feature (57)..(57): n is a, c, g, or t
  misc_feature (94)..(94): n is a, c, g, or t
  misc_feature (101)..(101): n is a, c, g, or t
  misc_feature (107)..(107): n is a, c, g, or t
  misc_feature (163)..(163): n is a, c, g, or t
  misc_feature (172)..(172): n is a, c, g, or t
  misc_feature (203)..(203): n is a, c, g, or t
  misc_feature (227)..(227): n is a, c, g, or t
  misc_feature (237)..(238): n is a, c, g, or t
  misc_feature (241)..(243): n is a, c, g, or t
  misc_feature (245)..(245): n is a, c, g, or t
  misc_feature (258)..(258): n is a, c, g, or t
  misc_feature (305)..(306): n is a, c, g, or t
  misc_feature (312)..(312): n is a, c, g, or t
  misc_feature (328)..(328): n is a, c, g, or t
  misc_feature (337)..(337): n is a, c, g, or t
  misc_feature (345)..(345): n is a, c, g, or t
  misc_feature (357)..(357): n is a, c, g, or t
  misc_feature (359)..(359): n is a, c, g, or t
  misc_feature (366)..(366): n is a, c, g, or t
  misc_feature (374)..(374): n is a, c, g, or t
  misc_feature (377)..(377): n is a, c, g, or t
  misc_feature (382)..(382): n is a, c, g, or t
  misc_feature (415)..(415): n is a, c, g, or t
  misc_feature (421)..(421): n is a, c, g, or t
  misc_feature (430)..(430): n is a, c, g, or t
  misc_feature (447)..(447): n is a, c, g, or t
  misc_feature (452)..(452): n is a, c, g, or t
  misc_feature (456)..(456): n is a, c, g, or t
  misc_feature (568)..(581): n is a, c, g, or t
cattaggcaaatttcatcattgtggtgaattcagagtgtactttacacaaacctagntggtgtagggtagccttacctacacacctgggctatnttgggantccccngtgtgcctcccttagggttaccaaactttggttgccaggttacctggtatttgganccacctgtngccttttggtaacttctgggtgggttttggngtgtcttaaccttggaaagccacncctaaggttnnccnnntngttattttattcnttttggggcccatggtccaatttgggggttcttggtggcctaaaccnnccgttntggtggttccattatnaccggtagntcttccantttccctggccntncttcctnaacttccnttncgccnggttttccattggaggaaaccttttaattggtnccaagngccaggaanggtccttttccccattnttagntatnggtttggcttttacgtaactcattgggagtcaaaattaaatgttaaactaggagtcagaatgaaagatacctagtttcacaatcatctcaactgaacaaaagtttaaatttnnnnnnnnnnnnnncatattaacaagaatatagtatggttgtcctccagggacccaatcccagcaaagaattgtgtatctctttctaaggaattctgtgaagcagatttgttcgggccagtgacctgaggcattagaatgagccctgtctctggaaacctgaattctaatcttgattctttgactaacttgcctgggttttaagatttttaggtaatttatcctctcagcatcagttttcttaccaaaatgaatgcaaaggctatcctgatttctaaggtgtcttctggtatgccaaagtattggtatgcttaagattagaggctttatttggatgaaatcagtatttaacttttcccaaatttgtcagtgttctcactgggttcacactgagggctttactcttttttccttcatagagatactagatccccttctttctttggccaagtccagcggaattttttcttaactctcttcctaagacttgtttacctcattcctttcccctttcatgatgtttccttcacttcattttccctttgaaatattttagaacccatttttcgcatatttcatc

SEQ ID NO: 175520 - DNA, 128 bp, Homo Sapiens
tttctaaacctaaaatctacttggtttgaaatcaagtggttggaacactgtttgacttttatttaaagcatgttgttgattgaaaatttcattgaggaagtttatcaatcagttgtgatcagtttgat

SEQ ID NO: 175521 - DNA, 368 bp, Homo Sapiens
agtataattcctgtgcatagattcctctagaaaggcatcaaaaggctcaacagactgaatggcctcttggtctgcgaaaattcagttgcaatgaggatgaagtcactatcctagaggctgcttggcccagaagagccaggcacagagctgcagttgggcacgccaaggattccaaaggtggaatgagagagtagggtcaaactgtcacagtatctgctccataggtttctgtatttaatttcaatgttaaatacaactacaatatgagcgagaacagcattttcttgggtgttgagaacttgtaccatggacttcagaccgccttgcagccgtatactgcacaagcgtgtacaccccctgggcagcct

SEQ ID NO: 175522 - DNA, 126 bp, Homo Sapiens
cgactagtcccaaccatactaattaattactattacttcgttactgaatagtcacagtcgttcagcaatggataaagagattaatggttctaaaatggacagatgatctcctgtgttgctgctgta

SEQ ID NO: 175523 - DNA, 717 bp, Homo Sapiens
accaaaaaatactacttcagtaaagtgctactgtagccaacatgttttaataattatttcctaaattaatttctgaaataataagctagatctaatgttagctactggatattataatgatgtgtcacaagtgctctgaaggtttgtgccagtaatcataactcataaagcattctgcaaattaaatttcactcaggatcaacatacatgaaaataaatacatgttagcagtaactatacattttgtatagttaaatgattcatatcattttatttggtgatttcactatttcaatatctcaggaaaattggatccaaatataatgttaactctttacaaattagttaccctaaaatttgagctggttttcattaggaaatggactaaattccaggtatatttccagaaaatgaactggatgttaatctaaaagaactactagtaaagccagataaatagaaaaaaacagtaaaaatatatcgtggaataaatgaaactctaatattgcactagagttgtcatagaagagagaagtagaataataacaagtataatttttaaaaaagttgtatacacttccggagcagaggattgcagaattataataactaaataatataaacacctaactgtatttttaaaaattaactttaatgttggctactcctatatcatcatctgtggcggatacgaggacactctggaacagctagacc

SEQ ID NO: 175524 - DNA, 496 bp, Homo Sapiens
  misc_feature (425)..(425): n is a, c, g, or t
aagattctgtattagctttatgaagccaatttctaccctttttcgtaagggcgcaaatcttcataaatttgttataccgagaaacttctaccaagaatccctcagtgatcagctgacgggaaaaagccttccaccgactctctgtttgatccttgccagtgccaaataaactgtgcctgcgatattgatcggcaagacgctgagaattagatcctcggagaaataaaactggaagccccattccaaatttttcgcctaagatgtccacagcagacaaaagcttaaatgcttgtggaccaaagtcccaggatgtatcctctgagtcatccatggaatagcaatgatccaatctggacctgcaattatcacagcatttttcagctcccataattcccaggaggctttttgtacttgtttgtcctcanaatgagacaagatgatttgtctcctacattctgctagaatgaagatatttttccatctgtagcctcgtgcg

SEQ ID NO: 175525 - DNA, 1646 bp, Homo Sapiens
gggcacccaatctctcgccctgtaaactgcggggtgacgggacgctgttactaggactcaagatggccaccgcgcccgctagtcatctcgctagcccgcgcgccagtgagctggcacgagacacgcggtggcccacggcgtctggggacgatctccagcccttcgcacggggcggagcgcccgccttccctccaatcagcacgccgggccggctagccaggggccgcccgcgcgcggggtgtgtgaggacgcgctcccagtcgctgagtgcctgagccgggaagcagttgctgtggtacctgctgctgcccgagcggacgtagagcatcggacgcgggcgccgtggcgctgggcaggagggcgaagccatgacgtcagtcagagaaaatattctctttggaatgggaaatcctctgcttgacatctctgctgtagtggacaaagatttccttgataagtattctctgaaaccaaatgaccaaatcttggctgaagacaaacacaaggaactgtttgatgaacttgtgaaaaaattcaaagtcgaatatcatgctggtggctctacccagaattcaattaaagtggctcagtggatgattcaacagccacacaaagcagcaacattttttggatgcattgggatagataaatttggggagatcctgaagagaaaagctgctgaagcccatgtggatgctcattactacgagcagaatgagcagccaacaggaactttgtgctgcatgcatcactggtgacaacaggtccctcatagctaatcttgctgctgccaattgttataaaaaggaaaaacatcttgatctggagaaaaactggatgttggtagaaaaagcaagagtttgttatatagcagaagctgccacttttgctagagagcaaggctttgagactaaagacattaaagagatagccaaaaagacacaagccctgccaaagatgaactcaaagaggcagcgaatcgtgatcttcacccaagggagagatgacactataatggctacagaaagtgaagtcactgcttttgctgtcttggatcaagaccagaaagaaattattgataccaatggagctggagatgcatttgttggaggttttctgtctcaactggtctctgacaagcctctgactgaatgtatccgtgctggccactatgcagcaagcatcataattagacggactggctgcacctttcctgagaagccagacttccactgatggaagagctgaaaacacaagcccaggagtgcagacactgccctaattgcttcctgagaattcccatattaataaagaagaaaattatctgccattttttcctactataataatgctgaatcttaatttagagggtacaagggtatggtaatgcttgtagaatctttattatctcaacaatctaaaaaatgatgtttatttccatagtttgatagtgccacttaaatgccaattaaacaagaatataacatttcaatagaaatttttatttcattttcaattactttgtaaattcgtgtgtatttagtacactgatttgtttttttacatttctgctttgaaagcagatgcaatttaatataatagattttttaatgaattaatcttaacatagtaatctttagcctcgt

SEQ ID NO: 175526 - DNA, 1249 bp, Homo Sapiens
cacgaggctacatgatggcggcaacaagaggaaacggcgtgaggcttcgcagtcaggcgaagaagccaaaaagaaacgaaatagatgcggagccgacagctaagcggcacgccacagcagaggaggtggaggaagaagagagggaccggatcccaggccccgtttgcaagggaaagtggaaaaataaggaacggattctcatcttttcttccagaggaataaattttagaaccagacatttaatgcaggacttgagaatgttgatgcctcattctaaagcagatactaaaatggatcgtaaggataagctatttgtgattaacgaggtttgtgaaatgaagaactgtaataaatgcatctattttgaagctaagaaaaaacaggatctctatatgtggctttcaaattcacctcacggaccatctgctaaattccttgttcaaaatattcataccctcgctgaactgaagatgactggaaactgtttgaaaggttctcggccccttttgtcttttgaccctgcttttgatgaattaccacattatgctttgttaaaagaactcttaattcagatctttagtacaccacggtatcatcccaaaagccaaccatttgtggaccacgtgtttactttcaccatttggataataggatatggtttcggaactttcagatcatagaagaagatgctgctcttgtagaaataggacctcgtttgtcttaaatctcataaagattttccaggggaagttttggaggaccaactttatatgaaaatcctcactaccagtcaccaaacatgcatcggcgtgtcataagatccatcacagctgcaaaatacagagagaaacagcaagtgaaagatgtgcaaaaactgagaaagaaagagccgaagactcttcttccacatgatcccactgcagatgtttttgtaacaccagctgaggagaaaccaatagaaatacagtgggtaaaaccagagccaaaagttgatttgaaagcaagaaagaaacggatttacaaaaggcaaagaaaaatgaaacagaggatggacagtgggaaaacaaaataagtcaatggaaacctgatttgtttttcagttactttatatttattttgtattcaatgtgtaaatacttttattatctaatactatcttacgtctaattagtgtagcatttacaagaaagaaaaattaagatcttaaaatcagtgattatctttttctaaataaaatatcaccagaatt

SEQ ID NO: 175527 - DNA, 783 bp, Homo Sapiens
tgcggcgcagccaccccgcgggatacgcctcagcgcgctttgcccgaagtttttacatacaaattctactagtcacacctggccattcagtgcagttgctgaattaatagataatgcttatgatcctgatgtgaacgctaaacaaatatggattgacaaaacagtgataaatgaccatatatgcttgacattcaccgacaatgggaatggtatgacttctaataaattacataaaatgctaagctttgccttcactgacaaagtcaccatgaatggtcatgtcccagttggattatatgggaatggcttcaagtcgggttctatgcgtctgggtaaagacgcaatcgtttttaccaaaaatggagaaagcatgagcgtgggccttttgtctcagacctacttggaagtcataaaagcggagcatgttgttgttcccatagtggcattcaacaagcaccgacagatgattaatttagcagaatcaaaagccagccttgctgcaattctggaacattctctgttttccacggaacagaagttactggcagaacttgatgctattataggcaagaaggggacgaggatcatcatttggaatcttagaagctacaaaaatgcaacagagttcgattttgaaaaggataaatatgatatcagaattcccgaggatttagatgagataacagggaagaaggggtacagaagcaggaaaggatggaccagattgcccctgagagtgactattcctgagggcttattgcgtatattatatctttagcctct

SEQ ID NO: 175528 - DNA, 758 bp, Homo Sapiens
agagaagagcttactggtgcgagcgtccgtcgacccgtcgccgctgacctagagatggcagccggtctcactgacatatttcagcatgatacatactgtggtgatgtctggaacaccaacaaacgccagaatggcggactcatgtggctctatctcaaatactgggaactcgttgtcgaactgaagaagtttaagagagtagaggaagccatactagaaaagtaagacaagagtgaaatcaaactgcttttagtgactcgaggccaggcagtcatgggccttctgggtctccggcgtcttccgttcccgtgctgcccgtgtcatggccacaccgtcacccttcagcagcgacctccactcccgccaccgtctgagcagaagtgcaccgaagcctcagagacagagggtctcctcccgatgctctcccgctgttggggatatggtttcttgaagcatttttaggctgccagtattgtattaagcagaacagtataacctcgtattttagctccagggtaaaaatggttttttaaaaagtcaaatacaatactggtccttaccacaagtaattttctgtctgtttcatcactccctaaatactttctcctcaaattatttttctctgtcaccagattacattaagaatttgtcagataatgtgtagaactgcataacaggtaatagaaagtagtaatattatattatcaagggtttatattttaaagatctctctcactccataaaggggaaataccaag

SEQ ID NO: 175529 - DNA, 607 bp, Homo Sapiens
  misc_feature (594)..(594): n is a, c, g, or t
tgaggcgcggtcgttctagaggatcccggacgaggctaagatatcagtagcttggaatttgctgagaataaggcaaagaccaggttgtcactgattcgtagatcaatgggaaaggggcgtattcgtcgaggaaactatccaggtccatcgtctcctgttgtagttcggttgccttctgtgtctgatgtctcagaggagaccttgactagcgaggcagccatggagactgacatcacagaacagcagcaagcagctatgcagcaggaggagagagtactgactgagcagattgagaacctacagaaggagaaggaggagctaacatttgagatgcttgtactggaaccccgtgcctctgatgatgaaacccttgagtctgaggcctccattgggactgctgatagctcagagaattcgaatatggagtctgaatatgctatctctgagaaatcagaaagaagcttagcccttagctccctgaagacagctggcaagtctgaaccttccagcaagtcgcgaaagcaacttaaaaagcagcaagactctttagatgtcgtggactcttcggtctcctctttatgtctgtctaacacnggatcatctcatg

SEQ ID NO: 175530 - DNA, 792 bp, Homo Sapiens
  misc_feature (91)..(91): n is a, c, g, or t
gtttgcccttttccgggttgaaggttcctctgctgatgaactgaggcttgtcttccaggaatttggtctggcccaatggtccttccattcncagggcctcattacctgaggcagctcggtagaatggagatttggaataaatctgaaatagttttctggtcccatgagatgatgccgtgttagacagacataaagaggagaccgaagagtccacgacatctaaagagtcttgctgctttttaagttgctttcgcaacttgctggaaggttcagacttgccagctgtcttcagggagctaagggctaagcttctttctgatttctcagagatagcatattcagactccatattcaaattctctgagctatcagcagtcccaatggaggcctcagactcaagggtttcatcatcagaggcacggggttccagtacaagcatctcaaatgttagctcctccttctccttctgtaggttctcaatctgctcagtcagtactctctcctcctgctgcatagctgcttgctgctgttctgtgatgtcagtctccatggctgcctcactagtcaaggtctcctctgagacatcagacacagaaggcaaccgaactacaacaggagacgatggacctggatagtttcctcgacgaatacgcccctttcccgagactgaattgcgggtaatgttcatgaatctaactgcaattagtacaggtttcattgatctacgaatcagtgacaacctggtctttgccttattctcagcaaattccaagctactgatatcttgagacg

SEQ ID NO: 175531 - DNA, 721 bp, Homo Sapiens
ttagccctggatgaagaccattgccagccaattcctggaacaacctcagttatcaccagaggaaccttcaacccggaaaaggcaaacaaaaattaaagaatgtgaaaactcacctcagaaaaccaaagagaccccagaggggacagtcatgtctggccgcagaaaaactgtggacccagactgcacctccaaccaacagctagcactctttggaaataatgaatttatggtctgaaccggcagatgtgtgtccctccgtggctacagagtggtaaacaaatctcacctttgggggctgcgtttcatcacctcggtccacaatagtcaatcctaattgtggtcctgcctcttttctaagcatatggctaagactgtatgtgctgaattcctgggcctcctgcagaagcagaaagcctgctggggatggtgccagctgtgccttggctgttgtatttgaattgagatttttactatacaaagccacctagggcctggggatttgggtcagttgtagttgcctctcccccaccctcttttcccttcccaaaggtgggtgttgaactaggggggatattgctgtcctgagggaccctctcatttctgacagtttgaagaaaacgtataaatctttcttaaccgtgaaagcaaaagcctttgggtttattttgggatagttaggagctaaggtagaatataatttttttccaaaaacttacttacc

SEQ ID NO: 175532 - DNA, 546 bp, Homo Sapiens
acgaggctaagatcatcgatttaggtggctgcttaagtattactgatgtgtccttacatgcattaggaaaaaactgcccatttttgcagtgtgtcgacttttcagctactcaggtatctgacagtggtgtgattgcacttgttagtggaccttgtgcgaagaaattagaggagattcatatgggacattgtgtaaatctgactgatggggctgtcgaagctgtccttacttactgtcctcaaatacgtatattactcttccatggatgccccttgataacagatcattcccgagaagtgttggagcaattagtaggcccaaacaaactaaagcaagtgacatggactgtttattgatgcttttttgaagatgatcaatgctaggaaagcttatcaaaactactttcccaggaaaccatctatagagatttgcattctacttaatgttaacactatttttaattattttattgtcttaagttataactctcagagaattagctaagtcttggtatatacatggtttgtgctttactcttaaacatct

SEQ ID NO: 175533 - DNA, 616 bp, Homo Sapiens
tctgcaggatacctgcacagtgagcatgttctggttcaggccactgtgctcaactgaacagtatcagtagcacaacatttggatgcccttgaatactgttcctgtttcaattcatttgtttgtctgagaattgggaatgcatgtctgggcagtgacaagaggccaaagaaagcagaagatgtgtgaagaggagaatcgattttccataatgagatgtcagaaacactgcttgctaagtcagcctgaaaccaaagaagaagaatggcattcagtgataagaactgttcatgagcctgaattccatggctgctcctgcacaaaccaccggacacagatccggggaaaggcaaacaaagttgcctctactttgtgagtggctagaagttactggacatctgggagccctggtgccttgactgtaaaatggagacaacaactcctctcatggttgttatgacaaggaaatgagagatacatatcaagtgcctaacatagagctggctcctatgaaccagaacttattaagcaattgtagaaggcaagatttaaagcacagactttggagcagtccttgggttccaatcctggctgcatcgtttatcatctttacctcgtg

SEQ ID NO: 175534 - DNA, 1027 bp, Homo Sapiens
cgcggctggtcgttctagaggatcccggcacgaggcataagatgttctgagaaacaagcagaagtttatgtaacttcacattttaccattaccactcttaagacgctagaaacaagtaagatttaaggaaaaataaaaagaacctaaacccgatagtactggatataccaatacagagactgattgcagaagactacagcagttctctctagagttcagccagctgcttattaagacatttaattacatttattaatatgccttgcacaagaaaatactacttaatctttcacatctcctatctttcaactatgttctgtataaataatacttctattacgttactaactccagcttaaataagcctcataaatcatgtcaaatgatataatttcaaaattccacacatatattactctacaaatatactccttggtgaaaagatgtcaacagtctcctttctgaaagctgttagtttgatgttagatcaatcactgactaagcatttattgagcatctactataactgtacccagtctttaactaataagaaaaaaatacctgctccaaatgcaagatgatatttgtaagggaggataatttatcaactttttctaatagaatgctccttgaatcaatatctgccatatgaaattatatgacaagtaaacctcaaatttattacctatcaccttataatgataaataagcaatctaaagtatgctgcatagcaccttgaggaaagtgactgctatacttaaaattaaggctgattcctaaaaggtatggaagaaaagccagaatgttattgtttgtaaaccactaaagacttaatatgaacagtttacataactatctggttaatttgggcaaatgagcacttgtgtttggtttctaactttgctggaaggtgttggtctaataaagaaaactgctttaagtaggagcacttttagcatacacaaaaataaaatccttgaagtttcaccttgcatgttggcaactgtatatcttagcctcgtgccg

SEQ ID NO: 175535 - DNA, 948 bp, Homo Sapiens
  misc_feature (795)..(904): n is a, c, g, or t
ggtggtgtggctgttctagagtagtccccgtgatcgaggtataagatgaagagaagcaaaatacatttttagtcttttttcaagtgaatctgggaactatgttatacgggaagaaatggaaagaatgctccacgtggtggatggtaaagtcccagatacactcaggaagtgtttctcagagggtgaaaaggtaaactatgaaaagtttagaaattggctttttctaaacaaagatgcttttactttctctcgatggcttctatctggaggtgtgtatgttaccctcactgatgatagtgatactcctactttctaccaaactctggctggagtcacacatttggaggaatcagacatcattgatcttgagaaacgctattggttattgaaggctcaatcccggactggacgatttgatttagagacatttggcccattggtttcaccacctattcgtccatctctaagtgaaggtttgtttaatgcttttgatgaaaatcgtgacaatcacatagattttaaggagatatcctgtgggttatcagcctgttgcaggggacccctggctgaaagacaaaaattttgcttcaaggtatttgatgttgaccgtgatggagttctctccagggttgaactgagagacatggtggttgcacttttagaagtctggaaggacaaccgcactgatgatattcctgaattacatatggatctctctgatattgtagaaggcatactgaatgcacatgacaccacaaagcatggcccctgctttattaaaaaatgttcctgaannnnnnnnnnnnnnnnnnnnnnnnnnnnnnnnnnnnnnnnnnnnnnnnnnnnnnnnnnnnnnnnnnnnnnnnnnnnnnnnnnnnnnnnnnnnnnnnnnnnnnnnnnnnnnggggggcccaaacccggtccccccgcccctgtcccggtcttctt

SEQ ID NO: 175536 - DNA, 598 bp, Homo Sapiens
gctgctgcggtcgttctagaggatcccgaggagtgatatcacccacaacgcgctggttgcagatgtcaaagaatctgcagagggtgctactgaagatccagccttagccaatcaccacctcattgggtgaaagttccagggctcaatccaggaccacactcttattggccaggcaggggctcccacagagctttgagtaacttcttggttgtgcagtctgcaggcaatgttggcattgtaaattcctcccttgcagcctccttcatgtggtgaggggatcacttcagctgcctgctgtggacaaagaacatcaaattacagcatcacgagtgctattgttgcctgtggtggtctccctgtccaagcgggaccgctttgcagagaccagaggcatatcgcggcttgagctgaaaatgcatttgttgcagcttaggttgaattatttttcgtttgctctttcttctacacgcgcctgatggatagtgaacctattcatcaaaaaagtgcactgctcttctgtctattgtaccgacttaacctcttccacccaagtccgcatctgtgtgtatcatcaataaagttgtgtgctttgattggc

SEQ ID NO: 175537 - DNA, 908 bp, Homo Sapiens
gagtgatatcaccccatccggggcggcaagtctcgcagcctgtctgcctcgcccgccctggggagcaccaaggagttcaggaggacacgctctcttcatgggccatgcccggtgaccacttttggaccaaaggcctgtgtgctgcagaacccccagaccatcatgcacattcaggaccccgcgagccagcggctgacgtggaacaagtccccaaagagcgtccttgtcatcaagaagatgagaggatgccagcctactgcagccgttcaaggagctctgcacgcacctcatggaggagaacatgatcgtgtatgtggaaaagaaaggtgctagaaagaccctgccatcgccaagcgatgaaagctttggggcagtgaagaagaaattctgtaccttccgagaagatcatgatgacatttccaatcaggatagacttcatcatctgcctggggggagacggggacggctgctgtacgcttcctcgcttttccagggcagcgtccctccggtcatggccttccacctgggctccatgggcttcattgaccccattcagctttgagaactttcagtcccaagttactcaggtgatagaggggaacgcagctgttgttctccggagtcggctgaaggtcagggtggtgaaggagctccgggggaagaagacggccgtgcacaatgggctgggtgagaaaggctcgcaggctgcaggcctggacatggatgtcgggaaacaaggcatgcagtaccaggtcctgaatgaagtggggaatgaccgagggcccctcctccctactgtccaatgtgggatggtctacctgggacggaaccccctctttccccacgggtgcagggcccaccggaagtgaattcgtgttccacccccctacggggaaggcactggcgtc

SEQ ID NO: 175538 - DNA, 1117 bp, Homo Sapiens
  misc_feature (85)..(100): n is a, c, g, or t
gtgaatagtaattataattaaccctttctaaaagaaaaggtatatgtaatagtacataatagagtaacaattgtaactcaagtcnnnnnnnnnnnnnnnnactcaaagcataaaccagacacaatacgttataccagattaacatgcaacttaaaaagaggttaatgtacatactaagcatggaaattcaccagtaaaatcttatttgtcattttacccccactaccttgacattattcttccatttcataatcaacaaggttctacttctggtcacctgataaatgccttgcattcctggagcttgacatttcagtcaattatggacacaagaacaatgttacaagcataaagaaaaaatgcatctacgaaacagctgactgcactgctttcaatggaaaggtccccactccaacctgcccactccctcccttttctcagcacaaacataaatatcccccagtcattcatgaagctgtgttgtcaaaaaggtcctgaagcattatttccctaaacacctaacacatcagcactgaccaaataaaaaccacccaagcactctaaaattctcactttttcaaacattccttgtgtgtaaaattttctaagcatacagagaaacacaagttcacaaaatgataaaaagataagacaaaatttctgcctcttcttgaatgcaaatcttgagtcaaaaccttttattgttttggaaattcaaatacaagaaacctaaggttttcttatttgcttgtcaatatgcatagagcccaattggcagggatggagaggggacgggggaaggtgttatacaaacagactaggtggaacccatttttacctaggcttctctaggacaatatgataaacaagaaagattagtatctactagaagaatttgtcatatttaaaaatcaatatgattagtaaaatgtattttaagtacaaattaaaatgattagtatacatttctctcatctctagcaaacaagagagccctcattagacatagctgcctcctcaatgctgtatcttggacattagcctaaaaaaatatctttaaaaggtgctttgcaggtatcacctcatctcatggaacccatagagggatctcagacaa

SEQ ID NO: 175539 - DNA, 1465 bp, Homo Sapiens
  misc_feature (951)..(1173): n is a, c, g, or t
  misc_feature (1343)..(1343): n is a, c, g, or t
tgtctgaggattctctcagaccttcccctcctcaaggatcacccatcctcctgtcagccccctttatggggaccaggcagctctggagccacccacaggggctgttagagaagcaaggcctggagtggcctgcaccgagtagcagggtcagggttcgtgtgctcctcctcctgctgcaggggctgcacatcccattgccccacttctgctttgtgtctccctctgtctagcttccagggcagggagcaggccccacctagggccgcaggcagtctggcctgtgccagcacggtctcctgtgcccaccagccccacaggtgctgtgctttgtgctcttggctgctgtgctgggacagaatgggatgccaggaagagaagaaagggggtgcagtctgaggccaccaccccccttcctatctaagggagggctgaagacaaggggccggcattcagtgggcagcagaaaggagaggctccttgaagctgctcagtcagaggcccccgtccctccttttgccttccgcaggactgaagacctgaaggggctggcttttggagtgttgaggtgaatatctgggagcagagatcatgaatagctcagggcagtgaatggcgcaccaagagcagggctgtgtgtgggaggctgcagccaggattgcctcagctcctccccctcaggctgggaggatagcacaggctaggggctcggggtggagggtctcagctctgctgcccccaccccagtactagcctagcttcccaagctgtggcttagaggatagttggcttcctgcctctctcctctaaaatagcaagtctgggaaatcctggggtgagtggagtcaccccactcccagttgctggcagagactgagactaaagcatcacttaataaaccccccaagcccaaacaacgcgaccttatacatccctcactcgcgcccgttcgcnnnnnnnnnnnnnnnnnnnnnnnnnnnnnnnnnnnnnnnnnnnnnnnnnnnnnnnnnnnnnnnnnnnnnnnnnnnnnnnnnnnnnnnnnnnnnnnnnnnnnnnnnnnnnnnnnnnnnnnnnnnnnnnnnnnnnnnnnnnnnnnnnnnnnnnnnnnnnnnnnnnnnnnnnnnnnnnnnnnnnnnnnnnnnnnnnnnnnnnnnnnnnnnnnnnnnnnnnnnnnnntcctcccctagcgctacgcgaacgtccttgcttccgccgcgcccgcccgccgttcgcgtgcccgcctcttcctggcccgttcccatgttcgcgccctcggccgtcagctatgcctccctcgacccgcgtaacgtcctcccgccccgtcgggtccgccgtatactcgcctnacctcgcgcccctcccgccccacgagattgcgctgccagctcccgcaccctgcgatattgcgcagctcccgcgcacgccctgatctccgctacatgccccctctgctccccgttctcctccg

SEQ ID NO: 175540 - DNA, 1031 bp, Homo Sapiens
  misc_feature (475)..(475): n is a, c, g, or t
  misc_feature (546)..(590): n is a, c, g, or t
  misc_feature (871)..(892): n is a, c, g, or t
  misc_feature (894)..(894): n is a, c, g, or t
caggccccacctagggctgcaggcagtctggcctgtgccagcacggtctcctgtgcccaccagccccacaggtgctgtgctttgtgctcttggctgctgtgctgggacagaatgggatgccaggaagagaagaaagggggtgcagtctgaggccaccaccccccttcctatctaagggagggctgaagacaaggggccggcattcagtgggcagcagaaaggagaggccccttgaagctgctcagtcagaggcccccgtccctccttttgccttccgcaggactgaagacctgaaggggctggcttttggagtgttgaggtgaatatctgggagcagagatcatgaatagctcagggcagtgaatggcgcaccaagagcagggctgtgtgtgggaggctgcagccaggattgcctcagctcctccccctcaggctgggaggatagcacagggctaggggctcggggcggagcccntccccgccgcggcctcggcccccctcttcctttccgccccggcgggtccccccggtattcctttcgcgcgnnnnnnnnnnnnnnnnnnnnnnnnnnnnnnnnnnnnnnnnnnnnnttgtcctcctgccgcttcgtttttataccccctcctcggtacgctgcctccaacccctcacaattagccgcccccccgctggagcgcccagcgtcttcttagcacctattcctcgccgtattccacccactcgtagcgtgcgcgggcctctgtcgtacaccgcgcgccccgcctggccccggtccttcgttatcgcgcccccgcctcccctccttctcttcggcgcgccgccgcccatatactgccttgcccctccacgcatctggccgtcccgacgttannnnnnnnnnnnnnnnnnnnnngnccggttagggcgtgcgcaaacacgaaccaataccaccacccccgccggggcgccctcctaatgatccccgcctccaggtccccgctcgtattctttccccccgcgcggcatggattatttgtgtcccgccattagcc

SEQ ID NO: 175541 - DNA, 516 bp, Homo Sapiens
ccagccctcacatacctccagccccaaacacacctccaattctatctatgaacgctttttttaacaacaccatatcatcagctgtaaaggcagagtatattagccaagctacaggaagcagtagaagctaatcttggaaccgctatgacctatacattgtttgaatatgccaaagacaataaagagcagttcatggagaatcacaatcccatcaattccgcaacatcgataagcaatatcatctcaattgaaactcctaatacagccccatcaagtaagaaaaaagacaaaaaagaacaactttcaaaagcccagaagcgtaagctggcagacaaaacagatcacaaaggagaacttcctcgaggctggaactgggttgatgtggtgaagcatttaagcaaaactggctctaaggatgatgagtagcactgggaattggagacaaggaaagagcattctttaaagagtaaaactgggttcaaaatctttcattactacttccaggtatgtgagggg

SEQ ID NO: 175542 - DNA, 502 bp, Homo Sapiens
  misc_feature (128)..(128): n is a, c, g, or t
ggtcgctctagagatcccccagccctcacataccttgaaacatgtaaggaagggcaagttttataataaaaaaacaactggcattactcaacgggaagtcagtacatgttcttgcaaggagaacaaanataactgtttaatgatgctgtcttcaatatactacctaattctgtttatgcaacttctcaccagggaattgttttttatggtcagtttggcttttctttgtccccctagtcaagggagagttggtaagtgtggttatctggaaatttccttcatgtcgaataaaaccaactagatggactcataatataggtgttttctctaggtaccatttacacagaagacaaaggtccccaaggacattatgggcagatcattaaaactttcacaggatataggataccaaagaggcataagcttttacaaaagtaaaaaagatgtgcctgtctatatacatatgcgcgcacacacacacgcacacaaaattaggtccaca

SEQ ID NO: 175543 - DNA, 804 bp, Homo Sapiens
cagccctcacatacctctgcagcccagacccgccactaaattctagaggagggtgtctctcaggtcacagtacttttttcttcatttcttttgatttagaaacaaatcagcagggaggacaaggttctcaaggacaaaaaaatcaaagctgaaacgagagcagcacaatccattggtgacgttcatctttttccagaggaatataccattctgttaggacttctggtccaaacgttggtagtcactggcctttgcccgccgggtgactttagatctttttccttccaggacaaaaagcaatgatcttccgcttgtggtgatgagcgatatagaggacagccacaaagaatggctgcagtcaccagatatgcaaagaagtggctgctctccgcgctgccatttccagaaccgttcggataaaggtcatccttctcgctacccgtggaatccgaaagtgtcccttcacggttctcactggaggcagaaccggacatcttttctttctcttctttgggcggtgagccctcctcgggtcctgtatcatcatcttcagcctctttgggctccacatcctcagtaggctctgaagacttaacttcctccttgttagggctgtcttttgaggtctgctcctccgcacccgacttgctgggcccgtctattgggccctgctcctctgcaccggacttgttagagccgtcttttggagtctgcttctccgcacccgacttgttagggacgtcttttggggtctgatcctccgcacccgacttgctggagccgtcttttggggtctggccgtcc

SEQ ID NO: 175544 - DNA, 612 bp, Homo Sapiens
ggtcatactcccgggactgttgacgctttacaaggtggggcaccgcagcctcgttagaggggaacacagcgatttagagtggggaactctgggatgcaaatctgcgtggatttaagtttcatcttggtctcttactagttgtatggccctaggcaggttgcctttctgtgcctcagtttcctagtcagtagaacagtgaagtgctagcatgtgccaggcactgtacttagctattactaattttctgtttccagggcctggagagaaccatccgggacaactttggaggtggaaacactgcctgggaggaagagaatttgtccaaatacaaagacaggtaaggggctgctgggggaaggggtgtatattcccctccccgccaaatctctgctctgctggtgtagggctaggaactcttggggagcacttattcattcaacaaatagcactgaacatctatagtatagcagtaaacaaggcaagcaaaatgcccccttcctggagctcacattctagtagagaagacaagcagtgaatgagtaagtgaataatattatgtcagatgaagaacaaacagtgaagcacgggtagactgcaggtatgtgagggctg

SEQ ID NO: 175545 - DNA, 603 bp, Homo Sapiens
ggaaatatgctgccaaagtatacttcaccaccgttgcttctcaggccatatcttaacaaaggaagaattgctgagctgcctcaatgtgtaggacctgggaactgtgttctggtccttagagaggtcctcactttacttatcaatgcagcctacaaacccagccgtgtccttcgggagctccagctggacaaagactctgtgtggcacggatgtggggaagtcctaaaagccaaatataaaggaaagagttatcgggctactgttgagatagtgaaaacagcagatcgggtgactgaattctgccggcaaacctgtatcaaactggaatgctgtcctaacctcttcggtccacggatggttctggataagtgttctgagaactgttctgtacttacaaagaccaaatacacacactattacggaaagaagaaaaataaaagaattgggaggccacctggtgggcatagtaacttagcttgtgccctgaaaaaagccagtaagaggagaaagaggcggaaaaatgtttttgttcataagaagaaacgctcctctgcatctgttgataataccccagcgggctctccccaggtattgaggatctcg

SEQ ID NO: 175546 - DNA, 642 bp, Homo Sapiens
cccctcacatacctggggagagcccgtggggtattatcaacagatgcagaggagcgtttcttcttatgaacaaaaacatttttccgcctctttctcctcttactggcttttttcagggcacaagctaagttactatgcccaccaggtggcctcccaattcttttatttttcttctttccgtaatagtgtgtgtatttggtctttgtaagtacagaacagttctcagaacacttatccagaaccatccgtggaccgaagaggttaggacagcattccagtttgatacaggtttgccggcagaattcagtcacccgatctgctgttttcactatctcaacagtagcccgataactctttcctttatatttggcttttaggacttccccacatccgtgccacacagagtccttgtccagctggagctcccgaaggacacggctgggtttgtaggctgcattgataagtaaagtgaggacctctctaaggaccagaacacagttcccaggtcctacacattgaggcagctcagcaattcttcctttgttaagatatagcgcctgagaagcaacggtggttgaagtatatcttgggacagcaatattttccattaatcataactgactctgtggagtcagctcctga

SEQ ID NO: 175547 - DNA, 663 bp, Homo Sapiens
ggtgctcttgagatcccccagcgcttcacatacctcgccgcgccgagtatataaacagaggaaaattgcagtggttcagccagaaaaacaagtaccatcctcgaggactgtccacgagggcctgaggaatcaggagctgaactccacagagtcagttatgattaatggaaaatattgctgtccaaagatatacttcaaccaccgttgcttctcagggccatatcttaacaaaggaagaattgctgagctgcctcaatgtgtaggacctgggaactgtgttctggtccttagagaggtcctcactttacttatcaatgcagcctacaaacccagccgtgtccttcgggagctccagctgcacaaagactctgtgtggcacggatgtggggaagtcctaaaagccaaatataaaggaaagagttatcgggctactgttgagatagtgaaaacagcagatcgggtgactgaattctgccggcaaacctgtatcaaactggaatgctgtcctaacctcttcggtccacggatggttctggataagtgtgctgagaactgttctgtacttacaaagaccaaatacacacactattacggaaagaagaaaataaaagattgcgaggcacctgggggcatagtaattagttgtgcctgaaaaaagcagta

SEQ ID NO: 175548 - DNA, 928 bp, Homo Sapiens
  misc_feature (895)..(895): n is a, c, g, or t
cgcagcatgctgcctggcaggggcccgcgcccgtttcgcgctcggcctgtcgggcgggagcctcgtctcgatgctagcccgcgagctacccgccgccgtcgcccctgccgggccagctagcttagcgcgctggacgctgggcttctgcgacgagcgcctcgtgcccttcgatcacgccgagagcacgtacggcctctaccggacgcatcttctctccagactgccgatcccagaaagccaggtgatcaccattaaccccgagctgcctgtggaggaggcggctgaggactacgccaagaagctgagacaggcattccaaggggactccatcccggttttcgacctgctgatcctgggggtgggccccgatggtcacacctgctcactcttcccagaccaccccctcctacaggagcgggagaagattgtggctcccatcagtgactccccgaagccaccgccacagcgtgtgaccctcacgctacctgtcctgaatgcagcacgaactgtcatctttgtggcaactggagaaggcaaggcagctgttctgaagcgcattttggaggaccaggaggaaaacccgctgcccgccgccctggtccagccccacaccgggaaactgtgctggttcttggacgaggcggccgcccgcctcctgaccgtgcccttcgagaagcattccactttgtagctggccagagggacgccgcagctgggaccaggcacgcggcccatggggctgggcccctgctggccgccactctccgggctctcctttcaaaaagccacgtcgtgctgctgctggaagccaacagcctccggccagcagccctacccggggctcaacacacaggctgtggctctggacatccggatattaaaaggagcgttgctnctccctaccaacgcaaaaacaaaaataacatgt

SEQ ID NO: 175549 - DNA, 747 bp, Homo Sapiens
ggccaccgtaagcaagggaaaaagggcagatcatgcggggagatgaccttgatctttgattgctaccctaaccttgacctttaacccgtgattccccccagctcctggaagagatgtcctaatatctcttagggacccagacccctaaattctcctcctcccccattttggtgttaaggtggagagggcatatgcatcctctgtcctgatctaggtgtctatagctgaggggtaagaggttgttgtagttgtcctgggtgcctccatcagactctccctacttgtcccatatttgcaaggggaggggatttggggctggggctccattcaccaaagctgaggtggcttctcattaaccctttaggactctgaagggtatgggacctacgtgaatgtgtgtcagggggagacttgctggtgggttagtggtcctcaggatgtgatagaaacatccagtgtaaaaaggaagttggaatgggagttggcgggcagtgaacgagtgtggggaaggattggtgctggggcaacaggaaggggcctggggccgtttggctgcactaactttggtagctcagtgtgcatctagagtgggactggggagggagctaagcttgggctgggctgcttggggcttggcatagggtggaaagggctaccctggggctctgaccacactgtagtatgtgtggagggtgccctcccgtctcccacaacttctgctataacaataaactgtagaggaatctg

SEQ ID NO: 175550 - DNA, 947 bp, Homo Sapiens
ccgagccctcaaatacctgctctaagagctgagctgcctccccgcgacccgggacacccagcgtggcatgtgcattcctcccccgttcagcctgtggtgtttcctcagcagcctgaccgcctcctcccccattctctcctgaccctctggctatctcgatagcaggtcacctgtgagtctttacactcaaaggaaatagaacagcagggaagggaactgaaaagcagtagaaggaacagtcagagatgcctcactgataggcaggaggccgaacaggtaaaccccagaagtggagattcccaaacggaaaattccagaaatgggcgctccagctctgtgctaagctggggacgagtgtgagtgtgtctgcttgtccaacatttgcacaggcagcaaggcaaagcaggtgtgctcccaaaggcggagtctgaggaggggccggcagcggcaaacggcagcatcaaacagaccactgctgccgcggcaacccagggcctcttcagagctttcaaggcgatggagcgaagaccaagggtgcacatgcatgcaggcaggctgggaaggaagagcgggtggaggaagactgaggggaggctgccaggagaccgccatctgggagcagggccaagagaagctggcagcagttacacagcgcaaaataaaaggccttgggctggactcaggcggaaagaaagtgctggaggaaatgaaagaacaaagcgggctgtctgtgtgcacacgccgggccggtcactaccttttctgcctgacaagtgtacataaaacaattcccgaacagcacggagcatcagacacaactagaggtatggagggcaggaggtgggatgcggtggtgaggctggggctgggcagccggctttgtacaaggtggcacaaaagacgtacgcattccagttcttggaagctggcttccctcgagtctggag

SEQ ID NO: 175551 - DNA, 983 bp, Homo Sapiens
  misc_feature (593)..(611): n is a, c, g, or t
tgattatagaggatccccgagccctcacatacctggtgaagctagacctgagtaagaacaagctgcagcagctgccagcagactttggccgtctggtcaacctccagcacctggatctcctcaacaacaagctggtcaccttgcctgtcagctttgctcagctcaagaacctgaagtggttggacctgaaggataaccccctggatcctgtcctggccaaggtggcaggtgactgcttggatgagaagcagtgtaagcagtgtgcaaacaaggtgttacagcacatgaaggccgtgcaggcagatcaggagcgggagaggcagcggcggctggaagtagaacgtgaggcagagaagaagcgtgaggctaagcagcgagctaaggaagctcaggagcgggaactgcggaagcgggagaaggcggaagagaaggagcgccggagaaaggagtatgatgccctcaaagcagccaagcgggagcaggagaagaaacctaagaaggaagcaaatcaggccccgaaatctaagtctggctcccgtccccgcaagccaccaccccggaagcacactcgttcctgggctgtgctgaaactnnnnnnnnnnnnnnnnnnnattttggtatgccgggagggctggttgcttgtcgggtgacagaactgcagcagcagcccctctgcaccagcgtgaacaccatctatgacaatgcggtccagggtctacgccgccatgagatcctccagtgggtcctccagaccgactctcagcagtgagcttgtccccagcacctgctgcctcccagccttggagtttggattcctatggaattgggttctgctggacacaacctctttttagcatcagacctacctgccatcatcaaatggctgcagattggtacatgagacctcctctttgtaggacttcttcattccttagtcagggtccctgaaggaatgaggagaaatgggaggtatgtgagggctg

SEQ ID NO: 175552 - DNA, 543 bp, Homo Sapiens
cagccctcaaatacctggtgaagctagacctgagtaagaacaagctgcagcagctgccagcagactttggccgtctggtcaacctccagcacctggatctcctcaacaacaagctggtcaccttgcctgtcagctttgctcagctcaagaacctgaagtggttggacctgaaggataaccccctggatcctgtcctggccaaggtggcaggtgactgcttggatgagaagcagtgtaagcagtgtgcaaacaaggtgttacagcacatgaaggccgtgcaggcagatcaggagcgggagaggcagcggtggctggaagtagaacgtgaggcagagaagaagcgtgaggctaagcagcgagctaaggaagctcaggagcgggaactgcggaagcgggagaaggcggaagagaaggagcgccggagaaaggagtatgatgccctcaaagcagccaagcgggagcaaggagaagaaacctaagaagaagcacatcaggcccgaaatctgagtctgctccgtcccgtaagcaccacccggaagcaca

SEQ ID NO: 175553 - DNA, 564 bp, Homo Sapiens
tttagaggatcccccgagccctcaaatacctcccgccacctcccattctctcattccttcagtggacaccctgactaaggaatgaagaagtcctacaaagaggaggtctcatgtaccaatctgcagccatttcatgatggcaggtaggtctgatgctaaaaagaggttgtgtccagcagaacccaattccataggaatccaaactccaaggctgggaggcagcaggtgctggggacaagctcactgctgagagtcggtctggaggacccactggaggatctcatggcggcgtagaccctggacccgcattgtcatagaatggtgtacacgctggtgcagaggggctgctgctgcagttcttgtcaacccgacaagcaatcagccctcccgccacaccaaatagcagcagagcaccagcagtttcagcaaaagcccaggaacgagtgtgctaccggggtgatggcttgccggggaacgggagccagacttaagattcggggccctgatttgcttccttctaggtttcttctcctgctcccgcttgcctgctttgaagggcatcat

SEQ ID NO: 175554 - DNA, 607 bp, Homo Sapiens
gacctcggaaccggagaagccgaagagaagagcgcccgagaaacgagtatgatccctcaaagccaccaaagccggagcaggagaagaaaccttagaaggaagccaaatcaaggcccgcaaatctaagtctggctgccgtcccccgcaagcccatcaaccccgaagcacactcgttcctggcgctgtgctgaaacttcttgctgctgctgctgctatttggtttggcgggagggctggttgcttctcgggtgacagaacgtgcaacagcagcccctctggcaccagcgtgaacaccatctatgacaatgcggtccagggtctacgccgccatgagatcctccagtgggtcctccagaccgactctcagcagtgagcttgtccccagcacctgctgcctcccagccttggagtttggattcctatggaattgggttctgctggacacaacctctttttagcatcagacctacctgccatcatcaaatggctgcagattggtacatgagacctcctctttgtaggacttcttcattccttagtcagggttcctgaaggaatgaggagaaatgggagtgcgaggtattgtgagggctgggggtcctctaga

SEQ ID NO: 175555 - DNA, 544 bp, Homo Sapiens
tagaggatcccccagcgcctcacatacctcccatttctcctcattccttcaggaaccctgactaaggaatgaagaagtcctacaaagaggaggtctcatgtaccaatctgcagccatttgatgatggcaggtaggtctgatgctaaaaagaggttgtgtccagcagaacccaattccataggaatccaaactccaaggctgggaggcagcaggtgctggggacaagctcactgctgagagtcggtctggaggacccactggaggatctcatggcggcgtagaccctggaccgcattgtcatagatggtgttcacgctggtgcagaggggctgctgctgcagttctgtcacccgacaagcaaccagccctcccgccacaccaaatagcagcagcagcagcagcagcttcagcacagcccaaggaacgagtgtgcttccggggatggtggcttgcgagaacggaagccaagacttagataccgggccctgatttgcttccttctaaggttacttctcctgctaccgtttggctgctttgagggcat

SEQ ID NO: 175556 - DNA, 550 bp, Homo Sapiens
  misc_feature (379)..(399): n is a, c, g, or t
agctctcaaatacctccgcagctcccatttctcctcattccttcagggaaccctgactaaggaatgaagaagtctacaaagaggaggtctcatgtaccaatctgcagccatttgatgatggcaggtaggtctgatgctaaaaagaggttgtgtccagcagaacccaattccataggaatccaaactccaaggctgggaggcagcaggtgctggggacaagctcactgctgagagtcggtctggaggacccactggaggatctcatggcggcgtagaccctggaccgcattgtcatagatggtgttcacgctggtgcagaggggctgctgctgaagttctgtcacccgaaaagcaaccagccctcccgccaaaccaaatnnnnnnnnnnnnnnnnnnnnntttcagcaaagcccaggaacgagtgtgctttccggggtggtggcttgcgggggcaccgggagccaggacttagatttcggggcctgatttgcttccttctaaggttacttctcctgctccgatttgctgctttgagggcatcatactcctt

SEQ ID NO: 175557 - DNA, 595 bp, Homo Sapiens
tacctttaggcatctacctaaaatgcttacagtatggtgaagccttattcagaaatatttacttaaaccataggtatagaatagctaccatttctgaataataatgtaaaatgaaaacagaaacagctttcaaatttgaagagaaaagtttccctgaccctagtcagctaacaaagcctatttctaacagtgaacttcctgaactcaagcagctgctcatgaagctttaagagttcacaggcatttcatatttcaatagttgtggaaacatggaagataaaacactgagaggatatttatcaaacacaaatttatatcaagattaactttttcaaccagcttacaagcagacttttccctttcttggttaaaaaatgaatggtatgaaactatatgttaaagatgtttctataataccttacatttacatagcgctttacaattttcaaagtgctttcacatgccatctcatttaatcctcacaacagccctgtgaggtaggtacagcaggtattattatcctcatttcaagatgaggaaattgaggcaaagagaggttaagtgacttgtccaagatcacacagctgtaagtgct

SEQ ID NO: 175558 - DNA, 664 bp, Homo Sapiens
cgtctagagtcccccagccctcaatacctggaaaaaggggtaaagtaaacccaaagtgaacgtgaagccatctgtggttaaagttgtgtcatcccccaaattgaccccaaaacgtaaggcagtggagatgcacgctgctgtcattgccgctgtgaagccactcagctccagcagtgtcctacgggaacccccagccaaaaaggcagctgtggctgttgtcccgcttgtctctgaggacaaatcagtcactgtgcctgaagcagaaaatcctagagacagtcttgtgctgcctccaacccagtcctcttcagattcctcacccccagaggtgtctggcccttcctcctcccaaatgagcatgaaaactcgccgactcagctctgcctcaacaggaaagcccccactctctgtggaggatgattttgagaaactaatatgggagatttcaggaggcaaattgcaagctgagattgacctggatcctgggaaagatgaagatgaccttctgcttgagctatcagaaatgattgatagctgaaggtggtagtgaggacactttaacacaaactcgccaaaaacgtggacttagttcatctattgaacatcacctgagatgatattcttagtctagaattgccaaatagagttcctctgatactgattg

SEQ ID NO: 175559 - DNA, 639 bp, Homo Sapiens
  misc_feature (313)..(322): n is a, c, g, or t
actgtccttgaagcagaaattcctagagacagtcttgtgctgcctccaacccagtcctcttcagattcctcacccccagaggtgtctggcccttcctcatcccaaatgagcatgaaaactcgccgactcagctctgcctcaacaggaaagcccccactctctgtggaggatgattttgagaaactaatatgggagatttcaggaggcaaattggaagctgagattgacctggatcctgggaaagatgaagatgaccttctgcttgagctatcagaaatgattgatagctgaaggtggtagtgaggacactttnnnnnnnnnntcgcccaaaaactggacttagtttcatctattgtaacatttacctgagatgatcatttctttagtctagaatttgccccaaatcagaagtatacctctgaattatctgtatgtgtcctggattccttggggtcagatttttaaagttactttataaccattttgtccatttgatgccattgtttatcatcttttgagaaaaaagttctgtcatacccttctctccacaaaaagagactgagagggagatcaagtgaaaggtgcaagcgaacttagtgaccttgacggtatttgcggatacgatgtcacacagaacag

SEQ ID NO: 175560 - DNA, 659 bp, Homo Sapiens
cgagctcctcaaatacctctggctgaccactccctgaaggcactaaacctcatcaactcccggcccaactgtgtcaatgtgctggtcaccaccactcaactaattcctgccctggccaaagtcctgctatatggcctggggtctgtgtttcctattgagaacatctacagtgcaaccaagacagggaaggagagctgcttcgagaggataatgcagagattcggcagaaaagctgtctacgtggtgatcggtgatggtgtggaagaggagcaaggagcgaaaaagcacaacatgcctttctggcggatatcctgccacgcagacctggaggcactgaggcacgccctggagctggagtatttatagcaggatcagcagcatctccacctgccatctcaccctcagaccccctcgccttccccaactccccaccgagaactccagagacccagatgtttggacaccagggaaggggccccacagccgagacgacgtgttccagtgaccatcttcagaaggcgtccatcagtccaaatgggggttctgagaaggaaagtaccaacattggttcggagatttgactttggggaaaggctggtcggagttagatctctgtaagatcaagaaaaaagaggatgtgattggggtgctgtgataga

SEQ ID NO: 175561 - DNA, 729 bp, Homo Sapiens
  misc_feature (698)..(698): n is a, c, g, or t
  misc_feature (702)..(702): n is a, c, g, or t
  misc_feature (704)..(704): n is a, c, g, or t
gggtatagaggatcccccagccctcacataccttgttcaaaaacaaaccaaaccaacgactaagaaacccagccacacaggtacaagagcataattccggagtaatgagactagtccataaattaaaaagaagacaagacaaacccatcccctcctcatcaccaggcaccccccaaatcagcaattccttgctttttgttctgtgatgtcttacagacagagtctacgactccgatgccagccctatttccccacaagtcaaactactccgacagccaactgttgggtactttccattctcagaacccccatttgaactgatggacggcttctgagatggtcactggacacgtcgtctcggctgtggggccccttcctggtgtccaacatctgggtctctggagttctcggtggggaggtggggaaggcgagggggtctgaagggtgagatggcaggtggagatgctgctgatcctgctataaatactccagctccagggcgtgcctcagtgcctccaggtctgcgtggcaggatatcggccagaaaggcatgtcgtgctttttcgctccttgctccttcttccacaccatcaacgatcaccacgtagacagcttatctgccgaatctctgcattatccttctcgaagcaggtctccttccctgtcttggttgcactgtagatgtccccatgggaaancacngncccaggcccatatagcagggacttt

SEQ ID NO: 175562 - DNA, 606 bp, Homo Sapiens
  misc_feature (342)..(342): n is a, c, g, or t
cgagccctcaaatacctttacaggcctctcaatgcttatttaacttggaaacagctctaccactccctgctgtgtatgtgcttcagttcctcatccttcgactaatgggccgcaccatcactgccgtcctcactaccttttgcttccagatggcctaccttctggctggatactattacactgccaccggcaactacgatatcaagtggacaatgccacattgtgttctgactttgaagctgattggtttggctgttgactactttgacggagggaaagatcagaattccttgtcctctgagcaacagaaatatgccatacgtggtgttccttccctgctgnaagttgctggtttctcctacttctatggggccttcttggtagggcccccagttctcaatgaatcactacatgaagctggtgcagggagagctgattgacataccaggaaagataccaaacagcatcattcctgctctcaagcgcctgagtctgggccttttctacctagtgggctacacactgctcagccccaaatcaagaagatatctcctcatgaagatatgacaacacccctttggttcgctgatgtacatctgatctggg

SEQ ID NO: 175563 - DNA, 456 bp, Homo Sapiens
tgctgggattacaggcatgagccaccgcgtccagcaagaataggtgattttcaaacttggaaaacattcagaagttatcgcctcagtttcagattgagtagtctcaaagagattacagacatctaccacaaattctctacttggtgtggtgcaaaatcagtatgatgtaaactttgtctctcagtttcttcaaaggaaagaagcaactggaacacacatataacactaacccttccagctgcattatgagggaccagtacctgtctcaaggcaaaattatgacttagttcatcctcacctctggaggccagtaaaagtgggttatagaagaacaaagaggcatctagatctttcactgggttatttggagagaaaccatctcctaccgaaggcagtttaacaagactggtagaggaggtatcttatctaattcacagaaatcaaacattgagtcaa

SEQ ID NO: 175564 - DNA, 1055 bp, Homo Sapiens
ggacgcgtggtcggaccgcgtggtcgaccagcgtgccgacacgagaacagtaaatgcaggaacatgctgaaatcacatagcgtactgaatgtacttggaaacagctgccatacacaatagttacttgggcttatgccatgcgaaaaagtattccagatcttctcgagagacaatcatgaaaccaatggtacttcactgatagcaaaaatactgggaggcaactaaaagatacatttgcagattccctcagatatgtaaataaaattctaaatagcaagtttggattcacatcgcggaaagtccctgctcacatgcctcacatgattgaccggattgttatgcaagaactgcaaggatatgttccctgaagaatttgacaaaacgtcatttcacaaagggcgccattctgaggatatgcagttgccttctcttatttttatgatctcatgagtgcagtgcagccactgaatatatctcaagtctttgatgaagttgatacagatcaatctggtgtcttgtctgacagagaaatccgaacactggctaccagaattcacgaactgccgttaagtttgcaggatttgacaggtctggaacacatgctaataaattgctcaaaaatgcttcctgctgatatcacgcagctaaataatattccaccaactcaggaatcctactatgatcccaacctgccaccggtcactaaaagtctagtaacaaactgtaaaccagtaactgacaaaatccacaaagcatataaggacaaaaacaaatataggtttgaaatcatgggagaagaagaaatcgcttttaaaatgattcgtaccaacgtttctcatgtggttggccagttggatgacataagaaaaaaccctaggaagtttgtttgcctgaatgacaacattgaccacaatcataaagatgctcagacagtgaaggctgttctcagggacttctatgaatccatgttccccataccttcccaatttgaactgccaagagagtatcgaaaccgtttccttcatatgcatgagctgcaggtatttgatgagctg

SEQ ID NO: 175565 - DNA, 470 bp, Homo Sapiens
gcttttacacaaaaacttgaaaatttgaaaaacatgatttttttaagtttctcatctcaccagtcttggtgtttatattgcaaatctatcaaagtaagaaataatttgtgctgtatacaaattacatggggaacataaaggagtgagatccttctgtgataaaatgaattcaccactctggttacccaactacagaacctcctttgatcaggccagtaggttgtgatgcaggctggagcccccgaatgccccacacacactgcagcattgaccagaccatccgaaacctgcgtccctggtgatgttctcaagcctcggaagtggcaaatggaaatgatatggccggttgcggttgtaggagagttgtgacttaggcaggagtcgacctcctcaagtaatggaacgatttcaaaggcaggctgccctgaccaaaaatatctgccatgaataaaggtgcctgaaatcctgaa

SEQ ID NO: 175566 - DNA, 837 bp, Homo Sapiens
attctagaggaccccccagaccctcacatacctcattccactgtacaaccacttggcaaactgatggctgctgaggtttaaaactgaatctctggcctggtgaagatatggcctttgagtaacttagaccagggcacatttatctgtttttcattaacaattttaactaaatagaaatataattctgttagctcttctacaggtctacttaaactttgaaagatgagatggttcaaaaatgacacgagaaaatcacccatcaccactaagttaaagacttgaatatgtgagagttccagagcctcaaactcctactacagtcactgatccataacattttcctcttgcaatggactccacgccaaagtagctcagtcttgcggcatgtttgtgcaccaaaaagtaggtttcgaaagatccagcactagtcatcactgtcactgccagactcactcaactgcaagtcatttctgagggtgttcatgagctggttgcttccttgtggccggctggttccattggcaacggcaggcctactgttgtagggctgctggtgtgaaggctgcggaggagaggctgggccattgtcctcgcctccactgctggagctatcgtcatcacttcccgaagagctctcagagtctgaagagctgctcccactgctgctgctcatttgttcaataatgtcaacttcagccctcagctctcttttgatgtcatccacactgaggttcaggtgacgggttatctgtcaagggagaagttttgggtccaactggaggcttcgttggagctctgaatggcataggtatgtgagggctgggggatcctcaagat

SEQ ID NO: 175567 - DNA, 673 bp, Homo Sapiens
ccagccctcacatacctgtacaacccaaaaaaagcaacgttctctacaaagaaatgttgagcttcctacagctctctagctcaaagagctagccaatttccttaaaagtaaaattactgtttctaaaaatatcaactctgtatcctcatcctcactttcagcaacatacagtgaagatggaaaacttgaagactgctataaaccagaaactacaaaacaatttcttaaatgacctgattttcctaaaaaccttaaaaacattagttccaaatactgagaatatatttggcccaattcctttgaactctgtctttagattaatgacgagtttcctttatttcacttattcactagtttagtatgaaataaacagagtttgaatcagttaaactggctaatgacaattttcctcaatgatttttcttctgcataggcatgataatgaaatcacaaaaggtcttcaactagtcttcaactattcttacactatataatcaattagggaaatttttacagacaaatgaagagaacacaagtagctttacagtaagttgagcctgttacatatatttgttctgacaagaatttctgacacaaaaattgctcctgcacacagaatctcagagaaatgatgaaacaagacgctgatggtagaaggtatgtgaagagctgg

SEQ ID NO: 175568 - DNA, 1108 bp, Homo Sapiens
  misc_feature (890)..(890): n is a, c, g, or t
  misc_feature (915)..(915): n is a, c, g, or t
  misc_feature (1049)..(1049): n is a, c, g, or t
  misc_feature (1069)..(1069): n is a, c, g, or t
  misc_feature (1084)..(1084): n is a, c, g, or t
ctgcgatgtatggtcacatcaattgtatcgtacccacagcacccatcccgatgatgaagacagtggcccttacaagcacatctctcctggggacaccaaggtgggtgatggagaattggggagctgatcattgggcatcctgtgttaagaagtctcagggcacgtcagctggctccctggtccacatctcctacctagagatgggtcatgacatcactcgcctcgtctactccaacattcagactgtcagtaacaactgggctcctcatcgagggtcatactattgcaattggggactccaattgctgattctaagacttaccaggacattcagaacactattaaagaaggccaagcaggacgtaatagaggtcatcgagaaggcacacaacaatgagctggagcccaccccagggaacactctgcggcagacgtttgagaatcaggtgaaccgcattcttaacgatgcccgagacaagactggctcctctgctcagaaatccctgtctgaatacaacaacttcaagtctatggtcgtgtccggagctaaaggttccaagattaacatctcccaggtcattgctgtcgttggacagcagaacgtcgagggcaagcggattccatttggcttcaagcaccggactctgcctcacttcatcaaggatgactacgggcctgagagccgtggctttgtggagaactcctacctagccggcctcacacccactgagttctttttccacgccatggggggtcgtgaggggctcattgacacggctgtcaagactgctgagactggatacatccagcggcggctgatcaagtccatggagtcagtgatggtgaagtacgacgcgactgtgcggaactccatcaaccaggtggtgcanctgcgctacggcgaagacggcctgncaggcgagagcgttgagttccagaacctggctacgcttaagccttccaacaaggcttttgagaagaagttccgctttgattatccaatgagagggccctgcggcgcactctgcaggaggacctggtgaaagacntgctgagcaacgcacacatncagaacgagttgganccgggaatttgaaccgattccgga

SEQ ID NO: 175569 - DNA, 1045 bp, Homo Sapiens
ggtcaccttcatcttgtataatttcatagattggctgacttagggtctttcaatagtttgggaattgaaagattcttgttatatatagctagtttgggtttgtttttgttttaactattttgaaggttaggtgagatgggcaaataggcttaactattttgaaggttggatgaaaagagatgggtcagtattcctacagaattcttattaactcaaataactaaatttcagaaaattaagaagctgactttatatttggtggtttgaagtatcttgttgttagcatttgtaataatgctaaaaaaggcctaataaaatgcccaagaaaatattcagtgcatttatagagaaggatattttgtagtagtatagtaatgtgttatgtagtacagttttaaagctataaatggaattttgtgtaaattcacaaaaatgtgatataaacaggatctaagactggattccctgtcactaaactgcaccactatacctgtctctctgtgtgggggacactgctgatgattcccaagattgagatgatgacggtgatgacgactgggtgaacagccatcacttcaacattgtgataatccttcacagcaagaaaccgaataaaatactaacatttctaacaactgctctgacattgtaaagagatccaacagaatcactcctgctgaaaaatacgctttctgccacctacacatttctatttaggaagtaaaatttgcttcatggtcatgaccccattagtcagtgttacagctgtgttggggataggaagtatatctggcagattgacatttatacacttttttataaagcagattttaaaatatagtaacatccatttttttcccttgaaagtgattctcttataaaaaatgaaagtggagtttaaggtatatcaaatcgttgtggaaggtgattaaaaatcaaaattcttttaaatatcaacttaattttttctaagtaagatacaaaaaattttcatctaaagtaatatttcactttatattgtaaaaggtaggtatgtgagggtctg

SEQ ID NO: 175570 - DNA, 804 bp, Homo Sapiens
  misc_feature (37)..(37): n is a, c, g, or t
ggcgttatagaggatcccagccctcacatacctccangccctcacatacctacacagggtttcaacatcaaaagtgtacaatcacaaggttttaaactgaatgtatgggacattggtggacagaggaaaaccagaccatactggaagaattattttgaaaataccgatattcttatatatgtaatcgacagtgcagacagaaaaagatttgaagagacgggtcaggaactagcggaattactggaggaagaaaaactaagttgtgtgccagtgctcatctttgctaataagcaggatttgctcacagcagcccctgcctctgaaattgcagaaggactgaacctgcataccatccgcgaccgagtctggcagatccagtcttgctcagctctcacaggagagggcgttcaggatggcatgaactgggtctgcaaaaatgtcaatgcaaagaagaaataaaatctagacgaatggagatgcaggagctgcgggagccgaattcggtcctgaaaaacactaatttgctgctttctgaccaaatgtttttccatctgtgtacagctccagctgtttgaagagagggaacaacacggtttagaaagaatccccattccagcagtagatttaactgatctctgaggttcagtatcatttttcaaataaaggaattatattatttcctctgcataattgaaatagtattaaatgtctcaaagcacatgattagaaagtgagatcttttaaatgagcaagagattgcattgcagtttagacaattccagtgggcttttttttcctcgcggg

SEQ ID NO: 175571 - DNA, 816 bp, Homo Sapiens; identical to SEQ ID NO: 15112

SEQ ID NO: 175572 - DNA, 681 bp, Homo Sapiens
cgagccctcacatacctattcccaagcctctgaattgcccacagatgctgttgatgtatgagcagagagcttgtgtcccttactagccgaaatcctgatcaaagaaaagaatcttggtgcattagtatcactgtgtccaaggtagacaaagaccagccttccattttaaactcctgtgaagacccagttccagggatgtagttttttttgccacctggtcagcacttgtcagactattcccagttgaatgaaagcacaacaaaagagtcttcagaggccagccagcttgaagatgctgctgggggtgacagtgcatctgaggaaaaaagtgggtctgctgagccatttgtactgccagcctcttctgtggaaagtacattaccagtgcttgaggcatccagttggaagaagcaggtgtcgcatgacttcctggagaccaggtttaaaatccagcagcttttggagcctcagcagtacatggcttttctgccccaccacattatggtaaaaatcttcaggttacttcccaccaagagtttagtggcccttaaatgtacctgctgctatttcaagtttatcattgagtactacaatatcaggccagcagattctcgctgggttcgagatccacgctatagagaggatccctgcaacaggtgcaaaaaaggtatgtgagggctg

SEQ ID NO: 175573 - DNA, 435 bp, Homo Sapiens
cagccctcacattacctggcttataagaagctaaaaggccaaagtccaggaattatcttcatccctggctatctttcttatatgaatggtacaaaagcgttggcgattgaggagttttgcaaatctctaggtcacgcctgcataaggtttgattactcaggagttggaagttcagatggtaactcagaggaaagcacactggggaaatggagaaaagatgttctttctataattgatgacttagctgatgggccacagattcttgtgggatctagccttggagggtggcttatgcctcatgccgcaattgcacgaccagagaaggtcgtggctcttatgggtgtagctacagctgcagataccttagtgacaaagtttaatcagcttcctgttgagctaaaaaaggaagtagagatgaaaggtatgtgagggctg

SEQ ID NO: 175574 - DNA, 690 bp, Homo Sapiens
cgctgatgcagtttcgtcaccatggaacatgcactctgacactttgtcacttacgacgggtcccccaccttctgccaggaaccctctcttcaactagcaatcaattgcctgtgggtctcccgatgacaccggtccgcaaggccagcctgcaggaggtcctgtcctgcagcgcctacctgctgttctacgagcggcgtccgttccaggatgcagcaccagagccaggaatgcaagtctgaagaatgactgtgccctcctgcaaggctagagctgatggcactgtctgcactgtccaggaaaaaagtaaaactgtactgttgcgtgtgcaagcggccccactagagcccttccagccttctggtgtgttctaagagcaggctccacctgggagccagccccagttcacaccaaaccaggctccctgaacagtcctgttcatgtgtgtaggtggttctgttgtgttaagaaagcattcattatgtccggagtgtctttttactcatctgatacaggtaattaaaagaactcagattcttgaagccaccgttttcatattgtaatgttaggtgttctcagaggggaggtacctttgtctaatcaacgtttccacttagatcttttatttttaataagcaggcccataaaaattgttgacaagaattaatgaaattattaaaggcaacaatttag

SEQ ID NO: 175575 - DNA, 633 bp, Homo Sapiens
atggtggagctgctcttgaggatcccccagccctcacatacctggagatatgtctactggtcccatagcagaaagctggtgttacacacaggttaaagtagtaaaattttcctatatgtggaccattaataacttcagtttttgtcgagaggaaatgggtgaagtgttaaaaagttcaacattttcatctggcccaagtgacaaaatgaaatggtgcctgagggtaaacccaaagggattagatgatgaaagtaaagactacttgtccttatatttgcttttagtcagctgccccaaaagtgaagttcgagcaaaattcaaattttcccttctgaatgctaaaagggaagaaacaaaagcaatggaaagccaaagagcatatcgatttgtgcaagggaaggactggggttttaaaaaattcattagaagggactttttgcttgatgaagctaatggtcttttaccagatgacaagcttacattatttggtgagaatctccagcactgcttgcagaagaggaggaagcattgcactacccttcctaaagaactgcctcctccccctcccctgcaagtggtgctgtagacaggtatgtgaggctgaggtatgtgaggcgcgggatcctctagatc

SEQ ID NO: 175576 - DNA, 240 bp, Homo Sapiens
  misc_feature (42)..(42): n is a, c, g, or t
gtatcccccagccctcacataccttcagttactatatctagncaatattgaatagaaattataaatggaaataaaaatgcttgttaaataaaatctccagtctcgcagcacccccgaatataatacaaacagacttaagttgaaatttggttttgttaatgcccaccttgtgtggttcaaaacacagttttgaaggaatgaccaccttcaatgttctttacagcttctttagtgttactt

SEQ ID NO: 175577 - DNA, 462 bp, Homo Sapiens
agtaacaagtatgacctgttgcctgttgaggtcaggtgtacctgtgtgtctctctctgtgatgtatgtgggcttggtgtccacatcaatgtgcgtgaatactcctacccacagactgctactgtgccaatatagaggttcataagaaagataaaagagaaccagcagaaccccaggttctgcctctccttcctcccttggcccagataaaggtgtacagtgtttgtggtgaggctgctggacactgctgttttgggctttctagagagaatgcaaacatgcaaaaacagtgtggtagtgtaggcagaacaagatctagaatcagaagacctggagtcgaatctcagctccaacacccactggatgaacgtggacagctgcttgatctctcagatcctcgatttcttcatctgtaagatggaaacatatgtgtcttttctaaggggaaagatcaaatgacatc

SEQ ID NO: 175578 - DNA, 504 bp, Homo Sapiens
ctcagatagagcccatctgccaggtcccccgtggcctgctgcccacttacccacgaatcagtctacactaggctctggcacaggctctagggtgatggctcctcccagggaacccttgttctttaacaggggcctcctctagaaaatggatgagcagccaaaaagtgacaccttgagcctctctcctcccacctcaggctaacagcaggtggtggctcagatagtgggtgaaaatgcttaactacaacgttcaattaaatggtcattattatactttatatcatcaaaaccaagttgcacacattctttgtctgtcttcggagacatctgggagaacaggattcctgaggtccacagggtggggagctaagctctgctgccgggctgtaaagctgatgttcaaggggagaggtcccaggctcctctggtggctgggggatggggctataagatggtgagctcgaagctccaggtatgtgagggctggcggatcctcaagagtcg

SEQ ID NO: 175579 - DNA, 605 bp, Homo Sapiens
cgaacagaggagcccccagccctcacatacctcgcattattgaatgcatatgctgagaagggcgacattgaccatgttaagcagactctggagaaggtggagaagtccgagcttcaccttatggaccgtgatttactgcaaattatttttagcttcagtaaagctgggtatcctcagtatgtctcagaaattttggaaaaagttacatgtgaaagaagatatattccagatgcaatgaacctcattttacttttagtcactgaaaaatgggaagatgtagcgttgcaaattttactagcatgccccgtatcaaaggaagatggcccaagtgtctttggcagtttctttttacaacactgtgtgactatgaatacgcctgtggagaagctaacagactactgtaagaagttaaaggaagtccagatgcactcctttcctctgcagttcaccctccattgtgctttactcgccaataaaactgatttggcaaaagccttaatgaaggctgtgaaggaggaaggttttcctatcagacctcactatttctggccattgctagttggacgtcggaaggaaaaaaatgttcaaggtatgtgagggcgctg

SEQ ID NO: 175580 - DNA, 817 bp, Homo Sapiens
acacaagaggattgaagtagaacaggctctggcccacccatatctggagcagtattacgacccgagtgacgagcccatcgccgaagcaccattcaagttcgacatggaattggatgacttgcctaaggaaaagctcaaagaactaatttttgaagagactgctagattccagccaggatacagatcttaaatttgtcaggacaagggctcagaggactggacgtgctcagacatcggtgttcttcttcccagttcttgacccctggtcctgtctccagcccgtcttggcttatccactttgactcctttgagccgtttggaggggcggtttctggtagttgtggcttttatgctttcaaagaatttcttcagtccagagaattcctcctggcagccctgtgtgtgtcacccattggtgacctgcggcagtatgtacttcagtgcacctactgcttactgttgctttagtcactaattgctttctggtttgaaagatgcaatggttcctccctctcctgaatccttttctacatgatgccctgctgaccatgcagccgcaccagagagagattcttccccaattggctctagtcactggcatctcactttatgatagggaaggctactacctagggcactttaagtcagtgacagccccttatttgcacttcaccttttgaccataactggttccccagagcaggaacttgtggaaataccttggctgatgttgcagcctgcagcaagtgcttccgtctccggaatccttggggagcacattgtccacgtcgttttcgtcatagtcatggtagtcact

SEQ ID NO: 175581 - DNA, 824 bp, Homo Sapiens
  misc_feature (94)..(94): n is a, c, g, or t
  misc_feature (98)..(98): n is a, c, g, or t
  misc_feature (105)..(105): n is a, c, g, or t
caaaaaaagagtacttttaatttcctcaactccagaagctccaattctatgttcccattcacagcagaccctcaaaattagatccttggctttntcanagatggnaacttctgaaggaaaagtcaaagtttctttccagttcatcaccttcttatatgtctctcgaggggtctcagaacagaaaggtgggtagccgatgagcatctcatacatgatcaccccaagcgaccaccaatcacagagcttgttgtacccggtctgcatgaacacctcaggagcaatgtagtcaggagtgcctactgtggagaaggctagctgacgtctatttcttttccaggtttctgctttcctttgggaattcatgttctggaaagtgaaatcactggggaggctgtggttcagattcctataaaattctgtcctatgtgcttttttcagtcctgtgcaaagaccaaagtcagaaagtttcacatggcccttgctgtccaaaagaaggttgtctggtttgatgtctctgtggatgaatccaagttggtgaatagagtctatggctaatactgtttctgctatataaaactgagtctcctcttctgtcagagtgtcttttttcatcaacaaggtcatcatgtcccctccaggcaggaactccatgattaggtagaggtttagcttatcctgaaaactatagaacattttcacaacccacaaactgtctgcctccactagaatgtcacgctccgcacgaatgtggccaacctgctctttttcaagcatatctgctttacggagtattttcattgcatacacatgtcccgtatctttct

SEQ ID NO: 175582 - DNA, 672 bp, Homo Sapiens
gataagaggatcccgggtcgaccaacgcgtcatcccctgtttctgcacagagctgtaagcccaaattattctggggattaatcacccaatgattgctggtcacagtgatatcaaagacaagccaacccacatctaaagcttgggcctttcttgtgtctaacaagaacagatctgcatccctatttgtgtattccttgatgatttgatatatgctaatcttaattgtttcattttcaaatcggttgttgctccggtccttgtatatccggaattcagctgctgtcactgcctctccatgaggaatttgggtaagatcaaatcgaaattctttgtaatgccttcgctggtgagaaaaatccttgtctctttcaactaagttgacaaagctcatgaccatgtcagcatcattcagaaagttggtatcatggaggctggctagaggaggactctgggtggtcagaggagtcgtccgagataactgtatgcgacgaggatacccattgggagaggctgggtatccctttcttgcccctctggtctcttctgccaaggatgcccttactgagtactccgactcttcaggattttcttcattggtcatggcattgtagagatccagcataaagagagtgcagagacgcttgggtcgacccgggatcctctagatcgccc

SEQ ID NO: 175583 - DNA, 599 bp, Homo Sapiens
ggggcccctgagaccctgcagcaccatctgtcatggcggctgggctgtttggtttgagcgctcgccgtcttttggcggcagcggcgacgcgagggctcccggccgcccgcgtccgctgggaatctagcttctccaggactgtggtcgccccgtccgctgtggcgggaaagcggcccccagaaccgaccacaccgtggcaagaggacccagaacccgaggacgaaaacttgtatgagaagaacccagactcccatggttatgacaaggaccccgttttggacgtctggaacatgcgacttgtcttcttctttggcgtctccatcatcctggtccttggcagcacctttgtggcctatctgcctgactacaggatgaaagagtggtcccgccgcgaagctgagaggcttgtgaaataccgagaggccaatggccttcccatcatggaatccaactgcttcgaccccagcaagatccagctgccagaggatgagtgaccagttgctaagtggggctcaagaagcaccgccttccccaccccctgcctgccattctgacctcttctcagagcacctaattaaaggggctgaaagtctgaaaaa

SEQ ID NO: 175584 - DNA, 620 bp, Homo Sapiens
ggggaccctgcagcaccatctgtcatggcggctgggctgtttggtttgagcgctcgccgtcttttggcggcagcggcgacgcgagggctcccggccgcccgcgtccgctgggaatctagcttctccaggactgtggtcgccccgtccgctgtggcgggaaagcggcccccagaaccgaccacaccgtggcaagaggacccagaacccgaggacgaaaacttgtatgagaagaacccagactcccatggttatgacaaggaccccgttttggacgtctggaacatgcgacttgtcttcttctttggcgtctccatcatcctggtccttggcagcacctttgtggcctatctgcctgactacaggtgcacagggtgtccaagagcgtgggatgggatgaaagagtggtcccgccgcgaagctgagaggcttgtgaaataccgagaggccaatggccttcccatcatggaatccaactgcttcgaccccagcaagatccagctgccagaggatgagtgaccagttgctaagtggggctcaagaagcaccgccttccccaccccctgcctgccattctgacctcttctcagagcacctaattaaaggggctgaaagtggaaacc

SEQ ID NO: 175585 - DNA, 440 bp, Homo Sapiens
cgacccaagcgtcacgttagaatatgagtggaatcttcgacaggaggagatagatgagagcgatgatgatctggatgacaaaccaagccctatcaagaaagagcgctcacccagacctcagagcttctgccactcctccagcatctccccccaggacaagctggcactgccaggattcagcactccaagggacaaacagcggctctcctatggagccttcaccaaccagatcttcgtttccacaagcacagactcgcccacatcaccaaccacggaggctccccctctgcctcctaggaacgccgggaaaggtccaactggccccaccttcaacactccctctaagcacccagacctctagtggcagctccaaccctatccaagaagaggcctcctcccccacaccgacgcgttgggtcgacccgggatcctcatagagc

SEQ ID NO: 175586 - DNA, 920 bp, Homo Sapiens
  misc_feature (87)..(87): n is a, c, g, or t
  misc_feature (656)..(656): n is a, c, g, or t
cccgggccacagccacacccgtcttgggctcgatgtggaggatgctgttggctgaggagctccaggttccttgagaggccttccagnctggtcagaacagtggccagacagagcacgtcccccaccaccatggccccagacagctctggggagatggcctgtaggacaggcaggggcatgaagtccgagaggcccgggtgctctgcgtcccacacacggagcagtgtcaggcccacgctgactgtgcggacaacgcaggtgttgttggtggggcccttcccgatctgcacaaagtcgtctctgttagtggcaaagttgaggaccgaactgtgagcatggaagacatctccagagttgtcgtggaagtggacagtgaaggtcacggtcattcccaaaggcacggccaccagggcctccttgttctgggtgtgcaggacagggctcatggaaaccctcaggtaggaaacaggggatacctttacagcaacaatgatggtttggttggccccaaaggcctcttgtgcaatcacttcgatggtggatgtcccgatcatagaccctgatgctagaaagcctttctcatcaacatgcacaactggaaccttttcgggtccatccaggacgcggtagctcagagaggctgcaccatccctgtntgtctgcagctttatatatgagtggggcgacattaatatttgttcggcttctatttcagggttgagcagctgcagtttctcaaacacctggacttggatctcatccgagagttctctggccaggccatacagttgccccgatgtgtggtccacagccttgacaaccaccctcagcctggtccggccttttacctggccgagcactgttcatggcaaagttgtactgtgacgggagtcggatcgaagcctcgtggtgccgccctc

SEQ ID NO: 175587 - DNA, 279 bp, Homo Sapiens
ggtcgactactactaaattcacggccgcctcaacgttggtcctctgccctggacctgtctctgtgttcaggtacagtaaggcatacagataacctgcccgtccataaagcagctcatcaggaaggtctgattcttggcagacaaccgatctctggagctgcaaaagttttgtgacacattcctgggactcacagtcacttctgagtttgtgataaatcacagctccaacagccagggggccagcatccccacaaaggaaggtgaccctgcgggtcgacg

SEQ ID NO: 175588 - DNA, 344 bp, Homo Sapiens
ggtcgactactactactaaattcgcggccgggtcgacgttggtcctctgccctggaccttctcttccctattgccttggttaattcctttccatcctacaagtcttccgcagcgaagccgccctgacctccctgaccaagtcaagctcctatgagctccattagctccacagacctgttctgcaaagccccagaactcagcgtggttttccctttgatctgtgtggtgataacttgagtcctggactgcaggccccatgacagcagggcctcaccagcacttagcacagtgcctggcacacagtaggtcctcattactgagatgttgagtggatgcgcacatgc

SEQ ID NO: 175589 - DNA, 419 bp, Homo Sapiens
ggtcgactactactactaaattcgcggccgcgtcgacgtcggtcctctgccctggacctgtcttggttcctgaccctgtcggcggctgcctggtgcctgccttgccacctgtacctctcctctatggaaggatggccacagtattccatggtgcctgagtcctccctaacccatcactcgtgtccttggctctctcctgacccctaaggtgagggtcaggtgcagagccatgaccttctgtgcccaatcccagctgggcctcatgtacccccaagtagaagtttctgggacctaccacaagaagagagtgtgctccttctgtacggtataaagtagtcattctgcacaaacatcagcatcaaatggagactgttccttgcctgccatctcattgactcccccaggtccacgcggccgcg

SEQ ID NO: 175590 - DNA, 334 bp, Homo Sapiens
tactactaaattcgcggccgcgtcgacagcaagtcgagtgcggaggcgcagaccccagaagacacccccaacaagtcgggtacggaggcaaagacccaaaaagacagctccaacaagtcgggtgcggaggcaaagacccaaaaaggcagcactagcaagtcgggttcggaggcgcagaccacaaaagacagcactagtaagtcgcatccggagctgcagactccaaaagacagcactggcaaatcgggtgcggaggcgcagaccccagaagacagccccaacaggtccagggcagaggaccaacgtcgacgcggccgcgaatttagtagtagta

SEQ ID NO: 175591 - DNA, 916 bp, Homo Sapiens
  misc_feature (808)..(808): n is a, c, g, or t
gccgcagggtcaccttcctctgtggggatgctggccccctggctgttggagctgtgatttatcacaaactcagaagtgactgtgagtcccaggaatgtgtcacaaaacttttgcagctccagagatcggttgtctgccaagaatcagaccttcctgatgagctgctttatggacgggcaggttatctgtatgccttactgtacctgaacacagagataggtccaggcaccgtgtgtgagtcagctattaaagaggtagtcaatgctattattgaatcgggtaagactttgtcaagggaagaaagaaaaacggagcgctgcccgctgttgtaccatgtggcaccggaagcagtacgttggagcagcccatggcatggctggaatttactatatgttaatgcagccggcagcaaaagtggaccaagaaaccttgacagaaatggtgaaacccagtattgattatgtgcgccacaaaaaattccgatctgggaattacccatcatcattaagcaatgaaacagaccggctggtgcactggtgccacggcgccccgggggtcatccacatgctcatgcaggcgtacaaggtctttaaggaggagaagtacttgaaagaggccatggagtgtagcgatgtgatttggcagcgaggtttgctgcggaagggctacgggatatgccatgggactgctggcaacggctattccttcctggtcctttaccgtctcacgccaggaaaaaaagaacctctaccgagcttgccagtttggcaaagtggggtctagattaccggagccccccgggtggcgncatttcctgaacagaccctatttccctccttttaaagcactggcttggcccccttattccctttcccctctggatggcccggggacccacagaaatccccgggttttc

SEQ ID NO: 175592 - DNA, 592 bp, Homo Sapiens
  misc_feature (90)..(90): n is a, c, g, or t
tgaccacgcgtcgttctccggctgtcctccgttcgctgccgccctgccaccatgacggaacaggccatccagtgactaccctagtgattntggggtgattcagataaaagaaaaacagaaagcggggctgctaacacttgaagatcatccaaacatcaaacgggtcacgccccaacgaaaagtctttcgttccctcaagtatgctgaatctgaccccacagtaccctgcaatgaaacccggtggagccagaagtggcaatcatcacgtcccctgcgaagagccagcctctccctgggctctggcttctggcatgctacgggaaggcattcgagcagacggctgctgagagccatcccgcgccaggttgcccagacactgcaggcagatgtgctctggcagatgggatatacaggtgctaatgtaagagtggctgtttttgacactgggctgagcgagaagcatccccacttcaaaaatgtgaaggagagaaccaactggaccaacgagcgaacgctggacgatgggttgggccatggcacattcgtggcaggtgtgatagccagcatgagggagtgcaaggatttgctcaga

SEQ ID NO: 175593 - DNA, 635 bp, Homo Sapiens
ggtaaagcgcgcagccgaccatttgaaagcgttagcagccattgaggacttctccctagagcattgaagctcttggtatttccatggccaaggtactgatggctttctaccagctggagatcctggctgaggaaacaattctgagctggttcagccaaagagatacaactgacaagggccagcagttgcgcaagaatcaacagctgcagaggttcatccagtggctaaaagaggcagaagaggagtcatctgaagatgactgaagtcacactgcctgctcctttgggtgtgattgagtgccctcctggctcctgggctgggacaagtgaggaactagctgcagagggatgagtgaccaccatccaggctgagactgaaaggagcagaggctggaactacagtattctttcccctgctagcaaccatgtgcctcccatcctgactgtggagttgggatgtggaagtggggctggaacaaagcttctgcctagggaggagctaagcaggcccggcagttggaggaaggccagaggaacagctttgtgctccggctttccctcagggaacagcagagagcagttggctctttctgctgcttgtatatgttaatattaaaagagagtggtgtaaaaaaa

SEQ ID NO: 175594 - DNA, 1919 bp, Homo Sapiens
acagttatgtttgccatgttcgtcaatatattccccaagccaccaactcgttgccctaagacaatgtggtagtggctgtggatagtaccacaaacagggttctccattatcagaagacccagggtctccggcgttttgcatttcctctgagcttgtttcagggcagtagtgatggagtgcaggttcgatatgatttactggattgtcatatcagcatctgttctcctcaggtggcacaactctttacagacaactttgactaccaaactcgagatgactttgtgcgaggtctcttagtgaatgaggagatcctagggaaccagatccacatgcacgtaacagctaaggaatatggtgcccgtgtctccaacctacacatgtactcagctgtctgtgctgacgtcatccgccgatgggtctaccctctcaccccagaggcgaacttcactgacagcaccacccagagctgcactcattcccggcacaacatctaccgagggcctgaggtcagcctgggccatggcagcatcctagaggaaaatgtgctcctgggctctggcactgtcattggcagcaattgctttatcaccaacagtgtcattggccccggctgccacattggtgataacgtggtgctggaccagacctacctgtggcagggtgttcgagtggcggctggagcacagatccatcagtctctgctttgtgacaatgctgaggtcaaggaacgagtgacactgaaaccacgctctgtcctcacttcccaggtggtcgtgggcccaaatatcacgctgcctgagggctcggtgatctctttgcaccctccagatgcagaggaagatgaagatgatggcgagttcagtgatgattctggggctgaccaagaaaaggacaaagtgaagatgaaaggttacaatccagcagaagtaggagctgctggcaagggctacctctggaaagctgcaggcatgaacatggaggaagaggaggaactgcagcagaatctgtggggactcaagatcaacatggaagaagagagtgaaagtgaaagtgagcaaagtatggattctgaggagccggacagccggggaggctcccctcagatggatgacatcaaagtgttccagaatgaagttttaggaacactacagcggggcaaagaggagaacatttcttgtgacaatctcgtcctggaaatcaactctctcaagtatgcctataacataaagtctaaaggaggtgatgcaggtactgagccacgtggtcctggagttccccctgcaacagatggattccccgcttgactcaagccgctactgtgccctgctgcttcctctgctaaaggcctggagccctgtttttaggaactacataaagcgcgcagccgaccatttggaagcgttagcagccattgaggacttcttcctagagcatgaagctcttggtatttccatggccaaggtactgatggctttctaccagctggagatcctggctgaggaaacaattctgagctggttcagccaaagagatacaactgacaagggccagcagttgcccaagaatcaacagctggcgaggttcatccagtggctaaaagaagcagaaagacgagtcatctgaagatgactgaagtcacactgccctgctccttttgggtgtgattgagtggccctcctgggctccttgggctgggacaaatggacgaaataaccttcctaagggattgaatgaaccccccatccacggcctggagaactgaaaaagggacccaaaagggcttgggaaactctaccggttatttccttttcccccctgggctttagacaaccccagtggggcccattccccacttcccttgaaattgcgtgggaaattctggggggaaagttgtgtgtaaagatggggggggcctttgg

SEQ ID NO: 175595 - DNA, 533 bp, Homo Sapiens
cggtgaccctagaggatccgggtgaccacgcgtctccggggctcaaggtccctcacgcacgcaaggaccgggacaccatcgcgggcctggtgttccaagacggggtcattctgggcgccgatacgcgagccactaacgattcggtcgtggcggacaagagctgcgagaagatccacttcatcgcccccaaaatctactgctgtggggctggagtagccgcggacgccgagatgaccacacggatggtggcgtccaagatggagctacacgcgttatctacgggccgcgagccccgggttgccacgggtcactcgcatcctgcgccagaacgctcttcaggtaccagggccactgtgggtgcatcgctgatcgtgggcggcgtagacctgactggaccgcagctctacgggtgtgcatccccatggctcctaacagccgtctgcccttcacagccctgggccctggtcaggacgcggccctgggggtgctagaagaccggttccagcgaacatgacgctggaggtgctcagggg

SEQ ID NO: 175596 - DNA, 978 bp, Homo Sapiens
actgtattttctgggtttattcccccttgttccaagctctaagcctcagcttactccacctccatagcctgcacagtttcctccactagctccagggttagtggcttcactgtctgggtcaggacagctgtggttccaggcacaaagtggtagcggccagacctcttcacgggctctgtgggtgagctcagtgtccgcagcagcttggcgccagtctttgtgatcacacatgcgtccacattgcccccggagcccaggtcacccaagatcccggcggtgacggcttccaccagcagcccctgagcagcctccagcgtcatgttcggctggaaccggtcttctagcaccgccagggccgcgtcctgaccagagcccagggctgtgaagggcagacggctgtaggagccatggggatgcacaccgtagagctgcggtccagtcaggtctacgccgcccacgatcagcgatgcacccacgtggccctggtacctgaagagcgtctggcgcaggatgcgagtgaccgtggccacgcggggctcgcggcccgtagataacgcgtgtagctccatcttggacgccaccatccgtgtggtcatctcggcgtccgcggctactccagccccacagcagtagattttgggggcgatgaagtggatcttctcgcagctcttgtccgccacgaccgaatcgttagtggctcgcgtatcggcgcccagaatgaccccgtcttggaacaccaggcccgcgatggtggtcccggtcttgcgtgcgtgagggaccttgagccccgggaggacgcgttccaatgatgcatttctttggcagttctcgaaggagaagccccctcggggctccagggctggcttcagcatcttggggcaggcagaggggattaggggtcgcgggcggatgagtcggccagacaagcggggccagtgagcagctaaaaagtcctctgctaggcttcacgtctgtccc

SEQ ID NO: 175597 - DNA, 439 bp, Homo Sapiens
gacacaagcaccgaggagcccatgctgaatgtgcagaggatacgcatggaaccctgggattaccctgcaaaacaggaagacaaaggaagggccaagggcacccccgtctagaatgccagaaccagcgggtggccttaggggctgtgaggcagtggggaccttattgatgaaagaaaccgtctttgcgttacacccgagtctgcctctcggagcagggagctcaccttccgcgacgtgttctgagggtctgcatcttaggggggagggctggggcaaatcgccacctgtgcctttcctctggccctgctgcccccacacccaactccgagggcccacgctggggaaagcgggaagcgctcgctccctttcccccattagtgctctctctgcctggatcccggcagaagctatgaaagggaataaagagaaaagaagtaaa

SEQ ID NO: 175598 - DNA, 1166 bp, Homo Sapiens
ggggacgcggacccgccatggcgcggaagaaggtgcgtccgcggctgatcgcggagctggcccgccgcgtgcgcgccctgcgggagcaactgaacaggccgcgcgactcccagctctacgcggtggactacgagaccttgacgcggccgttctctggacgccggctgccggtccgggcctgggccgacgtgcgccgcgagagccgcctcttgcagctgctcggccgcctcccgctcttcggcctgggccgcctggtcacgcgcaagtcctggctgtggcagcacgacgagccgtgctactggcgcctcacgcgggtgcggcccgactacacggcgcagaacttggaccacgggaaggcctggggcatcctgaccttcaaagggaagactgagagcgaggcgcgggagatcgaacacgtcatgtaccatgactggcggctggtgcccaagcacgaggaggaggccttcaccgcgttcacgccggcgccggaagacagcctggcctccgtgccgtacccgcctctcctccgggccatgattatcgcagaacgacagaaaaatggagacacaagcaccgaggagcccatgctgaatgtgcagaggatacgcatggaaccctgggattaccctgcaaaacaggaagacaaaggaagggccaagggcacccccgtctagaatgccagaaccagcgggtggccttaggggcctgtgaggcagtggggaccttattgatgaaagaaaccgtctttgcgctacacccgagtctgcctctcggagcagggagctcaccttccgcgacgtgttctgagggtctgcatcttaggggggagggctggggcaaatcgccacctgtgcctttcctctggccctgctgcccccacacccaactccgaggggcccacgctgggggaaagcgggcaagcgctcgcttccctttccccccttagtggctctcctctggccgggatcccccgcaagaaacctatggaaacggcacttatgccgaactcgttagcccttcaccccacacttacattggcccaacaccttcgggcaatcagaatacccccactgtcccacctcctccttattggcgggcataaccggggggcgaactcccttctccccacaaactctataatgtcgccaacccttcccgggggagaa

SEQ ID NO: 175599 - DNA, 956 bp, Homo Sapiens
actgtgctgaggtcgtctagaggatccctcggcacggggctggactgtctactccggggtcttcgtggccttctgggcctgcgccctggccgtgggagtctgctacaccatttttgatttgggcttccgctttgatgtggcatggttcctgacggagacttcgcccttcatgtggtccaacctgggcattggcctagctatctccctgtctgtggttggggcagcctggggcatctatattaccggctcctccatcattggtggaggagtgaaggcccccaggatcaagaccaagaacctggtcagcatcatcttctgtgaggctgtggccatctacggcatcatcatggcaattgtcattagcaacatggctgagcctttcagtgccacagaccccaaggccatcggccatcggaactaccatgcaggctactccatgtttggggctggcctcaccgtaggcctgtctaacctcttctgtggagtctgcgtgggcatcgtgggcagtggggctgccctggccgatgctcagaaccccagcctctttgtaaagattctcatcgtggagatctttggcagcgccattggcctctttggggtcatcgtcgcaattcttcagacctccagagtgaagatgggtgactagatgatatgtgtgggtggggccgtgcctcacttttatttattgctggttttcctgggacagctggagctgtgtcccttagcctttcagaggcttggtgttcagggccctccctgcactcccctcttgctgcgtgttgatttggaggcactgcagtccaggccgagtcctcagtgcggggagcaggctgctgctgctgactctgtgcagctgcgcacctgtgtcccccacctccaccctcaacccatcttcctagtgtttgtgaaataaacttggtatttgtctgggaaaacccaaaataattcaaaccgta

SEQ ID NO: 175600 - DNA, 770 bp, Homo Sapiens; identical to SEQ ID NO: 7093

SEQ ID NO: 175601 - DNA, 514 bp, Homo Sapiens
ggggggcagccatggcgacctatttcgatgaacacgactgcgagccgtcggaccctgagcaggagacgcgaaccaacatgctgctggagctcgcaaggtcacttttcaataggatggactttgaagacttggggttggtagtagattgggaccaccacctgcctccaccagctgccaagactgtggttgagaacctccccaggacagtcatcagaggctctcaggctggaggaggagactgccattgagatgccttgccatcaccttttccattccagctgcattctgccctggcttaagcaagacaaattcctgtcccttgtgccgctatgagctgcccactgatgacgacacttatgaggagcacagacgagataaggctcgaaaacagcagcagcaacaccgactggagaacctccatggagccatgtacacgtgaggaggttggggctgagtgctggccctctgcgtcttccttattaaccttgaatcctcattaaaggtttctttactc

SEQ ID NO: 175602 - DNA, 711 bp, Homo Sapiens
actcacggtctgatgtgcctgcggagaagttcttgagtgagggcctctggaccacggtgttaggactcgccaaccacgaacacctggtacaggacggcgttgtggttgatgaaattctggaccacgcagggtggctggatggcgttcaagccctcctggttgaacacgatagccatctcgtgagagttgggtgccatgagccactctggttttgcaaatgaatgggaaagtcaagccgttcttctccagcagccgcatggtgtcatccccgcacaggctcgtgagctccatgaagggtggcgagcagatcctgtcgtcttccatgtaggcctcaatcttccggatgagctcataggacttggagccgtcaagcagggttctgatggcagggagcgggtccaggacgatggtctcagggtgggcatcgatgtactcctggaacctgtgcaccagctccagggactggctatcattctggtcggcttcaaggatgacgtcagtcagcttgtggatgatgacgtccagggggccctgctcctcgatcggccggctaaggttcagctgcacaacctccatccctcgcttcctgcacagctcggcgaaggcctggaaattcagcttcttgattttcttctcgctcagccagtagccaactctcttccctttcagaaaggtctgcatcttcctcctcgggcggggagcctgggtccg

SEQ ID NO: 175603 - DNA, 1116 bp, Homo Sapiens
  misc_feature (170)..(170): n is a, c, g, or t
tggccggtcatagagcagaacacagggggactggaaggatggtggctgtgctcgttacacggtcggcaaggcattgtcccaggcaaccgggtgaagcttctgattggtcccatgcaggagactgcctccagtcaccagcagcctgcctctggactgatgcagcagacctnttggccaacagaagctctatcaagtgccaaacccacaggctgctccccgagacaccatctaccaagtgccaccttcctaccaaaatcagggaatttaccaagtccccactggccacggcacccaatgaacaagaggtatatcaggtgccaccatcagtgcagagaagcattgggggaaccagtgggccccacgtgggtaaaaaggtgataacccccgtgaggacaggccatggctacgtatacgagtacccatccagataccaaaaggacgtctatgatatccctccttctcataccactcaaggggtatacgacatccctccctcatcagcaaaaggccctgtgttttcagttccagtgggagagataaaacctcaaggggtgtatgacatcccgcctacaaaaggggtatatgccattccgccctctgcttgccgggatgaagcagggcttagggaaaaagactatgacttcccccctcccatgagacaagctggaaggccggacctcagaccggaggcggtttatgacattcctccaacctgcaccaagccagcagggaaggaccttcatgtaaaatacaactgtgacattccaggagctgcagaaccggtggctcgaaggcaccagagcctgtccccgaatcacccacccccgcaactcggacagtcagtgggctctcagaacgacgcatatgatgtcccccgaggcgttcagtttcttgagccaccagcagaaaccagtgagaaagcaaaccccaggaaagggatggcgtcatgatgtccctctgcataacccgccagatgctaaaggctctcgggacttggtggatgggatcaaccgatggtctttctccagtacaggcagcacccggagtaccatgtccacgtcttccacctcctccaaggagtcctcactgtcagcctccccagctcaggaccaaagg

SEQ ID NO: 175604 - DNA, 917 bp, Homo Sapiens
cgaggctggcttcgccgagtatgtgggccgcctgggcatcagcaaccacacgcacgtggtggtgtatgatggtgaacacctgggcagcttctatgctccccgggtctggtggatgttccgtgtgtttggccaccgcaccgtatcagtgctcaatggtggcttccggaactggctgaaggagggccacccggtgacatccgagccctcacgcccagaaccggccgtcttcaaagccacactggaccgctccctgctcaagacctacgaacaggtgctggagaaccttgaatctaagaggttcaacctggtggattcaaggtctcaagggcggttcctgggcacccgacccggagcccgatgcagtaggactggactccgcacatatccgtggtgcccgtcaacatgcctttcatggaccttcctgactgaggatgccttcgagaagggcccagaagagctccgtgctctgttccagaccaagaaggtggatctctcgcagcctctcagtgccacgtgccgcaagggagtcaccgcctgccacgtggccttggctgcctacctctgcggcaagcctgatgtggccgtgtacgatggctcctggtccgagtggtttcgccgggcccccccagagagccgtgtgtcccagggaaagtctgagaaggcctgagccgtgacctcttctgcttactgtaactgcgggcggtttagtgaccccatgacttacagccggttcttacctcttaggctgaggaacatgacttgttttttaaaattggctgtggcaaggctccccccttctctctggtgaacacttgggaaataaaccttttgcccttttttctggccaacatcattccgtcccctttccccttcctcaaattccacgtcccctcttccctttggcacctcttcttctc

SEQ ID NO: 175605 - DNA, 1188 bp, Homo Sapiens
  misc_feature (909)..(964): n is a, c, g, or t
  misc_feature (984)..(992): n is a, c, g, or t
  misc_feature (1027)..(1039): n is a, c, g, or t
  misc_feature (1064)..(1116): n is a, c, g, or t
ggggcggaaaagcgggctgtctcggaaactcagagccgggttcctcccgggtttctgccgggtttctccctgcggctcctgggttgttgagactcttgtgaagatggcttgcgctgccgcgcggtccccggccgaccaggacaggtttatttgtatctatcctgcttatttaaataataagaagaccatcgcagagggaaggcgaatccccataagtaaggctgttgaaaatcctacagctacagagattcaagatgtatgttcagcagttggacttaacgtatttcttgagaaaaataaaatgtactctagagaatggaatcgtgatgtccaatacagaggcagagtccgggtccagctcaaacaggaagatgggagcctctgccttgtacagttcccatcacgtaagtcagtaatgttgtatgcagcagaaatgatacctaaactaaaaacaaggacacaaaaaacaggaggtgctgaccaaagtcttcaacaaggagagggaagtaaaaaagggaaaggaaagaaaaagaagtaacctagtatcagcatcaagtatgtggtactactgtaagagacatgaatggagacttctaatttgtatcggagggaaacagaagctttttgtttgcatcatttaactgaactgtgaacccttgtgcctctcatctttatcatcggagttgacagtgaaacaaatttacatcagaagtttgcatctcgcgtatatgccgtataaaagaatttttttgtctttcaatgcagttttttggaagaaaatatttttaaatggaccatgggactgtacaataagttacttgaaataagtggtttccgataaatttcaattagatttaaaataaacattatgtccaccttttaagttaatgaaataaaatttgaaactgnnnnnnnnnnnnnnnnnnnnnnnnnnnnnnnnnnnnnnnnnnnnnnnnnnnnnnnngaagaaacgccacgaccctnnnnnnnnntttcaaaaccatttctttggcgaaaggaccccccnnnnnnnnnnnnngtggaaatagctgtttcgttggcgnnnnnnnnnnnnnnnnnnnnnnnnnnnnnnnnnnnnnnnnnnnnnnnnnnnnnaacggaaggaaacagggccactcctgtttccccaaaaaacccgccactgaaaaaaagggcggggacccccac

SEQ ID NO: 175606 - DNA, 1565 bp, Homo Sapiens
  misc_feature (1425)..(1425): n is a, c, g, or t
taggaattagtatgagagttgtgtattagcagtgtctgtctgaaacgctgtgatatttgacccgatgcgtcgtacccgactgcgtcgagggatggaagcgtcggagtggggcgggcccgtgattcggacccccggggcgcttcgatccccccaggtggtcaccgaggcacggccgcttcacccatggtagcaccctgatgaaggccatggtcctaatgcgtcagcctggtcgggtgcaggagatcgtgggcgccctcggcaagggcggtggagaccggttacagatttctcaatatggtcatgctgcttcctcatattggacatgaatggctgcccacaccagtacctaggtgccttatcctccccaagcggtccccagtgatttctgattttgacatgaccttgagcaggtttgcatataatggacaagcgatgcccttcttcttacaatattctggataatagcaagatcatcagtgaggagtgtcggaaagagctcacagcgctccttcaccactattacccaattgagatcgacccacaccggaccgtcaaggagaagctacctcatatggcggaatggtggaccaaagcgcacaatctcctatgtcagcagaagattcagaagtttcagatagcccaggtggttagagagtccaatgcaatgctcagggagggatataagaccttcttcaacacactctaccataacaacattccccttttcatcttttctgcgggcattggtgatatcctggaagaaattatccgacagatgaaagtgttccaccccaacatccacatcgtgtctaactacatggattttaatgaagatggttttctccagggatttaagggccagctcatacacacatacaacaagaacagctctgcgtgtgagaactctggttacttccagcaacttgagggcaaaaccaatgtcatcctgctgggagactctatcggggacctcaccatggccgatggggttcctggtgtgcagaacattctcaaaattggcttcctgaatgacaaggtggaggagcggcgggagcgctacatggactcctatgacatcgtgctggagaaggacgagactctggatgtggtcaacgggctactgcagcacatcctgtgccagggggtccagctggagatgcaaggcccctgaaggcgcaggctccagaccggcctgcaggccgtggtgaggaggggcgcctccccagagtctgctcccccgtgaacacagagcagaggccagggtggccagcagtggctgggtccttccgcgcccctccgtcctcctttccctgagcaccttcatcaccagaggcttgaaggaaaccccgccatgtggcagggcacaggcactgttcctggtgaaccttggaccacagcatgtcagtgctctagggattgtctacntccagggattttcttcaaaattctacacatgggaagtccaacaaatatattgtgtgaacagatcacaaatttaaatgaaacaaaaacacaagaacaaggggggcgccaaaaaatccccagggggccaattgtaggatacg

SEQ ID NO: 175607 - DNA, 668 bp, Homo Sapiens
tcggaacacgagcgtctgctccatcacggctacacccacggaatgcacaccttggctttcatggctgcagagtctcttcttgtgacagtgaggactgctcatgtgattgtacgatacgtaattcacctctgggacctcaaccacgaaggaacgtgggaaggaaagggaacgtatgtctattacacagactttgtcatggagctcactctcctgtccctggacctcatgcaccatattcacatgttgttatttggcaacatctggttatccatggccagcctggtcatctttatgcagctgcgttacctgtttcatgaggtgcaacgtcgaattcgtcggcacaagaactatctacgtgtggttggaaacatggaggccaggtttgcagttgaaactccagaggagctggctgtcaacaatgacgactgtgccatctgttgggactccatgcaggctgcgcggaaactgccctgtggacatcttttccacaactcctgtcttcgttcctggctagaacaagacacctcctgtccaacatgcagaatgtctcttaatattgccgacaaaatcgtgtcaggcaagaacatcaaggagagaacttggatgagaatttggttcctgtagcagcagccgaagggagacctcgcttaaacccatcacccggaacg

SEQ ID NO: 175608 - DNA, 118 bp, Homo Sapiens
tcatctccagtagcagccatcttgccaaaagaaggtaaatttgatgaagtctatgaagcactaactcacgctcatcctaatcttactgtttacaaaaaagaagacgttccagaaaggt

SEQ ID NO: 175609 - DNA, 271 bp, Homo Sapiens
gtacccctataaggccaccaagcacaacatctgcttcaccaagagcaagccacgaccccgcaagactggccgcaggaagaaggatggtgtggcgaatgctgaggctacaaatgggaaacatcgaggcctgggctttcaggacacagctgctgtgatattaaccgtggagtctgaggaggaggaggaggagagcgacagttcagagacagagaaggaggacgatgaggggatcatctttgtggctcgtgccaccagtgaggttctccaagaa

SEQ ID NO: 175610 - DNA, 125 bp, Homo Sapiens
acaaaaaaggtgactgctgaactgtgtgtggtttattgttgtacattcacaatcttgcaggagccaagaagttcgcagttgtgaacagaccctgtttacagtatcaggtggggtcgcgagctcga

SEQ ID NO: 175611 - DNA, 581 bp, Homo Sapiens
gatcatgtcggtatatttatatgtaaatacaaaactgtatcactgtaagatattgaatatgaacattacaattattttctgaatcagactcagtccattgatattaaatacaaaatgaaatgattgtaaaaaataataatatacacattcaaagagcttattacagtataaaattattgaggtctgatcagctgccaacctcatcttctgtcacaggggaaggtttaggagttcctgggattttttgggaatgtggagtgctgaggactcttgatttatccctagcacataaggatgagtgggctgggagcaggcagggacaggttgggtgggtaggggacaaacagtgattgcaggggaccacctcacccagccagggggtgaagctttttattgacacagaacccacccagtttgagggtctagcaggctagcaggcaggaagagatgggcatctcggtagacagggccaagctgcataaaggaaccatccagcaaaagaaaaagggccccagctgatcctcccagggagggattttcttagtggatttttccttatcatacctggggtccccctcctt

SEQ ID NO: 175612 - DNA, 992 bp, Homo Sapiens
  misc_feature (786)..(786): n is a, c, g, or t
  misc_feature (797)..(797): n is a, c, g, or t
  misc_feature (913)..(913): n is a, c, g, or t
ggcctgggtggcgaattcggcacgaggccaccatccgcagtgcagtggagaagcagctgaacctgatcgcccagggcaaggccgactaccgccaggcatggatgagttgatggaggtgtctttctcgcccctggcggccacaggcaagcccctctcacgctgtgggaagtgccaccgcttcatgaagtacatccaggccaagccaagccgcctgcactgctcccactgcgatgagacctacacgctcccccagaacggcaccatcaagctctacaaggagctccgctgccctctggatgacttcgagctggtcctgtggtcatcaggctctcggggcaagagctacccgctgtgcccctactgctacaaccacccacccttccgagacatgaagaaaggcatgggctgcaacgagtgtacgcacccctcctgccagcactcgctgagcatgctgggcatcggccagtgcgtggaatgtgagagtggggtgctggtgctggaccccacctcgggccccaagtggaaggtggcctgcaacaagtgcaacgtggtagcgcactgcttcgagaacgcccaccgcgtgcgggtgtccgccgacacctgcagtgtctgtgaggccgccttgcttgatgtggacttcaacaaggccaagtccccactcccgggcgatgagacgcagcacatgggctgcgtcttttgtgaccccgtcttccaggagctggtggagctgaagcatgcggcctcctgccaccccatgcaccgcggtggaccagggagaaagcaggntcgagggcggngccgggccaggaagccccctgggaaagcccaacccagaacggcccaaggacaagatgtcagcccctggcccgcctacttttgtatgaatgaaccctgttcctcccctcaacccagngctggcagtgcccatggcagaacaccctccatgggcacttttcaaaactaatttaaaaatgccatttttatatccttta

SEQ ID NO: 175613 - DNA, 582 bp, Homo Sapiens
gggtcctttggcggattttctgttttcggaagttgctgggttcgttttattcagcggcagtggtgctttcccgaatctcagaatgcctgttaaaagatcactgaagttggatggtctgttagaagaaaattcatttgatccttcaaaaatcacaaggaagaaaagtgttataacttattctccaacaactggaacttgtcaaatgagtctatttgcttctcccacaagttctgaagagcaaaagcacagaaatggactatcaaatggaaaagagaaaaaaattgaagcaccccagtttaactgaaaggcgaagaatctaccacccaaaggacaatggatgaattccctggaggtgccttatccaaatttgaaaaattggtcaaaaaaaatcctgggaaataatgccaaaattttagtagatttcccgggctttttggagggcaaataaaaaacctttgaaaaatcctctttggaaatcccccggggccactccactttttcttaaaaaagagaaaatgtccgaaaacccccagaaaacctttgttgcccaaatgggggttaaaacaccaaaacttttgtttt

SEQ ID NO: 175614 - DNA, 827 bp, Homo Sapiens
gtgttcactaggccagtttatcatcagcgtgacaggctgccattacccagcccagatagcagatcacctgagaaaggagactgccttctgaatggtctttagtgcagtatttttttcatcttctgctgaactgcttcccataccaactgatttaccgcagtgtacagtaatgccttctttccatgatttgagtccagaatatgagccacatttcctgctacaacacctccctttgcatttcgttgagcatactgtgcaacaactcgagacaacagagaccaaagagcagggtcaccagggttgctgtgaacagctttagatatttgtttttgcacagccacactgcggccttggagtgcataaatcgctgatgtaagaaggcacctctgataattactgtctttgtgtttgatgtgcttcagtaactcattaagtgctgcttttgacagtgtagcatcctgcattgccaaccctagagcacacagggcttgaaggctttctgtggttggttcctttaagatagagcatttaaatagcaatgtcttggctacatccgtttttccttgtttatattcagttattgccagagctgtcaagatatgggctttgtcttgctccgattcaacaatagacaaggctctctcataggctttgctgctctctttataaagccccttcatgaataaagccaatgcaaacctatgatgtcttctaacacttcaaggggtgttgacttaaaagcctggatagctttatcatattcaccagtggaacataacatctgccgtaatttcttattgcaacattgtaagtatcttggtcttctg

SEQ ID NO: 175615 - DNA, 458 bp, Homo Sapiens
tgtattggtggtgctctcctctcgtactctgtacaattccttgttttcaagggtaagttccaagacttccagactcaggtttgaagtcaggtcctggtgaaggtcgtcatgctgttgtgatagcgtttaggtccttcattagtccttccaggtgggccatctctttggtcagctcatctggttcatagctactctcggagtcttccaacatccttgtggtctcctgcacttcaggggcactgggaacaaccactggcatagaaggccggctccttcctagagtcccgatggaggctgtcttcactgagtgaatgtgatggttcagagcttgctgggacagtaatggtgtgcttggcaatgcaggatcataggtgggaggtcctggaggcgggattgctggcacggcgaagctcttcaatgggtgggaagggcgtacatgggcagtgggaagactccga

SEQ ID NO: 175616 - DNA, 1079 bp, Homo Sapiens
  misc_feature (560)..(589): n is a, c, g, or t
tgtcatcaaaatggtcttgccctccctgtagtggaagaaggggaggttctctcacactctctagaagcagagcacaggttattgaaagctatgggttggcaggaatatcctgaaaatgatgagaattgccttcccctcacagaggatgagctcaaagagttccacatgaagacagagcagctgagaagaaatggctttggaaagaatggcttcttgcagagccgcagttccagtctgttctccccttggagaagcacttgcaaagcagagtttgaggactcagacaccgaaaccagtagcagtgaaacatcagatgacgatgcctggaagtaggcatataaatgctcacagttaaatctgacccagtaaactctgtgtgtttagggagtatacaaaagaaatcgttcttttccttttcttatgttgttgaatacttcattcacaagggaaataatcatatcccaaagagagagcaattggcatgatctgcttctgttattgttcttccctgttatctgctatatagagagaagtttgtgtggtgggacagattttttaannnnnnnnnnnnnnnnnnnnnnnnnnnnnnccagtatatatggggcgatgcacaggtaggagctggcagtgcagggaagaggagacactggtctgcagcaacagcttctactaccagcccttggggcactcacccctgtgatcaagcaatcattgtcaatgacaaagtgactattgaagttataattgtattaaattaatgctaataattcggatatcttattcctatttttggctgctcgggtaactttagcccttaaccaagcatatgtgggttacagaggcttgtcctaataggtatcatattattctttaccctttaggggtacagctgtaaacatatcgggcatatacggacaatggtcgtgtcatccttgcagcccctggaaaatacaggggtggcctcggtaaacactactacaacttctggcgcagactttcaacagcatccacgaatcattgggactaacattaattcacgcatttaaaaagcagtggctatcacaaggtctcccaggtgc

SEQ ID NO: 175617 - DNA, 315 bp, Homo Sapiens
tgtattgttggtgctctcccaccactcaagaaatctgagattaacctttggattctactttttcccataacttctaaacagccaatctgcagtcatgtccttttgatcccatctcttaatatttcctgttgacttctgttcattcctattgcaaggaacattattgttgtctttgataaggccactatcatttttctctcgtatcttcctaatatgcatttttttaaccagtcttcctgcctccagtcttgcctcctcaaatcgatccttgatgctgccaaagtggtatttgtgaaatgcagtttaggaagatac

SEQ ID NO: 175618 - DNA, 823 bp, Homo Sapiens
  misc_feature (97)..(97): n is a, c, g, or t
gaaagatgaggccccatgtcttgtacaaacccccttccctttttgggggtaccgtgctcattcagctttttcttgattttatccaaccacatggggntcctttcagcccttgacacgcttctttaatataataatagtatggaatcttggcaaaaaaaggagctctcagaacagcaataaactttcaagaggaggaactcacatttcaactgttcctcaggacacatctgcctctccaggacctcagattcctgacaacactgttggcttcccggagactccttcatcctgcagaagatgcaattccacggggtcctctcagcttccacaggcgggatgtgacagtcctcatggaagactcttgaacaagtgtcgcaacagaacagctcccctccgtcccggcacacctcacactcatccaggtttctcatacaagggtcaactgagctattgttttgagacttcagtattctcttttttttcctgtaacatattcttgaaggatcaggcagaaatccatcctccatcagccatcgtaggggccacccgccacagcgcacactcagcctccagttctttgatcttgcatagcctcctttgatttcaaattccatgggggtgaaccattttccatcctcagtctgtatacacttcaccaagattccttgctccaatttctccttatgtaaaattcccttcaccccaccacaggtcactggaagcaaaggagcctgaaaatccacagtttcatctttgtgctttcttgaagctcttgatcggactcttttctgtgaactcgtcagagaggatccgctagatcacc

SEQ ID NO: 175619 - DNA, 939 bp, Homo Sapiens
  misc_feature (867)..(876): n is a, c, g, or t
ctatgcagggtgagggcccctagacttcggctttcgccgctgttggtggtaggctggagttgggggtccctggatacggttttggctttacaccccctttccagcaagcttcccgtgggaatctgttccttttcaggacagctgtgatccactggccagtgttcgggctgtggaaaaaccatagagtctattcagctgagtccagaagaatatgaatgtcttaagggaaaaatcatgagggatgtgatagatggaggtgaccagtacagaaagacaacacctcaggaacttaagagatttgagaacttcataaaatctcgtcctccttttgatgttgtcattgatggtctcaatgttgccaaaatgtttcctaaagttcgtgaatctcaacttctcttgaatgtcgtctctcaactagccaaacggaatctgcgactgctggtcctaggccggaagcacatgctaagacggagttcccagtggagtcgggatgagatggaagaggtgcaaaagcaagccagctgtttttttgctgatgacatctcggaggatgatccattccttctgtatgccacactgcactccgggaatcactgcaggtttatcacaagagacctgatgcgggaacacaaggcctgtctgcctgatgccaagacccaacgcctgttttttaagtggcagcagggacatcagctggcaatttgtaaataggttcccaggatcaaaacctaaccttttcagcgtattctcagctatgacccagtgggtgcaaacaactggaaaacttctgggcacattccctttgtatgaaagactttggtaaaaaagaaagttcccggggaaagtacccaaccaaatggctttttnnnnnnnnnnaaagaacttagaaaattccttacctcccaatgcttaaatttggggggtttgggtacccctttg

SEQ ID NO: 175620 - DNA, 843 bp, Homo Sapiens
atagatgtggctaaatctctgctggcatgggtagcagccaaaaataatggtatgtaagttacgatttactggtcaagtattgtatctctgtgtctttcatatgcagacatctgaagttattgatgtctttgaaattatgaaagccagatataagactttagaacctagaggttacagtcttctcatccggggattgatccattcagacagatggagagaagcattgttgctgttagaggacatcaaaaaagttataactccttcaaaaaagaactataatgactgtatccaggagctctccttcatcaagatgtaaacacagcttggaatttatatcaggaattgctaggtcatgatattgttcctatgttggaaactttaaaagctttctttgattttggaaaagacataaaggatgataactattcaaataaactactagatattctttcatatctaagaaataatcagctgtatccaggggagtcatttgcacacagtataaaaacatggtttgagagtgttcctggaaaacaatggaaaggacaattcaccacagtccgaaaaagtggccagtgttcgggctgtggaaaaaccatagagtctattcagctgagtccagaagaatatgaatgtcttaagggaaacaatcatgagggatgtgatagatggaggtgaccagtacagaaagacaacaccttcaggaacttaagagatttgagaacttcctaaaatctcgtcctccttttgatgttgtcattgatggtctcaatgttgccaaaatgtttctaacagttcgtgaatctccatttctcttgagtgtccgtctctcaacctagccaa

SEQ ID NO: 175621 - DNA, 621 bp, Homo Sapiens
  misc_feature (469)..(496): n is a, c, g, or t
aagatctcgagtctatgaatcaatacctgcagacattcccttcatctgtggtttactagtaattcatttggttcccttgcagaccccagatggggtccactgtttggtgggcttcaccctcacccataggagattcaaatataaggacaaaacagatctaatagagttcaagactctgagtgaggaagaaatagaaaaagtgctgaaaaatatatttaatatttccttgcagagaaagcttgtgcccaaacatggtgatagattttttactatttagaataaggagtaaaacaatcttgtctatttgtcatccagctcaccagttatcaactgacgacctatcatgtatcttctgtacccttaccttattttgaagaaaatcctagacatcaaatcatttcacctataaaaatgtcatcatatataattaaacagctttttaaagaaacataaccacaaaccttttcannnnnnnnnnnnnnnnnnnnnnnnnnnngtcttttaaagatggcctgtggttatcttggaaattggtgatttatgctagaaagcttttaatgttggtttattgttgaattcctagaaaagttttatgggtagatgagtaaataaaatattgta

SEQ ID NO: 175622 - DNA, 510 bp, Homo Sapiens
aacctgtccccctttgtttccatccggttccctcgggctgtcccttcggtggccggctacacaggcatgggcatctcattgtactcgtccacaccctcccgctcatcaaacaccggctctgcctcgttagcatccagacatttcatctctcggtcggtaaagatacgggtgagcaccaccatgcggagcggcactgtgaggatgagcatgaaggggaaggccagggaggcagctgtggacatgacggcccagagcagggccaggcagagcagctgcagggccgtgaacaggtgcatacggagggtccggaccttcttgacgtaagtgacatctgggtggtgtttgggcggcatgagcagcagatgcagccgctcatagaactggatcccgttaagggaggtgactcccatgtacaggaaaattccaaagagcacggccagggggatctgccggagcagatccccgataactatggagagcaccgccaatacagggtaccgagctgagatc

SEQ ID NO: 175623 - DNA, 1411 bp, Homo Sapiens
gggggccaaagcactttactgcaggggcagtgggggaggagaagactttaaattattcacttaaataaaaaggagggaggggcatgggagggggaaccccatcccaccaggcctgtcccctcgtccatcggtccctcggctgtccctcggtggcggctacacaggcatgggcatctcattgtactcgtccacaccctcccgctcatcaaacaccggctctgcctcgttagcatccagacatttcatctctcggtcggtgaagatacgggtgagcaccaccatgcggagcggcactgtgaggatgaggatgaaggggaaggccagggaggcagctgtggacatgacggcccagagcagggccaggcagagcagctgcagggccgtgaacaggtgcatacggagggtccggaccttcttgacgtaagtgacatctgggtggtgtttgggcggcatgagcagcagatgcagccgctcatagaactggatcccgttaagggaggtgactcccatgtacaggaaaattccaaagagcacggccagggggatctgccggagcagatccccgataactatggagaggcccacaagcagggcaaccagcagccccgtcacccgcttgctccttgacttcctgaatcttgggcttgtccccaggtgccacagccttgctcatgacagtgagcgcgttggcgtgagtgacagagcggacagtggcagcagccaaaccagggcaggccaaagagggcacaagatgccgcccatggccacgatgagcagcaggtccaggtggaagccggagcccttctgcagcatgcgctccttcttggagatgatgagcgtggtgatctgtgtctccatgaagatgagaatgaagaccaggatggcgggcagcaggctggcaaccatcatccacacagggaaggggctcttctctcccagggggttgatgacccagcccctcttttctggggcagtcaccgagaatccactgggaacgctcagcttctgggtataggtgtcctcaatactgtaatccacaagcaccatgatgaggatggcgatgggcaccccaaagtccccaatcacccgccggatccggccaggaaagaaccggctgttcttgaatttgcgcaggaagaaggcgatgaagaaggtgccggccatgagcaccagcgacagcagggccgtgttgggctggccccggggcttcccctgcccagactgcccagccaagctcctgttgcccggccccagcgtgggtcttgccccggcccatgtcatgttctcaccgccgtccacctctgagctgttggaggctgagcagccatgcagggggtgctcctggaagatcttcaccagcttgtagaaggtctcatagatgaagatgagtgagatcaagaaggcgaagatc

SEQ ID NO: 175624 - DNA, 403 bp, Homo Sapiens
  misc_feature (327)..(327): n is a, c, g, or t
  misc_feature (330)..(330): n is a, c, g, or t
ctctgccctcgttaaccatcccagacatttccatctcctcggtcagtgaagatacgggtgagcaccaccatgcggaagcggcactgtgaggatgaggatgaaggggaagcccagggaggcagctgtggacatgacggcccagagcagggccaggcagagcagctgcagggccgtgaacaggtgcatacggagggtccggaccttcttgacgtaagtgacatctgggtggtgtttgggcggcatgagcagcagatgcagccgctcatagaactggatcccgttaagggaggtgactcccatgtacaggaaaattccaaagagcacggnccnagcgatctgccggagcagatccccgataactatggagaggcccacaagcaggcaaccagccctcatgccgaat

SEQ ID NO: 175625 - DNA, 195 bp, Homo Sapiens
catctctgggcagaggagatggtgagcacaaagccctaatgtgggaacaaacaaaaaaaggacagtgtgcccgtggcagaggaccctagtggagcggaggcagggccacagcaggttagaccatgttggagctaggatgttgaaagtgaaaacctgacgagatgaggtggcgcacgtctgtgatcccagcacttt

SEQ ID NO: 175626 - DNA, 609 bp, Homo Sapiens
  misc_feature (231)..(231): n is a, c, g, or t
  misc_feature (496)..(528): n is a, c, g, or t
ctcatttgttccagagagtcaaggcaacctttcaagttcatttgctgcataaaaaaaaggtttttagtatcagaaagaacctcgctgtcctccaatatccacagggaaaacaagatcagaaacaaaagtccaccatggaagaaatcccagagcgatccaatttggaaagaatttaattaacaaaataaaacggagggaaaatggtccaggtgggcccctagggaaaacggnacttctgtccccagctgaagtctgcccagcacaccctgggtgggcagcccctgggcctgtcactgcagaactgggccttgacaagcagacccactgtgcgcgacgcccacggtttccttacgcactcggcattatgtacagatatgaaaaaacccaacggcaggtggctggaaagtggcttctagctcccctatgctggcttggcacgttcatgcatgcaaagcgaggaggttttgcgggcttcaccaaacagttaattttggcnnnnnnnnnnnnnnnnnnnnnnnnnnnnnnnnnttcataagcaggatttaaaagccactgaagtgaaaatgatgtatttcctcagcgttatggagttagactaccactacaatc

SEQ ID NO: 175627 - DNA, 405 bp, Homo Sapiens
  misc_feature (378)..(378): n is a, c, g, or t
  misc_feature (390)..(390): n is a, c, g, or t
ggacagctcggtcctttcagagccctgcacttccacctctccaccagccaggtccctgccaagacagactgtgtcatgttcttcgggcccgtggtccccgacggctacggtgtctgctataaccccatggaggcccacatcaacttctccctgtcggcctacaacagctgcgcggagaccaacgccgcccgcctggcgcattacctggagaaggcgctcctggacatgcgtgccctgctgcagagccacccccgggccaagctctgagcccctaggactcaggcctgccaatgccacagccaagcccaccctgggatgggccacccaccagggctcagctccttggttccctcttccttggttccctcttccctggtncccccaaatctnactgagccacggacc

SEQ ID NO: 175628 - DNA, 579 bp, Homo Sapiens
  misc_feature (83)..(83): n is a, c, g, or t
  misc_feature (91)..(91): n is a, c, g, or t
  misc_feature (180)..(180): n is a, c, g, or t
  misc_feature (182)..(182): n is a, c, g, or t
  misc_feature (191)..(191): n is a, c, g, or t
  misc_feature (201)..(201): n is a, c, g, or t
  misc_feature (203)..(204): n is a, c, g, or t
  misc_feature (206)..(206): n is a, c, g, or t
  misc_feature (208)..(208): n is a, c, g, or t
  misc_feature (223)..(224): n is a, c, g, or t
  misc_feature (244)..(244): n is a, c, g, or t
  misc_feature (283)..(284): n is a, c, g, or t
  misc_feature (288)..(288): n is a, c, g, or t
  misc_feature (304)..(304): n is a, c, g, or t
  misc_feature (310)..(310): n is a, c, g, or t
  misc_feature (318)..(318): n is a, c, g, or t
  misc_feature (331)..(331): n is a, c, g, or t
  misc_feature (341)..(341): n is a, c, g, or t
  misc_feature (344)..(344): n is a, c, g, or t
  misc_feature (353)..(353): n is a, c, g, or t
  misc_feature (384)..(385): n is a, c, g, or t
  misc_feature (388)..(388): n is a, c, g, or t
  misc_feature (392)..(392): n is a, c, g, or t
  misc_feature (398)..(398): n is a, c, g, or t
  misc_feature (404)..(404): n is a, c, g, or t
  misc_feature (410)..(410): n is a, c, g, or t
  misc_feature (419)..(419): n is a, c, g, or t
  misc_feature (440)..(440): n is a, c, g, or t
  misc_feature (444)..(445): n is a, c, g, or t
  misc_feature (461)..(461): n is a, c, g, or t
  misc_feature (464)..(465): n is a, c, g, or t
  misc_feature (468)..(468): n is a, c, g, or t
  misc_feature (479)..(480): n is a, c, g, or t
  misc_feature (493)..(493): n is a, c, g, or t
  misc_feature (495)..(495): n is a, c, g, or t
  misc_feature (500)..(500): n is a, c, g, or t
  misc_feature (502)..(502): n is a, c, g, or t
  misc_feature (527)..(527): n is a, c, g, or t
  misc_feature (537)..(537): n is a, c, g, or t
  misc_feature (541)..(541): n is a, c, g, or t
  misc_feature (553)..(553): n is a, c, g, or t
caacgcatgtgccgctccctgaatccgaatacagacccaactggtccctgaggtgcgaggagcgttagcgacgagccacaaangggccggngtgagacacgtatggagtccttcgcggctcgcttcgctcgcacctcagtagctgcacctggcgagccgtcgtggactagaacgaactgnanttgtgctcngagcggtgcncnncncnctacgcatgcccgcnngcacctcagggcgcataagngctcctgcttatacatggcaagacgtaaacacccttagnnatanatggccctggctcccngctaancaaaaccntgttctgaactcnccgtggatgnaanttgttcagncctagctgtgcttattcgtagtgtccagacnngtnctanaagcgncactgncgcatnatgtagttnaaagcttgtgttatgctttgntaannttgtgggcttttaccntgnncgncataagtcctnnggaactcgagacngnattananctatattggggagcatggctcatgncgtatatccngggnttttccggcttntgtctggggttgcgtcccctcgttgt

SEQ ID NO: 175629 - DNA, 169 bp, Homo Sapiens
caacgcatgtgccgctcccgtaccaggaggccgctccgctctgcgcggcggccgggaggcttgttccgacgacggtggacagcattccaagtgagacaacgagcttaccgaaaccaaacgacattctcgacgcattccctttgtttttgtcggagcggcacatccgttg

SEQ ID NO: 175630 - DNA, 195 bp, Homo Sapiens
catgggatggaggacccggatgtaatcctggtgggcgaattgcgcgatctggaaaccattcggctcgcgctgacggcggcggaaaccgggcatctggtgttcggcacgctgcacaccacgtcggcggctaaaaccgtggaccgggtggtggatgtgtttccggcgggggaaaaggccatggtccgctcgatgctc

SEQ ID NO: 175631 - DNA, 139 bp, Homo Sapiens
cgtccctgccgatgatcgcatcgtgtccgaagcgctgataggcgccctcaccttccagcgatgatcccgactgcccgtagcttgccatcgttctcctacagtaggtcaaacatattgtgtctggtctcggtgtcgatgc

SEQ ID NO: 175632 - DNA, 180 bp, Homo Sapiens
gtgctgaggagcccagcaatggcagcagggcaattcccgcttggacaggactttgtccattgacgccctgaagacgcactggaatgttatatatcaccacgaagaaaccgaaacctgtcagcagagtgttgacagctgcagctgagtaccgaagtgttttcaagaggtctgctgggaaga

SEQ ID NO: 175633 - DNA, 151 bp, Homo Sapiens
agccccaacccatggggccgccggggttgttgtgacaggatccatcacaggcgatggtgtaggtcttcatccggctcctctccagttagggtactatcggacgctgaaataagtctatcagcacggtcgggtcggagccgcacatacgttg

SEQ ID NO: 175634 - DNA, 181 bp, Homo Sapiens
cccacatggaatggaggacccggaatcgtaatgctgggggtttatatcctcatgacaccacaggcaggtggccgtgaggtctaccgcctgcacctcaccctaaggcccggggatcttcaagcgcagctcgaactccacagcgaccatcatgggtaactggctgatcaacatcaggccctgc

SEQ ID NO: 175635 - DNA, 126 bp, Homo Sapiens
cataccgggcttgtcaccgcctatgtgcctgccctgatttcccgccgactgtacccattctccccgcagtgggtctcgctcagcgtgggtgaactgccaacccgtggttacttttcccgatacgtg

SEQ ID NO: 175636 - DNA, 106 bp, Homo Sapiens
cagtaaccggccccaagaaggtcccaagtcgcgtacgccaattcgcggccatttgcccccggctgtcaattaaaatagttaaatcacgctaacttgaggtcaggct

SEQ ID NO: 175637 - DNA, 150 bp, Homo Sapiens
catgggatggaggacccggaggctcttctagactaaaacgtggtacaaactggcatactaacattgagattcccgagattgagatcgcgaaatgagtgcaatagaaaatttcgcctaataagtaactgatgcacagctgatgtgctttgt

SEQ ID NO: 175638 - DNA, 382 bp, Homo Sapiens
cgctggcagtaacggatctgaaacaaccagtcgtgcgatatcggaagtgggcccactgcggtgcgctcggcgagtttgcgtacctcgtcggcgaccaccgcaaatccgcgcccctgttcaccggcgcgtgcgggcttcgatcgccgcgttcaaagcgagcaggttggtttgatcggcgatctcacggatcagattgacgatgccgctgatctgctgcgcccgctcgtcgagcgtaccgatcttggtcatcgcttcttgcgatgcctcagccaacttctgcagattgttcgcgatggtacgcaccacccgttccgtttgcgcggcgctcttttccgcgtgttcggcttgatcttggttgttcagatccgttactgccagcgct

SEQ ID NO: 175639 - DNA, 329 bp, Homo Sapiens
agcgctggcagtaacggatctgaacaaccactccgccgatccactggtctgcatgtatgcttggccgcagcaacaagaccacaccgccaaaccccatgataatcgcagccatcaggcgccagtccatattgcgctgcctgcgccaccaggcgctcaccagcagaatagcggcgatccagattggcgacatataattcagcgtcaccgccattgccagcggcaattgcccaatcgcataaaaccataaccataaggcactgacgccgacgctgccgtgccacaggtgatgacctgccattccggttgttcagatccgtactgccagcgct

SEQ ID NO: 175640 - DNA, 615 bp, Homo Sapiens
  misc_feature (419)..(419): n is a, c, g, or t
  misc_feature (435)..(435): n is a, c, g, or t
  misc_feature (440)..(440): n is a, c, g, or t
  misc_feature (475)..(475): n is a, c, g, or t
  misc_feature (483)..(483): n is a, c, g, or t
  misc_feature (485)..(485): n is a, c, g, or t
  misc_feature (491)..(491): n is a, c, g, or t
  misc_feature (494)..(494): n is a, c, g, or t
  misc_feature (501)..(501): n is a, c, g, or t
  misc_feature (508)..(508): n is a, c, g, or t
  misc_feature (512)..(512): n is a, c, g, or t
  misc_feature (516)..(516): n is a, c, g, or t
  misc_feature (526)..(526): n is a, c, g, or t
  misc_feature (531)..(531): n is a, c, g, or t
  misc_feature (537)..(537): n is a, c, g, or t
  misc_feature (560)..(560): n is a, c, g, or t
caagtgaacaacacagcgaaacgaagtaccccctacacgagaaacacctatgacccccatgccgacagaaatgttcatgcgttcgatgagtgatagcgaacttgtgaatgtcctagcagccgcgcaagccgtggagcgttttacgcctgtagaaagcgagttgttgtttcgtcttaccgccctagtagaagactacgagcacgtatgtgaggcactggagcagcgcagcgatgagcagtgatgacaacggacaacgcaccagcaccagctaacccacacacgagagaaaaacccatgttccctatgaccgtcaccattaccgaccaggcccaattaaacgctgtttggcggtgcttaagccgccagcaggtgcagcccgcgcaactgtgcttgacatccccgggtccgactcgaattcnatatggcttactgttnctggngaaatggtttcgttacaattccacaaatcaccganttaatgtnanctgggngcncatgagnggtactnatanttgntggtatggcntttcntcggancttttgccctggttatgatgcancgggaagcgttgcgttggcgtttcgttctgttatgatgtgctggcgtggtgggag

SEQ ID NO: 175641 - DNA, 278 bp, Homo Sapiens
tgatgacacccatttaccagcgtatattgcgcgaatctaaaaagcggaagatctccattaaaggtgtccgcctcgctttctccggcgctatgtctcttcccatggaacttgttgaagagtgggaaaacgccaccggtggcatcattaccgaaggatatgggcttacagagacgtctcccattatcgccggcaaccccatggatccggcactccgtaaagcaggttccgttggcgtccccttccccgaaactgaaatccgcattgctgcaggtgtcttc

SEQ ID NO: 175642 - DNA, 135 bp, Homo Sapiens
agtacagcaggaaggaccacaaccagcgcaacccatcgacgcgggcattggtgatggcacccgtggcaacacgaccgccagcggaaccaaagccacagtttcgatccccagcacctttgaaaagacgtatttcat

SEQ ID NO: 175643 - DNA, 835 bp, Homo Sapiens
aatgctgcaccttcttggatttggggggctcctgcgccaagaacgccatcctcttcgagaccatcagcctcatcatccactatgacagtgagcccaacctcctggttcgggcctgcaaccagctgggccagttcctgcagcaccgggagaccaacctgcgctacctggccctggagagcatgtgcacgctggccacgctccgagttctcccatgaatgccgtcaagacgcacattgacaccgtcatcaatgccctcaagacggagcgggacgtcagcgtgcggcagcgggcggctgacctcctctacgccatgtgtgaccggagcaatgccaagcagatcgtgtcggagatactgcggtacctggagacggcagactacgccatccgcgaggagatcgtcctgaaggtggccatcctggccgagaagtacgccgtggactacagctggtacgtggacaccatcctcaacctcatccgcattgcgggcgactacgtgagtgaggaggtgtggtaccgtgtgctacagatcgtcaccaaccgtgatgacgtccagggctatgccgccaagaccgtctttgaggcgctccaggtcccctgcctgtcacgagaacatggtgaaggttggcggctacatccttggggagtttgggaacctgattgctggggacccccgtctccaggcccccaagtgcagttctcccatggtccaactccaagttccatcttgtgcagcgtgggccacgcgggcgctgtggtggtccagctacatcaagttcatcaacctcttccccgagaccaaggccaccattcagggcgtctgcggggccgggtccca

SEQ ID NO: 175644 - DNA, 837 bp, Homo Sapiens
tctagagcccaccagcctctcagagcctccggtgactggcctgtgtctccccctggatggacatgtggacggcgctgctcatcctgcaagccttgttgctaccctccctggctgatggtgccacccctgccctgcgctttgtagccgtgggtgactggggaggggtccccaatgccccattccacacggcccgggaaatggccaatgccaaggagatcgctcggactgtgcagatcctgggtgcagacttcatcctgtctctaggggacaatttttacttcactggtgtgcaagacatcaatgacaagaggttccaggagacctttgaggacgtattctctgaccgctcccttcgcaaagtgccctggtacgtgctagccggaaaccatgaccaccttggcaatgtctctgcccagattgcatactctaagatctccaagcgctggaacttccccagccctttctaccgcctgcacttcaagatcccacagaccaatgtgtctgtggccatttttatgctggacacagtgacactatgtggcaactcagatgacttcctcagccagcagcctgagaggccccgagacgtgaagctggcccgcacacagctgtcctggctcaagaaacagctggcggcggccaggaggactacgtgctggtggctggccactaccccgtgtggtccatagccgagcacgggcctaaccactgcctggtcaagcagctacggccactgctggccacatacggggtcactgcctacctgtgcggccacgatcacaatcttgcagtacctgcaagatgagaatggcgtggctacgtggctgagtggggctg

SEQ ID NO: 175645 - DNA, 1455 bp, Homo Sapiens
  misc_feature (647)..(647): n is a, c, g, or t
  misc_feature (892)..(892): n is a, c, g, or t
  misc_feature (1015)..(1102): n is a, c, g, or t
ggaaacgagctctggggatgttcgtttcccattgctgacaatttctatcccctgaaagctaatgattattgagaccaaaaggctcagaatcagtttgtacagaaactgcagtgtttcattttcgagggataactgctaagatacaattgcatgtacaggtcatcttcttatgtggtaaggatacctaatggagaataatgtagcacctgggcgtttgggggtgctagcaacgtgtggctttagctgacaggagcaattacacagagctagagggttctgcattggcatagcttagggaagggttaatgatgtcgccacaggtcagctcctgatccatgcagacttgatgttgctgtagcagggctacctccccagaggtacagcttgcgttttgagggtgattgcgacatatgttgttgctaaacagctcagtaacacacttgaatgaatttgcataccagattgtcctcattacagttcctttactcttagggcactctacactcgcggttggggttgggagtggttagtacatttattacatttattaagcaacgtaatgacataaaaggttagctctggaccagacttctcttactctgtgggtaatggcaaggatgtgtaggtaaacttggttcttttttttnccctaagatgacagcttgattttatcatctgcagtcaaataactgagccaatccaaatttaaatgatagatgctttaattgagtttaagtagctgaaactgctgagacactaaactttaaccttctgatgactttttaaaatgcctcaaatgtgcacatgtatataggatatttttataacttccctgatgaataatctgatattaaagtagtatttgggacccagagccagaactcggtgggtnggaggctgctggtctctcctcaccaccttcttttgcacttgggaaagaacagcaacatctggatagagttctagccttgacttctcatttccttgtctttttgggtgcattcctcagcacacnnnnnnnnnnnnnnnnnnnnnnnnnnnnnnnnnnnnnnnnnnnnnnnnnnnnnnnnnnnnnnnnnnnnnnnnnnnnnnnnnnnnnnnngcaatgatgtgcttgcccagctaacttttgaattgcactttttaataaatattcttaacaatttttgaagaaggatattttatctcatttgagatcatggtaggttaagaaaatatgcctgttgatgaaagctaaaagcaaatttatgaaactaaaagggtgattgacatccatgtttacactccgctctaatgtttgatatataaataagttattttcaaattaggaaaaaacagtgagtattacaaagggcttcagatgtttagagtactaggttatttatgttttacaaagtttgaatcttctataaactaagaaaggggatgatccttagatttgcattaaatatagaa

SEQ ID NO: 175646 - DNA, 1316 bp, Homo Sapiens
  misc_feature (893)..(893): n is a, c, g, or t
  misc_feature (895)..(895): n is a, c, g, or t
  misc_feature (897)..(897): n is a, c, g, or t
  misc_feature (903)..(903): n is a, c, g, or t
  misc_feature (987)..(987): n is a, c, g, or t
  misc_feature (989)..(990): n is a, c, g, or t
  misc_feature (1017)..(1017): n is a, c, g, or t
  misc_feature (1082)..(1082): n is a, c, g, or t
gggggccaagcggaagtggagatggcggagctgtacgtgaagccgggcaacaaggaacgcggctggaacgacccgccgcagttctcatacgggctgcagacccaggccggcggacccaggcgctcgctgcttaccaagagggtagccgcaccccaggatggatcccccagagtccccgcatcagagacttctcctgggcctcccccaatggggcctccacctccttcaagtaaggctcccaggtccccacctgtggggagtggtcctgcctctggcgtggagcccacaagtttcccagtcgagtctgaggctgtgatggaggatgtgctgagacctttggaacaggcattggaagactgccgtggccacacaaggaagcaggtatgtgatgacatcagccgacgcctggcactgctgcaggaacagtgggctggaggaaagttgtcaatacctgtaaagaagagaatggctctactggtgcaagagctttcaagccaccggtgggacgcagcagatgacatccaccgctccctcatggttgaccatgtgactgaggtcagtcagtggatggtaggagttaaaagattaattgcagaaaagaggagtctgttttcagaggaggcagccaatgaagagaaatctgcagccacagctgagaagaaccataccataccaggcttccagcaggcttcataatcctcggttccccagactcaccggacaccatctcctatgccttggagaccttctgtcacttggctcccttcttaccaccaccaagactgtcccactgggcctgacccacctatgagggaagaagtcccacctgggccagagggagttcatgtgttactcataacatgcatttcaataaaaacatctctgcggtgacnananacgcgncacgaacccaaggaccgatcgcccgcacgccagaacccaggcccgggcgtaagtttagcaacagcccagatgacgccgcgaaanannccttggcgggccgcccccggcccctanaaaaacttttcaaaacccttttttttgggggcgggggccccaaaagaggaaagggaaactgggcncaatactttggttcctaaaggagaccctgggcacaggaaaagggcttgggatttcccccaataaaaaaaccccccgggggggaacccggggtgttcgaaaaaaacctccaaggggagttccgggggcttttccgtggctacactcacaggggattcagcccgagtctatatattaatttcacgcccccgcccgggcccccatttgtgggagaagggtggagacttccttatact

SEQ ID NO: 175647 - DNA, 720 bp, Homo Sapiens
ctgctgggtgggcttcccctaggagaaagctgctactcagattttggtcggctcagttcccccaaccccagccatccaagaatatggtgttactgaacctctcagtgcatgggttggtgggaccctttatagcggaaaagggaaactgaagcccagtgaagagcaagctttgtacaagatcgtagagcctggtagggctggcttgccagggtgggaactggagtgtggattaggtccctgcccttggtgggagctcatactgacagaaggtgagacttgccagtgcctttagaggccactgtccaccccagaccctccactgggagaagcagaggccaggataggctgacttgtatgggtaggggattatttcagtctctaagtcctggccagtgtggacctaggtccctctgagagacacttctatccatggggaggtagcgtgtgacctcaggcagcctaccataatcctggggcttctctggaggaccccacacagatctatcataggataaatctacttgtctgtcgtagatctatctcaactaggaccattcatcagtgggccatttaatcagcccacttcagccaggagggcacaaacatgaagctactttgcactgaatcctatcagtgtggtgagaacattagacacgcctatagggaatgatctgtgtttttggttgaaataaaatagagagcaattaattactgtttagt

SEQ ID NO: 175648 - DNA, 729 bp, Homo Sapiens
  misc_feature (715)..(715): n is a, c, g, or t
ttccactcagcaagcaagcatgagtatgccagttttagctagcttttcgaaagtggacatacctatacgaactggccatcccactgttctagagtctaattctgattttaaagttattcccacttttgttaccgaaaataatgttatcaaaagtcttacaggttcatatgccaaattacctagtccagagccaagtatgagtcctaaaatgcaccgaagacgttccaggacatcatcagcgtgtcatatacttataaataacccaataaatgcctgtgaattaagccctaaaggaaaagaacaggcaatggacttaattattcaagatactgatgaaaacacaaatgtgcccgaaattatgccaaagttaccaactgatttagcgggagtttgttcaagcaaggtttatgtgggcaaaaatacatccgaagtcaaagaagatgtggttttaggtaaatcaaatcaggtatgtcaatcttcaggaaatcatttagaaaataaagttactcatggacttgttactgtggaaggtcagttaacatccgatgagagaggcgcacacataatgaacagtacctgtgctgcgatgccaaagctgcatgaaccatatgccagcagtcagtgtatagcaagtcccaaactttggaactgtgagtggactccagcccacccagtatggtagaagaaaaactgccagttgcaaacagaactgaantaagtcttatgatg

SEQ ID NO: 175649 - DNA, 780 bp, Homo Sapiens
  misc_feature (184)..(184): n is a, c, g, or t
aagtaggggaaaaggaaaaaaagacgaaaagaagagactattatattttaaaagtgaggaagttgtaaggaaaataaaataagaaagaggcaatagaaatataagataaaagaggaaaaaaagtggaatgattataaaaagatattagaaaagggtaagtaaagatgtttagaagtataagatngttggtaaaaaaaagggtaagggaaaaagattgaagggaaatagggtaaaatataaagggatatcaatataaaattgaatataatcaataattttatattattaagtttttgtaattttttctgtttggttaaaaaagtttaatgagctgtaaaataaatacacttccattaaatattaaataaattatttacaacttgaaaaaatactttttaccttcgtgcacctttatatacagaaatagcataaaaagtgacaattgaaagtttaaaaccatcataacaaaaagggtccattgtcttatgatccactggaaagaggaccgactcatcatttatggctatgacttggcagtgactccaatgtgatatcctgtaattttatcttcagttatgctatagcatgtacatttccattctcttgtcgaagtttctttcgttcctcagcttctccttcatatttcctgacgtattgtcttctaagctggactgtaataacagcaacagctgtgaggatcacagcagacataaaggcagctatggctgctaatgcaatttttgataaacactgtcaatcatactgtaagataacatgaac

SEQ ID NO: 175650 - DNA, 863 bp, Homo Sapiens
  misc_feature (19)..(19): n is a, c, g, or t
ctagaggatccccgctgcngagaaaaccaaacagggtgtggcagaagcagcaggaaagacaaaagagggtgttctctatgtaggctccaaaaccaaggagggagtggtgcatggtgtggcaacagtggctgagaagaccaaagagcaagtgacaaatgttcggaggagcagtggtgacgggtgtgacagcagtagcccagaagacagtggagggagcagggagcattgcagcagccactggctttgtcaaaaaggaccagttgggcaagaatgaagaaggagccccacaggaaggaattctggaagatatgcctgtggatcctgacaatgaggcttatgaaatgccttctgaggaagggtatcaagactacgaacctgaagcctaagaaatatctttgctcccagtttcttgagatctgctgacagatgttccatcctgtacaagtgctcagttccaatgtgcccagtcatgacatttctcaaagtttttacagtgtatctcgaagtcttccatcagcagtgattgaagtatctgtacctgcccccactcagcatttcggtgcttccctttcactgaagtgaatacatggtagcagggtctttgtgtgctgtggattttgtggcttcaatctacgatgttaaaacaaattaaaaacacctaagtgactaccacttatttctaaatcctcactatttttttgttgctgttgttcagaagttgttagtgatttgctatcattatattatacagacttttaggtgtcttaaattgatactgttcttacgaataatgaccgtatcgtgaaactttgttaagctatatttatacttaagaatttgtggagctgaaactatacacctat

SEQ ID NO: 175651 - DNA, 738 bp, Homo Sapiens
cggggcagagcatcctgcgccccggcgcggggccctgcggtagcctcaggcccctcccctggacccgccgcagagccagtgcagaatacagaaactgcagccatgaccacgcacgtcaccctggaagatgccctgtccaacgtggacctgcttgaagagcttcccctccccgaccagcagccatgcatcgagcctccaccttcctccatcatgtaccaggctaactttgacacaaactttgaggacaggaatgcatttgtcacgggcattgcaaggtacattgagcaggctacagtccactccagcatgaatgagatgctggaggaaggacatgagtatgcggtcatgctgtacacctggcgcagctgttcccgggccattccccaggtgaaatgcgacgagcagcccaaccgagtagagatctatgagaagacagtagaggtgctggagccggaggtcaccaagctcatgaagttcatgtattttcagcgcaaggccatcgagcggttctgcagcgaggtgaagcggctgtgccatgccgagcgcaggaaggactttgtctctgaggcctacctcctgacccttgggcaagttcatcaacatgtttgctgtcctggatgagctaaagaacatgaagtgcagcgtcaacaatgaccactctgcctacaagagggcagcaccagttcctgcggaatgatggcagatccccagtctatccaggaagtcgcaaacctttca

SEQ ID NO: 175652 - DNA, 428 bp, Homo Sapiens
cacagtgataccactgcagaccctgcctgccaagcctccagctctctgactgctcatgaacccccgctgctctatgacctgtccaaggacccctggtgagaactacaacctgctggggggtgtggccggggccaccccagaggtgctgcaagccctgaaacagcttcagctgctcaaggcccagttagacgcagctgtgaccttcggccccagccaggtggcccggggcgaggaccccgccctgcagatctgctgtcatcctggctgcaccccccacccagcttgctgccattgcccagatccccatgcctgagggcccctcggctggcctgggcatgtgatgctcctcactgggagcctgtgggggaggctcaagtgtctggagggggtttgtgcctgataacgtaataacaccagtggagacttgc

SEQ ID NO: 175653 - DNA, 498 bp, Homo Sapiens
  misc_feature (409)..(409): n is a, c, g, or t
  misc_feature (455)..(455): n is a, c, g, or t
  misc_feature (475)..(475): n is a, c, g, or t
gaaaacacctgcggcatctgccgccaccgtcaggccgcccgcagccgcttcttcagccggccgtcaggaaggagtgacctgacagtcgatgctgtgaagttacataatgagctgcagtcagggtccttgcgcttgggcaaaagcgaagccccggagacgcccatggaagaagaggcggagctggttctcaccgagaagtcctcgggcaccttcctgagtggcctttccgactgcacaaacgtcaccttcagcaaagtacagcgcttctgggagtccaactcggctgcccacaaggagatctgtgctgttctggctgctgtcactgaggtgattcgctcccagggagggaaggagacggagactgagtactttgttgctctgatgacaacaatggaagcaagtggaagtnccccggagtccttggccgccgttgctttaccttgttgaacctttgncttgaaacggggttcccaancctttgctttatttaaaaaaatt

SEQ ID NO: 175654 - DNA, 602 bp, Homo Sapiens
acggatgaaactggagtctggggtaccctgggctggcaggtgggaggaaggcgcccagctggcctgggccactctggtccataagtgcttggctaccagccagccagaccctgggaggatgccctcagaagatgcccttggcaatcttgagtcctttctgcttcatgcgagggagggtggagctggctccgtgcttgaccttcactcccttggtgaaggtccgcttcttcaggacaaagtcatagttggcagtagagttcatggcataaaagacgtgggcgttttcagggatcttcaagcttccggtcatctgagagaatctgcagcagctcataagtccttccggctcctccttcctccaaggttgcggtttgtccatggccttgcggaatacaagccggagccctatcttggcttggtcaccaagatgctcttgtacatgttgccattgtccacgtccaggctgacgcggatgatacagcagtcgcccacctgctggttgtagagcggcagcgcggagctggagttgcagagccctgagacagagcgcttgtgggtgcgtgtggcagccacgggcgtggtggaggctgaggaggacgaaa

SEQ ID NO: 175655 - DNA, 940 bp, Homo Sapiens
tcagcctggagacccatgcccacatccaggagtgtaagcaccccagtgtcttccagcacggagacaacagcttccggctcctgtttgacgtggtggtcatcctcacctgctccctgtccttcctcctctgcgcccgctcactccttcgcggcttcctgctgcagaacgagtttgtggggttcatgtggcggcagcggggacgggtcatcagcctgtgggagcggctggaatttgtcaatggctggtacatcctgctcgtcaccagcgatgtgctcaccatctcgggcaccatcatgaagatcggcatcgaggccaagaacttggcgagctacgacgtctgcagcatcctcctgggcacctcgacgctgctggtgtgggtgggcgtgatccgctacctgacccttcttccacaactacaatatcctcatcgccacactgcgggtggccctgcccagcgtcatgcgcttctgctgctgcgtggctgtcatctacctgggctactgcttctgtggctggatcgtgctggggccctatcatgtgaaattccgctcactctccaatggagtctgagtgcctgttctcgctcatcaatggggacaacatgtttggggaacgttcgccgccatgcaggcgccaaacagggccccagcaaacctggggggaggctctttctccccagctctaacctttaattcctttcatcaagcctcttccatccaacatgggtggctcagaccttctttaattcccgcctcattcaccgggcgacccaacggacaaccaatcaaagccatcccccggggggcggcagggccgcataaaggaacagccgaacctgtcaaggcccttaaattccccaacaggtggcccaaaggaaaatgcccgccaaccttctcggggaaaagatttcccactccgtggggtaaagaacggccatccc

SEQ ID NO: 175656 - DNA, 799 bp, Homo Sapiens
ggtggaggagcagctggtactgaagcgggtggccaacatcctcatcaacctgtatggcatgacggccgtgctgtcgcgggccagccgctccatccgcattgggctccgcaaccacgaccacgaggttctcttggccaacaccttctgcgtggaagcttacttgcagaatctcttcagcctctctcagctggacaagtatgctccagaaaacctagatgagcagattaagaaagtgtcccagcagatccttgagaagcgagcctatatctgtgcccaccctctggacaggacatgctgaggcaggggacagtgtcccctgctaccgcccgcccctacccatggcccgttgctggatgactgttactcttttttcagaaggtgttgggattatcacaggttaagccttttgttccccgtctgcacctgaagggttgtcgctctggcctgcgagagcctcttccaggttttgacctgcaggcagtgctctctaacaggaccatcacagcttctgaactgagccggagagagagaatggaattgctgacccctggaactggcgggtattctggtcattgaggagacaccatagtggaaactggggcttatgctgctgcctccagggtgtgaggtgggtggggacctgtgtcaggtgtggatagccatttctgctcaaccacacattctctaagaaacagcttgaaagctctgtctgggtcattcatttaaactagaagcagaggcacttaaaacatgtaccaggaaccatttaacaaagaatataaaatgtcacaatctgtgt

SEQ ID NO: 175657 - DNA, 866 bp, Homo Sapiens
ggacccaggggcagcagggccctgagcacctgtggcatgtttgctgctgttgctgtctggaggccctgccagcacccatgccaggccacgtgccccactcacctgggagggcaggatttgacgtgggcaggcccagagagcaccaggctggcccacattctggggggaggaggcaggagcggcccttctgagggcctgagccaggcctcacccgcctgcactcctggcctcacgtggagcccctgatggtggagtgcagtgggcgtgactcacgggaggcattcttgcttgtttccctcaagcccaagaagtcttgcaagcgacgggagccaattcaggccagtaccgccagggaggccatcgagaagatgctggagcagaagaagatctccagcaagatcaattatagcgtgctccggggcctcagcagcgccggcgggggcagtccgcacagggaggatgcacagcccgagcatagcgccagtgccaggaagctgtcacgaaggaggacgccggccagcagaagtggggctgaccctgtgaccagtgtggagaaaaggtaccatcctgtcctgagtggctgggttagggcagcagcccagggcgggcagaggcccatggcttcgggtcctggagctgccgggggccagccggggccacagaagtgcctggagtggcatttgccacctgcatgctggggactggtgggccttctccggcaccttgacagtgtctcaactctccttggcctggcaggctgtgagcggacgggcgggtccacctggtcaggggggtcctgccagcctagggctctggttttgtccccaggaaggggctgggacaattcggtggggggtcgggggcct

SEQ ID NO: 175658 - DNA, 425 bp, Homo Sapiens
  misc_feature (58)..(58): n is a, c, g, or t
  misc_feature (78)..(127): n is a, c, g, or t
  misc_feature (201)..(201): n is a, c, g, or t
  misc_feature (234)..(234): n is a, c, g, or t
  misc_feature (269)..(269): n is a, c, g, or t
  misc_feature (309)..(309): n is a, c, g, or t
  misc_feature (371)..(371): n is a, c, g, or t
gcttggaatgcggctggtgctttgagatgcaaaaggagctggacaaacgagctagggnccccaggctgaagaaaagcnnnnnnnnnnnnnnnnnnnnnnnnnnnnnnnnnnnnnnnnnnnnnnnnnntcaggcctggtgagctcaaggggggctggggaaaagcaaggccccaggcatggtggcacagtgcccactggcancctagcaccaatggatactcctatcctggaatnctgggacagggtgaagctctatgagggaccccagnttgtggcgggattctggggtgatcattgacacatccatgngaggggggcgtcttggtgtattcttgctttttcccaagaaaacataatttggtccaattttncagttattcgatggcaatgaacaacaattgccttgaaggattttgaggcctttt

SEQ ID NO: 175659 - DNA, 268 bp, Homo Sapiens
gagggggaccccattcccgaggagctttatgagatgcgtgagtgaccactcgatccgctcctttgatgatctccaacgcctgctgcacggagaccccggagaggaagatggggccgagttggacctgaacatgacccggctcccactctggaggcgagctggagagcttggctcgtggaagaaggagcctgggttccctgaccattgctgagccggccatgatcgccgagtgcaagacggcgcaccgaggtgttcgagatctcccggc

SEQ ID NO: 175660 - DNA, 370 bp, Homo Sapiens
  misc_feature (340)..(340): n is a, c, g, or t
  misc_feature (343)..(343): n is a, c, g, or t
gggaagccattggataagcggatgaggggcctacacgtgtgcactccaccactctggccattccccacccatctcctcccagaacgtcacagtgctcagagacaaactggtcaagtgtgagggcatcagcctgctggctcagaacacctcgtggctgctgctgctcctgctctccctctccctcctccaggccacggatttcatgtccctgtgactggtggggcccatggaagagacaggaagcctcaaggtccagtgcagagatcctacttctctgagtcaagctgacccccttccccaatcccttaaaccttgaggagaaatggggaccccacccctnatnaggagttccagtgctgcatgcgattat

SEQ ID NO: 175661 - DNA, 295 bp, Homo Sapiens
gtcagctgattccttagcacgaccaatctttttctaggttttcctctcaccgcatggggccaaaacagtacagagcatgagtttggtaccccaagcctgagcagcgggtctacgctgatgccagggaggatccggaccgtgcttccgggggcccccaaccagcatggccttctcagcctggattctgtatgggttagaggcaaatgcttcatttttctgcacagtgtacacgttccttaataagcgaagtgtggggtgatttctaaaaggcttctagggggctctcagtcgcgtc

SEQ ID NO: 175662 - DNA, 271 bp, Homo Sapiens
  misc_feature (1)..(1): n is a, c, g, or t
ntttttttaaaaaagtctgcctaccctgtgtgacaggccacacagagaccacatggaaggcaatgccaggaggagaggcacttgagccacctagtgggagagagggccagggctcaccagccttccaactgagcctaatctttcaagcattcccaacaagaggcccaatgcggagatgaaccagcctaagctttctagcccacccaaaccccagacgatttttttcccaggcaacattacatggagcggagcgattactttaggtagaaat

SEQ ID NO: 175663 - DNA, 508 bp, Homo Sapiens
ctggaggacctgcaggtcgccttccgcgccttcgaccaggatggcgacggccacatcaccgtggacgagctcaggcgggccatggcggggctggggcagccgctgccgcaggaggagctggacgccatgatccgcgaggccgacgtggaccaggacgggcgggtgaactacgaggagttcgcgaggatgctcgcccaggagtgaggctccccgcctgtgtccccctggctgcgctctgagccttcagggccaccgcccgctgctgcttttgtgctgggactctccggggaaacctggtcggtggatgggaaactgcctccccctgggaggaaggctttgcgctccggggcctggatgcggcgccctcgggccgcctgcgagcccctctctgcctccagaccttgggcagaaggaggcctccttgggcctggtccccctttgccctgcagtggaatgagggcccctcagccccgcattgatctaaataaaggactgccgagttcaaaaa

SEQ ID NO: 175664 - DNA, 1158 bp, Homo Sapiens
acttctttttaaggccccgttttaaaagggaatttctgggggggagccccccgcccccttcaaaaagggaaaactgaaagttcaatttatttttacaaaagcccgaaaggggccccttttccggccccgaaagaagttttcccccgaaaaaggccggttttttgggggggagggccctcgaggaagggccgacagtggaagaggaggcatcccggcactgtaaggctctttgttaagccacccccaggcccctgtgctgtcagggggcagcttgggccacttggctgcccctgagagaaactgaggctccccgcgtacctgtggagcgaaggagaggttgtcatctgggcccctgtttcaccagtcaaaaacttatgaagcagtcagaagcccgaaagcatccaagcccaggtgcccaggaagcttctgaaataaacggcactgggttgggaaggatgagaaagccaagaccaggtgggccaggttctccgaacatggggcaacagtgacctgggcaaaagcctggaactgagcggctgataaggcccacaattactgccaccacctctcagtatctacacgggggcagacgttaggcagtgggaactgaggactggagggcgtgtggcaaacacgggatggattttatcagaaaagagaggacacccaaacacgtgcctgccctatttatcttgcatgtcctgtgccaggtgaaggacgctggagcatgggtaaggttcctgagaacaactggtgggcagaaacgggctgggatgggcactgctccacaggcaacattaagcctctgagggggacactaatagtgctacatcttgtgggctgctgaaaagtaggtaacgaatggcctttattgcactttttcgttcttaggaaacaggggagtgccctgcagagtttctcttgatttgcagaaatcactgcagatcaatgataaggtgcaggcagaatcacgggtgacctctgactctcaagggaagaagtccagtgattggtctttccagtattttcaagtccgctgctttcccgcaaagctcggcctaacctggagctagttaggtccgcaggcgccaccgccggcgcactccggagaagaagctccttcttcacccgcccaggagagctcctcgagaaaaaccc

SEQ ID NO: 175665 - DNA, 556 bp, Homo Sapiens
  misc_feature (34)..(34): n is a, c, g, or t
  misc_feature (37)..(37): n is a, c, g, or t
  misc_feature (46)..(46): n is a, c, g, or t
  misc_feature (62)..(62): n is a, c, g, or t
  misc_feature (79)..(79): n is a, c, g, or t
  misc_feature (96)..(96): n is a, c, g, or t
cctcaaaaaccaggcaagccggcccagggcatgngcntagaatccnagctactcgaaagccnaggcagaaggcccgctnagtccagggattcaagnccaacctgggcaatagagcgagaccctgtctcttaaaaaccgatgatgatgaacacagagcacggggcacttgtgctggaagccagggggcctagaagaagccgagaccagccttttacctcggggttttgaggccaaaagggacgacagagacagtttctagttagagccttggctccatttttggatgatttagccccgagttcctgagtctattttatgccccttacgtactttgatagaactaaggaaatagtggttttgagtgaagggaaaggaaacccagaaacattttacgttgcttttacttctgtagtgtagattgccccggcccctctctgagccctgtagcatctgtgatagcttctgtcccttcatcggttcatgtcacagggattttctttcccaggaagcggacacggagagtcagccctaataaatgagcacatgccctggctgt

SEQ ID NO: 175666 - DNA, 344 bp, Homo Sapiens
gaacacagagcggctgatcaagcatgcggtgcaggagaggctggcagtcactgtgtgcatcaacaagattgaccggctgatcctggagctgaagctgcctccaactgatgcttattacaagctgcgccacattgtggatgaagtcaatggattaataaggcatggattccaactgaagagaacctgatcctttccccactcctgggtaacggctgcttctccagctcccaggacagcatctgcttcacgctgggctcctttgccaagatctatgccgacacctttggtgacattaattaccaagaattttgttatagactctggtggacatctacttaaccctt

SEQ ID NO: 175667 - DNA, 366 bp, Homo Sapiens
ggaaccactgtgcgctgctttcatgggctgggaagtagattccagcagggtttctggctggtcgaagagtcatgcatcagccaggtgctgatttagcattcgccccccaccttctgtgtaaggaaaacctacttcatcacagggactagtcccattgtaagtatctctcttcccactgctgggtgggatgagatataaataaattaccttgataaaattggggcgtgtgtgctgggtagaggagaccaggggatgctcccaccactaacccagatgttccggaggctgggggccctgccttcttgtcctgtgtccctcctatccctgagccgtattttcctttcagacactacactgcgtggagag

SEQ ID NO: 175668 - DNA, 689 bp, Homo Sapiens
  misc_feature (323)..(323): n is a, c, g, or t
  misc_feature (563)..(563): n is a, c, g, or t
  misc_feature (592)..(592): n is a, c, g, or t
  misc_feature (620)..(620): n is a, c, g, or t
  misc_feature (632)..(632): n is a, c, g, or t
  misc_feature (655)..(655): n is a, c, g, or t
  misc_feature (671)..(671): n is a, c, g, or t
gagggagccacgcctcaaggtggagtgggcagaggtcaagagagggatgtactgaagcttcttcccgtcctgccacagacacttctcctgccttcccaccctgacccggcagaacccaccaagtgcctgtgtgcagcctcctgtgcctcacccagggcctgaccccagagtggtcccaacaacccggtctcatgcccactccccatccctgcttcccaaaaattgcactgtgtgcagtttgcaacaaagaatcccgctggcatcctgtccttgggaaccctttctcattctccaagcctggtcagctgcctgcacaggcaganggtgccctcagcccagattagcaacactcatagttttgccaattaccagtagacactagtggaaccatctaactggaacttcctctctccttccacttatttcctcaaacttgttgctttacactagacacatgcaaatgtatgttttaaacacaccaaaacagatcatgccaaatgagttgcctgtcaaaggctgggaggggcaggaaggaggggcctgggttttggggtcttttcctnccagccttttggatgggtgcctttggggnccctttagggccccagcggccaaggggncttcccaggttnaggggccacaaggggcaaagganttttttttattgatgntactttaaaagggcacaa

SEQ ID NO: 175669 - DNA, 782 bp, Homo Sapiens
  misc_feature (54)..(54): n is a, c, g, or t
  misc_feature (98)..(98): n is a, c, g, or t
ggcctaatggattaagctttcccagatgttcaggataatgaagccttggacttntaaggaatcctatccatatgaggcacagaagaatcctgtaagtncaatccccaagtattctgttgctaatggcaccggctttgtggacatccctaagcaggagaaggccctgatgaaggcagttgtaactgtggggcccatttctgttgctattgatgcaggtcatgagtccttcctgttctataaagaaggcatttattttgagccagactgtagcagtgaagacatggatcatggtgtgctggtggttggctacggatttgaaagcacagaatcagataacaataaatattggctggtgaagaacagctggggtgaagaatggggcatgggtggctacgtaaagatggccaaagaccggagaaaccattgtggaattgcctcagcagccagctaccccactgtgtgagctggtggacggtgatgaggaaggacttgactggggatggcgcatgcatgggaggaattcatcttcagtctaccagcccccgctgtgtcggatacacactcgaatcattgaagatccgagtgtgatttgaattctgtgatattttcacactggtaaatgttacctctattttaattactgctataaataggtttatattattgattcacttactgactttgcattttcgtttttaaaaggatgtataaatttttacctgtttaaataaaatttaatttcagactaggggctgtattactatgaagaagaaacttgtgca

SEQ ID NO: 175670 - DNA, 228 bp, Homo Sapiens
tgagggtcgcccacccacctgtgtgttgccctctgtcctggcggggaaacataaaccccttgtctcaccaccaaccttgcttgtgtagatcagcagggctggccctgccccaaggactcactgcatgtacccggacccctaggcctggcctttgcagcatagtggggagcttctggattccatctgcacctgtgagccccatgctggctgtgcactgcgcgggcctga

SEQ ID NO: 175671 - DNA, 563 bp, Homo Sapiens
aagcagcacccgcgaatagaagcgtttctttcccaggagacaaattttgcttacttgttaggcaaacgaaaaaccccagaaggagggcataaccaataccttagaagagtcattcagccttgaaaagtaagaggcttcaggattctaaacgaaagactacatgcggtggatttttgggcgagacctgcctctcagaatcatctgatggatcttcacgtgaagatgctgaaagttcatctttaatgaatgtacaaaggagaacagctgcgaaagagccaaaaaccagtgcttcagattcgcagaactcagtgaaggaagctcccgtgaagaatggaggtgcgaccaccagcagctctagtgatagtgatgacgatggagggaaagagaagatggtcctcgtgaccgccagatctgtgtttgggaagaaaagaaggaaactaagacgtgcgaggggaagaaaaaggaaaacctaattaaaaaatatgtatcctctataattagttatgacagccatttgtaatgaatttgtcgcaaagacgtaataaaattaactggtagcacgg

SEQ ID NO: 175672 - DNA, 452 bp, Homo Sapiens
tgcgaccgcacacgtcctccatgtccgcgcccagccgggcctgcgccgcctgcagctccttggacagccgtgcccgcgtctcctccgccaccggggtcagttgttcctccagttccgatttgtaggccttcaactccttcatggtctcgtccatcagcgccctcagttcctgggtgacctgggagctgagcagctcctcctgcacctgctcagacagtgtctgcacccagcgcaggtaatcccaaaagcgacccagtgccagttcccagcgctggccgctctgccactcggtctgctggcgcacgtcgggctccggctctgtctccaccgcttgctccaccttggcctggcatcctgccaggaatgtgaccagcaacgcagcccacagaaccttcatcttcctgcctgtgattggccagtcggctcctggggaaggaagtccttcagctccg

SEQ ID NO: 175673 - DNA, 544 bp, Homo Sapiens
ggctgttctagaggatcccgcgtatggtaatggtgggaggatatacccacacctacaaatacccagaggggtctcagaggagagggaggcttcacaagggcgaaccacctgaacaaactggccgagaaggaggagacagggatggccatgcggatccgtgtgggccagagcatgaacatgggcagtgactttgacgtctttgcccacatcaccaacaacaccgctgaggagtacgtctgccgcctcctgctctgtgcccgcaccggtcagctacaatgggatcttggggcccgagtgtggcacccaagtaccctgctcaacctcaacctggagcctttctctgagaaggagcgttcctctttgcatcctctatgagacataccgtgactgccttacggagtccaacctcatcaaggtgcgggcctcctcgtgagccagtttaaacagctacctgtggctgagagggactctacctgggaatcagaaatcaagatccggatcttggggagccaagcaaaacgagctggtggtgagtgtcctgaga

SEQ ID NO: 175674 - DNA, 333 bp, Homo Sapiens
atttccgttcctttggtaagcgggggtgggttaatgggagactacagtcggccatgttcacacaatgtctgaaggccacttattttgagaaatgtgatctcaaagccgcctcttcaacaaagttcaatgtttgtaacagactaaagacacctgcaggccatccctcaaatcctgcgccagtgagcctaggttcagtgacctgaaatcatcatcgaacccaactgtcagtttcagaggccctaaaagtaggaagccagaagcctagtgctcagcccagctccttaggctatttctggaaagttctggacacagctgaaattaaccacactagcc

SEQ ID NO: 175675 - DNA, 544 bp, Homo Sapiens
  misc_feature (46)..(46): n is a, c, g, or t
  misc_feature (472)..(472): n is a, c, g, or t
  misc_feature (493)..(493): n is a, c, g, or t
  misc_feature (512)..(512): n is a, c, g, or t
ccaagagcagccagagtgtgaaggacgtggtgcggttcttcaaccngcaacttcccggaagccatgctcaaggagcggcaccacacaaaggtgcagtaccagctcaagtcggagcacatctcgctggcccaggtgttcagcaagatggagcaggtgtctggcgtgctgggcatcgaggactactcggtcagccagaccacactggacaatgtgttcgtgaactttgccaagaagcagagtgacaacctggagcagcaggagacggagccgccatccgcactgcagtcccctctcggctgcttgctcagcctgctccggccccggtctgcccccacggagctccgggcacttgtggcagacgagcccgaggacctgggacacggaggacgagggcctcattcagctttcgaggaggagcgggcccagctgttcctttcaacacgggacacgttttgttgaccacccagagttngggccaggggaggacaagttncattgaccacccagagttnggccagggatttaaacatttggggacagaatt

SEQ ID NO: 175676 - DNA, 397 bp, Homo Sapiens
  misc_feature (17)..(17): n is a, c, g, or t
  misc_feature (33)..(33): n is a, c, g, or t
  misc_feature (40)..(40): n is a, c, g, or t
  misc_feature (76)..(76): n is a, c, g, or t
  misc_feature (80)..(80): n is a, c, g, or t
  misc_feature (126)..(126): n is a, c, g, or t
  misc_feature (146)..(146): n is a, c, g, or t
aggatcgggtaggcctngaaggaccgccaacgnaaagatnatctagtcaccggcaccagccaaggcatgcatgagntgantggctacctccgtcgatccagcccccaccgccacctggctcacgtnaaacgccgaagtgaccggcnatggtcgagcgtacttcctcggcactcattaatgggtaacggatgaacctcggcagtgtgcgggtgacggcctcgaccacactcggcagtggttcgaaagggttctcgttggatgacagcttcacagcgttctcgccgtgacatgccccttgcttgtagagcggtagtcctcgaacaacatcgcgtcggtcctgactcacgtcatcctcccattcaacgctcgcatagaactctttcacactcccccgaca

SEQ ID NO: 175677 - DNA, 410 bp, Homo Sapiens
  misc_feature (242)..(242): n is a, c, g, or t
  misc_feature (283)..(283): n is a, c, g, or t
  misc_feature (337)..(337): n is a, c, g, or t
  misc_feature (345)..(345): n is a, c, g, or t
  misc_feature (365)..(365): n is a, c, g, or t
  misc_feature (389)..(389): n is a, c, g, or t
gcaagggctcatgacgacccctcctgaacactgttcaaggacgacggctagcattcctcgctgtgagtcctgaacagcagcttctcgaatatgaccgacgtcatgtctggcacccctacgcaccgacgatcggggcagacccaatgctcgcagtgacggctgccaacggagtccggctgcagctgcatgatggggaacaccaccacgaggtcatctgatgccatggcctcgtggtggtgccnatattcacggttaccgaaacccggtcctcgacgaggccctnaaccgtcaaagctcccagttcagtcacgtcatgtttggcggacgcacccataangccgcggntgacgccgtcatattcctantgcgcctggccccggggcccctcnaccggatcttactggctgatt

SEQ ID NO: 175678 - DNA, 290 bp, Homo Sapiens
ctcgtcgacgagttcggcccgctcgggtcacgatgtcaacgtgaccgagggtgatggggtcgaatgaccctgagaagactgcattcactgctgctccctgcccgcatctacctccggctcaccggtacgttgggcgtaatagacaactgtctcaccgtagcgagaattccacgactcgtatccatccggaaaacggggatcccgacttctccgtgatctctcgactacgagcagaccgttgtgggcgagggccccgtcgcacgctgtcaagatgaggctatccatgtcgt

SEQ ID NO: 175679 - DNA, 396 bp, Homo Sapiens
ccagaacgccttaaatatggtatagtgatgaaaccctgatcccggtggtcccaagggtggaggaggggatgggtgtaacgctggtagctgtggatttggtggctgtgcttgtcagcactggaagggtggttgcaggccttggactggaggaggaagtggctttggaactggtggctgtgggtgtggtggcccggccaccagctctacggccatgccctccttcactccggggacgacctggatcctcacagagctgaccacaacagccactacgactgcattcactggatccacggccaccccggtctccaccccgggaacaacgtacactaacaaagaggcgactaccacaaacacggggtttacaaggacccccttcttcagaccagagaaggg

SEQ ID NO: 175680 - DNA, 1057 bp, Homo Sapiens
caacatatggtattgtgatggatggggggtccccgaccgaatccaggtgaccacggacctgtaccaggttctagctgccagagggctaccagctggagtgtcgaggggtggtcaaggtgaagggcaagggggagatgaccacctacttcctcaatgggggccccagcagttaacagggcccagccacaaattcagctgaagggaccaaggtgggcattgagtggactctgtgctcactgggtggagctgtggcagggggcactgagcctccagaccctgctaaccacaaaagggaacatcccagcaggctgtgcttggatcatgctcgtctgccctcaagctggaaaacaaggggctacctaccgagaggattatgcaagtgactttctttcttacttggggtagggctgttccctctccaatcttccagcctttgggagcaggggaggggtcagtagcagaagcagagggaggcctcttgcctgagggattaaaatggcagcttgccatgcctacccttccctgtctgtctgggcagcaggttcagggctgagcccttcttttccctcttttttcctgggaatattttgtacaatattttgtacaaagacaggcatgaggagtgcctattccatgcttgcctttgcaatacctgcatccccagcactggtcctgggcacttccccaccccagccaggtgtccctcctatgcacagagcagaggagggagaagctctggggagccagctttggccatatttcaggagaatgtttccatgtgccaaatcttagtcccatgatctgtccccaaaggggaacaaagggacctctgacagcttagatttagccccagttcctgcacgctccagggaaacggggtgtctggcctcactggtactgtgaaaaatgctcaaagagcaagcctgtggtgtggggatgtcagggcaggagctggaaagtccacctgcaagtggccaaaaagcaggccggccaaggcctggggcagtgccagacctctgatctgggggacccccgtcggggttcccagatcaaggcc

SEQ ID NO: 175681 - DNA, 334 bp, Homo Sapiens
tcccgagtattaaatcttaaatcagaaaaaattggaaaaatacctggttccatccaagacaattatgccgttcttctaaggactttatgggtaaaacttttacaccctattatcacaaaaaccgttggacaagagagacaacagcagagtacaacattaccatcacagtcaccgacctgggcacacccaggctcacaacccagcacaccataactgtgcaggtgtctgacgtcaacgacaacgcccccgccttcacacaaacctcatacaccctgtttgtccaggagaacaacaacccccgccgtagcacatataaaaactggagtttcagggg

SEQ ID NO: 175682 - DNA, 641 bp, Homo Sapiens
  misc_feature (536)..(584): n is a, c, g, or t
  misc_feature (612)..(613): n is a, c, g, or t
ctaaagaaatggcacagggacagtaaatggtagtgttccaccctgtgctgaggcctaggcctcttcctcagctttatctccctttccttcactcaagggccatttccccagtccctatctcccccatcccctcccggcttataggccccacaggtgctatttgttgtgctggcccaggcgtggggctaccaagcaaaggcttggcatataccaaaggccagctgcatgcccatcagtctggtctttttcctctgcggtcatgttggctttcatgctggatcaaatgttttactttcccagacaagtggcatctgagttccccatcctaccactctcaccccactttcctgccccacctaaaccctcgttttagtaatttgtagtgactgttcccttccctctgttgcagggaaccaggaggaaagggaaagatgttgccatatttcctactctttaggcatggactctcctttccctttgttagtgtcctgggttcccatggactcagggatttgttggctaaggtttctctgtgnnnnnnnnnnnnnnnnnnnnnnnnnnnnnnnnnnnnnnnnnnnnnnnnntgtacagaataaaaatgtttctatccannacaacccccaaaacccccattaatatgt

SEQ ID NO: 175683 - DNA, 459 bp, Homo Sapiens
gcgtccgccccctcccctggaggacaacctgttcctcccgccccagggtgggggcatagccgcccagctccgcacagaccgcagagatcttccaggcgctacagcaggagtgcatgaggcaactgcaggctccggccggctccctggccccctctcccagcccggggggtgacgacaagccccaggtgcctcctcgggtacccatcccccctcggcccacgcgcccacacgtccagctgtctccagcccccccgggcgaggaggagaccagccagtggcctggacctgcttcccctccccgggtgcctccgcgggagcccctgtcccctcaaggctcgaggacacccagccccctggtaccacctggcagctccccgctgccaccccggctctcaagctcacctgggaagaccatgcccaccacccagagctttgcctcagaccccaagtacgccaccc

SEQ ID NO: 175684 - DNA, 225 bp, Homo Sapiens
gggcgtgttgaggagacgttgaccagggttccctggccccaggggtcgaaccagttgggactatagcccccatgtcgcgcgcagtaataggtggcggtgtccgagggcttcaggctgttccactgcagataggcggtgtcgatggacctgtcggctgacatggtcacctggccttggaaggacggactatatctgatatcagacccgccatctatcgcaattcca

SEQ ID NO: 175685 - DNA, 840 bp, Homo Sapiens
  misc_feature (536)..(536): n is a, c, g, or t
tttttttgcacctgtttccccatgtagtttttaatagcatcccgcttcatactcagaagtgtcccagggtggacaagacattgtgtggcacccttgcaatggcccgcgctgagcagtgggagtaggggatggggagggcggggggcaggtgccctctccactcaccttcccagaaggccccacccacctccctcagcaccatctccagtgggtggggcaacatctgtcctggcctcagattgcccaagacaccatttgctcacggaggccaccatgccccaatatgtacttcccgtttcgggaccaccaagctctggggactggaatgcaggcagtggaagccccagattgacttaacctgttgacagatcttcagagaaactgctggtaggaggcagctggggaaggtggcgatggccagtgggcaggcaggcctggccccagagccactgtggtacaaagaggaagtctgacagaagagcagcctcgggcaaaacgggggagccaaggcggccaacggggaagaagtctctccnaccgtgccctgtgtctggtgccctgggagggtggcccagtgcccatcttgtcccactgatgctgccacatcccaaggctcatgtctcagaacgagagctgctgaagggctggacgttctgagacttcttaagatgtaagtcatttggcatctgtagctggtgaatttcaggtctctaggggagaatctcagcaccccaaaatccttggaacaggggctgagccgtccagcatccccatgtagcatccagaggggttgaggggctgggcttctgggatgtcacagtatctgagcccagagcaggc

SEQ ID NO: 175686 - DNA, 386 bp, Homo Sapiens
cagaacgtgttaaatatggtattgcgatggatggagggtccctaaaagtttcttaagaaacggggctggggcgctgagctgggctggttaccaggggctgccctgcaagccatccatcagaggagggagggaagacctgggagacttccagggccctaccccaccacatctgaacccctgggaggagggaggagatccagggagggccgggcccacccccgcaggactctggctggcattggtcaccaaggcctccagacactccgggcaatttgggctggggtcaggctgcccagggctgcgggcaccaagtcgggcccctcaacaggagcctgactcagatcagcctcaggggccctcttcaagtcggagcacaagtcgtgccc

SEQ ID NO: 175687 - DNA, 872 bp, Homo Sapiens
  misc_feature (628)..(779): n is a, c, g, or t
  misc_feature (784)..(784): n is a, c, g, or t
  misc_feature (793)..(801): n is a, c, g, or t
tggtgcccgcagccctgggcagcctgaccacagcccaaattgcccggagtgtctggaggccttggtgaccaatgccagccagagtcctgcgggggtgggcccggccctccctggatctcctccctcctcccaggggttcagatgtggtggggtagggccctggaagtctcccaggtcttccctccctcctctgatggatggcttgcagggcagcccctggtaaccagcccagtcaggccccagccccggtttcttaagaaacttttagggaccctgcagctctggagtgggtggagggagggagctacgggcaggaggaagaattttgtagagctgccagcgctctcccaggttcacccacccaggcttcaccagccctgtgcgggctctgggggcagaggtggcagaaatggtgctgggcactagtgttccaggcagccctgggctaaacaaaagcttgaacttgccacttcagcggggagatgagaggcaggtgcactgagctgcactgcccagagctgtgatgctctgtacatcttgtttgtagcacacttgagtttgtgtattccattgacatcaaatgtgacaattttactaaataaagaattttggagttagttacccttgnnnnnnnnnnnnnnnnnnnnnnnnnnnnnnnnnnnnnnnnnnnnnnnnnnnnnnnnnnnnnnnnnnnnnnnnnnnnnnnnnnnnnnnnnnnnnnnnnnnnnnnnnnnnnnnnnnnnnnnnnnnnnnnnnnnnnnnnnnnnnnnnnnnnnnnnttggntgggccccnnnnnnnnngaaaaaggttttaaaccccgccttgggggcgcgcccccccaaaaaaaaggaaccgggggaaatccttttcc

SEQ ID NO: 175688 - DNA, 524 bp, Homo Sapiens
cgtcatcgaggcaaaagatggatcaggaaggtgggggagatgggcagaaggccccgagcttccagtggcggaactacaagctcatcgtggatcctgccttggaccctgccctgcgcaggccttctcagaaggtgtaccgctatgatggagtccacttcagtgtcaaggattcaaagtatataccagtcgaagacctccaagacccccgttgccatgtcaggtccaaaaacagagacttttccctcccagtccctaagtttaagctggacgagttctatattggacagattccactgaaggaagtgacttttgcaaggttgaatgacaacgtgcgggagaccttcctgaaggatatgtgccgtaagtacggtgaggtggaagaggtagagatcctccttcaaccccgtacgcgcaagcaccttggctctggccggttgtgctcttacaccaggcactcggggcgcccaaggaaagggcaaaaaacttcaagcttacctccgtcatgggcaacatcatccatgccc

SEQ ID NO: 175689 - DNA, 680 bp, Homo Sapiens
ccgtgatggtgcagagctgttctagagtatcccgggtagtgataacaccccaatcaaaattttcctttgaaaaaattacaactggcaactcacataagatttaatcaacttacttaaaataagggagggcttctcaataatgtttccccactagaaaactaagaaattcagtgatactcagtgccagtaattaagtggtacatatcataaaaattcaaacttggacgcaggtgcgtacacacccatgaaaagattttatacatttataagcttgtgctttcacactttataagcaacacaggtaagttcccacttcagtttccatttcaagtgagtaccgtgcatgtggcattgagggacggtcatcaaacagtctctcttacgcagacttccagtgttacgtcagagccgaaaaagaaaccagccttctcttttcctctatgaagattctctccactttgggaaaacaatcttctatgcaatgaaggtcttgtggaactatgtaaacaaatcatacaactgaatagaattttagaggtcaatcaggaactagaagaagaaaaccatggtgtggatgagcccagcagttcccttccccacaatgtcttgctccaggtgacccttcaacagcacaaaggcagcacgaacttcacactcagcaatttgtcttcctatatccc

SEQ ID NO: 175690 - DNA, 882 bp, Homo Sapiens
  misc_feature (29)..(29): n is a, c, g, or t
agacgctgtactgacgattcctactcagnttgggaattctgtaggaaaacgagtcgggagaggcctcaaactcgctgatcactgtgggataggggtgggagcagaatacagagtactttcggatgatgccgttcagcttgagagggggaagccaggacacaaagaccatgagaagctgaagccgccgctgccttcacacccgcgggaggacctggaacatcctcttgggtccgggtgaagatctgctcactcctgaccccgtctcctgcgcgggtgaaggccagcacctggatgctgtagttggtgtacttttccagcccgtccagctccagtgaaggctgtgtggtggtgatgtttttaatctcacccagctctccgtccatgaggttggcccagtaaatgactctgaacccctggagaattccattcaaggcttccttggaaagtgtggaccaggatattgatatgctttctggtgatgttgctatggcttggacattttcgggggggtaactgggcacatcctcgagagtggtggtgatgatttcctgagaagaaggccccgtgccggcccggttacaggcctgcaacaccaggccgtactgagtgaacttattcaggttgtccagggtgtaaaactcactgtccccgctggtgtcgacactgataatgttgaattggaagttacccccagtggctgtactctcggtaacctatttggtaggcacgggataatcccatttttgcaaatgtttcttggggagcctttccatgtaaccctgatgctctgagatgatataggctccaggtgaacttcctgaggtggaccatcaggagctggctcgtccgccgtgatggtgagctcgttgctggggtcggtct

SEQ ID NO: 175691 - DNA, 880 bp, Homo Sapiens
  misc_feature (452)..(452): n is a, c, g, or t
  misc_feature (708)..(760): n is a, c, g, or t
gtcagggccatacaaaacctgaatactattatcctaatttccttccatcccctttcagctcctgggacctacgagatatggccctgcttctgaacgcagagaacaaaacggaagccgtgccccgagtgggaggacttcttgggaagtatatcgatagacttattcagcttgagtggctgcaagtccagactgtacagtgtgaaaaagcaaaggggggcaaagcaaggccccccactgcccctgggacctcaggggcactgaaaagccctgggagaagtaagctaattgctagtgctctgtccaagccactacctcaccaggaaggggcttcaaagtcaggcccttcccgaaagaaagcttttcaccatgaagaaatccacccatcacattatgcatttgagacttcccctagacccattgatgtgcttggtggtaccaggttttgttctcangaggcaaacccttgaaatgaggacagaagaaaagaaaaagaaatcaagtaagagtacgaagctgcagcgctgggatctgtccggcagtggaagcagctctaaggtggaaaccagcggtcacattcgagttcccaaacaggcagctgtgattctggactcagcagattcctgtaaggcctccaaaacacaagcacatgcacatcctaggaaaaagggaaaggcagagagctgtggtcatgccactgtatcgagtgannnnnnnnnnnnnnnnnnnnnnnnnnnnnnnnnnnnnnnnnnnnnnnnnnnnntatctaaaatgctgaattgccaagacctgcaggtacctcaatgttagagcgcttccaaaagtcaaaatactgtgaattttaaggaattttacaaatactgacatttaagtagttgactgg

SEQ ID NO: 175692 - DNA, 474 bp, Homo Sapiens
ataatcaccctgtaaatactcttaagtatacatttcaaccactgtttttatttactctttttgctgctcattaaaatctttcatgtaggtgccagaaccatatgtaaacagctttttaaaaaattgaagctggtattttgtttaaacaaaaagccatagaacttggtcatgttttccattttaaaatgatttactgaaacaaagtaatactaataaaaacccacaggcaccaaacaggctgcttaaaatggtctgttaaagacattttttggttatggaatataagaaaagttttgcacatctgtaagggggaaaaacagtatatcaccattgggtagagtggacgggactcatgtaaggactcaatttggggaagagcattcagtggcatgctgttagaggactagtgtccgagaatctcctcacagtatcatgttgcaggaattccccattgctctcgaactttccaaacca

SEQ ID NO: 175693 - DNA, 605 bp, Homo Sapiens
ccgtatatggtctagctgttcctgatgtaactgggattggtaacacctgagaaaaaggagaggtaaataatcgagaaaatgctcctcttgaaacggatatagagatggaaacaagatataagaaggattgagaatcatataatacaggagcttaaacacctatgcgcgatgataaagagggtactattagagcgcttggaaaataccaggaagttgagagagttaacagaagggcgcacgcgggattggccacaaaatcgaattactgaagtaagtgcaaaacgacaaattgtcacagaatacagagaagaggggaaaagaaattaagaggagaaaaagagagatctagagggccggtccaggagatacaatctatgcataataggaatacctgaaactgaggacagagcaagtggagctgaaacaataaaggatctacttgaaaaaattttccagaattgaagaacgaactagatctacaaatggaaaaggctcataggatacctttaaagtttaatgaaaagaaagcagcatctagacatatccgggtgacgtttttgaatttcaaagacgaaacattttacaagcatcagtcagagaaagcg

SEQ ID NO: 175694 - DNA, 603 bp, Homo Sapiens
ggaaaataagaatagggaggcaattgtatgaaagaactgatggtatgcattaaaactagttaaggagcattaagtttaaattgttatgtatagggcattaaaactaaatacaaaaatagaaacataagctgggtgtaaaatttcagtttacgtttaaactggaagggcataccacatgttcaatatattggacaaatactgttttatttttagcatgtagtattgtagatacaaatacgcatgttcttaagctaaacctaagtaaaagggctttgtcactgtagatttgacaaataacattctaaatgtcaaatctgacaattggaaaacagtacagttttatttcccttatttttaagtatagcaggaaaaaaataacaagtttgtccatgttactactgatactgtaaagaaacttccaaatcactgggttggggaggggggtggatacatcctcattttctgtacatgatgcatgggggaaaaacagtagttactgcatcatataattccaagtaaatcatatagttccccagtaaattggacatggaaattaagtggttaccttccaaaattgaaatttttccctttcccatgttttgg

SEQ ID NO: 175695 - DNA, 643 bp, Homo Sapiens
  misc_feature (135)..(150): n is a, c, g, or t
cagtactgacttacccagactgggattaccagataccaggtgatttatgtggagatgatttttcacctttaaactctaagccaagtgtaagaaactcttgatagctatgtctattttatatcagtcactgagacnnnnnnnnnnnnnnnnatttattattaagacaactttgccaaaaaagtcccctaagcacaactatttacatttctttatagcctcttctgatctctaacacatatgcagttttaactgttattttcatagtaactgatcttttgtctaaggatttttacctgaaagcacaatgtatcgagtctcttgaaacatcatctttcagatctttttacagaatgaacttatgcactgctactgtagtattctcaaggaatatatgtaaacacaaatgtatgcctgaggtgggtttaggcagaaaacagtctctgcttctaaaaacttctatgtctagtcttccataggaaatcctcactgtttaaccatgtgaggagcctaagtcattaaacggatcatgtctgtacatggtgtaatgaatgacaagcacataaatgtaatctactttgaactttgtaaaaatgatgtgtggaggctatccttgtatctccatctcaagtcctgtgtgtgccgt

SEQ ID NO: 175696 - DNA, 993 bp, Homo Sapiens
tgttgaatctttaggagccctctcatgtgcgtcaagttcgctgttcaagtatgatgaaccaggccaacgtgtacggccagatcaccgtacgcatgcacacccggcagactctggccatctatgaccggtttggccggttgatgtatggacaggaagatgtacccaaggatgtcctggagtatgttgtattcgaaaagcagttgacaaacccctatggaagctggagaatgcataccaagatcgttcccccatgggcaccccctaagcagcccatccttaagacggtgatgatccctggccctcagctgaaaccagaagaagaatatgaagaggcacaaggagaggcccagaagcctcagctagcctgatgacaaaaatgacttctagggtgaagcctgggtgatgaggctgctggaagctttgaagtctcccattcccctcatgctataaaaagaactacctttgttctctcccatcctgctcaggtcttttcagcagtctcatcatcagcaaccatgactgatgactgggccctagcaggtggcaggtataacatggccatggacactcttcttttttaaattttatgtctagcttctgagtctagatgaaagacagtatgtttcagagaacattggatatcagtttttcccacagcagggactgtgagagacaaccagcagcatcctctttgtaatcacagggcagggatcagagtttgaaatgaaatgttgtcagggtgttggaaaaattttggtgagttctgcacatttcccctggttcaggctgggcatggaccagccttcagatggcagaagtggaagatgagcctacttgtgagcgatgtgactttaaggaaatgaagaattgggggaaaaataatttagtggtttaaaaagaaattttaggagggcccttttttcatataaccggaacccccgggatgaatccagcttttgggcttttttagggaaaaatattaaatcccaaggg

SEQ ID NO: 175697 - DNA, 890 bp, Homo Sapiens
tgaccgactcgataacctacttgcaacttctctgctacatactcttcctcctgcactggccccaccaccttgggatgagctgctcttccccttatcttcttccccctctaaagaggccaggctggggcccttgctgttctccaattccaagacatgctcccgagacaacagagcttcttcaagcacctttttcccccaacacggcatcaccagtcccttcggccccacctgtctctcttgccctctccccagagctacgcttctctgcggggactacggggtagcctggctggaccttccttggcaccctgctgaagggggaatcttgcttacacacctcagctgatttgctggagaatagtacaccctttggggatgaaagggggcactctagaggaatcgatttggcttcaccacctgtcagggctagctccagctttgtactgtcatctctgcgtgttcctggtcgcaatctcatgtctgtggtgttaggaagaatgcccgaggactctgatcttcggcaaggtgggtgtgtctggagcaatgctgggggctctgcaggcagcttgctcacggtggacagttccttttctggaggctctgtgacactggggggtgtggacactactttgggacagacgtcttccacggggagaggttccttgatggcagggtcagccctcagctgcacagcaccagcctccacctgctgctcatcatggctgctgacatggccttttttacgagagaaaaaccaccaccagccgaggagcgccagcatcccaggcaatgccaaggggaagagcgaacggaactggattgccatcctggaggcttgaagtaattacaccagctcctcggctaccatcggggtgcgggatgcggagtcc

SEQ ID NO: 175698 - DNA, 577 bp, Homo Sapiens
gctcgtacccccgcccctcactacctccaccccacacacacctatggtcctagaatccttaagagaagcaccctgtaaccttttatgtggtttgcctttaagaggcccaggtgcttctcctttatgatttgagttggcctcttcataaattagtgctgtttactttcagaggaagcagagaagttgctgttatgtttttgcatccgtttaccctatgcaaagttgctgtatgatgccaactaaactgctctttaggcagccttctgaggagaaaagcaaccctgtttcaaatccactgccaattcagctcctctggagtggagctttctgatttcttggagcaggaattttagagattgaaatgaatgatcatttagtcagatttatcctgtaatttcatgcagctttgtggcctttgcagtactatttataaaatggaccctgatggtgatgaactctttagaacgcattactgttaagcctgtgttgagacattgatgctgtctatctcattttttagacagtttttgtagctttctattgagagtcagtatgtgatgggcgggatcctctagaa

SEQ ID NO: 175699 - DNA, 706 bp, Homo Sapiens
tgttggaaatgtaccttctccgaatgcacctttaaagcgggtattagcctatacaggctgttttagtcgaatgcagaccatcaaggaaattcacgaatatctatcccaaaggctgcgctttaaagaggaagatatgcgcctgtgtgtatacaaacagtgagaactaccttactcttctggatgatgaggatcataaaattggaatatttgaaaatccaggatgaacaacacctggtaattgaagttcggcaacaaagatatgaaattggcctgaggagatgtcttttatagcaaatagtagtaaaatagatagacacaaggttcccacagaaaagggagccacaggtctaagcaatctgggaaacacatgcttcatgaactcaagcatccagttgtgttagtaacacacagccactgacacagtattttatctcagggagacatctttatgaactcaacaggacaaatcccattggtatgaaggggcatatggctaaatgctatggtgatttagtgcaggaactttggagtggaactcagaagaatgttgccccattaaagcttcggtggaccatagcaaaatatgctcccaggtttaatgggtttcagcaacaggactcccaagaacttctggcttttctcttggatggtcttcatgaagatctaatcgagtccatgaaaagccatatgtggactgaagtattga

SEQ ID NO: 175700 - DNA, 696 bp, Homo Sapiens
agccctcacatactcgcgcgcatgtgttgcgccggagaaacggagtggaagactctcagctacctccagcccgtcacataccttaggtgtggatttgtggtcatccagaatatatcccagccagttcacagtgctggagctattacagaacaccagaacagttcctgagggaccagtcctttctgctctgtcacgatgcttgaggatgtgcaccagctcggccaccttatctgctcccttcagtctcagaaatgtctgtttcacatgaggcatgatacagtggagcttggagctggtgatggtggtgacagcatctgggctggcgactttattcagcaactggcctacaccttcgggaaatgtggctcctaccagcactaactgagctttgggattgaaggggtcttccaagtcagctgggccttctgctatgtggctcttctctaagatgtagtccaccagttccaggaagctttcatccagcagtgtgtctgcctcatccaacaccaagaaggagagttgctccagactgatcagtcgacttttcagggccttccacagagcccctggagtggccacaagcacatctgctgaaggctgtctggacagctgcagcctgatcctacgcatgctgtggctccctccaggtcctgaacaagaggccaatgagcggccatggttgggcacagccagact

SEQ ID NO: 175701 - DNA, 578 bp, Homo Sapiens
cagccctcatactacctcgcgcgcatgtgtttgcgccagaaaaacggcagtggcaagactctcagctacctcctgccgctgcttcaacggctcttgggccagccaagcctggactcccttcctatccccgcgccccgaggcctggtccttgttccttcccgagaattggcccaacaggtgcgggctgtggcccaacccttgggccgctccttgggcctgctggtgcgggacctggagggaggccacggaatgcgtaggatcaggctgcagctgtccagacagccttcagcagatgtgcttgtggccactccaggggcttcttgtggaaggccctgaaaagtcgactgatcaagtctggagcaactctccttctgggtgtgggatgaggcagaccacactgctggatgaaagctttcctggaacctggtggactaccatcttagagacagagccacatagcaaaaggccagctgacttggaagaacccttcaatcccaaagctcagttagggctggtaggagccacatttcccgaaggtgtaggcaagttgctgaataaagtcgccagcccagatgctg

SEQ ID NO: 175702 - DNA, 461 bp, Homo Sapiens
ccacacatacctcccacatacctactgaacctgtgcgatacaacgccgtctgcgatccttggagctccacagttccatggtttgggctgcggtacactgggctgtaataggtcctcccctcatatataggagtaatgtgcaagtcgggagacacggcagaacgaaggtcttgcccaagctgactatgctgactagcataggaactccgtaagcctgtcaggctgtctggcctgggtggaaccatcctctcataaatgtcatactgctgctgtccgaattgctccatgtcatgaacagtcctttgcagtgaaggtcccagatgctgtggtacggcggtcatccctgagcgtttgggggacgacgaccccacctggccttgggatggggaagctactcgagtctgtgcatccgtcagggtcagtggggaccccactcctgcggtgttaggtatgtgagggctg

SEQ ID NO: 175703 - DNA, 1068 bp, Homo Sapiens
gaggatcccccagccctcacatacctattattaaaaacattattaaggatgcttccaaaactaaacattgtcatcacagtgagaattttagtggaagttagttgggcatcagtcagcttgtctttgtagtgagtatctgtataataaatagttatccgcttttttctttggtattttaacagaatgcctggtacccagtaaataaagttaagaacctgttaaggaactgcagtgaagatttggttctttacagatggcagcaagtctgagttgaggaagttctgacagatgcaaaatgtacacctgttgcaggtgcacatacagcgtaaccgggcacggggatacatggccatcgtcgtcaatttaacaaagatatccttactgggggcatcagcagtatggcaagtgaagcgcttgtggtgcaggcatttggtgtttcctgcagaaatcagtaggtgaaatactgtattcttgtttaacttcatgcaggtctgactttgcagctacgattaagcaaggtattctgctgtccataaagtgttgcttaaaaatcctggcacagtattcaaaggattcgggattgctgacatcatataccaggcatacaacatcacaaatgacttcagcttcagttagaaattccgattctgagatatcatgcaaccaacaagtatttctcttgtccatatacataaacagtgttaatcgcatagtaggatttatgatcttcacgaatgttcttctgcctcattaagtttcttccaagaagagcctgaagaactccacttttcccacagtttttcactccaattacattacatctgaacacatttctttgagtttgctttttctgcaggtctatctttttatctcttgtcactgtaacagctgaagcttgagactcttgctcagtcaatattgaatagcctagatagcccaaatattccaggcaccgctgtacatctaaataagtcgtgagcgtccactgggaaaggaatccctggtaggttatccagcctctttcattggtacaactgtgttattcacatctgcccccaaggtatgtga

SEQ ID NO: 175704 - DNA, 567 bp, Homo Sapiens
tctagaggatcccggcccatcagagacctccagcaacgtcacacctgtgaaagtttgagtcataaacccccgccccactatcacttctcagtctatttgaccaaatccaaacctatttcctcccacttccaaatcactgcctgccattcaaacccgtgtaggcgaactccagttggcatttggttttgaattaatacatattagtgggtggtaatacatttctaccagtgcatatatttacttgaaatacaattttccatctaatgcattttattcacatcactgcatggtaactgcatccagaataatatctttaatgattattcattactggaataatgtatcggtgccaaacagtagcttttaagtggcttcagatttttttctttaaattgaacatgttattattacacagatagaataatcccattatccctactaactgaagatgacagctttccaggaggctctttgacaaagctgaattcaggtgggaaccaggccttcctctgactagggatggggtggaggtgggaggtgggtaggtagctggtcttggggaaagtg

SEQ ID NO: 175705 - DNA, 597 bp, Homo Sapiens
agaggatccccgagctcgtcaaatacctgaactatacctcacatgcacacgagctttctgctccatctgttcatcccacatgtgtcttcacattcaaagcagcaccttccccaagaccagctacctaaccacctcccacctccaccccatccctagtcagaggaaggcctggttcccacctgaattcagctttgtcaaagagcctcctggaaagctgtcatcttcagttagtagggataatgggattattctatctgtgtaataataacatgttcaatttaaagaaaaaaatctgaagccacttaaaagctactgttgggcaccgatacattattccagtaatgaataatcattaaagatatcattctggcatgcagttaccatgcagtgatgtgaataaaatgcattagatggaccactcgtatctcaagtaaatatatgcactggtagcaaatgtattaccacccactaatatgtattaacttcaaaaccaaatgccaactgcagttcgcctacacgggtctgcctggcaggcagcgatccgcacgcgggagcgacacctcggtctggatacggtcaaatagactgagaaggtga

SEQ ID NO: 175706 - DNA, 767 bp, Homo Sapiens
  misc_feature (75)..(112): n is a, c, g, or t
  misc_feature (268)..(312): n is a, c, g, or t
  misc_feature (322)..(427): n is a, c, g, or t
caccatgcgattgccctgcacaccttggaactctgcagagagtccccagcaggaaggtctcacctgaggtgaacnnnnnnnnnnnnnnnnnnnnnnnnnnnnnnnnnnnnnnggcaaccatcaaatcaagaaattggcccaaagccctacagtctgcaaacatcataacaattcatcctgaagtttctccatgaattgtgatgctttgctacatcattctgcaatcccagaagattttttgcatatttttttgctattacagaaaaannnnnnnnnnnnnnnnnnnnnnnnnnnnnnnnnnnnnnnnnnnnntttactccannnnnnnnnnnnnnnnnnnnnnnnnnnnnnnnnnnnnnnnnnnnnnnnnnnnnnnnnnnnnnnnnnnnnnnnnnnnnnnnnnnnnnnnnnnnnnnnnnnnnnnnnntcattcacagctttcaaaagacacgtctgtccttaccttcactttttgttttaaacagcacactcactttactctgaactatacctcacatgcacacgagctttctgctcccatctgttcatcccacatgtgtcttcacattcaaagcagcaccttccccaagaccagctacctaaccacctcccacctccaccccatcccttaagtcagaaggaaggcctggttcccaccctgaattcagcttttgtcaaaaagcctccctggaaagctgtcatcctccatttagaagggacaatggggattattccaatccgggggaaaaataaacatgcgtcaattt

SEQ ID NO: 175707 - DNA, 608 bp, Homo Sapiens
gtgtgcggagatgaggtctcgggccatggctgaagtggggaccatcgtgggacaaagtgaaagaagtcctccttccaggcacagtggcttccagcagagtttgacctgggatttctgtcatgggtgtccctctgtactcagaatgggttcaggccaagtcggtgaagatggatgttggcaaaataggaggataccctcatttgctgaatgggggacctgctctgagcctgcccaggggccaggcctgctccaggttaaactggacggaaggcccaggtctcagtttctttcaaccaggagaggccgctgcctagagcccctccccaccttttcctggatgggtgaagcaagccaggagaagcaagcagtgttgtcctcacgggaggaggactgagcgactgggaaaactcggctctacatctcacccagaacggcttttagaaacaccacagctggagagtcctggctgagccttgggagtttcagctctttggcggggtgcccaggtgccatgcgatcagcgaagcctgcgagttggcaggactctgaggtttcctgcagaccatgccatgagattgaaggtatgtgagggctcggggatcctctaa

SEQ ID NO: 175708 - DNA, 494 bp, Homo Sapiens
caaaatacctaactgacagccaaagccagcattatgtgtaactctggcaggactaatccccttcgtgctccaccactgttcatgctgatgacaaaaacttatattcccatattagcttttactcagatggcttatggagccagtttcctatctttcttgggtgggatcagatggggttttgctctaccagaaggtagtccagccaaaccagactaccttaatttagctagcagtgcagctcctcttttcttttcatggtttgccttccttatttctgaaacacttagtgaagccatagtcacagtaataatgggtatgggagtagcattccaccttgaactttttctcttaccacattatcccaactggtttaaagccctgaggatagtagtcactttattcgccactttttcatttataatcactttagtagttaaaagtagttttccagaaaaaggacataagagacctggtcaagtataaaaaatataaaa

SEQ ID NO: 175709 - DNA, 1006 bp, Homo Sapiens
  misc_feature (556)..(564): n is a, c, g, or t
  misc_feature (597)..(605): n is a, c, g, or t
gggaaaacgagtttcaatccactttcctgaccccaaccatcctgcccactctccgcttccccctcttgtacacccctaactcctgaggcttcctccgaatcacgcgagtggaaagcggacaagctcaagtggccgccatgtcagaggcttatttcccagtggagtcaggtgccctggggcctgaggagaactttctttctttggacgacatcctgatgtcccacgagaagctgccggcgcgcacggagaccgccatgcctcgccttggcgctttcttcctgcaccgtagcgcacgcgcttacaccgataacgcggccccgcaaggttcccagcttgaactacccttgtggctggcaataggactttttgacaaccagccatggatcctttccgcggaacttcccaggatcttacaagaggcttgaaggactgagatcattgcacatcccaatgcggttggatccccccaaaacgggcgccccacattttaacgcgttttccgctcccattctcccagcctccatgatacgccccctacaatcgtctttccctcttnnnnnnnnntccgcctttgtatcacctatacaccccccgacnnnnnnnnnggccggtctttcttcgaccactgcttttcgccgttaatggcttttacccccccacattagaattcttctcccccccttggtaacctcctcgcgctctacaaaagagacaaatgggaaaaaggcgggcctttcaacctcccgcgcaaagtgtgcacccatacaggcacttgggacactgttattctatatacatggaaccgcttacacgaacaggggggctcaaagcgcctccccttccagaaataccaccacgtattttacccacaactcatatcacccccccaccgataatatttatcccccttttatgccgaaagaaatacccctcccccatgttgagcgccccccgcggtatggaaaaaacccccgaataatactgacctcctgcatacaaccacaca

SEQ ID NO: 175710 - DNA, 399 bp, Homo Sapiens
caaatcagtgcgcagtagtgtgcttgcatgtgcatgacattgttagcagtaatgcagcagaagcatctgccacaaaagcggaagatgactcctttcttcaggtgggtcctgctcctctatccctgtgactgcctttgcctgtggggacatggcaggtccagcgtcggaagtggaagctgaacctgattgcagagttggagtccagagttctggctgagcctgaccctctgccagccgacccaatgaaactgaaacaatctggagtataggccagtgaaggtcagggggtgctttgaccattccaaggagctgtatatgatgccccggaccatggtggaccctgtccgggaggcccgggaggggggcctcatctcctcctcaactcagagggggcctatg

SEQ ID NO: 175711 - DNA, 577 bp, Homo Sapiens
gaccccgcgccacagcccctcgccgcgcgtccaggttcccggccagcagcctccccatacgcaggtcctgctggacgccccgtcgcgccccccactctgaactcaagtcaccgtggagctccgccgccccgaaactttcaccgcgagcgggaaatatgggatgtataaaatcaaaagggaaagacagcttgagtgacgatggagtagatttgaagactcaaccagttccagaatctcagcttttaccgggacagaggtttcaaactaaagatccagaggaacaaggagacatggtggtagccttgtacccctatgatggcatccacccggacgactggtctgtcaaaaaaggagacaagatgaaaagtcctggaggagcatggagaatggtggaaagcaaagtcccttttagacaaaaaaagaaggcttcatccccagcaactatgtggccaaactcaacaccttagaacggtgagttggtttgcaagggtttaaccggaagggctccggatggcaacttttggcaccagagaatgacgctgggcgtgtccgattagagagagtggccattaaaagg

SEQ ID NO: 175712 - DNA, 440 bp, Homo Sapiens
cgacccacgcgtctgagccaccctcgacatcacttgaaacaagttactaaagtggattgtcctgttggcggggttaacattccagaaagtcacattaataagcatttagacagctgtttatcacgcgaagagaagaaggaaagcctcagaagttctgttcacaaaaggaagccgctgcccaaaactgtatataatttgctctctgatcgtgatttaaagaaaaagctaaaagagcatggattatctattcaaggaaataaacaacagctcattaaaaggcaccaagaatttgtacacatgtacaatgcccaatgcgatgctttgcatcctaaatcagctgctgaaatagttcaagaaatcgaaaatatagagaagactaggatgcgtcttgaagctagtaaactcaatgaaagtgtaatggtttttacaaaggaccaagc

SEQ ID NO: 175713 - DNA, 720 bp, Homo Sapiens
ggttcgaccggacaggggcgggccgggcatggtaacggctcggaagctaggaggctgcgccggagggaggcggaggaacggtgttcccgccgccgctcttcagcttattccttgtggcctctgcgggtcctgcctcagccatgatgatccacggcttccagagcagccaccgggatttctgcttcgggccctggaagctgacggcgtccaagacccacatcatgaagtcggcggatgtggagaaattagccgatgaattacatatgccatctctccctgaaatgatgtttggagacaacgttttaagaatccagcatgggtctggctttggaattgagttcaatgctacagatgcgttaagatgtgtaaacaactaccaaggaatgcttaaagtggcctgtgctgaagagtggcaagaaagcaggacggagggtgaacactccaaagaggttattaaaccatatgattggacctatacaacagattataagggaaccttacttggagaatctcttaagttaaaggtggtacctacaacagatcatatagatacagaaaaattgaaagccagagaacagattaagttttttgaagaagttctccttttgaggatgaacttcatgatcatggagtttcaagcctgagtgtgaagattagagtaatgccttctagcttgtctgcgttggggttcttgagaattgatggggtgctttcgatgat

SEQ ID NO: 175714 - DNA, 702 bp, Homo Sapiens
  misc_feature (509)..(509): n is a, c, g, or t
  misc_feature (512)..(513): n is a, c, g, or t
  misc_feature (526)..(526): n is a, c, g, or t
tcgaccgacgagttcttccggggcggaggtcaccatggcagctgccttggctcggcttggtctgcggcctgtcaaacaggttcgggttcagttctgtcccttcgagaaaaacgtggaatcgacgaggaccttcctgcagacggtgagcagtgagaaggtccgctccactaatctcaactgctcagtgattgcggacgtgaggcatgacggctccgagccctgcgtggacgtgctgttcggagacgggcatcgcctgattatgcgcggcgctcatctcaccgctctggaaatgctcaccgccttcgcctcccacatccgggccagggacgcggcgggcagcggggacaagccgggcgctgatactggtcgctgacagcgccaaagagaccaacaagatgattttagcgtggactaggacacttaacctaagaagagtttcacttaatcattcaaatcactatctgaagggtcacggagcgcaaaataaagtttaaaaccctgctaccacntcnnaaattacactcancccttcctttcatgtcggccgcctcggcccctccagaagcctttctagaaccattcgttttggcggcgcggggcccccgtaaggtaaagggaaacatgggccataaacctgtctcccctacggaaaatcccgtggtccatgaaacaacggggctttgggatttccctcaccacaat

SEQ ID NO: 175715 - DNA, 822 bp, Homo Sapiens
ggggtccgaggcgcgcctctcacgccctgcccaacagaagccgcagtcccgtggggtctggagacgtagtttcctgttaatgacaataaatccctgctccccctgcctcagacatctacgcagcgaaatcgagcctggccttgagggtccacaccgcgagggaagatgcgtgcgcccattccagagcctaagcctggagacctgattgagatttttcgccctttctacagacactgggccatctatgttggcgatggatatgtggttcatctggcccctccaagtgaggtcgcaggagctggtgcagccagtgtcatgtccgccctgactgacaaggccatcgtgaagaaggaattgctgtatgatgtggccgggagtgacaagtaccaggtcaacaacaaacatgatgacaagtactcgccgctgccctgcagcaaaatcatccagcgggcggaggagctggtggggcaggaggtgctctacaagctgaccagtgagaactgcgagcactttgtgaatgagctgcgctatggagtcgcccgcagtgaccaggtcagagatgtcatcatcgctgcaagcgttgcaggaatgggcttggcagccatgagccttattggagtcatgttctcaagaaacaagcgacaaaagcaataactgaaaaagactgtcctgtcagcgatgactttatacatcaagggggtcttgttttgctagagagtttggggtttggtttgtggatttcattgtgatttataataaggcttattttcacagaataaaataaagcaaaacgagggaggattttattgggggaagtgcagt

SEQ ID NO: 175716 - DNA, 542 bp, Homo Sapiens
  misc_feature (401)..(410): n is a, c, g, or t
acgaggtaaagatatgtagacattaagctaatacaattcaaatatccaccatcttcagttaccttatctgttacactgtcaaggtttgttcagcaggcacacaggtgcacaaaacacactgtattttctggctagtgtcctttgctatttgatttttgctctagcatagagttttggatgtcttaaaaactaaactctttgtaaacaaacagtatcttcatctctgaagcataaaattacatggtcttgacccagagaaagaggagagacatttaatagacatttctcttccagttaagtaggagtctgatcttctacaaaatagtttatttgtctttttaataaaggttgaaaaaatgtccaccctggattaaaaaatcagttaaccaaggggaacgtannnnnnnnnnaaagagtagttttaaaaagtattaactggtgtccattagacatatttccttatattcagctactagagaaaaaacagttcccagggaatttggggctttctgcttctatatgtggtcatctttaacctcgtg

SEQ ID NO: 175717 - DNA, 861 bp, Homo Sapiens
agaggacccccggcacgagcaaagataagtggggaaggacagcgtttgcatagaggggcagttacaggccatgaagaatgtgtagatgcattacttcaacatggtgctaagtgcttacttcgggatagcaggggccggacgcctatacacctgtctgctgcctgtggacacattggtgttcttggagcccttttgcagtcagcagcatctatggatgcaaatccagccacagcagacaatcatggatatacggcacttcactgggcttgctacaatggtcacgagacatgtgtagaactgcttttagaacaggaagttttccagaaaacggaaggaaatgcttttagtccattgcattgtgccgtgataaatgacaacgaaggtgctgctgagatgttaattgatacattaggtgccagcattgtgaacgccacagattcaaaaggaagaactcctctccatgcagccgccttcacagaccatgtagagtgtttacagctgctggtcagccataatgctcaagtcaattctgtggactctacagggaaaacacctcttatgatggctgcagaaaatggacaaacaaatacagttgagatgctggttagcagtgctagtgcagaactgactttacaagataacagtaaaaatactgccctccatttggcttgtagcaagggtcatgaaactagtgccttgttaatactggaaaagataacagatagaaacctcatcaatgcaaccaacgcaaccttgcaacacctctgcatgttgctgcccgaaatgggctaacaatggtggttcaggaacttttgggaaaagggacaagtgtgcttgcagtagatgaaatggctatacccc

SEQ ID NO: 175718 - DNA, 492 bp, Homo Sapiens
tcgtctagaggtccccggcacgagctaaagatcacgtacttgtcatagtcttcccacacaaacaagtagtaaggtaacccaatgacagccatggggattaatgcaaaagtgaaatactccaaaaatccaaagtacagagcaattgtttccccaaagtagccacgaatactgtctatgggctgatacttcaaagcaaaccgagtgtaccaggtgtcctcaagcttcttcagggcttcactgtcatgcagtggaaacacctgaatcacgatgccagacgtgagcaatcttctcaacaatgattttcctggatacaactttgcctgagggtaaccagggatcattttttcatctttagctctaagattttcaagttcatgtttgataatgaattgacattctgccattgtcaggaaatcatcattgttatcatcaaaacctttgaagttctgtctggttctgtatgtgaggctctcatggtgttatcattgcact

SEQ ID NO: 175719 - DNA, 609 bp, Homo Sapiens
gtgcccaatcccctacaatactacctgatgggtgaagggccccgtagaggaattcgaggcccaccaagccagccattggagagcgccagatccttcaggttccagtctggctaatctctgtcctgtgagaagcttctgcacaagtttccttaccacctcctcttggacctatgcttggccaacagcatgcagtcttccatctgctttctcttcatactgtggattatcttttcctttggttctaaatcttcagtaatcggttgcaagattgttggcttacctgcctgtgccattcttcctctgggccttcatgcttttctgcattgtgttaacatgtttcaagtgcatggccttctacggcttctatgccaagtgtatgatactatagatatagtgtaccatactgcctttctttgcatggcttggaccctatctgtgaccatgctcttctcccaatttaagtggttctgtaccacaaagaatcttgatacattttcacaaataaccgattgggcttcatactttatgctggctgtgtcctgatacccatgtacttatggtaagctatttgggtattaccactgcaagaaaactgaatctttacctcgt

SEQ ID NO: 175720 - DNA, 377 bp, Homo Sapiens
ggggaaggtctggagggatcagcaccggctcctcctccggcaaccacggtgggagcggcggaggaaatggacataaacccgggtgtgaaaagccagggaatgaagcccgcgggagcggggaatctgggattcagaactctgagacgtctcctgggatgtttaactttgacactttctggaagaattttaaatccaagctgggtttcatcaactgggatgccataaacaaggaccagagaagctctcgcatcccgtgacctccagacaaggagccaccagattggatgggagcccccacattccctccttaaaacaccaccctctcatcactaatctcagcccttgcccttgaaataaaccttagctgccccacaaaa

SEQ ID NO: 175721 - DNA, 580 bp, Homo Sapiens
  misc_feature (565)..(565): n is a, c, g, or t
acgaggctaaagatgtgctgcacagagaccgcatgtacgggtctcctgtttttgtgtaggcgtggacagctgaggccagctcacctcctttccttccttggcagtggtccactagggccgcaaggtcttcagtcgtattttgggatcataggtccaaaccaggaggcgccgaagtgttaaactactctcaagtcccaaattcacaccctggtcatcctctagttgtagccgagaatgtaaaacagagagcaatcgatagtattctctgagttcctggtgcaaggcagcacaaaagctctgcccgacgagtccgaatgagcggtccaggctcctctgctccgtgtatcttctgattttattatgcaaccatcccaactcagaaagcctgactgctgtgtctctcaaagacctacttagatttgcctttccttctactttgtaacaattttcagtgttgttcattttgatgtttttgccatctatgccctgaaagacgtacaaaatgtcccttaccagagctgcttctgtaatttccatagtaccacccgtatccccatacctgganctcttgagaaaattg

SEQ ID NO: 175722 - DNA, 634 bp, Homo Sapiens
tggtatagaggatccccggcacgaggctaagatcttgcaaatggcaatttgagaatctaatgatgtaatgatctttttatgtagttgacacgatctccaacttctttaatctgaatgcacatctgttccactctttcaaaagtgacacgaattctctcttcactcccagaatgaaatttgtcatctttttcattgaaatacatttcaacacactgctcttcaaaatcatgaagtttcttttgatcttcttctgttaagaaaagttttggtccatcggaagtcttatctttctttcttctcttacatatgcagcaaaacagagaaactatatggctaagaatgataagtggaggaggcagaactggtttctcatgataagccataataaaatgataacgctggtacttccatacaatattggaaattgccttcacttgtaaatacacattgttgaaaaatgcaataagaagattaaccataatgatatactgtacaaagaggtagactgcttgaagaaatggagtcaaccacgtcccaggaccacagatttgagggataacagaatcatttgcacacacatcaatttcgtatgcataaacttcaccaaaaatcatccagtatgggtgagaactat

SEQ ID NO: 175723 - DNA, 788 bp, Homo Sapiens
  misc_feature (674)..(701): n is a, c, g, or t
  misc_feature (707)..(707): n is a, c, g, or t
  misc_feature (766)..(766): n is a, c, g, or t
ggggggcgggccttccgggacgagggcgcgtgggtgaggaaggtcaggtctaggaactctaactccttgccactcaagaaatgtcctccctttcagaatatgccttccgcatgtctcgtctcagtgcccggctatttggtgaagtcaccaggcctactaattccaagtctatgaaagtggtgaaactgtttagtgaactgcccttggccaagaagaaggagacttatgattggtatccaaatcaccacacttacgctgaactcatgcagacgctccgatttcttggactctacagagatgagcatcaggattttatggatgagcaaaaacgactaaagaagcttcgtggaaaggagaaaccaaagaaaggagaagggaaaagagcagcaaaaaggaaatagtgttggtccctcaagagggagactttcttcctcagtggcggagagaagaaagtgcatttattgtctttccacatattggaggaatgtcatcttcctaaatgaagtttatttggaggaacacagtcatctccttggtgaaatctaatccggttacattgtggctggtttcttgaacacattctaactgtgcaaaattatcttggccttggccgtgtaatgtgaggtttacctgattctctaatgaaataaatacctaagttattgtttgacaannnnnnnnnnnnnnnnnnnnnnnnnnnnctgttnggcgcgcttggccctttaaaaacttttccaaaccttttcttttggccccccggcccccntaagggaagtgaactgggcctt

SEQ ID NO: 175724 - DNA, 854 bp, Homo Sapiens
ggggaatgtggcggcggtagttccaggcgacggcggacggtggtacggtcctggagggcccagtgcgcggggctagccgtggctggagagcttcgaagagccttgaaatgtgaggaggaggaagatagctgttgcagaagtagtggccaaggtatcgttctggacgcgcctgcggcaggagggtcgccgcgtccacttccgccagccccacctccccccggccttcctggagtccctgaaagaggaagaagtaggttttaaggcaaaagatggccaaggaaagatgcctgaaaaagtcctttcaagatagtcttgaagacataaagaagcgaatgaaagagaaaaggaataaaaacttggcagagattggcaaacgcaggtcttttatagctgcaccatgccaaataatcaccaacacttctacactgctgaaaaattaccaagacaacaacaaaatgttagttttagctttggaaatgaaaaatccaaagtgaaagaagcccagatatcatcctacagctgagaaaagaatgttactatctcacatgtcagctatatgcattgaaaaggaaacttacatcaccacaaacagtagaacctgctcagaaccaggaaatattgttcctctggaatggaccccaatagtgatggacgctcccgaaatttattttggaaggatttaccgcaaattcctcttgagaaactggacctcccggacaagggaatcttttccaatagaaaaaccaatccctctattccttccgaaccccctgggaggtggtttttgattcaggggaaactaaggcccccgtggaaagggcctaccctaaaactggatctggttcctaaccaaa

SEQ ID NO: 175725 - DNA, 896 bp, Homo Sapiens
  misc_feature (724)..(784): n is a, c, g, or t
  misc_feature (792)..(843): n is a, c, g, or t
ggggtcctgtcaagagaatattctatggcaatggctcactctgtttgtgtactcttacagatcctctcctgaagcaacagaaagaggtgtagattgaatttaaacgatatcccacgaaaccttcattgtatttgtttcatactttttttagaacgtctcaaatcctttttctgcttgaaaataggagaattcaaaacacacgaatctgtaaaagggtcccctcttctcagtttcgaagcgagggtgggctccttatagttcacgctggctgtgcacctacgtttaggcagagccactgctgggcttgctttattcttttttggagaaagagaaagtcttctgattttcacaacaggatacaaggagacattggtgatatccttcaggctaagatgaggtgactgctgagtttcaggtggtgtagtggtaggagtttttgttggcttagaaccctccgtctcttcttcatctgtgtatttcagtgctcttttagctagaggcctggtgactggtctatctgaattgctcgtgggattctgaatgtacttgcaagtgggcaaatagaggtcatcggaatcatctcctgaaccacttgattcacagaggctcacttcagactcgttgttttcttctctattagagtcattgctcactttttgtcggaaaggagtaagatgaacaccctcttccaaattaaaattgtaagcatcattggaactgacannnnnnnnnnnnnnnnnnnnnnnnnnnnnnnnnnnnnnnnnnnnnnnnnnnnnnnnnnnnncgacatannnnnnnnnnnnnnnnnnnnnnnnnnnnnnnnnnnnnnnnnnnnnnnnnnnngtgtatctcttagcttacttttagtttgttcagatttagattctaaaatgtct

SEQ ID NO: 175726 - DNA, 837 bp, Homo Sapiens
  misc_feature (442)..(451): n is a, c, g, or t
  misc_feature (606)..(614): n is a, c, g, or t
  misc_feature (678)..(686): n is a, c, g, or t
  misc_feature (739)..(739): n is a, c, g, or t
  misc_feature (751)..(765): n is a, c, g, or t
gggccacggggactgaagatggcgccgcgaggtaaacggttgtcctccaccccgctggaaatcctgctctttctgaacgggtggtataatgctaccctatttcctgctggaacttttcatatttctgtaataaaggtgtcctgctaccatatccaacagctaaaccctagtactggatgtgggtgatgcctcctcctttatcttgggaattgagtaattccccctgttttttgggaccaaggggaaaccctctgccaagcgaaaaaaggccactcaagtaataaccgggggcctttgaacctttcccatcctggccatgagtggccctccctaatttacctgggtgggttggaagaacccatacggtaacctccccgcccctggtgaaaaccccatccttgggaaaaggggcgcattctcctgggctccctcccctctcccnnnnnnnnnncgtcccagaaacagctgttttttaaaactttgtgagagagggggggcctcaccccctttgtgggcggcgggggtcttttttcttctcccccccctaaatagcgggacacaaccccgcaaattcttttgtgacaagcgtgtcccccgccagaagannnnnnnnnctgtcggccgtccagggacagaagaagcccgcccattttcaatgcggcgggtttggtgaaaaannnnnnnnngcatacaattttattttggggcggccactctctcggggcggaaacaccttctngtcggacgccgnnnnnnnnnnnnnnngcactggggcgaagaaaaaattagtcgggaggggggggagggcacacaagacattgttatcccctcctcccc

SEQ ID NO: 175727 - DNA, 1042 bp, Homo Sapiens
ctcgtcactctggagcccttctccacagcctcggtgcttcaaggccctctgtggcttccccctcggtgccctcatcattgtctgagtcgctgttgtccgagcagtccgtgcgggtggctttgctatctggctcatcaggactgccgccctgctttctcttcttcttcttggttcggaagtcggctgtggtccaggtcttccaggtccgcctcatctgcttcatgccattgccaaacccgaaaccaaagcgggagccgcccgggaaggcgcccccacctcgcatgccctggaacatgccgtactcggggatgatgtactgggagaagagggagggcagccgagaggcaccagacatgcactggccccgggccccccatggggtcttcccacatgcgcccatagcctgaggccattggccggccgctccgggcatcccgggcccagccctgtgccctgggaccgaaggtgtcgttgccacgcatgcggaactggtcgcggtaggcatcgtattggccctcataggccatttccatctcagggtcaagctcgctgtagtcatagcctgaccggtacaggtcgcgctcactcaggacggccctcgagtcgcaggactcataagagtcatacctttctccacctgagccgtacacgcctccttgcatcatgtctgtctccaaatgcggcaccatatctaagcgctggttaattctggataaaacggaatcggcactggcgctacccgaggcactagtgtttgcatttgtgtcagagctaggcatttcccaagagtgtgaagtggccataccatacccatagttggtggtgttatcctggccatagccatagccatagccatagccctcgtagcctctatttgtcccagagttccaagttccatatccataatcacaggtgggctgagcgctggtatccgagtatgtcgactgcaaagtggtttcagatccctggacaaagcctgtgtagctcatggtggcgggcaacacaacatccgacgacgccggcttctgctgctctgaacatc

SEQ ID NO: 175728 - DNA, 647 bp, Homo Sapiens
tcccccagaccctcacatacctgtcagataagagaccaaactatggggaaatccctgtccaagagcatctgttaagaaacatcttcacccagccggcctgcttccctgccaagagtgcctgcgatggaaagtgccaagaccctctcagtgtctcggacgaagtagtgaagaaatgaaacgggacatttctgcacaggagggagcgtcgccagcctctctgatggctatgggaaccacgtctccacagctttccctgtcctcttctccaacggcatctgtgactcccaccacccgaagccgaataagagaagaaaggaaagaccctctctcagcattggccagagaatatggaggatcaaagaggaaccccttgctgaagtggtgtcagaagaaaacagaaggctatcagaatattgacattacaaacttcaccagcagctggaatgatgggctggccttctgtgccctcctgcatacatatctccctgcccacattccatatcaagaactgaacagccaggataagagaaggaacttcatgctggctttccaggcagctgaaagtgtcggcatcaatccacactggacattaatgaaatggtacggactgaacgacccgactgcgaacgtgatgcattatgtgagcg

SEQ ID NO: 175729 - DNA, 944 bp, Homo Sapiens
tatcctttcgtactaatgccttgaaagaatgtacaaatttaaattcccagaccacagaatttccacagcaagatacacttattttaattaaccatagcacagatatagcatagggcagtgggttttttagttaatttatggcgtactttgtttatccattggccaacctgaaggaaatgaaactcacctatctttctatcacagatgaatgtgctagatgaatgatttgggttgtatctgatcatggttcaccaaaattatgttagtgtgttttcagtatgctaaaaagtcagagtgatacaaaagtgatatttaaaaatatacacacatgtatgtacacatgcttcagaaatattgttgcttagggtgatttgggcagctaaatagtaagtactttttaaaatttttgcatcatcatcttcctatttaatgaattgtgatttaaaacaaaatgaaaataagccaggtattctaaaagatcctggatacaaattaagaattttgctttattttaaaccaaattgagattaaattgaagaaaaagcaagcaaattaatttcagcttgattatcaacctgtatcaagaacaaaaatgggaggaggtgtccacatttatggtgtgtataggtaacatggggaaaatgctattctgtgttttggaaaagaagaaatagtgccgtcctatttatttctatatttagaaatctttctcaaagaaatttcaattgtatctatgagatgggtttctaagtatcttattgtgtgttataagtgccttttaatatcatactaagtgtgagcttctggacattttcaagagcttacaaaaactaagtggcattgtatttttataaccccattgagaagactaagtaagaaatgaaatgtcctatcaattttattttgtcatgcttcaaacaataaagacatttctgctttaaaag

SEQ ID NO: 175730 - DNA, 756 bp, Homo Sapiens; identical to SEQ ID NO: 4208
  misc_feature (598)..(615): n is a, c, g, or t

SEQ ID NO: 175731 - DNA, 796 bp, Homo Sapiens
  misc_feature (763)..(763): n is a, c, g, or t
cagaccctcacatacctgcagatatggaaatgcagaaggggagcctgtggtacctgaacgacagattagaataagtgagaaacctggtgctccagaagataaccaagaagaggaggatgaaggcttgggagttgatctctctttcattggctctcatgcttttgctcgaatggaaggagatattgacaagcaaagaaaactgatccttcagggacaattatcagaggcagctctgcagaagcagcatcaaagaaattataatcgctggttatgtcaagcaagatctgaggatctgtctgatattgcttctctaaaagccttataccaaacaggtgttgataactgtggtcgaacagtgatggtggtagttggaagaaacattcctgtaacattaatagatatggacaaggctctcttatatttcattcatgtaatggatcacattgctgtgaaggagtatgtattagtgtattttcacaccctgaccagcgaatacaatcacctggactccgacttcctgaagaaactctacgatgttgttgatgtcaagtacaagaggaatttgaaggctgtttattttgtacatcccacatttcgttcaaaggtgtcaacatggttttttaccaccttttctgtctcaggactgaaggacaaaatccaccatgtggaccagcctccaccagctgttttctgccatatcaccagaacagattgactttcctccttttggtccttggaatatggatgccaggggaaaacgggnccttactatacatcatatcccccattcaccaga

SEQ ID NO: 175732 - DNA, 605 bp, Homo Sapiens
ccagccctcacatacctgcagtctggtgcaccccaacccaccgtctgtgctgtttggagctgacaagggacacagaggtggcagcaccctggacggagggagacagtgaagcagtgtctgtacctctacctggccctcctgcctcagaaccacaagctgatccacgaactggcggccgtgtacactgaagccatcgccgacatcaagcggacggtgctgagggtcattgagcagccgatccgaggaatgggcatgaactccccggagctgcttcctgctgctggaaaattgtcccaagggagcagagacactggtcacgagatgtctgcacagcctcacagacaaagtcccaccctccccagagctggtgaagcgggtccgggatctctaccacaagcgactgccagacgtccgcttcctcatcccggtgctcaatgggctggagaagaaagaggtgatccaggccctgcctaaactcatcaaactcaaacccatcgtgggtgaaggaagtcttcaaccgactgctgggcacccagcatggtgagggaaaactcagccttgttcccgctgaaacctggagagctcctgatcgcattacaccacat

SEQ ID NO: 175733 - DNA, 655 bp, Homo Sapiens
ggatctagaggaccccccgagcccctcaaatacctctcctccagcacattccagctctatttaaaaagtaaagacacccaccgactcctgatccccctctttttctatggagaacgtgccttatactctacttcagatgatgaacactgtgtactgtgtgcgctttaaagaagttttatttaattgctcccttcttcctttccttgttattcacctccctgatgcctgctttcagttgagggttgggggcaatgatgagcatatgaattttttctcactctagcaattcccttttctaaatgacacagcatttaaactcaaatctggattcagataacagcacctgcacatcctgcacctcctccctctcccttcacctcacccctgcccggcccaagctctacttgtgtacagtgtatattgtataatagacaattgtgtctactacatgtttaaaaacacattgcttgttatttttgaggcttttaaattaaacaaaaatccaactttatttttagttgtaactgcttgaggtatgttttatgaattaagtgacagatttgttatcctttattaacgtactttgttggtcagcactgggctgacaaaaattttttcttgctaataaatttagttgcctgaggcaaaatcttca

SEQ ID NO: 175734 - DNA, 662 bp, Homo Sapiens
gctcatcacatacctcagccctcacccatagatggaaacttagatgttttcataattacaaacaaatgccgcagtcaacacgtgtgcacattcatgcgcatgcccatggcgtggaactgtggggtcaaggatgggcacatcttcagttctactcagaatgcccctttgcattccagtgtggtgggattgatgcccatgctccctggcagtattggagaattcccactgctccacatcctcaccagattaccagattttctgttgtcagactttttaatttttgccaatctcatggatgtgttgcgccatggtaaaaccaaggcctaacaagggccaagaggccttaggccaacaaccatctggcttgccaacaaattccaaccccaataccacccaactgtacaccttcctacacttaggtcctattcccttcctggactcaccgcgtttctgccaccctggcctcgatgttccattgtatgtaccaggcactcatgcccttaaaactttaacacgtggcttgttccctcttccacaaatggctgtaacccaggtacagtcattgtctctccttgcttcctacaagtctctgtgcacatgtcaccttctcagtgacacctattggggccactttatcacaagtgtcccaatcctgccctgga

SEQ ID NO: 175735 - DNA, 299 bp, Homo Sapiens
  misc_feature (128)..(157): n is a, c, g, or t
  misc_feature (168)..(180): n is a, c, g, or t
aattagttatcctgcaatctgttgcctggagtgcagtggtgcaatcatagctcactgcggccttgaaattcctgggcaaagtgattttcccacctcagcctcccaagtagctgggaccaaggtgtggnnnnnnnnnnnnnnnnnnnnnnnnnnnnnntaaagattacnnnnnnnnnnnnngtgtaagacggggtctggctgtttggcgcggggtgggtcttgcccttctgggcctcaagcgattctccaacttaagcctcctaaaatgccgggattatagcaatgagcaacaaagcttg

SEQ ID NO: 175736 - DNA, 385 bp, Homo Sapiens
  misc_feature (198)..(235): n is a, c, g, or t
gaagcagacacctctcactcccgacaggacatgctggagatctggcctcggccaccagaaacgcttagcacgtcaccaaagacactccctgctccggaagcctcaggacaagaagaagcaagcatctcctcatctccaggatgtgaggctggaggggaatccaggggcccccgatcctgcatccaggcagcctctgannnnnnnnnnnnnnnnnnnnnnnnnnnnnnnnnnnnnngtgggtgccatgtttctcctgcccgcgtcaggaggcccctgctgctctcatgcccgaatacccaggacaccctacctggtgctcagctatgtcaatggtcttcccccagtctgatgtttgtaataaatggtcactgtcaaaggatgtgtg

SEQ ID NO: 175737 - DNA, 984 bp, Homo Sapiens
  misc_feature (632)..(688): n is a, c, g, or t
  misc_feature (691)..(719): n is a, c, g, or t
ggggccgctagggggcgcggcggggcggagcgcacctttccgcgggccgcggggatggcggcgcagggcgtagggcctgggccggggtcggcggcgcccccggggctggaggcggcccggcagaagctggcgctgcggcggaagaaggtgctgagcaccgaggagatggagctgtacgagctggcgcaggcggcgggcggcgctatcgaccccgacgtgttcaagatcctggtggacctgctgaagctgaacgtggcccccctcgccgtcttccagatgctcaagtccatgtgtgccgggcagaggctagcgagcgagccccaggaccctgcggccgtgtctctgcccacgtcgagcgtgcccgagacccgagggagagacaaaggcagcgctgccctcgggggagtattggccctggcggaacgcagcaaccacgaaggatccagccagaggatgccacgccagcccagcgctaccaggctgcccaaggggggcgggcctgggaagagccctacacagggcagcacctaggatggggcagagacttgtcacatctttgtccccagcaaaggctacatgttacctccttcagttgataataaacctttctgagatgcaaaaggtccaagtcnnnnnnnnnnnnnnnnnnnnnnnnnnnnnnnnnnnnnnnnnnnnnnnnnnnnnnnnngcnnnnnnnnnnnnnnnnnnnnnnnnnnnnnccttgttcggccgcccctcggcccctcgaagaagcttctctaaaccattcgttttgggcgcgcgggcccccgttaggtaaagggaacatgggccatagctggtttcccaagggaaaaccctgggccatgaattaaggggcttgggattccccccccaataaaaaaacgccccggggggaaaacgaaggggttcgtgaacaaattccaaaatgggggtttcgggagggccatttaactgggttcctactcaaccgggaggtcccag

SEQ ID NO: 175738 - DNA, 794 bp, Homo Sapiens
  misc_feature (642)..(643): n is a, c, g, or t
  misc_feature (652)..(652): n is a, c, g, or t
  misc_feature (656)..(656): n is a, c, g, or t
  misc_feature (712)..(712): n is a, c, g, or t
  misc_feature (729)..(729): n is a, c, g, or t
  misc_feature (749)..(749): n is a, c, g, or t
gggagtgtcagctcgcgagccctggcgtcgcgtaggagggaggatggagagcggcgacgaagcggccatcgagaggcaccgcgtccacttgcgctccgccacattgcgcgacgccgtacccgccacactgcatctgctgccctgcgaggttgcggtggacgggcccgccccggtggggcgcttcttcacgcccgccatccgccagggccccgagggactcgaagtgtcgtttcggggccgctgtctacggggagaggaggtggcggtgccgcctggcctcgtgggatacgtgatggtgacagaagagaagaaggtgtcgatggggaagccagaccccttgcgggattccgggactgacgaccaagaggaggagccgctggagcgggacttcgaccgcttcattggagccactgccaacttcagccgcttcaccctgtggggtctggagaccatccctggcccggatgccaaagtgcgtggggccttaacttggcccagccttgcggcagcgattcacgcacaggtgcccgaggactgagaaccagagctttgaaattcaaagctgcgatcccttcacagcagtaaaccagctctttggaaccgattccatcaccccaataaaaggagctccttcacggcaannaaaaagaangagnaagacgagcggcgggcgggggacgaccgggcggcgagggcaaaggggcgacgggcnacgggccgggggaaaanacgggggaggagagcgcganggggaaaatgtgggggcgccctcgggcccccgaaaaagtttttta

SEQ ID NO: 175739 - DNA, 692 bp, Homo Sapiens
gcctgagttaccagcgatcccagaggagacttcccttttttggatatcgtcgacccacgcgctcgcttcttaggaaaattaaatccagaccctcacttccaggtttccagaagttgccatcatcacccctggggtgcagaaaaagtctactgggctcaactgcaattgaggctccttcatctacatgtgttgctcgtgccatcacgagggatggcacgagggaccatcagttccctgcaaaaagacccaggctatcagaaccctctagggctccggacgccagggcaattccctgggtgcctcagatggggtggacaacaccgtcagaccgggagaccagggcagctcttcacagcccaactcagaagagagaggagagaacacgtcttacaggatggaagagaaaagtgatttcatgctagaaaaattggaaactaaaagtgtgtagctaggttatttcggagtgttatttatcttcccacttgctctctgtttgtatttttgttttgtttttgattcttgagactgtgaggacttggttgacttctctgcccttaaagtaaatattagtgaaattggttccatcagagataacctcgagttcttggtgtagaaattatgtgaataaagttgctcaattagaatttttagggttctctttgataggcctgtttttctgatatgtgtttcta

SEQ ID NO: 175740 - DNA, 429 bp, Homo Sapiens
catagaagaattcagctagtaactgatggagttgaggcttgaacccaagcaacaaaatagttccagggctacgtttttaaccgtccttccactatgctgtactgcctcttcataactgtttgggttttttcccctctttaaggcatcgttggcttcacagtatgactgatgatcctccaacaacaaaaccacttactgctcgtaaattcatttggacgaaccataaattcaacgtgactggcaccccagaacaatatgtaccttattctaccactagaaagaagattcaggagtggatcccaccttcaacaccttacaagtaaagacaatgaagaacagttgaaacatgcaaaatatggagcttttcatgtaattactcttttactgtttaccattcactataattcacaattaaaattgtgtgactaa

SEQ ID NO: 175741 - DNA, 507 bp, Homo Sapiens; identical to SEQ ID NO: 70952
  misc_feature (477)..(477): n is a, c, g, or t

SEQ ID NO: 175742 - DNA, 768 bp, Homo Sapiens
  misc_feature (580)..(581): n is a, c, g, or t
  misc_feature (586)..(586): n is a, c, g, or t
  misc_feature (588)..(589): n is a, c, g, or t
  misc_feature (595)..(596): n is a, c, g, or t
ggggcacccgggaggcggggccagcgaggcaagatggagttagtgcaggtcctgaaacgcgggctgcagcagatcaccggccacggcggtctccgaggctatctacgggtttttttcaggacaaatgatgcgaaggttggtacattagtgggggaagacaaatatggaaacaaatactatgaagacaacaagcaattttttggccgtcaccgatgggttgtatatactactgaaatgaatggcaaaaacacattctgggatgtggatggaagcatggtgcctcctgaatggcatcgttggcttcacagtatgactgatgatcctccaacaacaaaaccacttactgctcgtaaattcatttggacgaaccataaattcaacgtgactggcaccccagaacaatatgtaccttattctaccactagaaagaagattcaggagtggatcccaccttcaacaccttacaagtaaagacaatgaagaacagttgaaacatgcaaaatatggagcttttcatgtaattactcttttactgtttaccattcactataattcacaattaaaattgtgtgactaaccnnccccncnncccccnnaaacaaacactgtcggccgccttcggccctcgaaaaagctttctaaaaccattcctttgggcgcccgggccccagaagggtaagggaacacgggccataacctgtttcccaaaggaaaaccctggccattgaactagggcctgtggattctcccccaattaaaaaaccgccc

SEQ ID NO: 175743 - DNA, 444 bp, Homo Sapiens
taccagttattacccaagatggagcagattggaccagtatcatcttcaagatttggtcactattatgatgcatcaaaaagaatgccacaagaactaattgaggcttcaaattggcatggattttttcttccagagaaaatatcttcaactctcaaagtagaaccctgttctttgacccctggctacacaaagctgcttcagtttatccagaacatcatttatgaggaaggatttgatggatccaatcctcagaaaaaacagagaaacattttaagaataggaattcagaatcttggctcacctttatggggagacgatattttctgtgcagaaaatggtggcacagtcacagccgtaccaagttcctctatgttctccgtggtcttctgagacctatctttagctgcataccggggtcctctagaacagctacgccccatccga

SEQ ID NO: 175744 - DNA, 129 bp, Homo Sapiens
catctgctaaagaggatcctgccaacattttacaggaacttccagcaccattacttgatgataaatgtaaaaaggaatttgatgaagatgtatacaatcataaaacaccagaatctaatattaagatga

SEQ ID NO: 175745 - DNA, 708 bp, Homo Sapiens
  misc_feature (50)..(78): n is a, c, g, or t
acgaggcaaaagattgacaaaaatgcacacttagaacatgcggttatttnnnnnnnnnnnnnnnnnnnnnnnnnnnnncaccacacgattctgtagaaccaatggttatgtcaccaccagtgagagcaccaagcaaggcaccatgggaaagacaacatacttggaagtctctataaataaagtaaatgctaatctggtcgaaaaatcggtgtctttggtaaaaattctatgaggatgacatattccatcatgttattcgtttcacatttccttttgctcagtctccaaagcaagcacagcttgtggtataacctattgttttcccattctaataacttctcaatcgatcttcgtgttcttttactgaggcaaataactggccacatactgcaacctaatgtgcagcagcaacaaaggcagccacaaagtagcccacgtacattaacaggaaggttcttcttaagacaactgttaactctgttgatgctggctttaaattcttcaggagctacttttccagttaatgaagaagggaattcagattcaaatttgttgctcagtccaaatacggtgacgtgaccggagccgcggacgaccaccgggtccggcgagtacttgagcagctgctcctccagggcccgctcctcgtcctcctcttcctcatagatttcgtcgaatccgccatctttagcctcgtccgggatcctc

SEQ ID NO: 175746 - DNA, 529 bp, Homo Sapiens
  misc_feature (427)..(427): n is a, c, g, or t
agatcgggtcgaccacgcgtcgcgacatggcctggagcaatgtaccagccttctggccgggctcatgcttgttaccggctccatcaacacgctctcggcaaaatgggcggacaatttcatggccgagggctgtggagggagcaaggagcacagcttccagcatcccttcctccagctctgaacatggccagtgcctccagcttccagatgctgcggggtgcagtgatcatattcactggcctgttctcggtggccttcctgggccggaggctggtgctgaagccagtggctgggcatcatagccaccatcgcggggctggtggtcggggggccctggttgacctcctgagcaaagcacgacagtaagcaaaagctcagagaagtgatcacaggcgacctgttgaatcatcatggcccagatcatcgnttgcatccagatggtgctagaggagaagtccgtctacaaacacaatgtgcacccactgcgggcagttggcactggaggcctctttggctttgtgatcctctc

SEQ ID NO: 175747 - DNA, 1120 bp, Homo Sapiens
gaggaattgggtagaaactctccagacccacgcctccaatggcaggatgcatgcctttcccacctgagaggggaccctgtccatgtgcagcctcatcagagcctcaccctgggaggatgccgtggcgtctcctcccaggatgccagatctagtgtgagtgtgactgaaaatgcctcatcacttaagcaccaaagccagtgatcagcagctcttctgttcctgtgtcttctgtttttttctggtgaatcgttgcttgctgtggacttggtggaggactcaggggaggaaaggctgggccccgagtacaacggatgccttgggtgctgcctccgaagagactctgccgcagcttttcttctttttcctcatgccccggttaacagtctttcttcagaattgtcaggctgggcaggtcaacttgtgttcctttcccctcacctgcttgcctccttaacgcctgcacgtgtgtgtagaggacaaaagaaagtgaagtcagcacatccgcttctgcccagatggtcggggccccgggcaacagattgaagagagatcatgtgaagggcagttggtcaggcaggcctcctggtttcgccactggccctgatttgaactcctgccacttgggagagctcggggtggtccctggttttccctcctggagaatgaggcgcagaggcctcgcctcctgaaggacgcagtgtggatgccactggcctagtgtcctggcctcacagcttccttgcaaggctgtcacaaggaaaagcagccggctggcaccctgagcatatgccctcttggggctccctcatccagcccgtcgcagctttgacatcttggtgtactcatgtcgcttctccttgtgttaccccctcccagtattaccatttgcccctcacctgcccttggtgagccttttagtgcaagacagatggggctgttttcccccacctctgagtagttggaggtcacatacacagctctttttttattgcccttttctgcctctgaatgttcatctctcgtcctcctttgtgcaggcgaggaaggggtgccctcaggggccgacactagtatgatgcagtgtccagtgtgaacagcagaaattaaacatgttgcaacc

SEQ ID NO: 175748 - DNA, 625 bp, Homo Sapiens
tgaaatatcatgtttatttggtggggatggtacagccagagtctaatgctattcctgaaggttacttctcagattagggaacctggaaatttgaaccgctaccagcccagccctggggcaagaactggaagggtttataggccccctcgaataaaggcaatggcacttgatcctcaacaccagacatctaaggtacaactgaaaatgactcattttggacagaaagggtttagagtaaagagctggactaaccaggagagaagtctagttggttccctacaggtgcactggaaacactgccagcagggaccttctgggatctggggagcactgctgccaattattaacagcagtcagggccagtaaagacctatcctgcctaaacaccactgcatccctggtaatctatctatgacccactgtctagttggtactgatgtcctgccaaaaagctcaaccaacagtagactagattctcagaaacgagaagagtctgaaggtatgcacccgatgccagttgctgcctgagtctcgcgttttagtgaatcatgcagatgcagttaattatgggtagccatcgctctgatccttgtggtgtgttgagtgttaaaacaccagattatct

SEQ ID NO: 175749 - DNA, 693 bp, Homo Sapiens
  misc_feature (612)..(612): n is a, c, g, or t
gaataagggtgatctttatttggatggcaaagtatagatatgaaccaggtttggaaatacaagttgtaacagttcagagatggcaccaggaacttccagaaaggaccatgacagcataccttcatcgttttggtgaggtgggtgggattatacaaagccttccccacctcctaccttctcggtagcaattggcaggtaatcagttaccaagaacagtcagctccaatgttccctgttccttctcagccttttgctttgctaataccttctccagactgtcctctgctgcactgacccctgcatggagtagcaccagaagaatggcaggagttagagaaatgtcttgacacaagggaaaagtgaagtctccacgctgtgggcctggggccatgggggtgagggaccaggaaagctacaggcatggaagccccaacctcttctgagacttggcagggagaggacacggggagacactgatatctgttacactttgacatcagcaccttgggctttcaaaacacaaatggtagacaaaatcgcctaggcaagactgaagtccaactcatagagtggctctgaccaagttaacccctacatcctgaccatacagantcccgcagtggcactctgaccacggaagatctgcagaaatgtagacagacaataaattactacagatgggtcacagaaccc

SEQ ID NO: 175750 - DNA, 304 bp, Homo Sapiens
ctcttccactgcatttcggcttcatacaagcacatgatgtcctcctccttgcactcagtgatgtctggcacgcggcggtactgccggtggtagtaataatacctgttctttgcgtgctgccgctctataaattctctcacgagggtcacgggtcggtccacgatgaggtcgaacgctttcatcatgtagacgatgggattgggctgcaccagcgtctgcgcgggggctcagggtacacatccttgtcccagctgtcccgcatgcagccgcggccggactccgctccgacagcgtgggtcgaccc

SEQ ID NO: 175751 - DNA, 410 bp, Homo Sapiens
  misc_feature (27)..(27): n is a, c, g, or t
  misc_feature (34)..(34): n is a, c, g, or t
  misc_feature (79)..(79): n is a, c, g, or t
  misc_feature (86)..(86): n is a, c, g, or t
ggaaactgttatcagggaagtggaganagttcancccaggttgccaaggccctacccgggaacgctgtgcgtgccccancccaccncccaaaccccccaaccatcctcctgaagccgggggcccagaacccattgcaaatcttccctcccctcccttgtgctcacttgactttgccccctttgcatgtagcagaggcctcggttcccagcttgtttccattgcttccccagatcaggacctgggggcctacagttctgccaggaagtgcctggccaaacagaggcagaggatgctgcaagagagaaaagctgcaaaagaggccgccgctgccacctcctgaggcagctgtgggtgcccctgctgtgtggctctgtatgactgttgctgaaatataaagccctgcaacctg

SEQ ID NO: 175752 - DNA, 897 bp, Homo Sapiens
  misc_feature (701)..(701): n is a, c, g, or t
  misc_feature (706)..(706): n is a, c, g, or t
gcagcgccctcggcgtctctgtagcgggcgacctaggccgcgggacccggacggaggtagaggccagggcagcgcgtccgggagcggagtccgcgcccgccgccgccatgccggacagctgggacaaggatgtgtaccctgagcccccgcgccgcacgccggtgcagcccaatcccatcgtctacatgatgaaagcgttcgacctcatcgtggaccgacccgtgaccctcgtgagagaatttatagagcggcagcacgcaaagaacaggtattactactaccaccggcagtaccgccgcgtgccagacatcactgagtgcaaggaggaggacatcatgtgcatgtatgaagccgaaatgcagtggaagagggactacaaagtcgaccaagaaattatcaacattatgcaggatcggctcaaagcctgtcagcagagggaaggacagaactaccagcagaactgtatcaaggaagtggagcagttcacccaggtggccaaggcctaccaggaccgctatcaggacctgggggcctacagttctgccaggaagtgcctggccaaacagaggcagaggatgctgcaagagagaaaagctgcaaaagaggccgccgctgccacctcctgaggcagctgtgggtgcccctgctgtgtggctctgtatgactgttgctgaaatataaagccctggcaacccaaaagnaaganattgacccaaagaggagggccctggtcgggccgccctcggccctccgaaaaccttttcaaaaccctttctcttgggggccgggggcccccattaagggaaaggggaacactgggcccctagcctgggtcccccaaggagaaccccgggggccatggaccaaggggcttggggattctcccccccaataaaa

SEQ ID NO: 175753 - DNA, 774 bp, Homo Sapiens
gggagggcgggtggagtcgcggagtagtcctcatggccgccccgccggagcccggtgagcccgaggagaggaagtcccttaagctcctaggatttttagatgttgaaaatactccctgcgcccggcattcaatattgtatggttcattaggatctgttgtggctggctttggacattttttgttcactagtagaattagaagatcatgtgatgttggagtaggagggtttatcttggtgactttgggatgctggtttcattgtaggtataattatgcaaagcaaagaatccaggaaagaattgccagagaagaaattaaaaagaagatattatatgaaggtacccacctcgatcctgaaagaaaacacaacggcagcagcagcaattgaacaatcttgagcatagaagtcaatgtaaacgaagttaagatcaaccacataaaacatttcatgtgcaataagctctcaatcaagtaaataaagtttaagttgtagtcatttttttcccacacttgtgtggaatgaaaacttgccagtttattctggccctgtgtctactgccaggatagcattcttacgtgttacatatagtggacttgtcatccttaaaatgtgaacagaatttattggcagtgtggcaaagaattataaaacatagtgtttaatgtacttggagtttccttgtagtagtaagtatagagtttgatgataagtaaacgtcccttaacaaaaacctcaaccttattactatcccattaaaaaacagcaaatactc

SEQ ID NO: 175754 - DNA, 421 bp, Homo Sapiens
  misc_feature (337)..(337): n is a, c, g, or t
  misc_feature (369)..(369): n is a, c, g, or t
  misc_feature (377)..(377): n is a, c, g, or t
  misc_feature (387)..(387): n is a, c, g, or t
  misc_feature (403)..(403): n is a, c, g, or t
aaggcgcacaaccaggacctggggctggcgggctcctgcctggcgcggttcagcaccatgcccttcctgtactgcaaccctggtgatgtctgctactatgccagccggaacgacaagtcctactggctctctaccactgcgccgctgcccatgatgcccgtgcacgaggacgagatcaagccctacatcagccgctgttctgtgtgtgaggccccggccatcgccatcgcggtccacagtcaggatgtctccatcccacactgcccagctgggtggcggagtttgtggatcggatattccttcctcatgcacacggcgggcgggagacgaaaggcgntggccaattcactggtgttcaacgggcagctnttttagangattttccgnggcaaaacattcattnaattgcaattggaaggcc

SEQ ID NO: 175755 - DNA, 610 bp, Homo Sapiens
  misc_feature (42)..(42): n is a, c, g, or t
  misc_feature (71)..(71): n is a, c, g, or t
aaaaagaatcccaatgtgggctttgggtttaaccctggaggnttccccccgggggaaacaacttttcccanccgggcggagccaagttattccgcttcgaccacgctcgcggagcgtggtcgaacagctcaaccgggtgtgatgccggccatctcacaggctcggcttcccatcctggaggcccagtctctgggacactgcaggcgcggtctgggtacaatgctcgttggccagatggtgagcggcttgtggggcagttcttatgcagccagtccttgtggcttcaggggaccccaggtatggctccaccgccagcccctgccactgcttctgccagtgctggcaccaccaacacagctaccacagctggccccgctcctggggggcctgcccagcctccacccacccctcaaccctccatggctgatcttcagttctctcagcttctggggaacctgctagggcctgcagggaaagggctggagggcctggtgtggcttctcccaccatcactgtggcgatgcctggtgtcctgcctttctccaaggcatgactgacttcttgcaggcaacacagacagctaacaagtagaaagcagaagaagagaaag

SEQ ID NO: 175756 - DNA, 691 bp, Homo Sapiens; identical to SEQ ID NO: 7012
  misc_feature (407)..(413): n is a, c, g, or t
  misc_feature (418)..(418): n is a, c, g, or t
  misc_feature (420)..(504): n is a, c, g, or t
  misc_feature (533)..(533): n is a, c, g, or t

SEQ ID NO: 175757 - DNA, 361 bp, Homo Sapiens
ggcggtaggatttctcctgacccagcatcgctcatcacaatgaagaaccaagacaaaaagaacggggctgcaaacaatccaatccaaaaagcagcccaggacaaccggaagcaggacccgagggagcccaggagcggcccagccaggcggctcctgcagtagaagcagaaggtcccggcagcagccaggctcctcggcaagccggagggggctcaagccagaacggctcagtctggggcccttcgtgatgtctctgaggagctgagccgccaactggaagacatactgagcacatactgtgtggacaataaccaggggggccccggcgaggatggggcacagggacggccggtgttcccga

SEQ ID NO: 175758 - DNA, 229 bp, Homo Sapiens
cagccctcacatacctttagaagaaatgatgctccgtccacttctgctttgcccaagagctgacaagtcaggtcaaaatactgcattggctgaacatcacacaattttagtaatgtccaagacggtgacatatgagtagatgcccaaacacgtaaggcttctaccattttgtggtcctcagtagtgaagttaaaatacttgcttgaagtgcgaggtatgtgagggctgg

SEQ ID NO: 175759 - DNA, 527 bp, Homo Sapiens
cggtacccccagccggtcaaataccttcaaggtgcaagaggcagagcctgggtttctatagcaacctggcagcacatccctgtcatccttcgacaggcccagctttctttatcttccctgaagccccagtggtcacaggggagtgggaactagcaggaaaggtggaagaaatgtgtaagtggaaaatcagactcccagaaacagagtctcgttaaggcatttggaatagataaattaattcaggaagacccaccttcacagaaggtcggggtaaccagacacacacacacatgcaagacagtttgtggaaccctgaaatgggaacaaaggaggccatagtcactgcttcgagcccccacaaaaacacacacccagagttgcattcagggatccaggccaccgaagatgacatgaggaaggatcccctctatcacagttttaggaccccagaatgatttccatgatgtgatccagttcattccactcccaggaacctggggcacagaagaggtatgtgaaggggctgg

SEQ ID NO: 175760 - DNA, 495 bp, Homo Sapiens
  misc_feature (309)..(309): n is a, c, g, or t
cagccctcacatacctgcatagtagtggcggcaaatttggcccagtgatctcggacaatttcctccacactctgcttccgggcagcaataatggagagccagaccaagacagcccacaggccatccttctctcggaggtggtcagagccagtgccaaagctctcttccccacacagattgcaacgtcctgagtccatcagatttgagaagaatctccatccagctggggtctcatatacagggaccttcattgatttggccactctgtccagggccatgctggttggcatactcctcccaaacccgcgnacccccatctgacggaaatatggaatgcaagagaggttggcagcaatgatggccagggagtcagaagggctcacaaagaagccattttggcctaggatcatataacggtccccatcagcatcaaatgcagctccaaatccatattctcctcctttcattgcttccagaagagtcgttgcatatgtc

SEQ ID NO: 175761 - DNA, 557 bp, Homo Sapiens
gatctcaatacctaaaggcatcaacaattgggaataaaccagtagcttcttaattcaaccctgacagacaactgaaacaaagattaaaagcatatgatggccatttggcagctagagtcaggaaaatgacccaacgttttcaactactgccccaaatttgttctctctcccaaatcctttgcactgtcatctcaagaaaccaacagccacataatctatgttggaaacacataaaatatctgtatgattttccccatctgaaactttgatcaaggcctttttattcagcagacttttttcttcttttaacatttgactataatggcaaaaatgacataggtcatataacatctgttttcctggcacaaccagacagaaggttgaattggaataaggaaaaattcattccgtgggcatcctaaacataccacattctattttcaaggtaatgtggcaatacagattacttactttttctctatagataaacttgagagacaagcttagaattaatacttccaataaggttatatataaaggacaaaaaaaccaaagtg

SEQ ID NO: 175762 - DNA, 825 bp, Homo Sapiens
tgttaaaaatattcgtaaaacctgtctgaaagttctcagatgcccaaaaaattccaaaagttttaatatgaggtagagtaaagccagcagtatcccaagactccatctagttacgttaccaaactccccatagcttataaggtagcgaaaccaaactggtatgggaacaaaagttcggtagtatagacacaattcttctaaaagcatataccagtaacccttagatttaaaaggcatgatgaaagaagccaccaataaaataaggcattttaagcccatgaaaaagaatttcagaatgaagtctgtaattccgacaatccaaaatacttcccagaagctcaaatggtccaaagtaggatttaaaaaaattaagctgtaataaagtgactgagaatgaaaggtgtaatataaaagaacagaagatcctgctaagaataccagtaaccaagcacactgaatctttgaggacctttctcttagaaaaacctgatttacaatgcttttgtttgcatacataaaagttgttagcagcccaattccaagagaaattcctgttatatgctgcataacaagtttgacgctcagaatccaaatatatggaagacttttttgcagccacttgaagagatagcggaattctgagaaggagctactaccatgatctccagattctgcggcagtatcatcagtcaaccttgcttcactgtgggagtgaccccgtaagcgactgtgtacacatccatgggcacagctatggacacctgaccttatatttctggagcttgcattttctgcacattctttaggtatttgagggtctcgggt

SEQ ID NO: 175763 - DNA, 781 bp, Homo Sapiens
cagccctcacatacctaaaaataggctctgaggaatgggacagcacatctgcatttttcattttgcacagcttcccaggagatcattactcccattaaagttggggatctttgctcttgggacacatgaaatgagtcttatttagctgggcacagtaaaatcaaatgaccagacaatgatggtaaaaacagcaaaaggagaaagcaaaagccaggcagggactctccagaggctcttttttaaatcttggggaaatcatacccactgaggaatagaggccagggcagatcaggcctgcgtggattgtgggtcagctagggaagcagaaggaggaagacgctggaatcattgtcaggactgagaatatggtgtgagttgcttttgagggtggccatgtgagcaccttggccagattaatctctttcccccctccatgatggtggcaggggcaggagctgacttcgtgatgctgggtggcatgctggctgggcacagtgagtcaggtggtgagctcatcgagagggatggcaagaagtacaagctcttctatggaatgagttctgaaatggccatgaagaagtatgctgggggcgtggctgagtacaggtatgtgtggaggcccaggagcttagtaatagtatggaggcagaactcatggctgctgagagggggatggtacagttctcagagaagcatggtgaaccggggctcaatgctagggtctgtggaaaagtccctgggcttaaggaatccagaaggagaagataataaagtttttccc

SEQ ID NO: 175764 - DNA, 749 bp, Homo Sapiens
actcttgatgatccccagccctcacatacctagagaaaccaaacaggtaaaagcaagtggtgaagccacatggattaatgagatgatagaaagtacaaaatcactatgtaagtcagattaaaaagccagcttgcactctctgctttcatctttttgaagcaataactattacataaatcagtgaatacagtatttctacagtatttgaaacggtgttcacacccagcaattccacttctagacatatatccaagagaatggaaaacatgtgcacacaggcacttgtacatgaatatttatggaagcattattcacaatagccaaaaagtggaaacagtccaaatggccatcaagatgaatgaataaataaaatgtagtgtgtgcatgcagtggaatattatttgcccataaaaagaaatgaagcactgatgcaggctgcaacatggatgaacttgaaagctttatgctacgtgaaagaagccagtcataaaaggtcacctactgttattcctttcataggaaatatccagataggcaagtccatagagacagagaggagaggagtggttgcaaggggctgggcaaggagaatgagagtgaccgctaatgggtgtggcatttctttgtgaggtaatgaaaatgttctgtattagatagtggtgatcattgcacaactctgtgaatgtactaaaaatcattgaattgtacactttgaaagaattatatagtatgtaattatatctcagttt

SEQ ID NO: 175765 - DNA, 490 bp, Homo Sapiens
tcgaaagaatatttgcccctttcatcccttccttacaatcagataataatattacagcacctataaataagcccaaaaaatatatatatataccgaaatcatctattgttagttttaaagatatggcaataaagaagtctaaattagcaaacttgtagaagccgtaactgataaaacagcttattgaaaaaggtggcagtaatgcactctacgtgtgcacaggtacttaagaaaatacacagacgtataaaattgcacacacgcacacgcacgcacactctcacccgcctctattctcacgcatatacacatagacaagggaggaatcagagacaagttagacctttcagtttgtacttagactgccctaaaactgtgcataaaaagaactaagaggcgaaatgaaagaagggcaaatggtaggtttggaagttgaagagcatccacgttttggtgtgagtttggcctttctacaggtatttgatggctg

SEQ ID NO: 175766 - DNA, 787 bp, Homo Sapiens
  misc_feature (37)..(37): n is a, c, g, or t
  misc_feature (51)..(51): n is a, c, g, or t
ctggatcttccctgaccctttgtgatcccgcccgttnttcagccttcccanaagtgctggggatcacagggagtgaagcccactgcgcccagcccactttttatccctaaataagtttcatttatccttggtatctgagttttatcctggactcatctcaatttaataatcattttgggggcggagaggactcctttgtcccaggcccagggctaattttaggataagttctcttttcagaaagagaaacactaggtatgactagtatccctttggcatataatcaccttgtgggatggcagatagttctaggttaggagttcccaagctctagtctactttcaacactcttcagaccttagtaggaagttagccctcttctgggaagaaagtgggagcccaggaacaaattcaggtatgttcggtaaagatagggctgctcaaatcaatgcaaatggcaactaaaaatgacagccaaggttgtcacatagtgatcaagatgctccgtctaccagttacgtagatagaaaagttcactttcatgcagttggtatggtcctttggggggagttaaaggcagataaataatgtcttccatactgaacaggcctgttaagtgaattccttggaagctgacttttgcttttctttcacctcagttagcatcaggaactcactgccttgttggggccagatctttcccaattctgtcttcagaagaatctgttattaagaaatgcttgagcatccattttttcaggggactgaaaaaagcaggaacattacc

SEQ ID NO: 175767 - DNA, 917 bp, Homo Sapiens
tattattcggtatctataaacaatgccatatgctaaatctcaagatataaaattctaaggggcgaaagtccaaggcagaagtcaaaagttttgcaaggaaaccgatgaggttgctgacctgagctggacagggttgaacaggcgagtgccaagatcaaggtctctgattgtctctccttgaaaggtaagcagagaactagggctatcccataaatgaagtgggagattggaaaggggtgcggacttctgtattggggagaaggtcttggatgaactggggcagagaactgccagagagagtacctaggaatacattgttagcaggagaaagaccaagttcagatgcagacttgggaaagtaggtaacttgaccaaaggtagcaaaattagactacccaactggattgtgaatgcagtttatgaaatggatcaggacaggagcaaaaatagattttctagaaactgcagactcctgtgattggagcagtatacaaagtacagcaacatcagactagatctcacctgaggtgctgggtgagaaatcttagggaccagatggaagagggcctgtgtataaagacagtaggaaggaggtttgggaaggtttgggagggcagcctgacttgtctccagagaaagttagaactggttgacttagcaaccaagggacactgggtcaaagacgaggaatcaggacgtcggtgcctagtgactgagcgccagcccagcccatttctctacattgccatgggctaaacccagtgtgctgtaaactcttcagctcctttggttatggatttagaatcttttctgtgtttcttaataaagatcttttgaaaaatgggaacctttctcagatgggaattttgtatctttcctctgtttcttaataaagctcttttgaaaaattggaaaaa

SEQ ID NO: 175768 - DNA, 794 bp, Homo Sapiens; identical to SEQ ID NO: 10892
  misc_feature (47)..(47): n is a, c, g, or t

SEQ ID NO: 175769 - DNA, 621 bp, Homo Sapiens
tgatccgtcaatacctgcacaagaaaggtctgcaaatgattaaaagtgtcttctgttggcattgcccaggttattgtatttgaactttttgctgatataagaacaattctcagcggtgttggtgattgagctattagatacctggactgcatcatcatagttctttgctcacatttcaaggagactattttgaggaaggaaaaaaacaacatgggtgccctgtttcagagtctcctgaaacactcaacattgtcctgggagatacttcatatccatagttgattcacaggagtctctttgaaacaagcctacttgatttcatcctttcagtgatgtccactgtttacaagccagggcactactacaataaaaaaatcttatggaaaagagaaaaggaaaatgcatggtttgcaacattataaggtttaacaatttcctgtgtgttctgtaacaaaataagatcctttgctaataaattctaaaggaaatctgctggggaacagattgctcagttgtaaaatctaggttaatgtcggcttctacttaatgcttttcatggggttacaagatcatattgctaaaacttgcaaataaaagtagaatctaggaatttctacgaga

SEQ ID NO: 175770 - DNA, 627 bp, Homo Sapiens; identical to SEQ ID NO: 15478

SEQ ID NO: 175771 - DNA, 800 bp, Homo Sapiens; identical to SEQ ID NO: 15479
  misc_feature (330)..(357): n is a, c, g, or t

SEQ ID NO: 175772 - DNA, 394 bp, Homo Sapiens
  misc_feature (94)..(94): n is a, c, g, or t
  misc_feature (207)..(207): n is a, c, g, or t
  misc_feature (307)..(307): n is a, c, g, or t
tgggcccctcggggaaaggtccccgtgcacctcggggacccccggtgaaagccctgttccagcccgtctgtgtccatgtggcccatccttgagncctactctgtcgctcttggcccctagcaccccgagaaccgtcagtttgagccagatggaagctgagctgaacacattacgatggatgatggaaacataagactatcaagaaanccaagtggtaatgggcgaagtttattcagcatccggcaatggacttatcgtagttggggaaacgggtgttccgaataataccctggaagttatcaggacncctattttaaatataggcctgaattttgtaaagtaatatttaaggtggtccgtgataattaaataaaatgcttaattcatgtggcat

SEQ ID NO: 175773 - DNA, 746 bp, Homo Sapiens
agaggatccccgaagtcctcgagacttaaagtttggcatttgacattaatgtgaagcagtgggaccatgctgcctgctaactactgtatgaatcgtaaatgttctgaagacgagcagctggaggctggaggatggcattccatacagcaaaggagaagcacccaccacttcatctgggaaaaggaaggaaattgcaggaggcctggagcatggacatgtggaatggagcagccgaggtccccctaacaaaaggttttatgagaaagctgaggagagtaagcttcctgagatattgaaggagtgcatgaagttatttcgctctgaggcactattcttgctgctctccaacttcacaggcctgaagcttcatttcttggccccttcggaagaagatgagatgaatgataaaaaagaggcagaaaccactgatatcactgaagaagggactagccatagtcctcctgagccagagaataatcagatggccatcagcaacaacagccaaaagagcaatgagcagacagacccagagccagagggaaactgaaacaaagaaagactcaagtgttcccatgtgcccaaggggaactgaggaatgggaagaccggtcactacacttttatttcttgaccatagcaaggttggaatttggccctaaactttaattccgtaaccgggggcttgggaaagggttggaaaaccccaaaattgggggttttttccttcttaattttgcccaagagggg

SEQ ID NO: 175774 - DNA, 473 bp, Homo Sapiens
caaccaactcggactcctgtttcctcttggaagaaggcatggttcaaaaggtctttgatggaatatctttcatctttgttttgtcgtatgcatccttcaataatttccttcacttcaggaattgctactttgtcaaaactggctggcttcaccccactggtcacgcgacggtagatctgcgcagcattttggcactccgagtaaggatattcagatgtagccatctcaagcatgcacatcccaaaagcataaacgtcaacggattcatcatatttctcctcatacatctcaggggccatgaactctggggtacctatcacactcttggcaaaagaagcccgcttcagggttgccagaccgaggtctccaatcttgactgagccagtagggccggtgataaagatgttgtcacatttaagatcgcggtgaatataggtggagtccgagtacttgggggatcctctaaaaccccc

SEQ ID NO: 175775 - DNA, 1029 bp, Homo Sapiens
  misc_feature (430)..(543): n is a, c, g, or t
  misc_feature (553)..(565): n is a, c, g, or t
  misc_feature (604)..(759): n is a, c, g, or t
  misc_feature (911)..(957): n is a, c, g, or t
ctctagaggttcccccaagttactcgagactccatgtgaggcgtggggaactgagggggctcaggccacccctcctcctaaactccccaacccacctctcttcccctccggactctaaacaggaacttgaatactgggagagaagaggacttttttgattaagtggttactttgtgtttttttaatttctaagaagttactttttgtagagagagctgtattaagtgactgaccatgcactatatttgtatatattttatatgttcatattggattgcgcctttgtattataaaagctcagatgacatttcgttttttacacgagatttcttttttatgtgatgccaaagatgtttgaaaatgctcttaaaatatcttcctttggggaagtttatttgagaaaatataataaaagaaaaaagtaaaggcnnnnnnnnnnnnnnnnnnnnnnnnnnnnnnnnnnnnnnnnnnnnnnnnnnnnnnnnnnnnnnnnnnnnnnnnnnnnnnnnnnnnnnnnnnnnnnnnnnnnnnnnnnnnnnnnnnttggggggcnnnnnnnnnnnnnaaaaaatttttaaaacctttttttggggcccggggcccnnnnnnnnnnnnnnnnnnnnnnnnnnnnnnnnnnnnnnnnnnnnnnnnnnnnnnnnnnnnnnnnnnnnnnnnnnnnnnnnnnnnnnnnnnnnnnnnnnnnnnnnnnnnnnnnnnnnnnnnnnnnnnnnnnnnnnnnnnnnnnnnnnnnnnnnnnnncccagcggagtccaatattaaattacgccccccccgggcatttttgggaggaatggtggaattttttaaccctttccccccaggggaaccccctccaaccggtttgggaaaaccttaaatcccccgggggatattacccccttgggcccctnnnnnnnnnnnnnnnnnnnnnnnnnnnnnnnnnnnnnnnnnnnnnnnttttccccactttggcgcccccctttaaaacaaaaaggggggggaaacctccccccgggggtttggggtgtg

SEQ ID NO: 175776 - DNA, 615 bp, Homo Sapiens
ctcgagactccggatctgatcaggcagtcagtcagagtcgtgagtcagacacttcccgagaaaacaaagttcaagcaaaaccaccgaaagtggatggagctgagttatggaaatctagtcctagtattctggccgtgcagagatctgcaatcctcaagaagcagcaacagcagcagcagcaacaacaacatcaagcctcatctaatagcggatcagaagaggatacctctagcagtgaagattccgatgactcatcaagtgaggtcaaaaggaaaaagcataaagatgaagatgggcaaatgtctgggtcaggatctccatctcagtctggttcagattcagaatctgaagaagagagagagaaaagcagttgtgatgaaacagaatctgattatgagccaaaaaacaaagtcaaaagcagaaaacctcaaaatagatctaagtcaaaaaatggcaagaagattcttggacaaaaaaagagacagatggattcatctgaggaggatgatgatgaagaagattatgataatgataaaagaagttctcgtcgccaagcaactgttaatgttagctataaggaggatgaagaaatgcaaacagattctgatgacctac

SEQ ID NO: 175777 - DNA, 517 bp, Homo Sapiens
tcaggaactccaatacccatgatgacagagggagcacttgagccttgccttccctcctcttaaatcaggatgtgttccgagattacagaacatcacaccttggctgtgatgaaatcatgccaagattctgactctccctttccggtgatactgctcatgatttctcctaatacgcttcaagcaactgttaccacaaaaaatacagtttccgccagggctctcaaaggatcgagtttagcatgtatatcatgcgttataaaagttcacgtgattcatgtgacacattaactgtcctttttgctagtaccaaaacagtgccttctctgcaccactttacttgttaataaagttctccccacatgtccttaaatatcaagggggaaagtatggatattcgcgtagaaataatgccagcaaaggtcatttccacttttaagtcatatagatacgaaaattaagtccatatagatatgaaaattgtttgacttaattgtctgggggagattttttttcctta

SEQ ID NO: 175778 - DNA, 593 bp, Homo Sapiens
  misc_feature (94)..(94): n is a, c, g, or t
ttactcgagactcctatcattggctcctgtggcactcaggagcaggcactgttaatagatcttacaagcaacagtgtcgaaggacccggagggncgttggatggaagcgagtcctgcgttcactctgtcattcacggacccgagtgccacttctagcagccatctactttctaatgattcatgtcctgctcattctgtgttttacgggccatctatagacttagttgttactctttggaccactcccctcaaaacttggaattctctcacctctaacatcagaacatcaattccagtggaacagtcttcccatttacaggtcttctctccaactcttcacggaaagtgcctgcaaaaacagaggtggatacgaggacaggttggagctgcagggactggcgagtctgctttcttctactgccctgagcctgaacgcttctgcttaatctgagaatcacatttggtttgttgagcctaatatttgttgagattttgcaggaccctgatcttttgtggtcctgtaaaagatactgaggaatgtctttcagccaagccaagaggatggtttcaataaacctaataatctgaagttc

SEQ ID NO: 175779 - DNA, 172 bp, Homo Sapiens
  misc_feature (81)..(81): n is a, c, g, or t
  misc_feature (84)..(84): n is a, c, g, or t
cgagaggagtagcacatcaggaaatcattccatagtactttcaatacaaggagacggtctggcttgggttccggttcctcnacngggaggctcctccatatttagagggatttttgactcaatgtcctcccagccaggaaggtggttagaagctggggagtctgagtaactt

SEQ ID NO: 175780 - DNA, 984 bp, Homo Sapiens
ggctccgggctgaagattgcttctcttctctcctccaaggtctagtgacggagcccgcgcgcggcgccaccatgcggcagaaggcggtatcgcttttcttgtgctacctgctgctcttcacttgcagtggggtggaggcaggtgagaatgcgggtaaggatgcaggtaagaaaaagtgctcggagagctcggacagcggctccgggttctggaaggccctgaccttcatggccgccggaggaggactcgcagtcgccgggctgcccgcgctgggcttcaccggcgccggcatcgcggccaactcggtggctgcctcgctgatgagctggtctgcgatcctgaatgggggcggcgtgcccgccggggggctagtggccacgctgcagagcctcggggctggtggcagcaccgtcgtcataggtaatatctggtgcccctgatgggccaccgccaccccacaagtatctcgatcagtgaggacgatgacgagtacccagcagttcccacaacctcttcttccttcttggtctacctcttccacctaggatctcagaacctttgccctccccctctgtttccttagcccaaaagacgggcccccaccgaacatcgtcccggatagaatggaacgggcctatccccagacgccgaaactaagcacactgcacgcctctaccctcctaactgccagcggctctccccagtcctaaccccaccccgatttgattatacccacgttgtcccccttttcccccccatacccaaaatcgcccgcattttgccattcccaaccacccgtttaagggcgccagcactactccccttcccccccctgcaagagccccgaacataacaccttttgccccgcatccagccgggaaggttcctctttggggccaagacccgccgattaagtccccgcgttatttcgccgctcaaagttgccggcgcgcaccaaacgctccaccttcgatcccacctgtc

SEQ ID NO: 175781 - DNA, 658 bp, Homo Sapiens
ttgcggctgttctagagtatccccgaagttactcgagactccccagtacaatgactcaagcagaaattaagctctgttctttgttgctgcaagagcattttggagagattgtagaaaaaattggagtccatctgataagaaccggcagccagccactaagagtaattgcccatgacacaggaacatcactggatcaggtgaagaaagccctgtgtgtcctcgtccaacataacctggtgagttatcaagtgcacaaacgtggtgtggtggagtatgaagcccagtgcagccgggtattgcgaatgcttagatatccccggtacatctatactaccaaaactctgtacagtgacactggagagctgattgttgaggagcttctgttgaacggcaaactgacaatgtcagctgttgtgaagaaagtggcagaccggctcacagagaccatggaggatggcaagaccatggactatgctgaagtatcaaacacatttgtgcgactggcagacacacactttgtacaacgctgcccttcggtacctaccactgagaattcagaccctgggccaccaccaactgccaccacacttgtcattaatgaaaaggacatgtacctggttctaaaataagttgtagggaaggtaaaggaggagatatt

SEQ ID NO: 175782 - DNA, 780 bp, Homo Sapiens
gtccccggaagccgccgaaactctggggtagagtggcacgcggctttttgcttttccgcgtcttcttcggtggcgatccgcgtcctagaaagggcggtgggctccacctcggcctagaaggccagcgggagccgtaggaagccgtcgcgggaagctcagccgaattggagttggagcccccggattgcgctgaccctgagctctcagactccccagtacaatgactcaagcagaaattaagctctgttctttgttgctgcaagagcatttggagagattgtagaaaaaattggagtccatctagataaggaaccggcagccagccactaagagtaattgcccatgacacaggaacatcactggatcaggtgaagaaagccctgtgtgtcctcgtccaacataacctggtgagttatcaagtgcacaaacgtggtgtggtggagtatgaagcccagtgcagccgggtattgcgaatgcttagatatccccggtacaatctatactaccaaaactctgtacagtgacactggagagctgattgttgaggagctttctgttgaacggcaaactgacaatgtcagctgttgtgaagaaagtggcagaccggctcaacagagaccatggaggatggcaagaacatggactatgctgaagtatcaaacacaatttgtgcgactggcagacacacacttggtacaacgctgcccttcggtactaccactgagaattcagacctgggcacaacaactgccccaacttgtcttatgacacgggctgtca

SEQ ID NO: 175783 - DNA, 1055 bp, Homo Sapiens
tggatgggaatacttgggattttatgattgccagttcaatgaagatggctccatgatcattgctcatgctttccacggagcgttgcacctttggaaacagaatacagttaacccaagagagtggactccagagattgtcatttcaggacactttgatggtgtcaaagacctagtctgggatccagaaggagaatttattatcactgttggtactgatcagacaactagactttttgctccatggaagagaaaagaccaatcacaggtgacttggcatgaaattgcaaggcctcagatacatgggtatgacctgaaatgtttggcaatgattaatcggtttcagtttgtatctggagcagatgaaaaagttcttcgggttttttctgcacctcggaattttgtggaaaatttttgtgccattacaggacaatcactgaatcatgtgctctgtaatcaagatagtgatcttccagaaggagccactgtccctgcattgggattatcaaataaagctgtctttcagggagatatagcttctcagccttctgatgaagaggagctgttaactagtactggttttgagtatcagcaggtggcctttcagccctccatacttactgagcctcccactgaggatcatcttctgcagaatactttgtggcctgaagttcaaaaactatatgggcacggttatgaaatattttgtgttacttgtaacagttcaaagactctgcttgcctcagcttgtaaggcagctaagaaagagcatgcagctatcattctttggaacactacatcttggaaacaggtgcagaatttagttttccacagtttgacagtcacgcagatggccttctcacctaatgagaagttcttactagctgtttccagagatcgaacctggtcattgtggaaaaagcaggatacaatctcacctgagttcgagccagtttttagtctttttgccttcaccaacaaattacttctgtgcacagtagaattatttggtcttgtgattggagtcctgacagcaagtatttcttcactgtacgtct

SEQ ID NO: 175784 - DNA, 690 bp, Homo Sapiens
  misc_feature (51)..(51): n is a, c, g, or t
ggttctaagggtagcgagggcctggggtggggcgaattctcgcacgagggngaaaaagcaggatacaatctcacctgagttcgaacccagttttaagtccttttgccttcaccaacaaaattactttctgtgcacagtagaattattgggtcttgtgattggagtcctgacagcaagtatttcttcactgggagtcgagacaaaaaggtggttgtctggggtgagtgcgactccactgatgactgtattgagcacaacattggcccctgctcctcagtcctggacgtgggtggggctgtgacagctgtcagcgtctgcccagtgctccacccttctcaacgatacgtggttgcagtaggattggagtgtggaaagatttgcttatatacctggaaaaagactgatcaagttccagaaataaatgactggacccactgtgtagaaacaagtcaaagccaaagtcatacactggctatcagaaaattatgctggaagaattgcagtggaaaaactgaacagaaggaagcagaaggtgctgagtggttacactttgcaagctgtggtgaagatcacactgtgaagatacacagagtcaataaatgtgcactgtaatggacttaataactacatgcttgcagtcactggtatcttaaaatattatcatgtaaacaggtcatctttaccttcata

SEQ ID NO: 175785 - DNA, 1033 bp, Homo Sapiens
gcagattctgctgttcgactctggtctaaaaagggtccagaagtaatgtgccttcagactttaaactttggaaatggatttgctttggctctctgcttatcttttttgccaaatactgatgtaccaatattagcatgtggcaatgatgattgcagaattcacatatttgctcaacaaaatgatcagtttcagaaagtgctttctctctgtggacatgaggattggattagaggagtggaatgggcagcctttggtagagatcttttcctagcaagctgttcacaagattgcctgataagaatatggaagctgtatataaagtcaacatctttagaaactcaggatgacgataacataagactgaaagaaaatacttttaccatagaaaatgaaagtgttaaaatagcatttgctgttactctggagacagtgctagccggtcatgaaaactgggtaaatgcagttcactggcaacctgtgttttacaaagatggtgtcctacagcagccaatgagattattatctgcttccatggataaaaccatgattctctgggctccagatgaagagtcaggagtttggctagaacaggttcgagtaggtgaagtaggtgggaatactttgggattttatgattgccagttcaatgaagatggctccatgatcattgctcatgctttccacggagcgttgcacctttggaaacagaatacagttaacccaagagagtggactccagagaatcgtcatttcaggacactttgatggtgtacaagacctagtctgggatccagaaggagaatttattatcactgtgggtactgatcagacaactagactttacgctccatggaagagacaagaccaatcacaggcaacctaggcatgaacatgccaggccctcagatacatggggtatgaacctgaaccgtcccggcaacgaaaaaaccgcagagcaccaggatctggagcagatgaacacacgccctgcagagcaccaccgcccccgcaaaatcgcggaacaccacgcacc

SEQ ID NO: 175786 - DNA, 850 bp, Homo Sapiens
  misc_feature (512)..(512): n is a, c, g, or t
  misc_feature (721)..(721): n is a, c, g, or t
ggggtctgcgtcgggagctcccgggcacgtgaggccgtgccgcgtttactggcgggcgggacggcctagccgggcggcgcctcggaggaagccgcggaccccttaggtgctgggcccttggaaatcggcgcgtggggggcggtgctcgagctgagcgcgagagggcgggagagctcgtggggtgcgaggggagcaggacgcccggccgggcagcatgagtcagcagcggccggcgaggaagttacccagtctcctcctggacccgacggaggagacggttcgccgtcggtgccgagaccccatcaacgtggagggcctgctgccatcaaaaataaggattaatttagaagataatgtacaatatgtgtccatgagaaaagctctaaaagtgaagagacctcgttttgatgtatcgctggtttatttaactcgaaaatttatggatcttgtcagatctgctcccgggggtattcttgacttaaacaaggttgcaacgaaactgggagtccganagcggagagtgtatgacatcaccaatgtcttagatggaatcgacctcgctgaaaagaaatcaagaaccatattagatggataggatctgatcttagcaattttggagcagttccccaacaaaagaagctacaggagggaactttctgacttatcagccattggaagaatgcctttgggatgagttccaatttaagggattgtgcctcancaaccttgcttttgggtttaccccgattggacaaaaggaaaaatggaaaggaccttagcccttatggggtacccctattcaaggaacaatttccatcagcccccttttcgggggcccctttcccaagta

SEQ ID NO: 175787 - DNA, 1156 bp, Homo Sapiens
  misc_feature (41)..(127): n is a, c, g, or t
  misc_feature (1082)..(1091): n is a, c, g, or t
aaggaagcgaggcctgggtggcgaattcggcacgagggtcnnnnnnnnnnnnnnnnnnnnnnnnnnnnnnnnnnnnnnnnnnnnnnnnnnnnnnnnnnnnnnnnnnnnnnnnnnnnnnnnnnnnnnnagtcggcgccgagaacatggctggaggcaaagctggaaaggacagtgggaaggccaaggctaaggcagtatctcgctcacagagagctgggctacagtttcctgtgggccgcatccacagacacttgaagactcgcaccacaagccatggaagggtgggtgccactgctgccgtgtacagtgctgcgattctggagtacctcactgcagaggtgctggagctggcaggtaatgcttctaaggatctcaaagtaaagcgtatcactccgcgtcacttgcagcttgcaatccgtggtgatgaagagttggattctcttatcaaggctaccatagctgggggtggtgtgatccctcacatccacaaatctctgattggaaagaagggacagcagaaaactgcttagagggatgctttaaccaaccctcttcctccccgtcattgtactgtaactgggacagaagaaataatggggatatgtggaatttttaacaacagttaaatggaaaagcatagacaattactgtagacatgataaaagaaacatttgtatgttcttagactcgaagtttgataaaagtaccttttcatgtggtgacagttgtgtgttgattggctaggtttctcccgtgtgttttatacaaaaatggaattgataaaccatttttttaccaaatttacagagaaaaacaaaaagcaaactccgaggccttctatggtcggggggcgggaaaaaagaggggaatggaaattgggccccattggcccataagcctggtttcctgaaacccaacttttttctggtaacaaggtgggggaaaatctgtcccggtcccccccaattagggggtcccaaataaattttccgaaaaacccacggtataacctcgcatttaatggaaatcgggcgcgacgatcccccggggaattttaaaccccccccaaatgggcgggggcnnnnnnnnnngggggaccccaaagggacctttcctctagaaaaccctcttttttttccgcgaagataaatttctg

SEQ ID NO: 175788 - DNA, 990 bp, Homo Sapiens
  misc_feature (292)..(347): n is a, c, g, or t
  misc_feature (390)..(402): n is a, c, g, or t
  misc_feature (528)..(537): n is a, c, g, or t
tgcagcatcgatagtggggctggttcgttgtgtgactgcggatatcaggggggaaagtgagcgagggtcaaggttgaggggacaacatgcgagcggaggtcgtgagtaggtggtgaagaacgcggaacacgtgagagatgcaggacacattacgcggctgcagagcagtatagcgggctggggggtggcgaaaacgggaaggggcggcgagagggtggaacaacaaagagtagggcggagatagacgggggcgcgcgggaaagcggggtggccggctcgacggaggagaggnnnnnnnnnnnnnnnnnnnnnnnnnnnnnnnnnnnnnnnnnnnnnnnnnnnnnnnntaaagcggtggcggaggcgaagggcttgggaaatgagagatcnnnnnnnnnnnnnaccaggtggcattaaggaatagaggggtggggtgagagatagagggcgggttagttagagaagagttagcgaccgtgagcccgccagtagttttgggtcggggcgccaagtgtgcaggaacaaaannnnnnnnnnagggaagaagggtatagagtaaagcaatcgcctggaaagcagtgttgggggggtgcgttgtggtacaagcagggagtggtggatgtgagggatcgcacagcccccagctatggtagccttgataggagaatccaactcttcatcaccggggagtgcaagctgcaaatgacacggagtgatgcgcttcactgtgagatcgggagaagcattacctgccaactccaacacctcagcggtgaggtactccagaatcgcagcactgtacacagcagcagtggcacccacccgtccatggcttgtggtgcgagtcttcaagtgtctgtggatgcggcccacaggaaactggagcccagctcgctgggaacgagacaccgccttagccttggccttcccactgtcctttccagctttgcctccagccatggtctcggccgcgcgacgcccactgcagcc

SEQ ID NO: 175789 - DNA, 705 bp, Homo Sapiens
cgagcggaggcggagtcggcgccgagaacatggctggaggcaaagctggaaaggacagtgggaaggccaaggctaaggcagtatctcgctcacagagagctgggctacagtttcctgtgggccgcatccacagacacttgaagactcgcaccacaagccatggaagggtgggtgccactgctgccgtgtacagtgctgcgattctggagtacctcactgcagaggtgctggagctggcaggtaatgcttctaaggatctcaaagtaaagcgtatcactccgcgtcacttgcagcttgcaatccgtggtgatgaagagttggattctcttatcaaggctaccatagctgggggtggtgtgatccctcacatccacaaatctctgattggaaagaagggacagcagaaaactgcttagagggatgctttaaccaaccctcttcctccccgtcattgtactgtaactgggacagaagaaataatggggatatgtggaatttttaacaacagttaaatggaaaagcatagacaattactgtagacatgataaaagaaacatttgtatgttcttagactcgaagtttgataaaagtacccttttcatgttggtgacagttcgtgccgttgattggcctaggcttcctccccgtggtgtttttataccaaaaatggaatttggataaacccattttttttaacaaattccc

SEQ ID NO: 175790 - DNA, 1258 bp, Homo Sapiens
ggggcctgggggtccggcgggatccgagccggggatgacgatgctgatggagctgatggggcaagagtgggaacggaggcacgtacactgaaatttaagtcatccaagttgggacttaagatagcaggttaatattgtctcaggcgagacttagaacgtcttttctggtatcccagtctgcagtgggcaaatctattgtctttatttctcatttaagggcagaatggagggatgacatatttttacttttcaagaggcggttgccacttttaagtcactgttgtgtgtgtgtgtacatacacaaaacatacgatagtgtgttttcagagcaagtatcaaaggctaaagacttggagtgatactagtgtttaaaagcctttttaaaaaaattaagatgtgatgacaaactggagaattgacttttaaaaatttcttttctgtagaagaggctatcttcaaaatggagtcctaaagtatatctgatggatagaatttaaattcttaacactgtatataccctgtggtcaaaagcatcaacgtaacccttgatgtttatcagactacttatgtttcaatcttcctgtggctagaaaaattaagacagaagtaagttattaccgggatttgcttgtaagaagcacgtcaaacgttcaaggaaaggtttgttgaaactccgaatatcgcatcacacccaatccatctaattttccatggctgtttctcccagttggcagccaatcattcttggcggttttacctggaccttttgaaaaacaagcggtccctaccccctcaatcgctccactttcctggaacctgcctccttcaattccgacctcctttcataaatcggccaacaacacccctgaccaaagccctctcctctctcgcccaaagggggcctacgacgcttagaccttcccaaaattcccggaccttataaggctctttccccagcattttcttttacccaactcccacgttcgctggtccccgagagggccatataaacttactcgccgggccccattggtgtgggtgcgattcctagtcgcatacggaattaccccgcactcgtcccctcgaggatacacctcggccccctggctgctccccctatagtgggacgcgcccctcttttttaccccccccacaccttacaaaaatttttgggcaatcgcgcccgcgccgtatatttttatccaccttcgtccgcttatttccactgtcgacatactgtctttctttgtgtttctgg

SEQ ID NO: 175791 - DNA, 667 bp, Homo Sapiens
actcggactcctggtcacttaaggatctgatactggacattctacaaatgaagttgggactttatgtcataaaactgatttaaataatcttgaaatgcccacttaaggaagatcagattgcagataactttcaaggaatatcaggtcctaaagaagacagcacaagtataaaaggtaattcagaccaggattcttttcttcatgagaattcgttacaccaagaagagagtcaaaaagaaaatatgccttgtggggaaacagcagaatttaaacaaaagcaaagtgttaacaaaggaaaacaaggaaaggagcaaaatcaggactcacagacagaggcagaagagctacgcaaactttggaaaacccatactatgcaacaaactaaacagcaaagggaaaatattcaacaagtgtcacaaaaagaagctaagcataaaattacatctgctgatggacacatagaaagttctgcacttttaaaagaaaagcaaaggcatcgattacataagttcttgtgtctcagagttggaaaaccaatgaggaaaacgtttgtatctcaagcaagtgctacaatgcaacagtatgcacagagagataagaaacatgaatattggtttgctgtgccacaagacaaggacagatcacttgtatgccttcttcattcagt

SEQ ID NO: 175792 - DNA, 864 bp, Homo Sapiens
ggggagagagctgagtaggaggcctccactccggatcgaggcctgtatagggctcgtttccccacacatgcctatttctgaagaggcttctgtcttatttgaaggccagcccacacccagctactttaacaccaggtttatggaaaatgtcaggccttccccacaactcccgtctaactgctgtcgcccccctacttgctggctctcagaagcctaggggagtccctggggtcctgaattctttccccaaagacgaccagcatttaaccaacctaagggcccaaagaccttggacaactgcatggagctgcactctaggagaaggaggggaaccagatgttagatcaggggagggagcaggagtgtccctcccagtcagtgcctacccacctatgaggcagccttctgattggcctggcccaccttccccagaaccaggggaggcctgaggcttcagtgttactctgctgcagaaatgaaggcgggactgcaagccgactacacctacggaggctgttgaggacaatttcattccattaaattaaaaatactgactggctggcacgcaggtgccatgtctgggaacacggacgggggagcttcaccttttttgtcctggcttttctttgggctgcggggggggcatccattttcaggggccggggaggaaataccccactgctttggttgctcctgctcaaaaaatctccacttgttttctaataaacgaaagccgcttttataacacatgacccacacccggagacaatttccccttggtcggctggccctccgggccctgtgaaaaagatgttccaagacccatttccttttgggcgccgcgggggccccaataagggaaaa

SEQ ID NO: 175793 - DNA, 602 bp, Homo Sapiens
cgaagtcagtcaactccagctgagcgcatcctttagcagatcatgtctctgctactcgaatcttgtgtggagccctgtctttcctactatgctacaatagtggtaaatgatgttcagtagtgttaactctaatttacaaaggacaatcttgggtggaattgcgtttgttgccataaaaggagcatttaaagtttacttcaaacagcagcaatatttacgacaggcacaccgcaaaattctgaattatccagaacaagaagaagcataaaactgacttctggttgttctgcagttctctcatccttatgaatctgtggtgtcgtttggattccatcattaatgcacttgtggagacttgtgataagctgctgctcctatattttttaagaaatataataaagcacttagggcaggggaaatcatctcggtaatcatggaacctaaggatgtgattcgttttcatggtttgtatgtactacttttatggcagtcatatgaaccattatcttagcatggtaaacctgggttttgttcatattttctccagacagaaatgcaaagatcaaactgtgcaaatattaaaaaaatgcacatgctgttct

SEQ ID NO: 175794 - DNA, 855 bp, Homo Sapiens
ggggtctaatggcggacgccagtatgttggagttggtggtggcttaagttttgaagggaggtagcatccgttggatatccacaccatccttctcgctgcaggctttcttggactccgtactgttggtgtaaccaaggcctggaggtctgggtggctcaggtttcctgcagccatgtttctgtacaacttaaccttgcagagagccactggcatcagctttgccattcatggaaacttttctggaaccaaacaacaagaaattgttgtttcccgtgcgaagatcttggagctgcttcgcccagaccccaacactggcaaagtacataccctactcactgtggaagtattcggtgttatccggtcactcatggcctttaggctgacaggtggcaccaaagactacattgtagttggcagtgactctggtcgaattgtcattttggaaataccagccatctaagaatatgtccgagaagattcaccaagaaacctttggcaagagtggatgccgtcgcatcgttcctggccagttcttagctgtggatcccaaagggcgagccgttatgattagtgccattgagaacacagaaattggggtatattctgaacagagatgctgcagcccggacttacaatttcatctccccctggaacccacaaagcaacacctttagtggatcatggaagttggagtaaatgtccgaatttaaaatcccatgtttgctttgtctgggaatgggatttgaagaaccaaaaaattgttccaactgggaagccacaacctaataccccgccgaaacctttctttttcttgaagctagaacttggggttttaaactctggtgggccccgaaa

SEQ ID NO: 175795 - DNA, 440 bp, Homo Sapiens
  misc_feature (293)..(293): n is a, c, g, or t
aggaaagggaaatgggggcggagcgggacgggccgggcgggagggagcgaagcagcgcgggcagcgagcgagatgcagcaccgaggcttcctcctcctcaccctcctcgccctgctggcgctcacctccgcggtcgccaaaaagaaagataaggtgaagaagggcggcccggggagcgagtgcgctgagtgggcctgggggccctgcacccccagcagcaaggattgcggcgtgagtatccgcgaggggcacctgcggggcccagaaccaagcgcatccggtgcagggtgccnctgcactggaagaaagagtttggagccgactgcaagtacaagttttgagacctggggtgcgtgtggatggggcaccagcacccaagtccgcccaggcacccctgaagaagggcggctacatggctcatggcagaagacctccgggtc

SEQ ID NO: 175796 - DNA, 1011 bp, Homo Sapiens
  misc_feature (18)..(18): n is a, c, g, or t
  misc_feature (64)..(87): n is a, c, g, or t
  misc_feature (141)..(141): n is a, c, g, or t
  misc_feature (151)..(151): n is a, c, g, or t
  misc_feature (212)..(212): n is a, c, g, or t
  misc_feature (222)..(222): n is a, c, g, or t
  misc_feature (238)..(238): n is a, c, g, or t
  misc_feature (251)..(251): n is a, c, g, or t
agaatgtgggtttataanatgatgaatttttgtggagttggtgaatgcccttggtcaaatatannnnnnnnnnnnnnnnnnnnnnnngagacgatcctgaagaaagagaagaaaagcagaaagatctggaggatcaccgangatgataaangaaagccgcccaccttcggaaatttcctctctgataaaattttgtgaagccatttcctcanatgtttccangataagggcacagcangaagaactaaagngaaaaatataaagaactcaccgaacagcagctcccaggcgcacttcctcctgaatgtacccccaacatagatggaccaaatgctaaatctgttcagagagagcaaagcttacactcctttcatacgcttttctgtaggcgatgttttaaatatgactgcttcctacatccttttcatgcaacacccaacacttataagcggaagaacacagaaacagctctagacaacaaaccttgtggaccacagtgttaccagcatttggagggagcaaaggagtttgctgctgctctcaccgctgagcggataaagaccccaccaaaacgtccaggaggccgcagaagaggacggcttcccaataacagtagcaggcccagcacccccaccattaatgtgctggaatcaaaggatacagacagtgatagggaagcagggactgaaacggggggagagaacaatgataaagaagaagaagagaagacagatgaaacttcgagctcctctgaagcaaattctcggtgtcaaacaccaataaagatgaagccaaatattgaacctcctgagaatgtggagtggagtggtgctgaagcctcaatgtttagagtcctcattggcacttactatgacaatttctgtgccattgctaggttaatcgggaccaaaacatgtagacaggtgtatgagttatagagtcaaagaatctagcatcatagctccagctcccgctgaggatgtggatactcctccaaggaaaagaagagga

SEQ ID NO: 175797 - DNA, 1160 bp, Homo Sapiens
  misc_feature (1022)..(1022): n is a, c, g, or t
taaagtcaggactagtcagatcaccaagaatagcatctagataatccaagtctccagatccctcttcactggtctctgtcttaattatagggtctttctcttgacttgagctaggaatggtggagctggtgcactcactcattttattatccactccttccacttggggctgtagttctttagagagtgcatcactaggatcatccctgtccagcaggtatctaagaagtgcattattctccttcttcttaggacttagctgctcctgcttgacaacatttccgtccccacaagaagttatactgctggtgtctttcccagttggcttctgcagtaatcttggccacctcagctggtgaattcccattctgcagcaacttgtgcaaaatccggtgcttctcttgtaacagtgacccatgcatattggatgtagaggatactcctccagatgtagaggaggagactccagaggggctggtgacactaacagaagattctttacaaattgaatctaggggggagttggtcaaggaggaatgaccccggtcatcagaagaacaggtaagtaactgcagtaattttttatgacctttgctttccaaaggacccctttgattctctgccccctcaacactgctctccttactttctttgtcactgaggtgatctctgctatttgactgacacattgaactctccactggattttggtcgcaataaaagcccagaggactcttggaatcctgattgcttactttacttggttgggtaatattcatattgggagagttatccaatttggggcctggtgatgacagagtagataaaagggaagtccccacaccttcactgatggcttgcagggcactgagagagctgctggaaaagctgtggttcccagtattgccagaagatgccatgggagagtgcacacctgcaacaggagaaaactgatgtgaggctatctttggactcccacgattacgaggagaaatcatgatattctgctggtttggggcaangaccaggactcccatgtggggggctactcatgttgagcccatagttgttgttctggtaggaagatggtgattgcatgcctggcccaggggtcaatgaagctatgttactgaatcccccaattccgggatcctctagaa

SEQ ID NO: 175798 - DNA, 952 bp, Homo Sapiens
cgcaacgtcgagaacatgaagatcttgcgtctaatgctgctccacatcaaatacctgtacgggatccgagtggaggtgcgaggggctcaccacttccctccctcgcagccctatgttgttgtctccaaccaccagagctctctcgatctgcttgggatgatggaggtactgccaggccgctgtgtgcccattgccaagcgcgagctactgtgggctggctctgccgggctggcctgctggctggcaggagtcatcttcatcgaccggaagcgcacgggggatgccatcagtgtcatgtctgaggtcgcccagaccctgctcacccaggacgtgaggggtctgggtgtttcctgagggaacgagaaaccacaatggctccatgctgcccttcaaacgtggcgccttccatcttgcagtgcaggcccaggttcccattgtccccatagtcatgtcctcctaccaagacttctactgcaaggaaggagcgtcgcttcacctcgggacaatgtcaggtgcgggtgctgcccccagtgcccacggaagggctgacaccagatgacgtcccagctctggctgacagagtccggcactccatgctcactgttttccgggaaatctccactgatggccggggtggtggtgactatctgaagaagcctgggggcggtgggtgaaccctggctctgagctctcctcccatctgtccccatcttcctccccaaacctacccacccagtgggcccctgaagcagggcaaaaccctccttccttgtctcccctctccccacttattctcctctttggaatcttcaactttctgaaatgaaatgtggataccagcgccactcctgcccccctcttgggccccatccatggaactctttggcctccggggcaatcctcccactctttggacccccaccctccctaatgggtcttgggcctgtgggga

SEQ ID NO: 175799 - DNA, 203 bp, Homo Sapiens
tcgagctcgggtaccacgaaagggatatatgggggaagtatgatgctcaaatgttgaaagttgaaacatgttggaacagaaagccgccgacactctcctgaaattgaggtgcccgttccattgtatggtgctgttttaaagccagtgagccctccgctgcccccacccccaaagggatgccaactcagagggggatcctctag

SEQ ID NO: 175800 - DNA, 441 bp, Homo Sapiens
tatcccacggaaaggaaatgggggttgggatggggggcaccttgcagccccttcctgctggggctccctccttgtagcaccccccttgcggctcagctctggtttcctctcccaggctcacccaggctctgctcaggctgggaggcagagggcacaaaccttataattttttaaatgaaaaaccgctgctgctggctgtggctagagccccctggggctgctggagctgctgcctctgttctggaggacgagccttctccttatctgctgcccatctttccaggaagtcaggatggagtcagaacaactacagtcatcccccgtggtgtctgcacatcactccagccccataaagagtgtcatgttagctgagtcaccatttggcttcggcctggaaatagtgtgattagaacactgatcgtgtgcgaggccaggagatca

SEQ ID NO: 175801 - DNA, 155 bp, Homo Sapiens
cttctaatgagccctggtgaaatccccatggaaatgggggctaatccctatggccaagcagcagcatctaaccaactgggttcctggcccgatggcatgttgtccatggaacaagtttctcatggcactcaaaataggcctcttcttaggaattc

SEQ ID NO: 175802 - DNA, 448 bp, Homo Sapiens
cggctctgattcaaaaactgctggccctgcagcctctgctgaagctgcattctaagttgcttgggggtgtttgtccggggtctcatgatgttggctcgtgggtgcattccttggagaggaaaattgccttgctggttcatctgattcatcatagagttaaaagatggtgattgtccctgaagatgaaagcctccttgcattggaggcccctgtgctgggtatgtctgtccatataatcctgccttctgatccatcattactgctgcttcttggccttggaaagcatcctgtttgggctctaatgcctgtccctgattgacaagttcaggaatgcccaaagctctgtcaatttcttccaggcctgtggcatctgtgttgctgagaagagtgtgcagctggtccaataatgctctttcgtcactctggccttccaggttggaaaggtggc

SEQ ID NO: 175803 - DNA, 1022 bp, Homo Sapiens
ggctgctctagatggatcccacgaaagtgaaatgggggaagaaatacgcaaacgtggctatcacagaaaagccagcttattactttaggttctgtgggagactacaggtcacataaaagcagtctcaacaataatgtgaccacatgtgcaatcaacatttacaaaatgaaattatatatcaagtataacacaaatgttttgcctatactttaatttacaaagccacataccgaatgactgaaatgtacataaacattcttttatgatagaccagaacatctatattatcatgacttagaaaaagaaaacagatgcaaaatagtgttgagaatttctggcctgaaattacaagactaagtgtgtgtgtgcatgcgtgtgtacatatatttaaatcgttgtattctcatttgatcctcttggctgaactttattcatatattatctgcccttcttcttataatctctctcatgaaagatatcattatccagtcattgaagccaaacccccttcaccagcccccaatctctagacatcaagggttaacaagacatcttcctaaatttctccggaattaagctcttctctgttagaatttcctttccaagtccatttcttcataaatctggcatgtgaaatttgaattgctctgccgcagttttctcttctttagtcagtggtgacagctccaggtctgtttgcttctgtagtttttgtatcatattcatagtctttttcacagtagcacaaatgcggctcttactctctttctgctcaacagcaactggtttaaagcgggcatacaaagtttgatatcgagactttatcactgacaattcctttaagagtgtaactggatttttctcacttgctgaatcaggatgattagtcttgatttcatattccagcctgtattgaatgtaatccagatcagactcagctttctggaacatcagttccagcttatcgacctccgcctccatgttgaatagttgacattccgcagaccgcggcggcgcttccc

SEQ ID NO: 175804 - DNA, 396 bp, Homo Sapiens
  misc_feature (218)..(238): n is a, c, g, or t
ccgggaaggggaaggggcaggatcaaagtgcaaaaatattgtttatatgtttggagggaaggtggtgaggaaaagacaaatctattcattctggataattaaaggtggtttcatgcatttttaaagccacaattttatatctagggttgctgtagaaaccaacatctctggagagggaaggaaagaaaaggagaaggaagagagagttcagtgggacnnnnnnnnnnnnnnnnnnnnnatataaaagtgttaagaccacaatgaaaaaaagttttttatccatatatataataaaccagtttgtgagctacataatttgtctttcccatcttcagaaatgttctcacattaacaatgattagatagcatcatgcccaaagacattggccacacaat

SEQ ID NO: 175805 - DNA, 865 bp, Homo Sapiens
  misc_feature (505)..(517): n is a, c, g, or t
  misc_feature (600)..(600): n is a, c, g, or t
ggaagagtggtatcaacgcagagtgcattacggccggggattctggggttcgtttagaggtttgaattttctcggagaaagacaggccggccacgaggaaaacagaaacaagccgcagcaacatctaagcccttgaaaggatcctgagagaggggggaaagggaaaacagcagccaccagcccaaccacttgtgtcttctgccccttcccacctatcttgcccaccccaccagcccacgctgcttgggacttgaaatctgtggccgaaggaccgtcactacataacttcaaaaataatcaaccaccctcccttcccaaaccacccaaattcactcatccagcgtttacttttttgaatccactcagaacttttttctgcgacccccctccctaaatggagttgggtgggggggaaatgaatactgagttggcctttattttttaaaagactttttgatccaatgaggccccctaaataattgagttttgggtcctggttggttgnnnnnnnnnnnnncctccaaaattttaccccctcccccctgagcccgaggtgctgacgtcgcaaaaaaattggataaaaccaccatcatgggttcngggtcccatagaccccaaagaacttctcaagggcctggacagcttccttaaccgagatggggaagtccaaaagtgtggatgggattttccaagatcttcagttgatgaaggaagcacgaaagatggtgagtcgatgcacttacttgaacattctcctgcagacccgttcaccagaaatatggtcaacatttattgacgttggcggctacgaacttcttaacaattgggtgacgtattcaaagacaaccaaaaaaattccctcctc

SEQ ID NO: 175806 - DNA, 836 bp, Homo Sapiens
  misc_feature (783)..(783): n is a, c, g, or t
gggattctggggttcgtttagaggtttgaattttctcggagaaagacaggccggccacgaggaaaacagaaacaagccgcagcaacataaaccaccatcatgggttcgggtcccatagaccccaaagaacttctcaagggcctggacagcttccttaaccgagatggggaagtcaaaagtgtggatgggatttccaagatcttcagtttgatgaaggaagcacgaaagatggtgagtcgatgcacttacttgaacattctcctgcagacccgttcaccagaaatattggtcaaatttattgacgttggcggctacaaacttcttaacaattggctgacgtattcaaagacaaccaacaacattcccctcctccagcaaattctactgaccctgcagcatctaccgctcactgtagaccatctcaagcagaacaacacagctaaactggtgaagcagctgagcaagtcaagtgaggatgaagagctccggaaattggcctcagtccttgtcagcgactggatggctgtcatccgctctcagagcagtacccagcctgctgagaaagataagaagaaacgtaaagatgaaggaaaaaggcgaactacccttcctggagcgacctttgaaagaggggaaggctggagacccgggctgagggaggccccagagaagaagagggaggaagccccaagtctcttcgcaccacaggaccccagtcatggcaaagttccgttccactgggactaagagtgggagacaccgtcccttgggggcctgcggaanaagaatggccggcaccgggggtggggtttctggacaagttacaaactttgaac

SEQ ID NO: 175807 - DNA, 417 bp, Homo Sapiens
  misc_feature (230)..(230): n is a, c, g, or t
aaatgcacaagggggtggtctcagtgatggacaaggggatggagtagagtatgtacagcccccgggctcacaggggagggggacggcggagtcggtgggggctgtgccaaaggagcccccctctctgggtagcccctgcctcctttcccatcaggacctctgacgcccaggtctgcccacccactgcccctcactctattcccaccacatcctgaatcctgctccacggncctgcctcggaagacccctgcagccctggggagaatgtgtggcggaaattctacccaagattccccaaataattggtcacctgctctcctggcccctaaaaccggggctctggtgttggcctgagctccacgggctgagtgctcgggcaggcagttgttggacctagtgacttacttacagggaccg

SEQ ID NO: 175808 - DNA, 566 bp, Homo Sapiens
aataggaatgggggaaacggtgattgcctgaaattcttactccgttccaagtgctgttcctcccaggaaatcaaaggccaggtccttatggccgtggagccttcccgaccacagagccaacttgtgaagcacacagctctgcagcctgggctctgccctgcctcagccgcctcccccacgctcttcaccacgttcctggagagtccggccaacctgtcccagccgaaacactgctgtattagaaaaagtctctttctggtctttctggttttgtttatgaatttccctctgtggccacaaattcctcccctcccccatgactcacagtccatatggcccacccccagacttgagcaccaagctctgcattaatgcagttggcctgcgacaaggagctgtggacccttccccatctcttccaattcactttccccaactatccagttccagaggccgcagccctgaagggatgcagtgcctatggaaaggtgaccctctgaaaacagttaagaggaatatctgtatgtttacccattaagaaaaaatggaagctaaacaatgtaacc

SEQ ID NO: 175809 - DNA, 993 bp, Homo Sapiens
  misc_feature (127)..(189): n is a, c, g, or t
  misc_feature (198)..(257): n is a, c, g, or t
  misc_feature (338)..(338): n is a, c, g, or t
attccagcgcgctgccactcgtttcccccatctatccacgtctgtcgtgtggcgggcgctgggcaatcgggcgcggaagcggtcggaatcatgtgcccatacccagtgtgttccgtaaggggcgggnnnnnnnnnnnnnnnnnnnnnnnnnnnnnnnnnnnnnnnnnnnnnnnnnnnnnnnnnnnnnnnggcgggggnnnnnnnnnnnnnnnnnnnnnnnnnnnnnnnnnnnnnnnnnnnnnnnnnnnnnnnnnnnngccccaaaatggggcgggccaaaaccaagcccccccaaagggccccctggccatggggggagatcctgccccaagcctggngccagagccagcgtgtgcccagggaaggggtgcagcggggttttggcaataaagtggggaccgggtggtaggaaggggatccgaggcagcaagttctcctctgccccaactccagcctcccatgggcctgctggagagggaggggcctggatcccaaggccaggggcacagcatctcctgtcctggactccactattctagggccacggcagggttgatgggggaagtggcccctgagctgtcattgccccctgccgcctccttctccttcttgccactgtactggccaatgaacgaaccatcctcgttgaactgaacatccacgctgcccccataatcggccaggctgtcgtcactgcccaggggcttgatgtccccgttgagcgatggctggctgctgccaaaggccttctcctcgttgtcactgtactcgccgaaggtctcatctttcatcggtcgggcctcagagtccacctgggtgtcctccttatccttcactgtgccattggtcttcacagccatttggtgccggaacatcctctccttaaacaagtggatctcgtagtcagtgtcaggctgcaggtcccactgcgtgtaggagctctggttgtagctgacatactgtggcgaaagggaagccccaccttctctccca

SEQ ID NO: 175810 - DNA, 755 bp, Homo Sapiens
  misc_feature (234)..(234): n is a, c, g, or t
  misc_feature (391)..(391): n is a, c, g, or t
  misc_feature (551)..(551): n is a, c, g, or t
gggttccaataagtgaatggaagcagtggtggtagctacactgggcagagttggcagggtgctggttcactctgcccagccctgaatgtgtgccttaaaggccccctacaaggggccccatacgacagagcttttaactggtgccttccctgtacccgcagcagccacaagtgggcccagactattgcagcctcccataaacatgtgagcatgttctgagtgtgccatgatgtngagtggacctggctggaatcttcggagagcgactgaggtgttcaaatcgaatctcccaggaggcttccttccagccccctattctggtaactaccaggaggcttccttccagccccctattctggtaactaccaaaatccctcgggtgcaagtgtangggtagagatggaaggatgagaggtgaaattgaccttttgaaagcaaagctctggctcacaggcccccaactaccagccgtatctagcatatccccacccctccaacccactacctccctccaaaaaaggaagtccaactcaggtttgaaaaaaactggntccctttggccctattccatggggtcaaaagcccaacctcctccctggggggccctggaaaagggacttgacccctaacgggaaaggggggattaccttttcccactttcagcaactgggcttttccaacaagggcccccccttggcccgggggggcctttccccaggggaaaccttttttttaaccccattttccagattccc

SEQ ID NO: 175811 - DNA, 952 bp, Homo Sapiens
ttcacaccaccaccacgtgtgtgatagtcagtcggactgcagaaggaggtgaagtgttaaaagagactctggacagtgacaggcccctccctgttccagagaggcccccatctgccaggtttgagaggaggaaggcctgtcagggccctactctcatgtccatcagcttgggaggcctgccccccagtatccacctctgggggagttccccatttccactcttcagatgggaagcaaaatgaggcaagatgagaaggaagcaaggtcctggaggcaaggccagtgctttgtgctgggggaaggacagagggtgagaaatcaccccaaatcatgggagaccccgacaaattcagagactcaaggccaccgaagagagacaaccagtcctcacaggtatctggggtcccttccaacttgggatatcaagcagatcccttggagggtttatgttcttggttctgccctgtacttctcaccccatcaaggttctgggaacatggccccccaccctgccccagggcttggagtccctcttggatgtgtgctcctccagtgtgagaagcaccacgtctgggtctgagctcaggccagttgatggggagcctcaagcatctccatgaggaaggtgtcgatgggggtgtcaccaatgagcttgaagaaaaacagatgctctagacacttaaggccaatggaccggagggcaggaagacgtagcagcagcttggcaaaccgtccctgctgctcagggtacttctgtttgcagtaggtctccagtgatgcatacactttctcccgcaggacctccacctcactagggttggagaggcccttggcatctggattacaacagaatgattgccctcaggcagccagctctgtcttgtccatcctcatgtcacgcattttggacactagctctgtcagcatcctggagagggaccgatcaaagatg

SEQ ID NO: 175812 - DNA, 653 bp, Homo Sapiens
ggactaaaacaatttcctgaactcacctgttgtactattcaccttttaaaccataaattgctctttagccatttgtagtgcagtaaatgttacaggaaaagacttggcacattttcttccaaattttaagaggtgattttcaaaagctttattggggtatgttgtcagaccagggttttcagagttgatggaaaagagtcttgtgagaaaacttattttgataaattattacacacgcagaaaaactgatcacactgactggatctgtccacgacatggaaaataaactggattttcagaatattgttgttttctgtagtgttcaaggtattgtttctaaacataaacatactctaaacatgctttattcacttgttaaagtcatacttttaaaagtaataccttactaaagatggtgattacttttccgaggtcagaaaaggaaagctaagcgttttcattatcaaatacacaagcttattaaatgaatgactgttaactactttattttcatttgcacattaattttggaattgtttctgttttgctgctgacggaaatactattttggctctgtgtatatttgtattttgatttttctggtttgtttacccccacttgccctttcgtgggatcctctagaacgcccgcgc

SEQ ID NO: 175813 - DNA, 530 bp, Homo Sapiens
acccattcggtttttcccagggccaattgagaaactcacagggcttgaacgttgactcagccgagttcagcttcctcaaggccatagtcctgttcacctcagatgccctgtggtctctctgatgtagcccatgtggaaagcttgcaggaaaagtctcagtgtgctttggaagattacgttaggagccagtaccccaaccagccgacgagattcggaaagcttttcgtcgcctcccttccctccgcaccgtctcctcctcagtcatagagcaattgtttttcgtccgtttggtaggtaaaacccccatcgaaaccctcatccgggatatgttactgtccggcagcagttttaactggccgtatatggcaattcaataaataaataaaataagaagggggagtgaaacagagaaagaaaaggcaaaagactggtttgtttgcttaatttccttctgttaagaaaggatataaaaggatgttacaagtttgctaaaagaagagaggggaagaatttaatggactgtgaatttc

SEQ ID NO: 175814 - DNA, 833 bp, Homo Sapiens
cgcggagccctatcccacgtcgcgcttcggcagccaatgcatgcagcccaacaacatcatgggtatcgagaacatttgcgaactggccgcgaggatgctcttcagcgccgtcgagtgggcccggaacatccccttcttccccgacctgcagatcacggaccaggtggccctgcttcgcctcacctggagcgagctgtttgtgttgaatgcggcgcagtgctccatgcccctccacgtcgccccgctcctggccgccgccggcctgcatgcttcgcccatgtccgccgaccgggtggtcgcctttatggaccacatacggatcttccaagagcaagtggagaagctcaaggcgctgcacgttgactcagccgagtacagctgcctcaaggccatagtcctgttcacctcagatgcctgtggtctctctgatgtagcccatgtggaaagcttgcaggaaaagtctcagtgtgctttggaagaatacgttaggagccagtaccccaaccagccgacgagattcggaaagcttttgcttcgcctcccttccctccgcaccgtctcctcctcagtcatagagcaattgtttttcgcccgtttggcaggtaaaacccccatcgaaaccctcatccgggatatgttactggtcggcagcagttttaactggcccgtatatggcaattcaataaataaattaaaataagaagggggactggacccgagaaaggaatgggaaaaaaacgggttttgtttggcttaatttcccttccggttaaaaaaaggaaatataagggattggtcccaaatttcggcttaaaagaaaccaagggggggat

SEQ ID NO: 175815 - DNA, 509 bp, Homo Sapiens
ggagcctatgtgttgtccaaggcctcgttgacatttacatcttttcagaagataccacattcaaatgggactcttgtgctgctcatgccatactgcagggccatgggtgggggaatagtagacttgaaagaatgcttagaaagaaatccagaaacagggcttgatttgccacagttggtgtaccacgtggaaaatgagggtgctgctggggtggatcggtgggccaacaagggaggactcattgcatacagatccaggaagcggctggagacattcctgagcctcctggtccaaaacctggcacctgcagagacgcatacctagaggaactctaaccccggtgtacctgtataaactgaactgtgaaactgtttcggttatctctgtcttttgaggatggctttgtcctgttgctggttaacattcaccttcctcttttgaggagtatttttccattatgtattcataataatgttaatttcaataaatgacattcatgcagcaagtcc

SEQ ID NO: 175816 - DNA, 833 bp, Homo Sapiens
gggagaacagcccaagatggccgacttcgatgatcgtgtgtcggatgaggagaaggtacgcatagctgctaaattcatcactcatgcacccccaggggaatttaatgaagtattcaatgacgttcggctactacttaataatgacaatctcctcagggaaggggcagcacatgcatttgcccagtataacatggatcagttcacgcctgtgaagatagaaggatatgaagatcaggtcttaattacagagcacggtgacctgggtaatagcagatttttagatccaagaaacaaaatttcctttaaatttgaccacttacggaaagaagcaagtgacccccagccagaagaagcagatggaggtctgaagtcttggagagaatcctgtgacagtgctttaagagcctatgtgaaagaccattattccaacggcttctgtactgtttatgctaaaactatcgatgggcaacagactattattgcatgtattgaaagccaccagtttcagcctaaaaacttctggaatggtcgttggagatcagagtggaagttcaccatcacaccacctacagcccaggtggttggcgtgcttaagattcaggttcactattatgaagatggcaatgttcagttggttagtcataaagatgtacaggattcactaactgtttcgaatgaagcccaaactgccaagggagttttattaaaatccatagaaaaatgcacgaaaatggagtatccagacacgccaattaactgaaaaacctatcaaacccaatgttcagaataccaccatttccaggggcccttggcgccccggcaggctttcccac

SEQ ID NO: 175817 - DNA, 912 bp, Homo Sapiens
ctaaaagtgtctgaatttgctgataactttataaaactcactatggcatgcttccctcctggtgggccctaggatggatgacactcaagatactacagatgtgggtgcaggcatgcacacacacgatggaatatggccattcctacacaggtggggtagagagtgggtcagcagcctggcacctcacagaggtgggacctaagaggactcatgattatgcagagaattggattgggtctctgtcatagattgagtaatctcttcccttacctcaattccatctccacccatctctacatctgggcacagcaacccagagatggccaaaagcattcaagcctgggggaagatgtttgactattgctgctcttcaccagaacctcacacctctcctgggactggaacccttcagtgggtgtgtggccagttttggaggctggaatgatgggccaggtgtaggattcattctccatgtaaagtttcctttcatcctgcctagccatccccaaggtttatttccagaagaaaggaatatctctacttggatcaattctggtcatttcaagaggatggaggcctcaagtgtgggaacttcccctactccctggatgtgtgtacctagcacacttccttctcccacccctttttccagtggattgtttttctgttctcttctgtcctgtcttatactgcaactgtgtctccttaggggacaagatggccttctttgtcatcttcactctccaccccagagaggagtcagagccataactcaatcactcaagcccctccaaagataagttgatgttgtgataatctcattattgttgagaaccctgatgagatactttgtcttcttctccctaaaaaggcttctgggggcaaggcaccattcttctggcatcctccatc

SEQ ID NO: 175818 - DNA, 1060 bp, Homo Sapiens
  misc_feature (67)..(220): n is a, c, g, or t
ccggttggatccttgcgttgtctccgttccctgtagctcccctttccgggtccccccattttcctgnnnnnnnnnnnnnnnnnnnnnnnnnnnnnnnnnnnnnnnnnnnnnnnnnnnnnnnnnnnnnnnnnnnnnnnnnnnnnnnnnnnnnnnnnnnnnnnnnnnnnnnnnnnnnnnnnnnnnnnnnnnnnnnnnnnnnnnnnnnnnnnnnnnnnnnnnntcagatgattttaacaacttatgcttccatgacttgctgggctagatgatatgacttgttaaatgcccaaacccccggttagcatcaagtaagcaaattgtaaatggtagccctgctctgcctatgactagtcttgtgctttaaactcaaatatttgttggcctactgaagtcaccacacagagaaagatgcttttcattctcagtaaagaactttgggagataactggggcaggcagcaagagaacagatgtcatatgtctagcatcagcaaactcatcggaactgatgggcagctcactttgcttagaacctgcaccagcatacacacggggctgcttcccagtcacactgctcctgggaaggtaggggggctgctgttctgcaattagcgtggttctttacctcctattactgaactgccagagttcatttgtgttcagttaggtagatgaccaattcttgttcattcctattttcttttgctcactaatgtgtttaacattcactaacctaccaatgtgatttattagcgactttttctttgaagatggagtggaggaatcctagcactttctgcaacattctactgctgttatggaacagtgcagttatggatgagcgtcagccggggatggggagaggctagggcagtacatgtgaattgagaggtagccccaccagtgtgttttctgaaatacagtcccacagagggcagtcttgggaaattactgttctcacacactcttcttgaccctacccctcaagcacacgcatgaatgttcatcccgacttggtagggggcttttcacccttacaagatggcaaaagattcacactg

SEQ ID NO: 175819 - DNA, 816 bp, Homo Sapiens
gcaaggcagcaggatggaggggtttgtaaaaatgccttccacctaccctgctgggcttgcccgagaggctctgagtgtgtgaaggggaagacaattatcgctaggctggagaatagaaagagcaccatcagtccagtgagttgcaagcctaatgctcacctgcagagacagaattcctgagtgaacgaacagagcagctcctcttccatctccagaaatgacctccaccttcaacccccgagaatgtaaactgtccaagcaagaagggcaaaactatggcttcttcctgcgaattgagaaggacaccgagggccacctggtccgggtggttgagaagtgtagcccagcagagaaggctggccttcaagatggagacagagttcttaggatcaatggtgtctttgtggacaaagaagaacatatgcaggttgtggatctggtcagaaagagtgggaattcagtgactttactagttctggatggggattcctatgagaaagcagtgaaaacacgggtggacttgaaagagttgggtcaaagtcagaaggagcaaggtttgagtgataatatactttcccctgtgatgaatggaggtgtgcaaacttggacccagccccgggtctggtatctcgtgaaggaaggaggcagctatggcttctctctgaaaactgtccaaggtaaaaagggggtgtacatgactgatattacacctcaaggtgtggctaatgagagctggagttctggctgatgatcacttgattgaagtgaatggggagaatgtagaggatgccaggcatgagggaagttgccgtggag

SEQ ID NO: 175820 - DNA, 739 bp, Homo Sapiens
gatgtgtgtgtctttaagtgctcagtgtcccgagagacagagtgcagccgtgtgggcaagcagtccttcatcatcaccctgggctgcaacagcgtcctcatccagttcgccacacccaacgatttctgttccttctacaacatcctgaaaacctgccggggccacaccctggagcggtctgtgttcagcgagcggacggaggagtcttctgccgtgcagtacttccagttttatggctacctgtcccagctagcagaacatgatgcaggactacgtgcggacaggcacctaccagcgcgccatcctgcaaaaaccacaccgacttcaaggacaagatcgttcttgatgttggctgtggctctgggatcctgtcgttttttgccgcccaagctggagcacggaaaatctacgcggtggaggccagcaccatggcccagcacgctgaggtcttggtgaaagagtaacaaactgacggaccgcatcgtggtccatcccgggcaaggtggaggaggtgtcactccccgagcaggtggacatcatcatctcggagcccatgggctacaatgctcttcaacgagctgcatgctggagagctacctccagcgccaagaagtacctgaagcccagtcggaaacatgttcctaccattggtgacgtccaccttgcacccttcacggatgaacagctctacttggagcagttcaccaaggtcaacttctggtaccagccatctttccag

SEQ ID NO: 175821 - DNA, 444 bp, Homo Sapiens
ctccacatgcaacttcctgagcaaaacagaggcggcaagctgccaataaactttacgtcaaggctaaaccgcagggcatcatttccaaagtatggaggggtggatggcggatgctttgataggcaccttatctttagcagattccgtcctatttcagtgttccgggaagccaatgaagatgagagtgacttcacctgctgtccattctcagcacgggagcggttcctgacgctttggaacctgcaacagggcagctgaagctctataatgtgtccagtgcacaggaggaggccagctataactgtcacaactcagccatcacacattctggaaccttccaggggatgggtccttgctgctgacaatcctggtatttggagccagcctttgtctgcactttggggaatgaaggtccagtatttgatatgaagcattccttcacag

SEQ ID NO: 175822 - DNA, 635 bp, Homo Sapiens
ttatagagtatccccgtcacagcaacttccgtcatgggaagagcacttaggatcttgctatcagctgccctaaactttggcggagccaaaataagacttggatgcagaactgaacaagatatttcatttttgtgtgttttaatcttcctggttgcagtcttagttgttcagccctgagaatttggagccacatttgtggctattattttggcatgcacttttcaaaatgatggacttaagcttcctgactgaagaggaacaagaggccatcatgaaggttttgcagcgggatgctgctctgaagagggccgaagaagagagagtcagacatttgcctgaaaaaattaaggatgaccagcagctgaagaatatgagtggccaatggttttatgaagccaaggcaaaaaggcacagggacaaaatccatggcgcagatatcatcagagcatctatgagaaagaagaggcccagatagcagctgagcagagtaaagacagagaaaatggggcaaaggaaagctgggtgaataatgtcaacaaagatgctttccttcctccagagctggctggcgttgtagaagagccagaagaggatgcagcaccagcaagcccgagttcagtgtggtaatccagctc

SEQ ID NO: 175823 - DNA, 553 bp, Homo Sapiens
  misc_feature (96)..(96): n is a, c, g, or t
gaagaagaggtccaagaatctttaaagacctgggtatcctttgcactatccaaaagctccatgtacacagtgggggctcctcatacatggcctcancattgtggcagccttagtttggctaatagactgcatcaagatacatactgccatgaaagaaagctcacctttatttgatgatgggcagccttggggagaagaaactgaagatggaattatgcataataagtggtttttggactacaccataaaatgctatgagagttttatgagtggtgccgacagctttgatgagatgaatgcagagctgcagtcaaaactgaaggatctatttaatgtggatgcttttaagctggaatcattagaagcaaaaaacagagcattgaatgaacagattgcaagatgggaacaagaaagagaaaaagaaccgaatcgtctagagtcgttgagaaaactgaaggcttccttacaaggagatgttcaaaagtatcaggcatacatgagccatttggagtctcattcagccattcttgaccagaaattaaatggtctcatg

SEQ ID NO: 175824 - DNA, 655 bp, Homo Sapiens
ggcactgttctaggtgctgtgttctactaaacaaggaaacagtcaagagtcatcgaataccattaagaaggatcatacagggaaatccaagatacccaaaatatattttgggacacgcacacacaagcagattgctcagattactagagagctccggaggacggcatattcaggggttccaatgactattctttccagcagggatcatacttgtgtccatcctgaggtagtcggtaacttcaacagaaatgagaagtgcatggaattgctagatgggaaaaacggaaaatcctgctatttttatcatggagttcataaaattagtgatcagcacacattacagactttccaagggatgtgcaaagcctgggatatagaagaacttgtcagcctggggaagaaactaaaggcctgtccatattacacagcccgagaactaatacaagatgctgacatcatatttggtccctacaactatcttctagatgcacaaataagggaaagtatggatttaaatctgaaagaacaggttgtcattttagatgaagctcataacatcgaggactgtgctcgggaatcagcaagttacagtgtaacagaagttcagcttcggtttgctcgggatgaactagatagtatggtcaacaataatata

SEQ ID NO: 175825 - DNA, 621 bp, Homo Sapiens
taacagagttcatgttgaagatggtagacactggtggagtttttatccaagaacttaaaacttaggaaacaccctatgatgccacctttaactggaagtaatggagacatctgattccaaattcacattttaaatccctatttgcaatcagcaaagagccaggtatgctgcatgctgcttgctgtaagttacgatttggcttcactagctcaaattttttcactccaccaaaagataaggcacaggcccgtttgtccaatcaagtttgctgaaaatactgcagcctgagtgtagacaaacttcccctgaatttgctagaagttttcttgtgtctggaggtttcaagatcaccatacatctttcaaacacttcttttctgaggatgttctaactgctggggcccttaaatacaaacccattctttgggtagagtcctggcctggtcatttgtgtgtataagtccatcctcggttgcatactggtaaccttggaagaagttaagaatttccttaactccagtattgtaggccaggccctgcattctgaccaccgtgccaggctgtggagggacaccgctaagatagcagctgtagggaagtaccaagactattaggcgaactg

SEQ ID NO: 175826 - DNA, 1125 bp, Homo Sapiens
ccatgaggtacccctgcatcgcaatcctacaggaaggctgtattctcctcctcaactatgcttgaaaatcacagggactttcagtctgtgcaacagggctccctgggcagcactgagtgctctcagtctcttcagaagaagaaagtcgctgagggtccgtgggctccggtgcacagggaagaaactggccatctgtctccggggcactggaaggatcctgtgctgtcatcattaagggcataagactgtccatctgcttgaggtttgttttcattagttgctgttggatgtccataagtttaaaaattggtccagtgcaaccgtctccaggaaatgggtgttcatgatgtgaatcaaggactcagaggttaatgtatagatgtccaactctcgatgatgcctcacagaacagtctccatacggtatttcataggataaactgctccaggagtctggttctccagcattctcctcggttagaagctggtgcagcttgtgatagcctcgctccaaaggccaagctcacaggcgtcgcccccttcctggttgtggatactgagagctccgcggccacctggcttctgcaacaggaaccacgtcaaccctcaacaaggcccagccgcacagcaaaatgcatcaatgtctctcgcgggccagcatcatgcaaactctgatcttggtccccaattacattccactccgtggggcagctttcaggtgcctggaatgccagcaccaacttcttatcaagggaattcacatccccagatgggggtcctgactgctcaagaaaacgggtaaagttcaaagcctgctgatttccagcactggttgctaggaattgagctgcatcatacgcttcatcctggacgaaatgaaagtcttctgtcagccaccacaaacacgggaaggccctctttggaagcacagagctgcaccttcactgtttcaacaacaatcatgaccaggagcaatggtctccaatgtatcagaactgaccttccgagtacttgtacagtgacggtagggtggaacccaaaaataccaagtaaaacactacatcaatcttcagctttgtcctcttcagcaagcagcatctgtaacaacacaatcaccatataagca

SEQ ID NO: 175827 - DNA, 714 bp, Homo Sapiens
ctccaagccaacttcctgagacacacacacttatgtgtacatacatttcatacacaattagaatacatctggaacacatgagtgaatacaccagtgtcatgaaatatttccagagcttaggattctagcaccttgtcccttgcccaaatttaaaatccctgattatttttggccccaagacaatagtctcacaaagcatcactttctaacaatgagcagccagtttctaagactcagacatggaaacatattccataccgtcagccttttgcaaagcataacctcagatgactgtatcatcctggtccctccttgagtaaatatgagagactacaacacagagaaaaatcaaagttgccccccaagctgaacaactaagagcttaatttaaggctgaatttcaaacaagtcagctctttagaccaaaatgacatctgccagtccctcatgttttcaggacatacggacaacaaacaggattggcatcctgccaggtagaagactcagatccaagccttcttgttgccaaacttagaagaatcattctgctttgttaaagatactcccctaaaaaaatacattgcagtttctgggagaatactccatgaggtagaaaaatacagcaccttgggagagtctcacaagagctttcccaaagtcaaggcataatctgacacactaagggaggaatttgctgggacggggatcctctaa

SEQ ID NO: 175828 - DNA, 864 bp, Homo Sapiens
  misc_feature (16)..(16): n is a, c, g, or t
  misc_feature (72)..(72): n is a, c, g, or t
ccagagtgtcatcgtnactccgcaacttcctcaataatgtggcagatcaaattaacttgtcgcaccttaatntgttttacagatcttctgaaacccctgccccatcatccaaaacaaaactttctagtatttcaaaggagtttagtaagactctggtattataaattcaaactcagtactgccatctgttacattttgtttaaaaattgaatcattttcctgctgaataaaaatatcttcccaggtcattggcttgttctgagtagatgtagtggtccctactggaggttcttttccagtgtcaaccttatacccagataccatcatccttcattgcaggaatagtgcttgatctatcggaaagatatgcatattgtctgatttgtaaagacctgcatggatgtaaacgataaagctttgagtccccagaaggatcttgactatgaactgactttatatgtgaagacataaactgatagttgatgaaagatttgccacaggccaaacactgataccttcgctcccctgtgtgatgaatttcatgctttgtgcgatattctgcaagaggaaataccttctcacagtaacggcacggatacttcttctcccaagaatgaatgttaaaatgtctccgcaagcttgtcagacagacatatgaccttttgcatacaatacagatataatagacccttccatctactattaactcatagtgatcatcatgttttactttcatacgtttgtttgccatctcgctgccagacgtttttggtatttcattctcaagtctgcctccccttcatcagggtcatctctgacagggatcactatatcatatgtcctcttcaatcgggatcctctaga

SEQ ID NO: 175829 - DNA, 1086 bp, Homo Sapiens
  misc_feature (914)..(914): n is a, c, g, or t
  misc_feature (952)..(952): n is a, c, g, or t
  misc_feature (971)..(971): n is a, c, g, or t
gagcgaggcctgggtggcgaattcggcacgaggcaggctgcggcccccagacctggcgcagcgtgtccagctgtgggagcacttccagagcctgctgtggacctacagccgcctgcgggagcaggagcagtgcttcgccgtggaggtgactactgggcgcgggagtcctcaggacttgaagctgtcaggccctggagcgactgattcacccccagctctgtgaactgtgcataaaggcgctggagcggcacgtcatccagggctgtcaacaccagccccgagcggggaagcgaggaggccctgcatgccttcctgctcgtgcactccaagctgctggcattctactctagccacagtgccagctccctgcgcccggccgacctgcttgccctcatcctcctggttcaggacctctaccccagcgagagcacagcagaggacgacattcaggagacagacagcttctccctccctgaggagtacttcacaccagctccttcccctggcgatcagagctcaggtagcaccatctggctggaggggggcaccccccccatggatgcccttcagagccccagcgcgcccctggccctggttctgtcccagctgatggatggcttctccatgctggagaagaagctgaaggaagggccggagcccggggcctccctgcgctcccagcccctcgtgggagacctgcgccagaggatggacaagtttgtcaagaatcgaggggcacaggagattcagagcacctgggctggagttttaagccaaggctttcctccaaaagctgctcccagcatgtgggaagctgaagcggcagctctgcgccatctaccggctgaactttctgaccacagcccccagcagggggaggccccacactggccccagcacctgcaggaaccagntgcaaaggctcatgcgggagaaccttgacgactggaangacttctttgctggggaanaaccggaggaccttcccctgggggtcctacctaaaaaagattcccccagcttgggggcaccttcatctaatggggaccgcacccacttgggccaatggtgggcgcctttccctta

SEQ ID NO: 175830 - DNA, 533 bp, Homo Sapiens
atcctgtgcaatgatagatacatcagtgtgggaacgcaagcagatacaaatgtgattgatctcactggagatgataaagatgatcttcagagagcaattgccttgagtttgcccgaatcaaacagggcattcaagggagactggaataactgatgaggaacaagccattagcagagttctttgaagccagcatagcagagaataaagcatgtttgaagaggacacctacagaagtttggagggattctcgaaacccttatgatagaaaaagacaggacaaagctcccgttgggctaaagaatgttggcaatacttgttggtttagtgctgttattcagtcattatttaatcttttggaatttagaagattagttctgaatcacaagcctccatcaaatgctcaagatttaccccgaaaccaaaaggaacatcggaatttgccttttatgcgtgagctgaggtatctattggcacttcttgttggtaccaaaaggaagtatgttgatccatcaagagcagttgcaattcttaag

SEQ ID NO: 175831 - DNA, 724 bp, Homo Sapiens
aaactgagcttgcccctgggcctgagtactcctgcagggctggaggaacaggttcttagaagatgattcaccttggaggaagctggggaaagtgtttagggagggagaggaggaagactgagaaatctctgcatccccagaactcagcaacccagctcttttatcatgaggagaggtacccatgctgactcatgaacaggtggaggaaaggggttgcaggtgaccagcatcttcaatctagttaccaccagcttggctagaattttattgaacgcaacttgctagttatgacagagaggaccagggtgagaactaatgctcaagagagcaagattctgtaatcctcttgccctctcacatcacaaattctgatatgccaaacatttggcccaatgagaatgactgatagacttgctgatgtgcatgtggggggatgaggtgtgtatatgcctttctcctgactggccattcagtgttcaggctgtcattcaaattggataggagaaagttggtgaggaaggaatggagagagcaggatccctggactccctggtccccaaactccttgactgtcacttgtaattgtatataatttttgtgtttcttgctccatttcctcatgctgtcatccttaaagtccatctgggaaggggaaaatgctgaacaccattgtatagtttcttcaactgtcccagccatgttgtacatagatatgtcatgttat

SEQ ID NO: 175832 - DNA, 606 bp, Homo Sapiens
cctccacagcaattcctgcaagggccgtggttggtgccttcgccaaaagtctatgcacatcatgctgtttctactcttgggatttccaaaaggaccacaggatagtggtcccattctattcagtttctttttgcacagtatatgcctgaatggctctgggtgtggggagcaaatattctcaaccgttcactacgtaaggaagccttatgctgcacagcctgagtctggatggccacttgagaagtttggccaactcctgggaacctcgatattctgacatttggaaaaacacatttaatttatctcctgtgtttcattgctgattattcagcatactgttgattcgtcatttgcaaaacacacataataccgtcagagtgctgtgaaaaaccttaagggtgtgtggatggcacaggatcaataatgcctgaggctgattgacgacatctacatttcagtgctttttccctaagctgtttgaaagttacgcttttctgttgttctagagccacagcagtctaatattgaaatataatatgatttgtcaggtcttataatttcagatgtcgtctctcaagggaaattgaccattcactagaggaagtg

SEQ ID NO: 175833 - DNA, 834 bp, Homo Sapiens
  misc_feature (379)..(637): n is a, c, g, or t
  misc_feature (641)..(704): n is a, c, g, or t
  misc_feature (760)..(771): n is a, c, g, or t
ggtgacggcatgggcaaagaggggcaacagacccaccctgaagacactcctcatctggttgacttggcagggttaagggaaaaagatgtgatgactaggagctgagagcttagtggttctgccagagctgcagagtctttgttggcctcagggtgggacctctcacatctctgtcagcttttcacagacaccaacctgttatgattcatttcacctgtcctgagcactagcaagaaaaattcgctgtagcttgtgatgtattattctggatttctcaactcattcatttgttcattcattcactataccattactgtctattataaggggggcacaatggtaggtgctgggaataaaaacgatgtttaacgtttcaaannnnnnnnnnnnnnnnnnnnnnnnnnnnnnnnnnnnnnnnnnnnnnnnnnnnnnnnnnnnnnnnnnnnnnnnnnnnnnnnnnnnnnnnnnnnnnnnnnnnnnnnnnnnnnnnnnnnnnnnnnnnnnnnnnnnnnnnnnnnnnnnnnnnnnnnnnnnnnnnnnnnnnnnnnnnnnnnnnnnnnnnnnnnnnnnnnnnnnnnnnnnnnnnnnnnnnnnnnnnnnnnnnnnnnnnnnnnnnnnnnnnnnnnnnnnnnnnnnnaatnnnnnnnnnnnnnnnnnnnnnnnnnnnnnnnnnnnnnnnnnnnnnnnnnnnnnnnnnnnnnnnncaccccctctctttcctatcaatttccatccccctttttcccgtttcctcgttttnnnnnnnnnnnnaatccaaagctttccgtcggcacacaagccgcgtgcttctcacccccagctcgggggtgcccc

SEQ ID NO: 175834 - DNA, 622 bp, Homo Sapiens
tctccgtgcccagtaataatcgggtagccagtccttctgcaagcactccagtgaagcacatttcctcgtattcctctgtgtaacttgcatgccttctggagttaaaaatgttgggtggcctctctctacttgatttagctgaaatcaccttcacagaaataggttgcttctgctgtatggtttgagtatgattaaatctagcataacagatatagtcttcgcgggtgtcctctgggagggacattggaaaaataaaggtccccattcaaaccttgagaaactctctcactttgtggaagtctttgaaaggaattatccatcccaaatattataggcggtggtaatccaattgggggtctgcagggaagtactaaagactgaccactttgaagtgtgattggttcaagtttttctttggtccacaatggtgatctggatgggcggacaacaatgttattagaaactgcagctccgcgttcgttccttgctgtacactgatagactccttcataggtctcagctttcccttcgctcatgatgttaattatgagcgttcctgtgccaggcttcatggtgaccagagggtctttatcgatgtcaaaatgagtcccattacgggtcc

SEQ ID NO: 175835 - DNA, 1039 bp, Homo Sapiens
  misc_feature (736)..(736): n is a, c, g, or t
  misc_feature (800)..(800): n is a, c, g, or t
  misc_feature (834)..(834): n is a, c, g, or t
ggagcgaggcctgggtggcgaattcggcacgaggggagcctgcccctcagcagcaagggttcgggctctgcaggctgggacgtcattcagatgacaccacaggagattgccgtgaacctccggcccggtgacaagaccaccttccagctacaggttcgccaggtggaggactatcctgtggacctgtactacctgatggacctctccctgtccatgaaggatgacttggacaatatccggagcctgggcaccaaactcgcggaggagatgaggaagctcaccagcaacttccggttgggatttgggtcttttgttgataaggacatctctcctttctcctacacggcaccgaggtaccagaccaatccgtgcattggttacaagttttgtttccaaattgcgtccccttcctttgggttccgccatctgctgcctctcacagacagagtggacagcttcaatgaggaagttcggaaacagagggtgtcccggaaccgagatgcccctgaggggggctttgatgcagtactccaggcagccgtctgcaaggagaagattggctggcgaaaggatgcactgcatgtgctggtgttcacaacagatgatgtgccccacatcgcattggatggaaaattgggaggcctggtgcagccaaacgatggccagtgccacctgaacgaggccaacgagtacactgcatccaaccagatggactatccatcccttgccttgctgnggagagaaattggcagagaacaacatcaacctcatctttgcagtgacaaaaaaccattatatgnctgtacaagaattttacacccctgatactggaancaaccggtggagatttttagatggagactccaaaaatattattcaactgattattaatgcatacaatagtattcggtctttaaaagtggaagtggttcagtctggggatccagccctggaagatcttaaatctcctttctttactggcaaacctggccaaagaatgggggggaatccctatccctggggccaaaaagggaaagtg

SEQ ID NO: 175836 - DNA, 790 bp, Homo Sapiens
  misc_feature (15)..(15): n is a, c, g, or t
  misc_feature (21)..(21): n is a, c, g, or t
  misc_feature (35)..(35): n is a, c, g, or t
gatatcccgaggagntaaaancgggcatagagtcngggatgccttctccgaagtatggccactcccaatcctgaagtggtcatcaatatttgcccacaaatacggcttcataatcctcaggcctcttcaagttgggtggtctctcctcgggatctgatccatattctccctgaaacctctttttgttgctcacaatgattttcttctttgctgtcaccctcgaggaggctgatgaagagctgcaccacccgcaaagcagcttcccggaatggcaccactatcagtaccttgggccttgttaacccttggtctctgaagtcatcatcatcacccactccaaacttctggcttcggcgtctgctattgttgccaagcacctgggcattggctttgaggatgtgatttatcacatgcaggcaatacacatggcggatctcttccccgttcttcagagcagtcctttccgggtagaacaggtcccggtaagaattcataattaagaagagttctttctggaggggggtgaatgggctgcttgatttttggggaccagataggaactggctgttggtcttagtccaggtggattccagaggcttctggagatgaagtgactttaagtcaatatcctttgggggtttaaatgtttccaacttctgaaacttagaggaaaagaaaagctggcccagaataggccatttaagctcgtgggtagttttgggatttgtggcaacagcctgaattgctttttctttcagttctttgttcacatgttgaagaaatggatccc

SEQ ID NO: 175837 - DNA, 503 bp, Homo Sapiens
ctctgtcacagcaattcctgaatgggagctcgagaatttgcccatgaggccgaatgcttctcctgccacccggaatgccaacccatggagggcactgccacatgcaatggctcgggctctgatacttgtgctcaatgtgcccattttcgagatgggccccactgtgtgagcagctgcccccatggagtcctaggtgccaagggccccaatctacaagtacccagatgtacagaatgaatgtcggccctgccatggagaactgcacccaggggtgtacacggaccaagagcttcaaggactgtataggaaaaacactggtgctgatcggcaaaaaccatctgacaatggctttgagagtgatagcaggattggaagtgatttacatgatgctgggtggcatttttctctaatggcgtgggcgcgggattcaggaataaaagggctatgaggcgatacttggaacggggtgagagcatagaggctctggaccccagtgagaaggt

SEQ ID NO: 175838 - DNA, 546 bp, Homo Sapiens
gatgtggactatactcaaatgattgagcactcaagagattaactatgtatgattgtatccctcatgaattttcttgtcaacaagtttcctttaaaattatgtcaacaacagcatgaatttcctgttttctgtagaaagcttagagccagtatttcccctctcatacaaaccactctggattttcatatttcacaataagtaagtgtggatggcagcaccttagaaatggctattttctggcaggctatcaatctatcacaatttttttcagagaagtgacttgaagaaactgacagtttcaaatgaaacaattatactaccattaacgattcacctttcagatttgctcggcttacaggtcaaaacatgacttgtatagtaacaggttccaccaagtacaagaaataaaatcaaaccaccttcttttcttaatacacgaacaaccacaagaattctagatcctaagattaaacttcaacttcagtaagcagagttctgatgacataagaggaataacagggcacttagtttcaggcaatgcagcaa

SEQ ID NO: 175839 - DNA, 796 bp, Homo Sapiens
ggggggcgacagcggcgcgcttcgccgggccggtactccaggtccgacccgcgaacccctctgggatccccgccgctctgtctacaacccgagcactttcatttggacccgtggatacccattgaacagatgcttgaaacctgcaagtaatcttcagatcctagcagaaccataggcctttcctttgtgttgggaggatatagcctgcctatatgctgtggaaatgaacggggagcagcagcttgatgcagatgccggctctggtatggaagaggtagaattaagctgggaagattatctagaagaaacagggtccacagcagttccctatgggtcttttaaacatgtggacacacgtttgcaaaatggatttgctcctgggatgaagctggaggtggctgtgagaacagatcctgagacctactgggttgccaccgttatcactacctgtgagcagttgctccttctccgctatgatggctatggggaggatcggagagcagatttctggtgtgacatcaggaaaggctgatctctaccccattgggtggtgtgagcagaataagaaagacccttgaaagccccagaaggcatcaaagataaaagtatctgactgggatgagtttctgcggcagaccctgataggagcatgtaatcctcctggtccgctgctagaaggcctcccgtaatgggagggaatcctttagaactcattgcctccaggatccaaactagaatgtcaagctttccaggactctttaagcacttggattgttactgtagtagaaaacattgg

SEQ ID NO: 175840 - DNA, 1237 bp, Homo Sapiens
  misc_feature (53)..(53): n is a, c, g, or t
  misc_feature (55)..(55): n is a, c, g, or t
  misc_feature (136)..(163): n is a, c, g, or t
  misc_feature (1184)..(1184): n is a, c, g, or t
ctccggagaggagggactgtcagtggagcacctggggccggttccgccctcgntncgggtggcggtggcgcccgcctgcctggcgccctcagatgtccacgtcccgcacgtcggtgggtgtgcaagccaggtccannnnnnnnnnnnnnnnnnnnnnnnnnnnggcggccttggggtccatgttctgctgggcctggcgcaggcttgactccagcagggcttcgatctgctcctggcaggcccggaggcagtctgggtcacacttgatcactctggagaggaagcgtgtgaggcggtagtaggacaggaagttgttggggctcctcaggttcaggccttgcactgcggccaccacgctccccgctgccaccatggagggcggattggaaatgaacttcacatctgtggcacagagggcaacgaaggtctgcgcgtgtttgcggatgatctgtttgttctcctccgcctctggcattttggagaggaagtgttcaatgaaatcgtgcggggtcattgcggccaggttccacttgagcttgttcaccaggagcagctccatttgcagcagctcctcgggccggatggagttgtcggtgtagatgcacagcttctcggccgtcagggggatggtctccttcatcttagaggccacgaacatgcaagtggcccccagcagctgcaggcggctctttttcacgggctccagcgacagaaagcggtccaggtagttcatggccagcgggaagacctcctcctcgcacttctgttcctcgcagacctccagcatccaggtggcgacgatcttccgcatggacggcaggacctccttctgcacacatttgaagtaggacaccgagggcgcgcaggtctcctccgccttcagcatggcccgcagcacccggtcgttgaggaggttggcatcggggtacgcgcggcggatggtttccacttcgcagcacaggagctggtgttccatggctggggctcttcctgggcagctggggagggctgtgggtcctggctgggtccgcgctcggctctcgcttctgctgccccgcgctccctcgcgctcttctgcccctcgccggagcgtgcggactctgctgctcgctgctactgcgccgacagccctctggaggctccaggactttgcaacttcaacaaaactcccctgtagtccgcgnacgcgtgggtcgacccacgcgtccggacccacgcgtccggacccacgcgtccg

SEQ ID NO: 175841 - DNA, 976 bp, Homo Sapiens
  misc_feature (142)..(158): n is a, c, g, or t
  misc_feature (351)..(359): n is a, c, g, or t
  misc_feature (491)..(516): n is a, c, g, or t
  misc_feature (741)..(796): n is a, c, g, or t
ggcgagcgcggcttggtgtgcgtgggtgactccgcttgcttgcagtgctgtgggccggtgggcgcgggctctgcacggttcttctctatgccgtggtgggtcgtctagggaaactgcgaggtgtaaagaccattgggacgcnnnnnnnnnnnnnnnnncggagctcagggggccggtttccctcgcgcgcctgcccggtcattacgaaactatacgtcgaggggggggcgcgggtagtctaccaccggagggggccgagcgccccaaaacccctccagtggagtccccgggggagaccgggccctaatcctcttttaggcgcggcttaaacaaccgtttgtgttttcggcnnnnnnnnnattccaatgtcttgaaccgccgcgcctggggtccggggcccttcccagggaggcagacttggaaaccctttctggaaatgcgagcttggcggtcagaacccaggagggacatggcccccattggcccccgcnnnnnnnnnnnnnnnnnnnnnnnnnntggacctggcttgcccacccaccgacgtgcgggacgtgggcatctgagggccccaggcaggcgggcgcctccgccacccgcagcgagggcggagccggccccaggtgctccactgacagtccctcctctccggagcattttgataccagaagggaaagcttcattctcctcgttgttggttgttttttcctttgctctttcccccttccatctctgacttaagcnnnnnnnnnnnnnnnnnnnnnnnnnnnnnnnnnnnnnnnnnnnnnnnnnnnnnnnntagtatttgcataaccctgagcggtgggggaggagggttgtgctacagatgatagaggattttataccccaataatcaactcgtttttatattaatgtacttgtttctctgttgtaagaataggcattaacacaaaggaggcgtctcgggagaggattaggttccatcctttacgtgttt

SEQ ID NO: 175842 - DNA, 851 bp, Homo Sapiens
  misc_feature (361)..(361): n is a, c, g, or t
  misc_feature (364)..(391): n is a, c, g, or t
  misc_feature (616)..(671): n is a, c, g, or t
aggatgtccctttagaaccgttttctttttcccaaaattcccagggggcgggagggagaaccaaaaccgttctattccgcaaaaccgcggcaggacctttggtttgccctctgtgcccccagaattgaagtttcttttccaatccgccctcccatgttgccagcggggagcgtggtggccccagtgcaaggcctgaacctgaggagccccaacaacttcctgtcctactaccgcttcacacgcttcctctccagagtgatcaagtgtgacccagactgcctccgggcctgccaggagcagatcgaagccctgctggagtcaagcctgcgccaggcccagcagaacatggaccccaaggccnccnnnnnnnnnnnnnnnnnnnnnnnnnnnntggacctggcttgcacacccaccgacgtgcgggacgtggacatctgagggcgccaggcaggcgggcgccaccgccacccgcagcgagggcggagccggccccaggtgctccactgacagtccctcctctccggagcattttgataccagaagggaaagcttcattctccttgttgttggttgttttttcctttgctctttcccccttccatctctgacttaagcnnnnnnnnnnnnnnnnnnnnnnnnnnnnnnnnnnnnnnnnnnnnnnnnnnnnnnnntagtatttgcataaccctgagcggtgggggaggagggttgtgctacagatgatagaggattttataccccaataatcaactcgtttttatattaatgtacttgtttctctgttgtaagaataggcattaacacaaaggaggcgtctcgggagaggattaggttccatcctttacgtgttt

SEQ ID NO: 175843 - DNA, 1143 bp, Homo Sapiens
tctccctttggccctgtctctcctggagttcaagtgagtcatcttcttttgagaacctgatcacccttttgagcttcttttggattccgtgtctagatgagcctgtccctcttgggaggctttgttttcgtatggtctcctttttggagttgaccagatacagcggtgtgcgtgtctgtccgttccttgtctgaaggtgttgctggacacctcctggggctcttctgggtcatttggttctggaagaattatcctctgatctgctggcataagaagcccaaggggagagtggggcaatctcttgagggtcttctttatctcttatttgggggatcacgtttgtcactggccacttgcacagtgctagtgaggaggctgggcatctcttctgagtcttcttccgcattcattttggatgttaacttgtcattggtcactgaagtgcttcttccttcctggatgagtgcagggagaggcaggacagggtcagatgggctgggcgactcactcaggatctcatcgctttgctgggaggatgttccaggctcactgactcttggcgcacagggtgaacagcttggttgagggggttgtggtgggggcagcgccagtggggtatggagggagcttccttctgctaggccagttggggcttcaagtaggattggtgtgtctctgctctgccgttcataggaagcaccaacacgtttgaagcttctgtaaatcgtcaccagattgggatattcacgcaaggttaatttgactgaacaatgtcaccagaaagagacaggttaaaagtccctctccagttgggtgagaatgttgtgccaccactctggatacagggatcaaatttctacaggcttccagagattccatgtacattctcttagtgatgatggagttgtctaggaggccttcaaagaagggaaatggcttgtgtatggcataggcgatccccagcttctggtgcatgaagtgctgaaaaagagcctcttccatggctcttgtcatggtgaacatcctggactttgagtttgtcgttcctgcccctttccaggggctgggacagggatcactcctcaagattgggagagttacagggagatgctagcaggcaaaacaggaagtctgtgctttccc

SEQ ID NO: 175844 - DNA, 377 bp, Homo Sapiens
agggagctgcagcaacaggctgccctgatccagtctcagctgtttaaccccaccctccttactcacttccccatgaccaactgagaccctgctgcaactacagcagcagcagcacctcctcttccctttctacatccccagtgctgagtaccagctataaccccgaggtgagcttgccagtgaccagtggggcactgacactgactgggacaggcccaggcctgctggaagatctgaaggctcaggttcaggtcccacagcagagccatcagcagatcttgccgcagcagcagcagaaccaactctctatagcccagagtcactctgccctccttcagccaagccagcaccccgaaaagaagaacaaattggtcatc

SEQ ID NO: 175845 - DNA, 1237 bp, Homo Sapiens
  misc_feature (1094)..(1094): n is a, c, g, or t
gccatgaaagccatcttccaggagccctgttttttggagctgaactgcacagattatagctgctattgtacttaaataagggagaggaaaagaaggttctcaggcacagactttctatttttctcaagccaaaccagtttaaaatgtctagcagaatgaactgtatttccatttcttcatgtctacctgccttccccccacaccctaaagttgtacttgtttctagcaaactagaaggaaaagataggaaagcctggcactactaacctcacctctcatacacctctttgaaggccccagctcttttgttcaggcctctcttctccctctagactcacgtcagcgttggtatccatcatcttgagcattcttcagtagattcatctaggggtcagattcaagactctcagctgaagacagggagccaatttcccccaggtcccctgcaggtaatccaggaccccattagggagaacaggctgactggggcattaggaatgtttggtacctctctgcttccctggcagcctggggaagggtgcagggcctcagtgcgctaaaccatggtaacagcttcaagagaactaccctagaatttagtgagtgtgagactgagatatagctcagaataaatttattccatagccatttaggatttgcatgttctggaccaaccttgtccagtatgttttctgtttgagctttttcattcttttgttaagccaacaagttgagaatttggccctgctgggatccatgtagtgggcactagctgctctttgccaaggccttcataaatgattcagtctctcattatctgtcctctagccccacaccctgatttagaccgtggcaaaggaagaacttgaggtcaagaccaaccaaatctgtgaattaaagctgttatttttttctctgcaagggcgctttgcttcaggtctgggctatgtgcagaacctaagcaggctgtgagagttagaagaggcagtattacatgttaggcccagaacaccatgggaaaaggtttatgtagtgtatcttagtggcctgcctagctgcctctgggccaggctgacttcttgatgtccacattnagcttcgtacctgaaccctgttgctgaatgccagcctgttctcctgtaactattatatacgccatggcctggggggcattgaaggaagtaagctctcagagatcctaacactggctgggaacctctgactcagagcatgtctt

SEQ ID NO: 175846 - DNA, 598 bp, Homo Sapiens
tcagtctcagcaactccttattacagttcaggagggtcagatggtccaagtggagtactgatctgctctgaaaactatattacttacaagaactttggtgaccagccagatatccgctgtccaattcccaggagacggaatgacccggatgaccctgaaagaggaatgatttttgtctgctctgcaacccataaaaccaaatcgatgtacttcttttttggctcaaactgagcagggagatatctttaagatcactttggagacagatgaagatatggttactgagatccggctcaaatattttgatactgtacccgttgctgctcccatgtgtgtgcttaaaacagggttccttttttgtagcatcggaatttggaaaacattacttatatcaaatggcacatcttggagatgatgatgaagaacctgagttttcatcagccatgcctctggaagaaggagacacattcttttttccacccaagaccacttaaaaaccttgtgctggtcgatgagtaggacagcctctctcccactctgttttgcagatagtgatctgccaatgaagatctcacagcgtatgtggctgggtagggac

SEQ ID NO: 175847 - DNA, 416 bp, Homo Sapiens
  misc_feature (112)..(112): n is a, c, g, or t
atgggccgtaaaggcccagggaaaaaacatcccctatacaaataatccccatcacagaagggatgatcccttgcctgctctgcccgtagggtttttgatgcctgagctatgnctgcacatgacgttaaccctaaagaacttggacctgagcttttaaaaaaggacagcaaacaattttataatccttaaagtgtaatagacggttacactagtgccagggtattggggaggctctttgggtgtggaggctgtcacttgtatttattgtgactctaaatctttgatagtaaaacaaatgtaaaaagaaatgtttgccaccagatgggaatagaagttccaataagcaggctggaatgggtggctatacgttgtatcacgaggaagttttagactctgaaagataataaatggatgat

SEQ ID NO: 175848 - DNA, 1409 bp, Homo Sapiens
agttagtggatgtaaaacaagcttggcttggaagctgcaggcaaagccaccagctcacatccggactcgacatctcgcaagccaaaggtgctggagaccttcctggccaaagtccagacctgagctcctggaagtagtaacaatttaaagtcatcctggacctacaaacaccgcccacaacaaagtggctctgtcagagtgctatacagtagcttctgtggctgagatgcctcagaactacccgccgcatcccacagaggttcacatactgctctcaggttctgggcctgcactgctacaagaaggcgatccactactgggaggtggagctgcagaagaacaacttctgtggggtaggcatctgctacggaagcatgaaacggcagggcccagaaagcaggctcggccgcaacagcgcctcctggtgcgtggagtggttcaacaccaagatctctgcctggcacaataacgtggagaaaaccctgccctccaccaaggccacgcgggtgggcgtgcttctcaactgtgaccacggctttgtcatcttcttcgctgttgccgacaaggtccacctgatgtataagttcagggtggactttactgaggctttgtacccggctttctgggtattttctgctggtgccacactctccatctgctcccccaagtaggcaggctgtaggcacttgggctgactgcctgcagaagtcccaagaccctagtcgaaatacagcaggcagaactctccttggataattccccaatacgtcccgaagattgggaacatgcgaaggaaagctggacgaaagcgagaaaggatgtgcaccaacgagtccgagacacggtgaataaagggccgcggagaggcactcggacaggactatggcggcaaacggatgggggcatagtggcacccacgccagacaacgcaaagactccagttgtggagtatcgaacgaaacgcgccggagacgccacgacgcccaaatgtcagcaaccaatggctatgcgcttattgcccgcacacgtacgcgagatagcaccacaccgagcacgggccacaggtgcagcgtggcacccactagcgactccacagggcgagccaacgcgacagaaacgcgcagtatgtagtcgggccacctacgtgccagggcggatacggcataacgcacgcaatcgtgtatacacattgactgagttcgattgccggcaccgcgcaacgcacggagacatcaccgactgaatcacccgaactaaggggtagaggatatgggagcctgcagacagccagcggtatacacaagtccacggactactacgtacgaagcatgcgaaagtgtgatgcgatgtactgcgctagcgtcaagagcggttagcgcattacacgcatcgcaggagcataggctcgc

SEQ ID NO: 175849 - DNA, 424 bp, Homo Sapiens
  misc_feature (269)..(294): n is a, c, g, or t
gggaagagacagcagcagaagtgggagcgaaaaattattggcattttttcagggcaccagtgggtggacatgaatggttccccacaggatttcaacgtgtctgtcagaatcactcctctcaaatatgcccagatttgctattggattaaaggaaactacctggattgtagggaggggtgacacagtgttccctcctggcagcaattaagggtcttcatgttcttattttaggagaggccaaattgttttttgtcattggcgtgcacacnnnnnnnnnnnnnnnnnnnnnnnnnnaaggtgtcttataatcttttacctatttcttacaattgcaagatgactggctttactaatttgaaaactggtttgtgtatcatatcatatatcatttaagcagtttgaaggcatacttttgcatagaaat

SEQ ID NO: 175850 - DNA, 1055 bp, Homo Sapiens
  misc_feature (1033)..(1033): n is a, c, g, or t
ggggctgggcagagggtgcttacaaccttgactccctttctccctggacttgatctgctgtttcagaggctaggttgtttctgtgggtgccttatcagggctgggatacttctgattctggcttccttcctgccccaccctcccgaccccagtccccctgatcctgctagaggcatgtctccttgcgtgtctaaaggtccctcatcctgtttgttttaggaatcctggtctcaggacctcatggaagaagagggggagagagttacaggttggacatgatgcacactatggggccccagcgacgtgtctggttgagctcagggaatatgtttcttagccagtttcttggtgatatccagtggcacttgtaatggctgtcttcattcagttcatgcatgggcaaaggcttactgataaacttgagtctgccctcgtatgagggtgtatacctggcctccctctgaggctggtgactcctccctgctggggccccacaggtgaggcagaacagctagagggcctccccgcctgcccgccttggttggctagcttgcctctcctgtgcgtatgggaacacctagcacgtgctggatgggctgcctctgactcagaggcatggccggaatttgggcaactcaaaaccaccttgcctcagctgatcagagtttctgtggaattctgtttgttaaatcaaattagctggtctctgaattaagggggagacgaccttctctaagatgaacagggttcgccccagtcctcctgcctggagacagttgatgtgtcatgcagagctcttacttctccagcaacactcttcagtacataataagcttaactgataaacagaatatttagaaaggtgagacttgggcttaccattgggtttaaatcatagggacctagggcgagggttcagggcttctctgggagcagatattgtcaagttcatgggccttaggtagcatgtatctggtcttaactctggattgtagccaaaagttctgaggagggagcttgagccctgtttgtnggccccatttaaagaaccaggg

SEQ ID NO: 175851 - DNA, 281 bp, Homo Sapiens
gttatccgtaagacagtgcctcacagccgcacaggacgcgaggatgctgacagtgcctcacagccgcacaggacgcgaggatgctgacatgtgcctcacagcctgcacaggacgcgaggatgcgtgacagtgcctcacagccacacaggacgcgaggatgctgacaggtgcctcacagccgcacaggacgcgaggatgctgacagtgcctcacagccacacaggacgcgaggatgctgacggtgcctcacagccgcacaggaccgaggatgctgacggtgc

SEQ ID NO: 175852 - DNA, 704 bp, Homo Sapiens
cgtaggtaatggtggggctggatgactttaggaagagtcaggagctgcgggtctggccaggctatgactatgtgggatggagcaaccacagcttctccagtggctatgtggagatggagtttgagtttgaccggctgagggccttccaggctatgcaggtccactgtaacaacatgcacacgctgggagcccgtctgcctggcggggtggaatgtcgcttccggcgtggccctgccagggcctgggagggggagcccatgcgccaaaacctagggggcaacctgggggaccccagagcccgggctgtctcagtgccccttggcgcccgtgtggctcgctttctgcagtgccgcttcctctttgcggggccctggttactcttcagcgaaaatctccttcatctctgatgtggtgaacaattcctctccggcactgggaggcaccttcccggcagccccctggtggccgcctgggccacctcccaccaacttcagcagcttggagctggagcccagaggccagcagcccgtgtccaaggccgaggggagcccgacacgacatcctcatcggctgcctggtggccataatcctggtcctgatgctcatcattgcctcatggtctgggggtgcctggggaaggtcctagcgaggtaacgggggtgtggacaaggctgaggtcacttttgtcctgggacctatctata

SEQ ID NO: 175853 - DNA, 505 bp, Homo Sapiens
gcctctctctctttgtgggttggccaggagattcccccgaccaggttggggagacttggggccagcgcttctggtctggtaaatatgtatgatgtgttgtgcttttttaaccaaggaggggccagtggattcccacagcacaaccggtcccttccatgccctgggatgcctcaccacacccaggtctcttcctttgctctgaggtcccttcaaggcctccccaatccaggccaaagccccatgtgccttgtccaggaactgcctgggccatgcgaggggccagcagagggcgccaccaccacctgacggctggggacccacccagcccctctcccctctctgctccagactcacttgccattgccaggagatggccccaacaagcaccccgcttttgcagcagaggagctgagttggcagaccgggcccccctgaaccgcaccccatcccaccagccccggccttgctttgtctggcctcacgtgtctcagattttctaagaacc

SEQ ID NO: 175854 - DNA, 950 bp, Homo Sapiens
gccctgtttagacaccacaggcctcacattctctgaatccacacaaggtgatgaatggctttgcctcttggtaaatgagaaactgaggttcagagaaggtttgtaagcttgtccccgtgtcaccagctggtgagggagcctgaacacggaagccatgcctgcctgactgggaaagctgggctcctcacagcactgccctgctccccaggctgtcgccaggggccccagggcaggcagagcaactgcgttcccgtggcagcacctccacctggaggggctgggcagggagcaccacactgtcaacttggaacaaacttttattttgaatgctggtctgatcagtccacggccaggggtaggtggtaactagaaacagctggaaggagggaaggagaggggaccagcagtccgcaagcaggaggaaaggaaagggttggggacaggaggaggcaaggctgaggaaggacccagacagctgggtgtctgccccggctagagaacgaaccacccccacccaccagcctaccctccatctgtggcttcagtgcagaagtcagtccaggtgggttcaggcccatgccaccttctctggcctgcacagtcccaccccaggcaggggttcttccagaaggctaaatgctctgtcctaaccctggaagtgtcctttcactaacccctgcctgcccgccaccacgctccagttgggtctttcaaacctggagctcaggccttcactactgtgctcctgtagcagccacaggggtggcgtggtggggaagatggggttctagtctcagcctggctcagggaagatggggttctagtctcagcctggactcaggggaacatccctccacccctcgacgcgtggtcgacaatatcccgggattccgaccgtacagcctgcatatttctacaactggttttcatatttaagtgtaacataaata

SEQ ID NO: 175855 - DNA, 974 bp, Homo Sapiens
gtagcgaggcctgggtggcgaattcggcacgaggccgcattggccgcccctcagagaccggcattattggcatcattgaccctgagtgccggatgattggcctgcgtctctatgatggccttttcaaggttattccactagatcgcgataataaagaactcaaggccttcaacatccgcctggaggagctgcatgtcattgatgtcaagttcctatatggttgccaagcacctactatttgctttgtctaccaggaccctcaggggcggcacgtaaaaacctatgaggtgtctctccgagaaaaggaattcaataagggcccttggaaacaggaaaatgtcgaagctgaagcttccatggtgatcgcagtcccagagccctttgggggggccatcatcattggacaggagtcaatcacctatcacaatggtgacaaatacctggctattgcccctcctatcatcaagcaaagcacgattgtgtgccacaatcgagtggaccctaatggctcaagatacctgctgggagacatggaaggccggctcttcatgctgcttttggagaaggaggaacagatggatggcaccgtcactctcaaggatctccgtgtagaactccttggagagacctctattgctgagtgcttgacataccttgataatggtgttgtgtttgtcgggtctcgcctgggtgactcccagcttgtgaagctcaacgttgacagtaatgaacaaggcctcctatgtagtggccatgggaaaccttttacaacttaggacccattgtcgaatatgtggcgtggtggacctgggaaaggcaggggaagggggcaactgggtcaactttgctctgggggcctttcaaggaaagggtcttttggcggaatcatccccggaaatgggaaaatggaaaatcccacgagcattggcccagcaaattgaactttacccaggcgcattccataagggatttta

SEQ ID NO: 175856 - DNA, 860 bp, Homo Sapiens
  misc_feature (809)..(809): n is a, c, g, or t
cattggccgcccctcagagaccggcattattggcatcattgaccctgagtgccggatgattggcctgcgtctctatgatggccttttcaaggttattccactagatcgcgataataaagaactcaaggccttcaacatccgcctggaggagctgcatgtcattgatgtcaagttcctatatggttgccaagcacctactatttgctttgtctaccaggaccctcaggggcggcacgtaaaaacctatgaggtgtctctccgagaaaaggaattcaataagggcccttggaaacaggaaaatgtcgaagctgaagcttccatggtgatcgcagtcccagagccctttgggggggccatcatcattggacaggagtcaatcacctatcacaatggtgacaaatacctggctattgcccctcctatcatcaagcaaagcacgattgtgtgccacaatcgagtggaccctaatggctcaagatacctgctgggagacatggaaggccggctcttcatgctgcttttggagaaggaggaacagatggatggcaccgtcactctcaaggatctccgtgtagaactccttggagagacctctattgctgagtgcttgacataccttgataatggtgttgtgtttgtcgggtctcgcctgggtgactcccagcttgtgaagctcaacgttgacagtaatgaacaaggcccctatgtagtggccatggaaacctttaccaacttaggacccattgtcgatatgtgcgtggtggacctggagaagcaggggcaggggcagctggtcacttgctctgggngctttcaaggaagggttcttttgcggatcatcccggaaatggaaatgggaa

SEQ ID NO: 175857 - DNA, 409 bp, Homo Sapiens
  misc_feature (16)..(16): n is a, c, g, or t
  misc_feature (26)..(26): n is a, c, g, or t
  misc_feature (31)..(31): n is a, c, g, or t
  misc_feature (55)..(55): n is a, c, g, or t
  misc_feature (63)..(63): n is a, c, g, or t
  misc_feature (144)..(152): n is a, c, g, or t
ggctaattgccccctncctatcaatncaagnaaaagccacgatttgtgtgcccanaatcaagnggacccctaaaggcctcaagataccctgcctgggagacatggaaggccggctcttcacagccttgcagaagaaccaactgnnnnnnnnnttctcaggctttacagcaagcaaacttcactatgatttttacaattcctgattctgtaaccccctgggggttatcccagttgcttctttaggatggggtttattacgttgtacatatatcccgatgtgtctgtgtgaatctttgtcttttttgggggagggcagagggcggttctttttttagatattgttcctaaaaaggaataaatgcatacacctgtttgtcaaaacacctttgctttttgtgcaactgcttta

SEQ ID NO: 175858 - DNA, 760 bp, Homo Sapiens
ggacgcgtgggtccaggagatctccctggtgcccacagatgtaaaagaactctctaccaaggaaccctgggagaactctggagccccaggatgctggctcggatagctgggaaagctccctgagtcttcgagagatgacacagataacgattccatgctgggagaggaacgtgagtaatagtttggggcccagtttaagcttcagcccagtagctcccctgagaacagcctggatccttttcctccccggatcttaaaggaggagcccaaaggaaaaggagaaagaggttgatggtctgttgacttcagagcccatggggtctcccgtctcctccaagacagagtccgtatcggataaggaggacaaaccagccctggcaccatcaggaggcactgaggggccatgagcagtcccacaacagcttgtcctgagcctaaactgggcagcccctccggtgggcctcatcaatgggagaagacaagagatgagggccctgttgctgatcaagttaaagagatcgatcgtagagaccctaatgctgaggagttcagtcctacgaagcctctgctgtctgtgagataatccaacatgtacccaaagttctaccggggccccggaatcattcaattccctcaatcccggtgctgacaggcatggccagagtgaggttatacagccccacagtacattctgtacattagctcatgatccaaattgggaccagcgtgtgaaggcacctcgagatgtatccatatcctg

SEQ ID NO: 175859 - DNA, 330 bp, Homo Sapiens
gaggatcccggtaggtactggtgggggtggggccatgctcagcgcttagaggcagaggcacgccatggttgccctgcacgttgcacagatctgcttctctccagccactgtcactcccaactcagactttcctgccttgtttggaataaagagcagcactgtttgctttcagaaagggtggttgtctagtggctactaaagaaacttctatttcctgtgcttcttgcgagggacacacagcacaacgctgcttcgtgaccatggaggcttctctgcttcagaagggagctgtccgccagcgggcgcaatttcagacggtctgtgtggtct

SEQ ID NO: 175860 - DNA, 857 bp, Homo Sapiens
  misc_feature (653)..(654): n is a, c, g, or t
gtgctttaatgttcgcagtcacacgaaagtggcatctccatcagcactggggcggccgcctcctcatcagccgacagctgcacggtccccgcctctcatccatttggtctgtttgcaagttactagatcatacaaaaataaccgctacaaattctctgtatcaggcatataaaaactgagcaaaaagtatctcttaaagcaaaacatctcagaaaaaatacaacacaggtttaacttctgcagtactttgttcatataaaacacaagtaaaataggcttcttaaaaattaaatagtgaaataccaaccaaattatatacattgttacagtacaagtgaatgaggcaaaatatccagttcttagtttcccaggagtggggggggtggccttcagtgcgtggcacgcagggggatgacaggaaggccacgttccgatgtcacagtcagcgcagaaagaggcttgcagcgggacaaacagatggaaagaactgagtcacacagggaagaccaggggctcctttgaggaagagtgaggtcatgtttttattgcttgctaatccgaggttttccctggcccgatgcccctctaggtagcctggatcccaaatgctgcagcccacgtagcgctaatccatgtcaccaagcagccacggnngaagccacagctgctccagagaagacagaacgaggcttcagagccctcaatatctgagctggaccgatcctggtctttcaggtccatcagggtcccacatggtccaactgacacacacgtttccccgctgacggccacgttcacctgagaaacctgaagggccgggcaatgttgggctcatgggcactgggaatggtaatcct

SEQ ID NO: 175861 - DNA, 814 bp, Homo Sapiens
ccttccggtgtgtgggtggaaattttctgctagaagagtcagatatggttttaccaccggatgggtgccacagaatctcaacccctttggggggacttcgacagtcctgggataggaccaactccatcccattgatcttcttgcggagtcctctttttctgttttcttcttcttcccccagcaacttggctcagagtctttgctgggagactcttttcctagtaagtcatccaattcgttcagtcccagtaaccgggcctggggcacctccagctccagccgataggacaggttcctcagggtgcacacgcagttctccaccgtcttgctgtcgtaatcggatgtgttcacacacgtgtggatcacatacaacagtgagtctaccagcccctcgcaggaccgcatttgcttccgagcttcttcccccgcggagctgaggttccttaggcaacctgtcgtgttacgcagaactagtgaagtctgaaatttaattttatgatcatcatcaaaagaagagttattccatccagaatgtggaacaatcacagtgtttgttaaggttgagagagcatctcgaatgattgtcatttttacagcatcacatgaggataaattccaaagaactcctgtaacaagctcccttacttctgcatcaatagattttctcaacagtcgcaacaaggcaggtatcccaccaacattcttcattgctattttattttcatctgtagacttgccaaaaacgaggtttcgaagggcaccacaagcattcttctgaacttcctaaactctgtggtccacgacagcgtgggtc

SEQ ID NO: 175862 - DNA, 603 bp, Homo Sapiens
ttaattaataaagagtccaccttttaatattcgtgtttaacacatctatgggtttggtagaaagcaaatacatgaccttgaaatagtagtaggtgataacatgtgacttgccagtaaattctcatatcttcactgtcacttaggagataatcgaagaatatgaacatatttaattcctaaagttcctgcaataacctacatacaccttaacattcagctttattaaacaggctttttgaaatagcatgtgaagaagttatcgctgtgcctcattttgaatggtattttctgcttcattttgattttcaacagcaaaaggatatggtgctcttcctaaaagaaactgttcccatttgggaatatattcttctactgatgcccagtaacgagtctcaagagaaaccacctcaggccgtggaagtgggtgaatcctggtctgtagtgacttttctgctgcttctatatcctttaaaagactaaggttccttttaaaagcagtctcaacagtttggagttgagatgccttttctgtgtgttgatcacccaatttattctccatttgttgaagtaacattaatctttgtgatactatttcttcatgcc

SEQ ID NO: 175863 - DNA, 982 bp, Homo Sapiens
gtattagaggatccccccttccggctgtgtgggttgtgtggaggtcctccagtcaatgcgtgccctggacttcaacacccggactcaggtcaccagggaggccatcatgtctggtgtgtgaggctgtgccgggtgctaagggggcgacaaggaggagaaagccctgtagccgcccgctcagctctatcctggggaggagtaacctgaaatttgctggaatgccaatcactctcaccgtctccaccagcagcctcaacctcatggccgcagacggcaaacagatcatcgccaaccaccacatgcaatctatctcatttgcatccggcggggatccggacacagccgagtatgtcgcctatgttgccaaagaccctgtgaatcagagagcctgccacattctggagtgtcccgaagggcttgcccaggatgtcatcagcaccattggccaggccttcgagttgcgcttcaaacaatacctcaggaacccacccaaactggtcacccctcatgacaggatggctggctttgatggctcagcatgggatgaggaggaggaagagccacctgaccatcagtactataatgacttcccggggaaggaaccccccttggggggggtggtagacatgaggcttcgggaaggagccgctccaggggctgctcgacccactgcacccaatgcccagacccccagccacttgggagctacatggcctgtaggacagcctgtgggggagatccagaagtccgcaaacagatgccagcgtccagcagccggtccagcaggcagagagctttcgatgatccctcctatgtcaacgtccagaacctagacaaggcccggcaaagcagtggggtggtggcgggccccccaattccctgctatccaagcgcagtgcacccagggacctggtcggaccatgaagcccttcgaagatgctcttcgcgtgcctccacttccccatcggggtcctggtctgag

SEQ ID NO: 175864 - DNA, 415 bp, Homo Sapiens
gagtatgttactgaatagcccttaggaaattaaacccatttatttactaatatttgacaggcatagaagtgtattaattagcataaaagttggagatgaaaaccctatagaaacaaattggccaatattatactaattgaatgcagaatgtggcattctattcccattcaactaataatcagcttcaactgacaggaatttgcacagaatgttacacaataccctgtttcccaagaaagtactaccttacctagagatgatctaagatatttttgttcatcctctgaataaggtgagactaaagggtgctaactccctggacctggctgtgaatgctactgaagagtatcaacagcaactgttaattataccgccgtgctttaagtttaagacttaccttaaaactcaagctgaa

SEQ ID NO: 175865 - DNA, 815 bp, Homo Sapiens
tttactgaacatctggtatccagacccaggcacggctccatttcaatggcattatcccatcagagtcggcagttcggccccgaaagccctgtaattgtacaaaatcactgtgtttgaaattgtattgtgaatgctttgcaaatggtgaattttgcaacaactgcaattgtactaattgttacaacaatttggaacatgaaaatgaaaggcaaaaagcaataaaggcatgccctgacagaaatccagaagcctttaagcctaagatagggaaaggaaaggagggagaatctgatcgacgtcatagcaaagggtgtaattgcaaacgatcaggatgtcttaaaaactactgtgaatgctatgaggcaaaaataatgtgttcctcaatatgcaaatgtattggctgtaagaattttgaagaaagcccggaaaggaagacattgatgcatttggcagatgcagctgaagtaagggtacagcaacaaacagcagccaagacgaagttatcctctcaaatttcagacttgcttactaggccaacaccagctttaaatagtggaggcggaaaattgccatttacatttgtaactaaggaagtagctgaagccacatgtaattgcctccttgcccaggcagagcaggcagacaagaaggggaaaatcaaggcagcagcgggaacggatgatacttgaagaaattcggacgatgttttgattgagtggtcatcaacctcttgcaggaaaaggccaaaaaagtgacccccttgttgccccatgaaatttggctaaactcctttggcaccaaaaagaaactggata

SEQ ID NO: 175866 - DNA, 905 bp, Homo Sapiens
ggggctgcagaagaagctgaaggctgactttgtcccctccccgaaaaagggtgttttgatgcctcagggtctctgaaatctcccgggaagccccagagctttcctgaggctgcctggccttgatcaacttgggaagacaaaattgagccattatctcctcttggaaacgaatcttgccagaaaaacgggatttcagggccttccctccctgcctgggtgtcgggccaccagaaggctctgccggacgccaagaagacggtctctgggctcttgtcagctgcttttgaacctgaggttcctgcgtcgttgagccagaaatcagaccaccgaagctcactcccttcctctccatctctccctctctccaagactctggcagtggcctatgatcctgaagacagctctgcagccaactggtgctttggcctttgcgctgtcccgcggccagcttccctcgacctggggaggccgtggcctgtggaggaggcccaggtaaaggctgggggctgttgctggctatcctctttgcttctggaagtttctgcctcactcagaatgggcaggacagacccactgactggacttcagaagtctggagggttccatcgggtcaggggaatggcggccacgtgacctcttgccgtgccccttgtcatagacccaaggagcaactctgtccccttggagcgttgggggtccccgggggagaggtggacagacacctcccctccaactggcatttgggaaacagggagcctggaacttctgtgccaagaaaagggagaaccttaagggtggaacaggtgggcccattaagaaaccgcctaaaagaaaccaaacattcccattttcccttaaggggggtctaccaaatccgttaaacctttcccctgggcaaaatctaa

SEQ ID NO: 175867 - DNA, 524 bp, Homo Sapiens
agctgtgtggagagcatgcatcaggtggaagaagactacctgtttgaaaaatgcagaagtcaacttttgggccgagaccctgatctttgtgaaatacctctgcaaggcacctcttctgtctcctctcaaagtccggctggcgtcccccaagccctgagatgctctgtcaccttcaaaggatggtgtcagagcagtgccacctcctgtctcagttcttcagagagcttccaccagctgctgagtttgtgaagacagtggagttcacaagactacgcattcaagaggaaaggactttggcttgcttgaggcctgctggcctttttggaaggaaaggaaggggaagacaccctagttctcagtgtttgggactcttatgcagaatcgaggcagttaactcttccaagaacagaagcggcatgttgaagaaaatctgggggattgggatgggggtatgtgtggatttttcctccactaaatctgcaggaaacatgttgaacataaattcaaaaattttatcccaaaaa

SEQ ID NO: 175868 - DNA, 882 bp, Homo Sapiens
  misc_feature (843)..(843): n is a, c, g, or t
tgcgtgcatgatgttacgtcctgtatcagttctttagaatttcttagcccgtgggttactctaagcctttggatggaaccatttagggagttagctagtatataatgcaaagaatagttaggatttagaaacattgtctgccttaatcaaagtgaaaagataaatattacaaacactgaaaatgtgaaaataaggttcaagagagctgcaaactatgtgggtaccagttagaaagtatcttcatctgactcatcactcttgggtttggtaagtctttctagttcttctccatccccactggaacgctcccaaagattgccacttagatctcggatcctttcttgcctaggtgcgtattccggaacttgaggcttgctggcattataaataaatatagagagaaggactgatggggcttccaagaaaaattccagggagggcctgaagtcaaagaccaggacagacactgttgtgataatgacagtggtaacctgggccatcaagacatggaacatgttatccaggaacttcagaatgaaagccactgaaaggccctggaatgcagttacaaaaataagggctactgaaaatgcactgtggccataaaaaaatccacagttcttaatctgatcacggttactcctctgaaggcccagagtcagcccattaaacagaatgccaaagaaatagagtttgctgttctgtatgaagatgctttcagtgagctggttcccttccttcagtatcttttcattatagatattagccattgaagaaataaaacactggactataataagaacatggcccatgccaagacggatgtgactgaaaactctggcntgtggtgttccatttagcttcaggaaaagtccattcctt

SEQ ID NO: 175869 - DNA, 258 bp, Homo Sapiens
ggcttaccaccttttaaaaaatttgttattctccagaaacagtaaataggtgagtaggggtggtgcaagtgaattcgttttcatttagaagcccctctgtacagataatcaaaattcaaagttgaaagaatcaaaagcagccacagttatgtaggtctgatttgaatgtcataattgcagtgacaggacattgccaccaactctatcctactaccatcaatgttgtgtttattccgtcaataaaaaagacttgcttcc

SEQ ID NO: 175870 - DNA, 248 bp, Homo Sapiens
cggcacgaggggggtctgggggaggcaatggtggaggagtcagtgaggccagaagactgccccagagtgaccgcagccccatgctgcattccaggcagctggagacattagcgggagacggcaggcattgtggcgcagaaggtatacagggctccaggaggcaacgggaggtcagtccaaggccagcggcccaggtgtaggggtgcagacagccccaaagactgattatacagccaccgatgccacag

SEQ ID NO: 175871 - DNA, 967 bp, Homo Sapiens
  misc_feature (816)..(826): n is a, c, g, or t
ctgggtggcgaattcggcacgaggatgagtatgaggacgaggaccagtgggaggatggagcagaggacattctagagaaagaagagattgaagcctccaatatcgataatgttgtcctggatgaagatcgttctggggctcgccgcctgcaaaacctctggagggaccagcgagaagaagaactgggcgagtattacatgaagaaatacgccaagtcatctgtgggagagacggtgtatggaggatctgatgagctctcagacgacatcacccagcagcagctgctcccaggagtcaaggatcccaatctgtggactgtcaaatgtaagattggggaggaacgggccacggccatttccttgatgcgcaagttcattgcctaccagttcacagacacgcccctgcagatcaagtcagtagtggcaccagagcatgtgaagggctacatctacgtggaggcctacaagcagacccacgtgaagcaggccattgagggggtgggcaacctgcggcttggctactggaaccagcagatggtgcccatcaaggagatgacagacgtgctcaaagtggtgaaggaggtggccaacctgaaaccaaagtcctgggtccgcctcaagcggggcatctacaaggatgacattgctcaggtggactacgtggagcccagccagaacaccatctccctgaagatgatcccacgcatcgactacgatcgcatcaaggcccgcatgagcttgaaagactggtttgccaaaaggaagaagtttaagcggcctccacagaggctgtttgatgctgagaaatcagtccctnnnnnnnnnnnatgtgccctcggatgtggacttcctcatcctttgaaggggaacgtttacgcccggaagggcttttctggtccagagcttccccatggcctgctgggacccacgggggttgtggaaccacccccctccctaatttggaaaaa

SEQ ID NO: 175872 - DNA, 849 bp, Homo Sapiens
  misc_feature (742)..(742): n is a, c, g, or t
tgagttcacctgatgccacccggagtctatggtcaaactctcaagtaagctgagtgccgtgagcttgcggggaattggcagtcccagcacagatgccagtgccagtgatgtccacggcaatttcgccttcgagggcattggagatgaggatctgtaatctccactgcttggatgtctgccctctaccccagaggaatttacagaaacttgccctgtgcctgtgtcccccatgctaggggcggaggggtcttttccttcttctttcctacctaccccttttctcttggccaggggcctcgtatcctacctttccttgtcccctgggctggctgcacagaggattgccccttctcttttcagagctggccctcgatgccaaattagcatttagtattttgcacaaagtctaagggaccatggctgcctgccttggggaggaaccatatctccctctgggccgcttctggcctcttggagccatgggccaaaggccaaggggatgggcagaggtctgtgtttggtctggcccagttccccatcattaaactcagcctgactgctgcctacctctggttccctctcactggccctgctttccccatcacaggatggactactatgctaagggtaagggccaaattgcctgccattgccatttcacaatagacatgggtttgttagcgtttccttttattataaggcactgaataagttaaataaacaggggggaggcttgggcctnttaatcataagaaaacaaaaaatgaaccttgtggggcgccctcgggccctcgaaaaagtttttctaaaaccattccgctcgggccgcgggggctcacaaaaggaaac

SEQ ID NO: 175873 - DNA, 1180 bp, Homo Sapiens
  misc_feature (551)..(551): n is a, c, g, or t
  misc_feature (910)..(1020): n is a, c, g, or t
  misc_feature (1025)..(1042): n is a, c, g, or t
ggggtggccggctgggatcagcctttaagatggcgtctcctcaggggggccagattgcgatcgcgatgaggcttcggaaccagctccagtcagtgtacaagatggacccgctacggaacgaggaggaggttcgagtgaagatcaaagacttgaatgaacacattgtttgctgcctatgcgccggctacttcgtggatgccaccaccatcacagagtgtcttcatactttctgcaagagttgtattgtgaagtacctccaaactagcaagtactgccccatgtgcaacattaagatccacgagacacagccactgctcaacctcaaactggaccgggtcatgcaggacatcgtgtataagctggtgcctggcttgcaagacagtgaagagaaacggattcgggaattctaccagtcccgaggtttggaccgggtcacccagcccactggggaagagccagcactgagcaacctcggcctccccttcagcagctttgaccactctaaagcccactactatcgctatgatgagcagttgaacctgtgcctggangcggctgagttctggcaaagacaagaataaaagcgtcctgcagaacaagtatgtccgatgttctgttagagctgaggtacgccatctccggagggtcctgtgtcaccgcttgatgctaaaccctcagcatgtgcagctcctttttgacaatgaagttctccctgatcacatgacaatgaagcagatatggctctcccgctggttcggcaagccatcccctttgcttttacaatacagtgtgaaagagaagaggaggtaggagccaagcccccaccccatcccactccccttccctccccagatatttatgtgaaatgaactgcagctttattttttgaaataaaaacttttaaaaagcnnnnnnnnnnnnnnnnnnnnnnnnnnnnnnnnnnnnnnnnnnnnnnnnnnnnnnnnnnnnnnnnnnnnnnnnnnnnnnnnnnnnnnnnnnnnnnnnnnnnnnnnnnnnnnnttggnnnnnnnnnnnnnnnnnnacaaaaacctttcccaaacccttttcttttggcgggccggggccccatttagggaaaggtgaacccgggggcctttacctttgtttcccaaaagaaaaacctgggcccaagaaaaaaggggttgggaatcccccccac

SEQ ID NO: 175874 - DNA, 618 bp, Homo Sapiens
ccgggtacggtaatggtgggatataaacttcggcaaatgcaagcacaaagtccgatcaaagccccaaagcacatcaaacctaaactcacaaaaggtaaaaggaactggcaacgccaaagataggtcctaaggagatcaatcccgctattgtggtttccgggatcaacaaatttctccatgaactgctcagttagtgtgaaactcacacattttgtgaccacatcaaatgactctgtcctttctggtgggctataccaatgcatgtttttgggtatggtgatacaccgtctccacaatcccactgtgccattgtatcgaaaaagtgcatcattataagtcttttcatctgcctcatcactaatgaattcatcccagatgcttttattcaaatcactggaattttcttgaactggacttcgatattcataccagaagtctgtgccaatggaggctgccatgtagatggtggaaatgaggctaagcacacaagcaattacaaatgctgtagcaaaacggttatccattctggcattcagactgctcgcccatcctcctgctccgccagcttcaccctctagctcagaccacagcaccctatctccccccatcatacctacc

SEQ ID NO: 175875 - DNA, 1146 bp, Homo Sapiens
  misc_feature (963)..(963): n is a, c, g, or t
  misc_feature (992)..(992): n is a, c, g, or t
  misc_feature (1050)..(1050): n is a, c, g, or t
  misc_feature (1071)..(1071): n is a, c, g, or t
  misc_feature (1084)..(1084): n is a, c, g, or t
  misc_feature (1119)..(1119): n is a, c, g, or t
  misc_feature (1131)..(1131): n is a, c, g, or t
tatgcgactaagtggtggacgagggcattgttgctgattctcactcaccggggcagctgccgcagatgcacaggccccaggtgcaggccaccacctccgggtcggcaccaggactgccctcggtgctcatagggaatggctgggcccacggaaggtcggcctgggatgtggcctgggactgctgctctgctggctgctgtgtggatgcttttcctggagcactttccaaggcatcccccagccccaagcctgcgcgcatctgtcactcagggactttctatgggtctttgtgggggaaggccctggctttgtattccccacaagtagcactgacgttcttaggaaatttgtcttcagtattaggtctccaactcttgtaaaaagtttatatgtaggataaaaaccttttagaggacacgtaggcggtaccactaaggttttggtaatgagccattcaaaccgacagcagtgtgaaggtgtgtcaaggtgtatattctcgtggctcggcattctcagtgcaaaggcctgtttggagactctgtgggaattgtctttcatctgtttctatggttgtcaaatgaattcttcacccaccctacagtttgctaactccttgaagctatcaaattagtaagagaggctgcccgcacccagggggcaccatcgcccacttattatttagttttgcggatactcatggaccatctatcacatccagcattgtcccagtgctttgagttggacgggaatgggactctgcagccaaggcaggataagaaaatcttgcaatcccgtcctgcagtgatagaaacaggtcgttctgcattataagccataggtggagcattcggtagcgtattcagactgcatgggccggcctaggagtctttgccttcataaattttaagaaccccgcccacaacaggggagttaaactgggaggactttgcatgattagttcangggatgagtggtttctgggggcatctganggtcaggagttcgaaaccagccctggccaactttgatgaaaaccccattctctacccngttctgggagaacaggtcacngcctggtcctggnagacagtggtgcccgggaaaaaggggaaacgtggntactcacctggnatgccaccccaggcc

SEQ ID NO: 175876 - DNA, 192 bp, Homo Sapiens
cccgtaggtactggtggggtcgtaggtgccgccaggtagtagaggtctgccggtcctggcacttgcggcccgggccatctgctcatactgctcgcgcgccacgacctggcacttgtgggagatggtctgcacgtcgttctcatcctcgtggcaggactggtacagcgcattcttgccgtcgcactgcctctt

SEQ ID NO: 175877 - DNA, 426 bp, Homo Sapiens
  misc_feature (258)..(258): n is a, c, g, or t
gcgtagggtaaaggtggggaatgtgagactactgaactttatttatcatagacacaagaattaagggctgaatcagaggtggagagggaaggggttagttccttccataccccaccaaatccctatctctcattttagaagaggacttccctactcgccccctccatctatctcggtcctttatcgccagccctggctgggaggctgtcaggaatggcagccctctttccctcttccttcatggctccaacagactgngtctgaaaggtttaataaggaagctcatcaaaggagttatttttacagcaacaaccctccaaaccagaaagagacacccctgccaagggggacccccaggctcccccatcccatctcggctctccctcgggaaaccctaggggcagaagcactttaagtgggatgaaa

SEQ ID NO: 175878 - DNA, 253 bp, Homo Sapiens
ttagtcgagactccatattcatatagaatcatgacaaaatttaccatggaattagaatgatacctatgttcttccactagattcacttattaagagatctgtctttatatggaagtaatgtttcacggaatgaaactaacattcatagtaatctctgatatcacattgaagggaacagcatacgagcaaacaaattttagaatctgtttagtgaatagtctgacaatgtaaataaacatctcccaaagtagag

SEQ ID NO: 175879 - DNA, 742 bp, Homo Sapiens
ttactcgagactcccactgcatcttaagtactaaggaattactagtgatgttttattttatccatgtactcttttagtatttaataattaaatacctattcttagtgtttgacactccatatttcttttttttggaaatgaaacaaatatgcagtccaaaattcaggaactactagagtgaaatgatattaagtggaaaccagagataaatgctgttaatttaacaagtagactcttctccaaagaatgatgagtgattcttgggaagataaatgttaatgttcccaatagtcaagcttgttttgcagtagtgaaaagcttagatgagtacggatacctcatttgaaactcagcctagtaaggaagtgaaaacttagcagtcagtgacatggggaaatagttatagaaaatgtcactgaattttttcatatttataattagtcatttacatatttttgtcttgttgatcattacctgtaaatgaaagaccttaataggaaaaaaagagtaaagctcagtgtgaatgcaaacatccacaaaatatgatcttcgtttatattctgtgatgttgtttataaatgaatgcctcagttctctgctaaccttttcacagctttgtactgtttgccttatattctatttgtgcttttaaagtgtgtctgttgggaaaacaaaatgtgtaggtggtttgtaagtgaataatttttatttcttcttgtattaaaattttgtttttttctct

SEQ ID NO: 175880 - DNA, 425 bp, Homo Sapiens
  misc_feature (211)..(241): n is a, c, g, or t
ctagaggacccccgtccgggatgggttaatgctttcaggtacaccaatctttctactaaatgagctctatttgaagttcttggaatctgtggtgaaaaataattttctgatttccaaatacattaagagcattaaatgaatattaatcacctttaaagtcttttagaaaaggacttgtattggtttttggctgcatagaggggttgaatannnnnnnnnnnnnnnnnnnnnnnnnnnnnnncttcttaaagaagatgtaattcacaaatagtttagctccctagcgctcagttgtagaatagaaaatagaacattattcaagttaattgaaaggtgaggtttttatacccccactaatgctgtgtatctgtctttcgtttgttaacattgtttgcttaatttctttcaactcacacatcggaagg

SEQ ID NO: 175881 - DNA, 661 bp, Homo Sapiens
  misc_feature (33)..(33): n is a, c, g, or t
ccgtcgctatagaggatcccccttccggtgtantgggttgatggcggccccaagcggctgggacgagatgtggaaatggaagaaatgattgagcagctgcaagagaaagttcatgagcttgaaaaacaaaatgaaaccctcaaaaacagactgatttcagccaaacagcaacttcaaacccagacatcggacggggctatagcaacggtagctagctgcagggccagtggcacgctaggccatgtctggtccaactgatgagactgcaggagacttgcctgtgaaagatacaggtctaaacctctttggaatgggagggttacaagaaacttcaacaacacggacaatgaagtctcgccaggcagtgtcacgtgtcagtcgtgaggaactggaagacagatttttgcgtttgcatgatgagaacattttacttaaacagcatgcccgcaagcaggaggataaaattaaaaggttatgataaaaagcttttagctttttttcttgactcagtaaaatttggagggtatggtattttataaacttaattgaataccccaccttgaatcttgtttggaacaaggcaggatgtaaataagtacaatttttaaaaatggaaaatcttgcaaactagaataataaaccaaaaagataatgaccgttt

SEQ ID NO: 175882 - DNA, 419 bp, Homo Sapiens
  misc_feature (403)..(403): n is a, c, g, or t
agctcatggtgcaaattgttatttccagtgcgagggctggaggctggcagaatgggtgctgatggagctacagggggagatcgaggctcgctacagcactggattagctggaaacctcctgggagacctacattacaccactgagggaatccctgtgctgatcgtggggcatcatatcctgtatgggaaaatcatccacctgggagaaaccttttgcagtccttgtcaaacacactcctgggggatcaggactgtgatgagcttgcccgcgagactgggcacccggtacctggggtgacagcacttcattcaaaggacaagatcctttttcaaaacccgccccaagcccatttattcaccagcgttccccaaggaaagttttgaaaggaacctcgggtttttnccctagggagaggcgg

SEQ ID NO: 175883 - DNA, 817 bp, Homo Sapiens
ggagaaaaagataagttctgaacgtcgaaaagaaaagtctcgagatgcagccagatctcggcgaagtaaagaatctgaagttttttatgagcttgctcatcagttgccacttccacataatgtgagttcgcatcttgataaggcctctgtgatgaggcttaccatcagctatttgcgtgtgaggaaacttctggatgctggtgatttggatattgaagatgacatgaaagcacagatgaattgcttttatttgaaagccttggatggttctgttatggttctcacagatgatggtgacatgatttacatttctgataatgtgaacaaatacatgggattaactcagtttgaactaactggacacagtgtgttctgattttactcatccatgtgaccatgaggaaatgagagaaatgcttacacacagaaatggccttgtgaaaaagggtaaagaacaaaacacacagcgaagcttttttctcagaatgaagtgtaccctaactagccgaggaagaactatgaacataaagtctgcaacatggaaggtattgcactgcacaggccacattcacgtatatgataccaacagtaaccaacctcagtggtgggtataagaaaccacctatgacctgcttgggtgctgatttgtgaaaccattcctcacccatcaaatattgaaatccctttagatagcaagactttcctcagtcgacacagccttggatatgaaaattttccttattgggatgaaaagaattaccggaattgatggggaatgaaccagaaagaacttttaaggccgcttcaatttatgaaa

SEQ ID NO: 175884 - DNA, 936 bp, Homo Sapiens
  misc_feature (292)..(292): n is a, c, g, or t
  misc_feature (920)..(920): n is a, c, g, or t
gggactgctgtggcggcagctggagcggcggccgcggtggcagaaccgggggcggccgctgcagtctggagccccatagtgcggggccgcggccaggccacaggaagagctcgaggcccgggccgcaccggctgagtgtgcgggcccgcgcggctcggagccgccgccgcccatcgagcccctccgggcgtgggtcggcccgccatggggtccctgttccggagcgagaccatgtgcctggcgcagctcttcctgcagtcgggcacggcctacgagtgcctcagcgccctgngcgagaaaggcctggtccagttccgagacctcaaccagaacgtaagttcttcccaaagaaaatttgttggtgagctgaagaggtgtgaagagctagagcgaatattggtgtatttgggacaggaaattaatagagctgatattccccttcctgaaggagaggccagccctcctgcgccacccctggaaacaggttctagaaatgcaggagcagttgcagaagctccaaggtgaactgagagaagtcactaagaacaaggagaaactgaggaaaaactttgctggaactgatagagtacactcacatgctgagagggacaaagacctttgtggaacacaaatgcttgagtttgaaccccccttatggaaaattttcccttccttaaaaaagggattcctttgttgggattacagcctgttattgcaaaggtttgggaaccaaaaactggggaatttgggggcctgggccctcaatttaacccaagggagaagtgtgggaacccctctctggaaaaaatagggttgtgggagagaaatccttgcccaaaggggtacacccccctccggtggccctctagttgccaagacactgtgatataaataccccccttgtgagaaacaccctgtanacaacgaggggggaaa

SEQ ID NO: 175885 - DNA, 413 bp, Homo Sapiens
ggtgtgtgggttattcttgtcgaaagcaggatacacagcacggatttccgtcaaccagccgtatggcatgtgacccacagagtatgtggctgtcaaaatcgccactgcctctgtggctgcagaactgccaccaaggtcccgggaaacaaagaggttgacaataggccgactgattctctgtgtggccagaattagagccaaaggccaccagaagctcagcatctttcttattgctgcatctccccccagctccgggccacttctgtcagggatgatgtcgtgaatgttcttgtagtagcccaggcacagggtggtgcagcgcaaaagtgcgcccatgtacaaggcgaggatcgggatgagcaggggctccgggcattccaggtgattgtgaagcaaaatggttacaaaacaac

SEQ ID NO: 175886 - DNA, 711 bp, Homo Sapiens
tgctgcggcgattatagaggatcccccttcggtgtgtgggttgtgcagggcacgggactcacccgctctccagcctgcgcctggggttggaggtgcccagcgcgccgcctcttaactcgggggtgacgctgcccgtttcccaggttgaagaagcctcagcggaggcaattacggcctcctcgccaacactgaggaccccacggagatggcctcgctggacagcacgaggagacggtctttgagtcccggaatctgagatgatgctgagccagggaggcggcccttccagcagccatgagggaaggacaggagatggggcccaccccagtgcccagcaaccccctgctccaccgctcattcccctgctggccccggggctggtctcacccagtgccaacccgagagctccttttggaacctgcacagcccgccgacctgttgccacctgcacccaccgctggaccatgcaacctcgcctccctggaatctgtcccaacctggccgagggtcccaggtgaagactggagggaccccaaaagccaccgcccaggacgctgaggctcccttgcctgactgtgacttgtgcctctctcctgccccgtggggacatggcagcccagagccaaggctgggtgggcaggtgacccaaggaacctttctgggaaaaccttctcgccgggctgggaacaataaatgcagccatgtctctgc

SEQ ID NO: 175887 - DNA, 266 bp, Homo Sapiens
gtacaatccatcaagcacacaaagaggaagagcagcacaatggtgaaggaagggtggatggtccattacaccagcagggataacctgagaaagaggcattattggagacttgacagcaaatgtctaacattatttcagaatgaatctggatcaaagtattataaggaaattccactttcagaaattctccgcatatcttcaccacgagatttcacaaatttcacaagcagcaacccacacgggatcctctgaacgacctcgccaca

SEQ ID NO: 175888 - DNA, 534 bp, Homo Sapiens
  misc_feature (307)..(375): n is a, c, g, or t
  misc_feature (406)..(434): n is a, c, g, or t
taagaggatcccggtggttgaatgatgaatgtggccaccaggctacaggccttctactgccatggggactgcccctttccactggctgacacctcaactcaaccaaccatgccattgtgcagaccctggtcaattctgtcaattccagtatccccaaagcctgttgtgtgcccactgaactgagtgccatctccatgctgtacctggatgagtatgataaggtggtactgaaaaattatcaggagatggtagtagagggatgtgggtgccgctgagatcaggcagtccttgaggatagacagatatnnnnnnnnnnnnnnnnnnnnnnnnnnnnnnnnnnnnnnnnnnnnnnnnnnnnnnnnnnnnnnnnnnnnngactgcttccttatagctggacttttatttnnnnnnnnnnnnnnnnnnnnnnnnnnnnntccctaaacattcaccttgaccttatttatgactttacgtgcaaatgttttgaccatattgatcatatattttgacaaaatatatttataactacgtatt

SEQ ID NO: 175889 - DNA, 1229 bp, Homo Sapiens
tgtgtgggatgattctggagaccattctgctgttctaggagctgaaaggtggggatgcacagtgcctggagcatgtctagcagtccctgccgacagccttcttccatgccatattcatccaacaaggatactgccaaggtacaggaagcaggaatgctgatgtacgtggtacacattcaccatctgtgtgactagtggctgcagcagtgctgcaaatcctttgcctacacagcgaacagcaaagcgcaggcacctgcaacaacgctctacaatccgattatcagctcggtgcttatttagagtctcggataaaactggccatatttcctgtatgactttctgacacggatgagtctgtccattttccacaatgggattggtatgcctaaataatcactgcaaggcgatctaagaaacactgtgggatctgaggatatgccattgctgggctcttgagacaacagctttttcaatgccataacctgaacagaacatagttcactaagacattcggtaatcttatccaaaggtaatcgggctaggacaagtgctgtcccttttagcaagcccacagcagcttctggagacaacaggaaggaatcgagcgagcgggcaatctccaggagtccattaaagtgctgagccatgtgatctcggcagacagagcaaatgttatgaatggctttggctgcagcagaagccaggggcttttcacacaggcctttcatcaaatagcccaacacagggtcaaggaactgaggatttcgatcaacgacttcactcatctctccaaccaattcaatgctggtgtatcgcacagccgtatgtacggtctccgggaggcggacaactccttctaggacttccacaagtgttggattgttttccggatcaacactctttgctatagcagccatgataaagagaaccgcttctgtcacctcccagggtgggttgccttctcttcagagtagaatataactgagcaaacactccatagaccctatcaagaaaatcaagtcctttaccaggtctgataccctcatgcgaaactcccccaagtcatcagtctcctcaggaaccccctcatggtctggttccagctggcagtgtcgagccaaggcgtgaagcagcctctgaatgtaagctttgaagatgccatgaataacttcatcgttagttttgtacaaatgttcccccagtcggtaccaaagttaaatgaaatttct

SEQ ID NO: 175890 - DNA, 488 bp, Homo Sapiens
ccaagtcactcagactcccaagccccgtgtgggcccggccagcccgagaaagacaggacggagtcagtgtgagaatggctataactttggaagaagctccgtggctgggctggctcttggtgaaagcactgatgaggtttgccttcatggtcgtcaacaacctggttgctattccatcctacatctgctatgtaattatacttcagccccttcgagtgctggacagtaagcggttctggtatatcgaaggaatcatgtataaactggcttttcggaatggtagcttcctggggatggtatgctggaatataccagtgattggaatggggagaaagatattaaagcagtttcaaaagatgaagcagtgatgttggtgaatcatcaggcaacaagggagatgtgtggccattgatgattgtgcttccaggacaaaaggactggtttgttgctcagatgattgtggttgatggatcattatttttaagtac

SEQ ID NO: 175891 - DNA, 350 bp, Homo Sapiens
gctgatgctgcgggtgttctagaggatcccacttcgcaaccgggctgcaaaccaagacaacgggggctgcccggtgtgcaatgcagcccatctgccctctgctgctaccacgccaagcactgccaaggaaaacaaatgccccgtgcccttctgcctcaacatcaaacacaagctccgccagcagcagatccagcaccgcctgcagcaggcccagctcatgccccggcggatggccaccatgaacacccgcaacgtgcctcagcagagtctgccttctcctacctcagcaccgcccgggacccccacacagcagcccagcacaccccagacgccgcagccccctgcccagt

SEQ ID NO: 175892 - DNA, 461 bp, Homo Sapiens
ggggaagtcacctttgatacaaccaagtcggatggggcagtttaagaagacagccagtaacagcaagctgaggacctacctgcccgacttccggttcacacccttcaagcaggcggtgaaggagacctgtgcttggttcactgacaactacgagcaggcccggaagtgaagctggaagacaggatcaggtgccagcggaccatctggctggcagagcccagcggccaccacccgtcaaccctgccaggagctgagggcaccacccagcaacctgggcctgcattccatccgctctgcaaccccaagcatctttccagtggggcccccattcacgttggtcctcagggaaaccaggtgtcgggcaggcccggcgctttgctccccacaccagccccctgcgcgtgtccactctgatcctgcatcccactccctgggagccaataaagtgcattttcacaggc

SEQ ID NO: 175893 - DNA, 813 bp, Homo Sapiens
  misc_feature (749)..(749): n is a, c, g, or t
  misc_feature (769)..(769): n is a, c, g, or t
ggggtcgaagggcttgcttccggagagcgggaaggctaaaacgcggtagctaaactgcagccaactttggttgtgtgtggaaaaggctttagccatggacaggagtggctttggagagatatcatcccctgtaatccgggaggcagaggtgacacggactgcacggaaacagagtgctcagaaaagagttttacttcaggcatctcaagatgaaaattttggtaatactacaccaagaaaccaggttatccctcgaactcctagctcatttcgacagccttttaccccaacaagccgaagcttactaaggcagccagatatttcctgcattcttggaacaggagggaagtcgccccgacttacgcagtcttcagggttctttggaaatctctccatggttactaatctggatgacagtaactggccagctgcattttcatcacagcgttccgggctgttcacaaacacagagccccacagtataacagaagatgtaactatcagtgctgttatgttacgtgaggatgatcctggagaagctgcatccatgagtatgttttctgatttcctgcagtcttttctgaagcactcttcgagtacagtttttgatcttgtggaagagtatgaaaacatctgtggtagtcaggtgaatatactgagtaaaatagtgagtcgagcaacacctggacttcaaaattttcaaaacagccagtatgctctggctctttccaaaggagagggtcccaggnaggctgctggccttccttgnatagagaagaatacggcctgcattttaaaaaagaaaaggggatt

SEQ ID NO: 175894 - DNA, 1094 bp, Homo Sapiens
ttactcgagactccagtgcaaaaggagacactgcattctacacactggcaaggaagcctttctcctgccctgagtgtaacttacagtttgctcgcttagacaacttgaaggctcacttgaaaattcatagcaaggagaagcatgcttcagatgccagcagcatttctggcagtagtaatacagaagaggtcaggaatattcttcagctacagccatatcaactctctacctcgggagagcaggaaattcagcttctcgtaaccgattctgtacataacatcaatttcatgcccggtcctagccagggaatcagcattgtgactgcagagagttcccaaaacatgactgcagaccaggctgctaatcttaccctgctcacgcagcagccagagcaactgcagaatttaattctttcagctcaacaggagcaaacagaacacattcagagcctcaatatgattgaaagccagatggggccctcacaaacagagccagtgcacgtgatcactctgtccaaggaaacactggaacatcttcatgcccatcaagagcaaacagaggagctccatttagctacaagtacttcagatccagctcagcacctgcagctgacacaggagcctggtccgccaccacccactcaccacgtgccccagccaacgccacttggccaggagcagagctgacctgtaaacacgtttgactgcttgattgggctcttcttataagccagctctgactggattttgaacgcttgaagtcaggctctccacaccattgacttgcagatgcttctgtgagagctgtgatggctaactgatgtttataatgccctccatccaggtagcaagatgtgtgtatgtcttgtctaaggtactgatttgtattgagcatttcaatattattgaatggttttcattttaatctgcaatgtctcataaagactcgggtagtttttctttgggggcattgatctcagtttttctgtaaggtttaaatgttcacagccataggttatggtcttgccaacctccccagttatgtttttttgttttctaggacaagggagtctgactgacttcgaggttcctcta

SEQ ID NO: 175895 - DNA, 545 bp, Homo Sapiens
ccattcgtcacacagggctggggggtgggtggaggcgactgtgggggcgacggctgacttgtgacaggcgtgaagtgaggaaggggacggtggaagccacggcagagggggagctgggcctggcgccggggggctcggtgatgggccgattgtagaagaagaaggggcactgctggataaagagttcaatgattgtctggtaggtgcgcgtggctgtgagggcgtccacagtgctgaaatcaggtctcatcaaggtgggccagaagcagatggagaggttctcgctggtcatgagattcaccttgttgttgtggctgaccttgtttaggtgagagatgacatacttgaagacttcgtggttttcctttggaaatttctttaatacctccttaagggcatgcaacttctgctcccggtcgttgattttgtgtgcttccaccaagtcgatctgcatgttatacgggaccaggggtcaggcagttctgagaaaaagctcttcacgcaccagccccaggtgacgaactgggatcctctagaacagccgg

SEQ ID NO: 175896 - DNA, 574 bp, Homo Sapiens
ccccgtaagtcagtcagactcccaccctagtaatattctttatttatgctggtacaaaattgccatccaaataagatgattcatgatactggtattcctgctgagtgtcaaagtggccagaaaacagttaaaccaaaatggcgcaacgttactcaggaaaagtctggttgggttgaatgctggactgtcccaagtgtcactgcttacaattgacttatacatggcatccacatttatccacaaaaagcagatgacacagctgaaacacatcattatcagaaatggaagagacaatgctatctgtattaaggccatcccagaagacatcagacagagttgtttcttctccctctacttcttcacgcccacctattgatccctcagaacttccacctgataaacttcatgtagaactggaactttctccagattctcagataactctctatggacctctactaaatgcctttatgtgtataaaggaaaactactttggggaagataacatgtatatggcttttgaagaggcatctcaagtctgtttgtcactgtaaattatcagctctggtgactg

SEQ ID NO: 175897 - DNA, 994 bp, Homo Sapiens
aggactggacatcattggatgaccacctgcagggcctgcagacactgctgctcataggttatgcggcatgcctccgccagcccacacggctcccatggcctcttcctgcgctaccgtgtggaggccctaaccctgcgtggcatcaatagcttccgccaagtacaagtatgacctggtggcagtgggcaaggctttggagggcatgttccgcaagctcaaccacctcctggagcgcctgcaccagtccttcttcctctacttgctccccggcctctcccgcttcgtctccatcggcctctacatgcccgctgtcggcttcttgctcctggtccttggtctcaaggctctggaactgtggaagcagctgcatgaggctggaatgggccttgaggagcccgggggtgcccctggccccagtgtaccccttcccccatcacagggtgtggggctggcctcgctcgtggcacctctgctgatctcacaggccatgggactggccctctatgtcctgccagtgctgggccaacacgttgccacccagcacttcccagtggcagaggctgaggctgtggtgctgacactgctggcgatttatgcagctggcctggccctgccccacaatacccaccgggtggtaagcacacaggccccagacaggggctggatggcactgaagctggtagccctgatctacctagcactgcagctgggctgcatcgccctcaccaacttctcactgggcttcctgctggccaccaccatggtgcccactgctgcgcttgccaagcctcatgggccccggaccctctatgctgccctgctggtgctgaccagcccggcagccacgctcctagggcagcctgttcctgtggccgggagctgccaggagcgcgccacttgtcactgggccgaggcgctgcagcctcttcctggccaccgctagcccattggtgtgccttggagcacacaactacggcgcccttgctcttcccaa

SEQ ID NO: 175898 - DNA, 1136 bp, Homo Sapiens
gtccccgggctctgacaggagcagcctgtgggcaccgcggcggtagttggaggcgggagagggtccgtagccgcgccgccctgccccgccatgggcctcctgtcggacccggttcgccggcgcgcgctcgcccgcctagtgctgcgcctcaacgcgccgttgtgcgtgctgagctacgtggcgggcatcgcctggttcttggcgctggttttcccgccgctgacccagcgcacttacatgtcggagaacgccatgggctccaccatggtggaggagcagtttgcgggcggagaccgtgcccgggcttttgcccgggacttcgccgcccaccgcaagaagtcgggggctctgccagtggcctggcttgaacggacgatgcggtcagtagggctggaggtctacacgcagagtttctcccggaaactgcccttcccagatgagacccacgagcgctatatggtgtcgggcaccaacgtgtacggcatcctgcgggccccgcgtgctgccagcaccgagtcgcttgtgctcaccgtgccctgtggctctgactctaccaacagccaggctgtggggctgctgctggcactggctgcccacttccgggggcagatttattgggccaaagatatcgtcttcctggtaacagaacatgaccttctgggcactgaggcttggcttgaagcctaccacgatgtcaatgtcactggcatgcagtcgtctcccctgcagggacgagctggggccatacaggcagccgtggccctggagctgagcagtgatgtggtcaccagcctcgatgtggccgtggaggggcttaacgggcagctgcccaaccttgacctgctcaatctcttccagaccttctgccagaaagggggcctgttgtgcacgctttacggcaagctgccgcccgaggactggacatcattgggatggaccgcctgcaaggccctgcagacactgctgcttcatggttcctgcggcagggcccttcggccgccccccacggctccccatggccctcttcctgggctacctggtggaaggccctaaccctggcgcgggcatccattagccttccgccccctccaggtattgacctgtgtgggaatggcgcccaaggtttttggaagggc

SEQ ID NO: 175899 - DNA, 1075 bp, Homo Sapiens
  misc_feature (164)..(164): n is a, c, g, or t
  misc_feature (183)..(183): n is a, c, g, or t
  misc_feature (232)..(232): n is a, c, g, or t
  misc_feature (287)..(287): n is a, c, g, or t
ggggggcaaccaaatagctttccccgccaggtaccaaggtatgaccttggtgggccagtgggcaaagggcttttggagggggcatggtttccgcaaaggtccaacccccccttcttgggaggcgctggcacccagttccttttttccctttaaattggtccccngggccttttcccggttttngtttcccatcgggcctttaccatgccccgctgtccggtttcttgctccntggtcccttggtctcaaaggctcctggaactggtggatgcagctgccatgaggcntggaatgggcccttgaggagccccgggggtgcccctggccccaagtgtaccctttccccccatccacagggtgtggggctggcctcgctcgtggcacctctgctgatctcacaggccatgggactggccctctatgtcctgccagtgctgggccaacacgttgccacccagcacttcccagtggcagaggctgaggctgtggtgctgacactgctggcgatttatgcagctggcctggccctgccccacaatacccaccgggtggtaagcacacaggccccagacaggggctggatggcactgaagctggtagccctgatctacctagcactccagctgggctgcatcgccctcaccaacttctcactgggcttcctgctggccaccaccatggtgcccactgctgcgcttgccaagcctcatgggccccggaccctctatgctgccctgctggtgctgaccagcccggcagccacgctccttggcagcctgttcctgtggcgggagctgcaggaggcgccactgtcactggccgagggctggcagctcttcctggcagcgctagcccagggtgtgctggagcaccacacctacggcgccctgctcttcccactgctgtccctgggcctctacccctgctggctgcttttctggaatgtgctcttctggaagtgagatctgcctgtccgggctgggacagagactccccaaggaccccattctgcctccttctggggaaataaatgagtgtctcctcgtccgcctcgtccgaattcgccacccaggcc

SEQ ID NO: 175900 - DNA, 1281 bp, Homo Sapiens
gataggaatggggggactgagctcacaactcggaggaagccacagacgtgaaaaggagatcaatcggctctccatcctgcccttcccccccagtgcctggctccatcctccgccggcagcgtgaggaagaccccgcaccccctaagagatccttcagcagcatgtcagacatcacagggagtgtgacacttaagccctggtcccctggcctctcttcgtcctcatcctctgacagcgtgtggcctttgggaaagccggaaggcctcctggctcggggctgtggcctggacttcctcaacaggtctctggctattcgggtgtctggccggagccccccagggggcccagagccgcaggacaagggaccagatggactgtccgtttaatggggacagatggtctggggctgtggtgcgcaggggtgctgtctgggcctgggtccgccaggatggaacccaagagagcaaagggtggaagctgctggtcttggagggggcgtgcctggaagccgaggcccagcagagaaccttgctctggaatcaggggtccacactcccctccctgatggactcgaaggcctgccagtccttccacgaggccctagaagcctgggcaaagggaccaggtgccgagcccttctacattcgtgccaacctcaccttgcctgagagggcagatccccatgccctttgcgtgaaagcccaagagatccttcgactggtggactcggcatacaagcggaggcaggaatggttctgcacccgggttgaccccctcactctgcgggacctggaccggggcaccgtgcccaattatcagagagcccagcagctcctagaagttcaggagaaatgcctgccctccagccggcaccgaggcccccgcagtaatctgaagaagagagccctggaccagctgcggctggtgaggcccaagcccgtgggggcgcctgcaggggactccccggatcagctgctgctggagccctgtgcagagccggagcggagcctcagaccctacagttttggtgcggccggctaactggtgtctgccctgcggcccctgggtgctgttggctgagtgcctggcgccccgggtcatccgtaacctgctagacctggccagcctccggctggacttcccagggtgcccaggggtaaaccccccctgggggagggactgtgctcatcctccgccgcctgggagtccccaacgcgctaaatctggccccccctgggcctaaggcacaatggatccccggccttgcgccggaggtggtgg

SEQ ID NO: 175901 - DNA, 1006 bp, Homo Sapiens
  misc_feature (900)..(920): n is a, c, g, or t
ggggagagccagaacctgttctgctgcctgtaccgctcctggtgccacaacccagtcaccacggtgtccctctgcttcctcacccagaactaccggcacgcctatgacctcatccagaagtttggggacctggaggtcaccgtggacttcctcgcagaggtggacaagctggtgcagctgattgagtgccccatcttcacatatctgcgcctgcagctgctggacgtgaagaacaacccctacctgatcaaggccctctacggcctgctcatgctcctgcctcagagcagcgccttccagctgctctcgcaccggctccagtgcgtgcccaaccctgagctgctgcagaccgaagacagtctaaaggcagcccccaagtcccagaaagctgactcccctagcatcgactacgcagagctgctgcagcactttgagaaggtccacgaacaagcacctggaagtgcggcaccaccggagcgggcgtggggaaccacctgggaccggagggttgtcctctgacaggcctggcacggaggagggcccaccgagtggtcccatgaaacactaagggtcgtcacgccctcccgaggagctcaaggacctgcctgtcaggaccagggctgggcctgccaacccagggcagtgttggggccggaggctgctgtgtctgcccaagctcctctcagagtccagtccccaggcctccagcgctgtcagctgcaccctggcattctcacagagctggctgcccacccagtggggggctatagcctcagagaccactcatcctctggaatcaacctctttctaataccctcttggaaaaagagcttgcccctcctccagcacactagagctctggccttgtgtgtatatgtatacatacgtgaacacatgccnnnnnnnnnnnnnnnnnnnnnacttgtatgcacgtaggcaccagcacaaagatctgaatgatgcaccccacccccaccccaataaagaaataacagaaaaccctcaa

SEQ ID NO: 175902 - DNA, 512 bp, Homo Sapiens
acaagggaaatgggtggatgtgatggtggaccggacaagggggacctggggaagactctgggacgagggagagtttggagctgtgatggaaggccagctcaaacaggacgactccatcctcaaggtggctgtgaagacgatgaagattgccatctgcacgaggtcagagctggaggatttcctgagtgaagcggtctgcatgaaggaatttgaccatcccaacgtcatgaggctcatcggtgtctgtttccagggttctgaacgagagagcttcccagcacctgtggtcatcttacctttcatgaaacatggagacctacacagcttcctcctctattcccggatcggggaccagccagtgtaccctgcccactcagacgctagtgaagttcatggcagacatcgccagtggcatggaagtatctgagtaccaagagatcatacaccgtgacctggcggacaggaactgcatgctgaatgcgacattgtcgtgtgttgttgcggacttcggg

SEQ ID NO: 175903 - DNA, 209 bp, Homo Sapiens
tgttagaggatccccacgaaaggcaaatggggtgtacacatcattgagttgttcaggctactgaaacattaaaatgtgaattcccaaacttttctttttggctttgtcagggaaaagaaaaatatctttataaagaaatctttggaaattaggagaaggaatttcaggtgggtttaagtcagagctattccccaccaggtaccctacgc

SEQ ID NO: 175904 - DNA, 990 bp, Homo Sapiens
  misc_feature (795)..(795): n is a, c, g, or t
  misc_feature (829)..(829): n is a, c, g, or t
  misc_feature (853)..(853): n is a, c, g, or t
  misc_feature (926)..(926): n is a, c, g, or t
ggtccatgcaaggtgtcttgttgcatggaagggatagtttggctcccttggaggctatgtaggcttgtcccgggaaagagaactgtcctgcagctgaaatggactgttctttactgacctgctcagcagtttcttctctcatatattcccaaaacaagtacatctgcgatcaactctagccaaatttgcccctgtgtgctacatgatggatgattattattttaaggtctgtttaggaagggaaatggctacttggccagccattgcctggcatttggtagtatagtatgattctcaccattatttgtcatggaggcagacatacaccagaaatgggggagaaacagtacatatctttctgtctttagtttattgtgtgctggtctaagcaagctgagatcatttgcaatggaaaacacgtaacttgtttaaaagtttttctggtagctttagctttatgctaaaaaaaataatgacattgggtatctatttctttctaagactacattagtaggaaaataagtcttttcatgcttatgatttagctgttttgtggtaattgctttttaaaggaagttattaatatcataagttattattaatattttgaacacaggtggatgtgaaggattttcatttaaaaaccaagtggttttgactttttctgttgaatgaacaactgtgcccttgtgggaatttttgcagaagtgtttatgctttgttagcatttcaacttgcattattataaagaggtattaatgcctcagttatgtgtttgtcaatgtactggctgangattctatctcagctgtcttttctaactgtgtangttgagtttttgacacgtgcctgntggacatcaagcctcctgccagcagttctttgaccttctttttcattcctgctactctacctggatttctcanttgcaccactgagtggtcaaaatacattttctgggccacctccaggaaacccatgcatctgccc

SEQ ID NO: 175905 - DNA, 1162 bp, Homo Sapiens
  misc_feature (436)..(449): n is a, c, g, or t
gtggccggtgtgcccgcattgcgggcaagttgctgcatgacaatttgtgtgagtctcatctatgtctcattgcagccaagtgcgtggccaaagtacccagtgccgcttgcttaaccaggcccttagagttatgagtcatccgatcatgtagcacacagggggcaaatttgggcaaggagttgatcgcaagatgaacttgttcttgggaaaatatgagagaagaaactgctgagcaggtcagtaaagaacaggtccatttcagctgcaggacagttctctttcccgggacaagcctacatagcctccaagggagccaaaactatcccttccatgcaacaaagacaccttgcatggatactctagccatgacttgctttgggacaaaaaatcaactgctaacgtttttcatctgctaatatcattaacaccatggagnnnnnnnnnnnnnnttgcaaccctagaaaacttgacaacgagaataagaaaatccacaaggaaaggtcatgctaaaactgatttgacagttgttccatcaccgcctaccacatgggcttgagactggtgacttcatggatgcatcccttcgatgccctgccaaatgtcagcttcaagtctgtcagtgaccccagtgtgatgctgcctgccttctattcaccaactcctatccaagagatccaagggggccttgggcggtggtaagcacaggacacgcaggtgccaagagcccaagaaccctctagaaaacttcgccttggatttgggcacggaaacgagccagtggtttgcagtcttggcaacagcatccacactggggcttaacctcagcagccagcctggaggatgcttgccccagagcgcttggtcacagacaatgttgtgaatacctctgcacagacagggtggattccaattgtgctgtccagctgctttttggtcagtccacatttgagcgcagctgcaaagccttgtgtaacttctccagcatttggacccagtacgtgaaagcccacaacacgttcattgtctttagtattacagattatttttgcataacatttgttgttatctcttgacggaatcgtccattccaatggccaaaagtaactagacccacgcgtccggacccacgcgtccgcgacagcgtgggtcgacccacgcgtcc

SEQ ID NO: 175906 - DNA, 496 bp, Homo Sapiens
  misc_feature (220)..(220): n is a, c, g, or t
  misc_feature (310)..(310): n is a, c, g, or t
  misc_feature (429)..(429): n is a, c, g, or t
  misc_feature (434)..(434): n is a, c, g, or t
  misc_feature (440)..(440): n is a, c, g, or t
  misc_feature (473)..(473): n is a, c, g, or t
ggaagaagctgcgccatgaacgggcgcaatcctacgagggcgagtggaggtgctggtggagagaaacgggtcccttggtgtgggggatggtgtgtggccaaaactggggcatcgtggaggccatggtggtctgcctgccagctgggcctgggattcgccagcaacgccttccaggagacctggtaattggcacggagatgtcaaacagcaacaaagtggntcatgagtggagtgaacgtgctcgggaacggagctgtccctggcgcactgccgccacgacggggaggacgtggcctgcccccaggcggangtgcagtacggggccggagttgcctgctcagaaaccgcccctgacctgggtcctcaatgcggagatggtgcagcagaccacctacctgggaggaccggcccatgtttccttgcttgcanttttnccattngaaggagaacttccttttcggccttaagcccgnagaccgaccccaccacgggttaa

SEQ ID NO: 175907 - DNA, 769 bp, Homo Sapiens
cggcagatgggagcagcaccaggcactgcacttgggctcccaagtctggtggagttctcagggataacctttttagggtgggggctgggacctccagaccacatggtgttgtgtctgggataagtgtgtgggggcagggaggttggaagaatgacacgggctcaggacacagagtgaggactcatgtctaatgagcaccggccaaaacttccatcttcagtttttctgatcacaagtcctcaaccccaagccttccctctcaagttgagtttatggtccagaccacctggacagagcaggagggaggcagtgcttggatcagccctgaactgctgtagttggaaatgggtttaccttaaaataggtcaattgccacataacacgctgaagaacaaagagggtggggtgggggctggaggtgcggatggtccacacacacacttgtctacgtaggcttgctcaacccagcccagcagcaccggagagcccctccgcacctcattcttaagaacctggacccggctctcctcaccagcgtctccagctgcacacagaaaggactgctctctgaagggtgaagatggagatgacattcccgagtcgttcttgggagccccagctaccactacagccccctcccactctcagggatgcagctgtgatggagaggttgggtatttaaattaaaaagtagaaagacagcaggcaccaagaagagagagcccccaccccacacgagagggaaggcactgtttctcctcccccattt

SEQ ID NO: 175908 - DNA, 481 bp, Homo Sapiens
  misc_feature (12)..(12): n is a, c, g, or t
gtgttaagtgcnaaatgaccctaatttagggtaaaacccaatcccaaactaaaagcagttcagggctggacccaaaaaactgcctcccctccctgctctgtccccaggtggtctggacccataaactcaacttgagagggaaggcttggggttgaggacttgtgatcagaaaaactgaagatggaagttttggccggtgctcattagacatgagtcctcactctgtgtcctgagcccgtgtcaatcttccaacctccctgcccccaaaaacttatcccagacacaacaccatgtggtctggaggtcccagcccccaccctaaaaaggttatccctgagaactccaccagacttgggagcccaagtgcagtccctggtgctgctcccatctgccgccccccttctctcctggcaattggtttgtactcactgggctgtgctctcccctgtttacccgatgtatggaaataaaggccctttat

SEQ ID NO: 175909 - DNA, 1054 bp, Homo Sapiens
gggagactgacgtgtgagctgcatcgcgggaggcgcatggcggggatggcgctggcgcgggcctggaagcagatgtcctggttctactaccagtacctgctggtcacggcgctctacatgctggagccctgggagcggacggtgttcaattccatgctggtttccattgtggggatggcactatacacaggatacgtcttcatgccccagcacatcatggcgatattgcactactttgaaatcgtacaatgaccaagatgcgaccaggatcagaggttccttggggaagacccaccctacgaagttggaatgagaccatcagatgtgataagaaactcttctagatgtcaacataaccaaccttataaagactaaaattcatgagtagaacaggaaaatcatcctgactcatgtgttgtgttctttatttttaattttcaaagaggctcttgtatagcagttttgtctattttaacattgtagtcatttgtactttgatatcagtattttcttaacctttgtgactgtttcaatattacccccgtgaaagcttttcttaatgtaactttgagtacattttaattgccttctatttttaaaactcaaaatcattagttgggctttactgttcttgctatgtatggcatatacatctgcctggatatatttctactcttgaccaaagtttgtaaagaacaatataagatttcgggtaggggtatggggagggaagatattttatggagaactacttaacaaaagatttatctgtaagcttgaactcaggagtacagttttagctatctagactctaacagcttttgctttaaaattattaaagtgtttcttaatgaaaaagaaaagatcttgctaaagttaaaataaggaacatttcaccttttaaatatttaattcttatgtggacttatttccagaaaacttggtgataattcttgagacaaaaggtggttaagtagcattattatgtaatgcttatataccatagagtttttaatagaagagaaatccatttcctccgagggtcactattaac

SEQ ID NO: 175910 - DNA, 821 bp, Homo Sapiens
  misc_feature (626)..(639): n is a, c, g, or t
  misc_feature (641)..(643): n is a, c, g, or t
  misc_feature (645)..(646): n is a, c, g, or t
  misc_feature (648)..(654): n is a, c, g, or t
ggtctgagagtgaaaccatgactgtgaccaccttctgtccccagccctgtcctggttccttcctatgcccaggtaccacccttcagaccccagttctaggggagaagagccctggacacccctgctctacccatgagcctgcccgctgcaatgcctagacttcccaacagccttagctgccagtgctggtcactaaccaacaaggttggcaccccagctaccccttctttgcagggctaaggcccccaaacatagcccctgccccggaggaagcttggggaacccatgagttgtcagctttgactttatctcctgctctttctacatgactgggcctcccttgggctggaagaattggggattctctattggaggtgagatcacagcctccagggccccccaaatcccagggaaggacttggagagaatcatgctgttgcatttagaactttctgctttgcacaggaaagagtcacacaattaatcaacatgtatattttctctatacatagagctctatttctctacggttttataaaagccttgggttccaaccaggcagtagatgtgcttctgaaccgcaaggagcaaacactgaaataaaatagtttattttttcacactannnnnnnnnnnnnnannnannannnnnnnacatgtcgggccgccctccggcccttcgagaaacttttcataaaccatttcgttttggcgccgcggggccccagtaaggtaaaggggaaattgggtcaatagcctggtttccctaaggaaattcctggggccatgaactaaggggctttggaattcctccacccatt

SEQ ID NO: 175911 - DNA, 1195 bp, Homo Sapiens
  misc_feature (1104)..(1104): n is a, c, g, or t
  misc_feature (1119)..(1119): n is a, c, g, or t
  misc_feature (1130)..(1130): n is a, c, g, or t
  misc_feature (1151)..(1151): n is a, c, g, or t
  misc_feature (1157)..(1157): n is a, c, g, or t
ggggctggggtgagagaggaaagacctacattccctctcctgcccagatgccctttggaaagccattgaccacccaccatattgtttgatctacttcatagctccttggagcaggcaaaaaagggacagcatgccccttggctggatcagggaatccagctccctagactgcatcccgtacctcttcccatgactgcacccagctccaggggcccttgggacagccagagctgggtggggacagtgataggcccaaggtcccctccacatcccagcagcccaagcttaatagccctccccctcaacctcaccattgtgaagcacctactatgtgctgggtgcctcccacacttgctggggctcacggggcctccaacccatttaatcaccatgggaaactgttgtgggcgctgcttccaggataaggagactgaggcttagagagaggaggcagccccctccacaccagtggcctcgtggttattagcaaggctgggtaatgtgaaggcccaagagcagagtctgggcctctgactctgagtccactgctccatttataaccccagcctgacctgagacttgtcggagaggctgtctggggcctttatcaaaaaaagactcagccaagacaaggaggtagagaagggactggggggactgggagtcagagccctggctgggttcaggtcccacgtctggccaggcactgccttctcctctctgggcctgtgtttccttgttggtcagaggagtgattgaaccagctcatctccaaggatcctctccactccatgtttgcaatgcttttatatggcccagccttgtaaataaccacaaggtccactccctgctccacgaagccttaagccataggcccaagatatttctgagagtgaaaccatgactgtgaccacctttctgtcccccagccctgttcctggttccttcctatgcccaggtaccacccctcagaaccccagtttctaggggagaagagccctgggacaaccctgctctacccatgagcctgcccgctgcaatgcctaggacttcccaacagccttaggtgccagtgctgggtcactaaccaacaaggttgggcancccaggttacccttnttttgcagggntaagggcccccaaacataggnccttgncccgggggaaggtttgggggaaccatgagtttttaagt

SEQ ID NO: 175912 - DNA, 477 bp, Homo Sapiens
aaatgggggaggggcttgtgggcctggggaccctggtcctaggtctggagtggccctacgaagtcagcaatggcaagtggctgctgtatcccacggagatcaccgtccatggcaatgggtcctggccctgccgaccacctggagaccttatcaaccctctcaacctcactctttctgaacctggggacaggccatcatccccacagcgcaggcggcgacagctggatccagggggaggccagggccccccacctgtcactctggctgctgccaaaaaagccaagtctgagactgtgctgacctgtgccacagggcgtgcccactgtgtgtggctagagtgccccatccctgatgcccccgttgtcaccaacgtgactgtgaagcaccgagtgtggaacagcaccttcatcgaggattacagagactttgaccgagtccgggtaaatggctgggctaccctattcctccgaaacagca

SEQ ID NO: 175913 - DNA, 974 bp, Homo Sapiens
cagactcggatacaaggagaggaactagagttccaaattctggagcaggactgaagttatttgggcaagggagcttggattcgcaagatatggaattctgaagtgcggaaatatactcctaggggctgagtggtcctaggctccagggctggaggtgggacctgtgctccttgggttaagggtgaacctcagcgtcctacaagctgggaggagccctgagtaacgttggtctgcttttaggtgaccggttccgaggaggagctttgggtttctaagggctgggcctttaaagactgggtaattaggacccaagcgtgaggtttccattggccggctgggattctgggagaagagacctatagttctaacgactggggcagagccatgggttctgagctggagaaaatcgtgggtttgatacagactgtactcgggaccgggaacctagggtttgggtagaggtgaaggcctggtcacctttgggctgggggcagaacatgggctcagagttgggggactaagggcggagcctgggtccccacaagcggtccgaagtccccagtagttcagaggcctttgcgctgccgcttgaggaaagacagagtgtagtcactaggggtggacactttctgcttcttcatctgcacttgcgactgtgccgtgagttgcagcttgatggcgctcgagttgatcttggtggccaccagcagctccttcatgcccttcatcttctcactctggaaagtgagcactggaccctccggcggtggtgatgctgcgggtgctggcacctgagccgtgctgccaccttcagggcctcgggctgtgccagcgacagtcccaggaggcttccgggggggtcctgacactgcaccctggccggtgcccaggcccttgtccagtgctggcttcttgggcggcgggggctcctctggcttggactcccgccgtgggccccgccgccggccttcccc

SEQ ID NO: 175914 - DNA, 588 bp, Homo Sapiens
  misc_feature (284)..(284): n is a, c, g, or t
  misc_feature (314)..(314): n is a, c, g, or t
agcagtcgggagaagaaaagctttactgggagaaaatacaacaaattccagagtgcatggtttttagcccaccctatcaccccaccagcaataggaacacagaccactcgatcaccacacattccctacctcagggagtaagtacagcagccaacatctggtctcagagctgctgggaaaaggggcaggaggaagaagtatctgggaataccattctctcactcttttcccctccttcctggcctgatttagaagaatctgactgtccccaggatacagaattncttggttgggatcttgtggaactgggggcnaaaaaaatagcagcaaaagcacttaagggcaagaattcagctgggactttcagactcagtgaccagtgataagacaagtgcccaagctccagccactgtaatcagtccttagattaatgacttattcctcaatcctaaaatatcaagaggtggacaagggttaagtcaaacccaggaagtctttcccttcactcttctataaagaagggaactggcatgaagttggatggcttaatgatcaagcagctaaaggtaagagagacagagtgagaga

SEQ ID NO: 175915 - DNA, 1456 bp, Homo Sapiens
  misc_feature (218)..(287): n is a, c, g, or t
  misc_feature (369)..(369): n is a, c, g, or t
  misc_feature (371)..(371): n is a, c, g, or t
  misc_feature (452)..(552): n is a, c, g, or t
  misc_feature (566)..(575): n is a, c, g, or t
  misc_feature (909)..(909): n is a, c, g, or t
  misc_feature (918)..(971): n is a, c, g, or t
aaaaaataaggggtgggtgggcgataataaagtgtaaacgcggcttggaatgatgtaggggttggacatgaagggaataatagaacgtggacgaggtatcagtgaagacgaagtctataaaaatataacggaaagggggatgaatatacgagagaggatggaggcggaggcgtactgcggaggcacaccgaataaacgggcggaggtgaacgagaacnnnnnnnnnnnnnnnnnnnnnnnnnnnnnnnnnnnnnnnnnnnnnnnnnnnnnnnnnnnnnnnnnnnnnnataacagttcatctggagtgcaaaaatgttacgcatcggagcgctaaatctaaggggtatgataatgaatacgggtagatgnangggatgtgtagcaagaagaaaatgtaggcaggcagcaaaagatatgaataacgtgagacacgaaaagatgtgcagttcggnnnnnnnnnnnnnnnnnnnnnnnnnnnnnnnnnnnnnnnnnnnnnnnnnnnnnnnnnnnnnnnnnnnnnnnnnnnnnnnnnnnnnnnnnnnnnnnnnnnnnctactaacataatnnnnnnnnnnattttttcccggacagggtagaattagggagggggattacgaggtagggataaggaggtaggggaaataacggccgggaatggtagtaaatggggaaggacgggagagataaagggacggcgcacgggggtgttgtgttgacatagaatggtgtaacgtatcgacgagcgacacatcatgcacggaaacgccggcggtaagagagcatgagagaacggggagacaggaggagagggagaagaggggaaatggagggaaaacggaagagatgatggggtggagagaagaggaaggaaagcgagtggaaagaggcgaaggagggggaaatgtgagngggcaatannnnnnnnnnnnnnnnnnnnnnnnnnnnnnnnnnnnnnnnnnnnnnnnnnnnnncacggttcctggactcaagacaattgtcaaggaggcgagaaaaatgggccgggtgtagaaggggggacgcgcaaaagggagagagggataaggcaatagggaggtggcgtagtgggcgtatgggagtggtggtgggtaggaaacagccatagtgatgggcccagaagagccacgcgcggtgtatcatacagcagactgcttggactgtaggaggattgctgccatggaaagcaacaagggagagagaaagcaacaaaagaaactgttaaggaaaactgggagcaggcctgaagaaaacaaggaaagcttctgagtctctaccacctttccaaaaaggaaaaaatacatgcagttaggaaaggcagggtttttccctactcagtgttctgggttaaacctaagagtaagaaaaatcccctgaactggcagcatcagtatgtatccaagtgcctcaccagcacaagcgccccccatttccctttcgt

SEQ ID NO: 175916 - DNA, 941 bp, Homo Sapiens
  misc_feature (79)..(129): n is a, c, g, or t
taaggagcggtgtgcataattaatgtgggtgccaaggaggtgcgtaactcttaacgggaagagaaggaggtgaattcannnnnnnnnnnnnnnnnnnnnnnnnnnnnnnnnnnnnnnnnnnnnnnnnnnccaaggcggcaggtgcaaaggccggagggcttaagcggccgttgaagacaggggggtgggtgtcctgaaggcttgccattccggggccggagcccttccacggtggccacctcgccttgtccatcccctcagccactaggtctgtctgcagcacggctgcctggacggaagggaggccgggccagcagtccctccggccaacactcaggcaagaaaatcatatcaaaaagcaacaagtttacaaaaatagaaaataattacagcgggcgcggggctctggtgccagctcatggggtggggcagggccgcagctctggcttggtgacggcgtcctccagcaggtgcagcgggtgccggcccaccaccacatcccgcaagcagcccacaaagcctgtgccgtaggccttgggcagtgctgggcccacgggcagctccggcaggcccccaagccacagggctccatcagtgtccagctgcgtggcgcccagcggggaggagccggtcacaggggcctcattgcccacctgcagggaaccttccctctgctccctatgtgccacgacccgcaaccagcggttggtgttgacgggcacggtggaacgcagcaccacgggctgggagcccaggttgtagctcagttgcaggtgcccgtccacaatggccagtgccacatagtctgcccgctccgtggccttgccactccagagcaccagcccctgcgtggcctcagtgcgcaggctcagttcaaagtggttgctctgcagtgccttctcgctctcggtcacagcgttgaggtactcgacaaaggtccg

SEQ ID NO: 175917 - DNA, 834 bp, Homo Sapiens
  misc_feature (133)..(133): n is a, c, g, or t
  misc_feature (678)..(678): n is a, c, g, or t
  misc_feature (780)..(780): n is a, c, g, or t
  misc_feature (809)..(809): n is a, c, g, or t
ggcaggactgcccaagaaaccagaaattactccacgttcacttcctccaaagcctactgtttcctcagggaaaccttctgtagctcccaaaccagctgctaacagagcttctggagagtgggactctgggacntgagaacagactcaaggtgacctccaaggaaggactcaccccataccctcccctgcaagaagcgggaagcatcccagtaaccaaacctgaattgccaaagaaaccaaaccctggccttatacgaagtgttaatcctgagattccgggaagagggcccctggctgagagctctgatagtgggaagaaagtgccaactcctgccccgcggcctttgctgctgaagaaatctgtttcctcagaaaaccccacctacccttcagctccactgaaacctgtcactgttcctccccgactcgcaggggcatcacaagccaaagcatacaagtcactgggagaagggcccccagccaaccccccagttccagttctgcagagcaagcccttggtggacatcgatctcatcagctttgatgatgatgttttgcccaccccatcggggaacctggctgaagaatctgttggttcagagatggttctagatccctttcagctccctggcaaaacagaacccataaaagaacgagcagttcaaccagcacccaccnagaagcccactggtaattcgaaatccagcccaaccagggaaatgtttacatgagggatccacaaagtccaccttcctctccctggctgaaaaacctattggnaaacacttttcagttacagtaatctgggnaaagctcagttaatggtggaggaat

SEQ ID NO: 175918 - DNA, 577 bp, Homo Sapiens
tcacagcccaaggtagggctagacaggtatgggtcagttctcttctgatagtcccagagtctacagcgaaccaaagatgaaagctctgaaggagagacaccagtactcacaggtctcatgtccatgctccgtccaaggggacctagctacttccttaccccttctcagtttcaggagaagaaaagtgttgcagattggttaagaccctttcccaccaattgctgtggtgaaccctccagcaagggcatggctactttcatggaaagcaaagagggtcctctgcttctcttatccttcccaaaaaaacatgggctggggtaagaaccctaaagagcaggcatggagggactgtgggaaggactcagcctttgctgtagaaaagctctctgcaaagcaagaaggcagggtatggtaacaaatgcaattcctggtttaattggacttgacaggtgaaagatgtcaggctgtgtgtggtcacattgtacatatgcatgcctgggggttaccagggttgtatgcaaatatacaaggaagaggtaggtctgagaacctgctgtgggctgtggaggggaccgag

SEQ ID NO: 175919 - DNA, 475 bp, Homo Sapiens
  misc_feature (462)..(462): n is a, c, g, or t
ggtacccgttcactccagtcccaccccacgcctgactcccctctggaaactgcaggccagatggttgctgccacaacttgtgtaccttcagggatggggctcttactcccctcctgaggccagctgctctaatatcgatggtcctgcttgcccagagagttcctctacccagcaaaaatgagtgtctcagaagtgtgctcctctggcctcagttctcctcttttggaacaacataaaacaaatttaattttctacgcctctggggatatctgctcagccaatggaaaatctgggttcaaccagcccctgccatttcttaagactttctgctccactcacaggatcctgagctgcacttacctgtgagagtcttcaaacttttaaaccttgccagtcaggacttttgctattgcaaatacaaaacccaactcaaacctgcttaagcagaaaataaatttaaangattcaagtttga

SEQ ID NO: 175920 - DNA, 140 bp, Homo Sapiens
cctggaaggttgaggctgcagtcagctgctgatagcactactacactccacgccttggacaacagagggagacctgagaatgttcagggcctggagagaaggactgggagcaggagctggtctaaagaggccattgtaca

SEQ ID NO: 175921 - DNA, 831 bp, Homo Sapiens
  misc_feature (627)..(627): n is a, c, g, or t
  misc_feature (638)..(638): n is a, c, g, or t
gggatgctaggggattctgccgggtagaagagctgggcctggaacccagccctgaggacatcctgcggcccaggggcaagtgacacctgctgagagaggcccaggatggtggaggctgaggaactggcacacctgcggctgctcaatctggagctcctgaggcagctgtgggtggggcaggatgctgtgcggcggtcaagtggccagggcagcctctggagtcaagcctggaatccagcagcagctacaactcagagactccatcgaccccagagacgtcctcaacttccttgagcacctcctgcccacggggccggtcctccgtgtggggcccaccagatgcctgtcgaggggacctccgtgatgtggccagatcgggggtggcctctctcccacctgccaattgccagcaccaggagtccctgggccgaccgagaccccactcagcaccctcgctgggcacctcaagcctgagggacccagagccctcagggaggctgggttatccaggaccccaggaggcacagacctcgaggtccatcctggctcaacagagcaagctgtccaagcccagggtgacccttctctgaggagtctgcagttccctgagaggagctggcgcctcangccatacctgngctatgaactgggattgcagggtctctggacaccagctcttccatcaccagccagcctggagccttcttctcccagctggcagggagtttcgggaaacccaccaagggaggagtgtatctgcagcccatcctgaaacccagtttgccagccctggcgtgagaacaatgggccaaccggccgtgggaggaaaaa

SEQ ID NO: 175922 - DNA, 613 bp, Homo Sapiens
  misc_feature (166)..(166): n is a, c, g, or t
cgtagggtactggtggggcttgattagagaagcatgagcgttgaggcctcctttgtatgcctgggacaacaggtaggtgctgtcactggtcctgcagactgttcagcaacagcccctttggatttctggatattctggaaacaaagtcagaacagtggcctactgnggggttggcagaggggtatggtaagaggacctcctttcatctccctgttcagcatccgatggcagtccacaggtcatccttggtgggtgtcaggcccaagacccatgcccaccttaccctttgaatccaggtgagatgagatcaaaccaggcagcacagaagaagacaggatgctacaaaggcagccaatgagctcatggcctcaggggttttaagcaccagccctggctacccagcctcccttgtccctacctagaggcacaggcccagcctacctgaactccctcacactgatgctccagacctggctcctgggacagcaaacttctctcttccaacgtcctcttgcctcatttccatttccttcacatctgtctcctactttactgggtccttctcttaaatctgtattttcattccggggtgttatgtctccccccatttttc

SEQ ID NO: 175923 - DNA, 618 bp, Homo Sapiens
ttcaccctcactgacgttagcagtggccccttcccgttctggctcctccaggctgggtatctcattggctgcttgctcttgactggctagaacctcttcaatcaagggtagagcatcatcctcctggcccaagtcttttaggggtggctttgagcgctcagacttccaggatgatcgtcctccattcctcttgtagttgtctgggacgtaatgaggcgagaaatcttttttgggagtgagcttcttggggaagtgatcaaaagcatagggtttggtgcagacaggatagcggttccggtggatcttgtaaaacaggtgtgctgacttgtcaagccgataatcacagatgtacacatcttgctcctttactcctttgggtctccctttacaatacgtataaaggtccaacacacagcaggtccccactacagcctccaagggaatgatctcatagagtggcacccgaaatagctcattatgatagaaccgacgggatggagagtggtgtgttgtggggaccgaaattatgtgaccaaggccaacccgtccttttttcttcttccaaagctttcatgcgaaaaatgtagtttaatctgggtattgagatacagtgattga

SEQ ID NO: 175924 - DNA, 413 bp, Homo Sapiens
  misc_feature (63)..(94): n is a, c, g, or t
tccctcctcagcttcttgttcctgggacaagggtcaagccaggatgggcccaggcctgggatnnnnnnnnnnnnnnnnnnnnnnnnnnnnnnnntgctgctttgcggggggcagggaagaaatggactccttttgggtccccgaggtggggtcccctcccagccctgcatcctccgtgccctagacctgctccccagaggaggggccttgacccacaggacgtgtggtggcgcctggcactcagggacccccagctgccccagccctggtctctggcgcatctcttccctcttgtcccgaagatctgcgcctctagtgccttttgaggggttcccatcatccctccctgatattgtattgaaaatattatgcacactgttcatgcttctactaatcaataaacgctttattta

SEQ ID NO: 175925 - DNA, 414 bp, Homo Sapiens
  misc_feature (63)..(94): n is a, c, g, or t
tccctcctcagcttcttgttcctgggacaagggtcaagccaggatgggcccaggcctgggatnnnnnnnnnnnnnnnnnnnnnnnnnnnnnnnntgctgctttgcggggggcagggaagaaatggactccttttgggtccccgaggtggggtcccctcccagccctgcatcctccgtgccctagacctgctccccagaggaggggccttgacccacaggacgtgtggtggcgcctggcactcagggacccccagctgccccagccctggtctctggcgcatctcttccctcttgtcccgaagatctgcgcctctagtgccttttgaggggttcccatcatccctccctgatattgtattgaaaatattatgcacactgttcatgcttctactaatcaataaaacgctttattta

SEQ ID NO: 175926 - DNA, 441 bp, Homo Sapiens
  misc_feature (89)..(120): n is a, c, g, or t
  misc_feature (277)..(277): n is a, c, g, or t
gggagtcactctgggcctggctgtcgtccctcctcagcttcttgttcctgggacaagggtcaagccaggatgggcccaggcctgggatnnnnnnnnnnnnnnnnnnnnnnnnnnnnnnnntgctgctttgcggggggcagggcagaaatggactccttttgggtccccgaggtggggtcccctcccagccctgcatcctccgtgccctagacctgctccccagaggaggggccttgacccacaggacgtgtggtggcgcctggcactcagggacccnccagctgccgcagccctggtctctggcgcatctcttccctcttgtcccgaagatctgcgcctctagtgccttttgaggggttcccatcatccctccctgatattgtattgaaaatattatgcacactggtcatgcttctactaatcaataaacgctttattcaa

SEQ ID NO: 175927 - DNA, 386 bp, Homo Sapiens
cggcagcaaggggtgtaatggggctgggttctgtcttctacaggccaccccgaggtcctcaggtggttgcctggggagccggacggggctcctgaggggtacaggttgggtgggccctcactgagggtctggggtcaagctttggcctctgctgcctctcagtcaccaagtcacctccctctgaaaatccagtcccttctttggatgtccttgtgagtcactctgggcctggctgtcgtccctcctcagcttcttgttcctgggacaagggtcaagccaggatgggcccaggcctggggatcccccgcaggccaaagggaacacaaacaagggaacgacaaatacacatagaaagcaaaaaagacaaagcaggaagcaaggaagag

SEQ ID NO: 175928 - DNA, 480 bp, Homo Sapiens
  misc_feature (439)..(439): n is a, c, g, or t
  misc_feature (455)..(455): n is a, c, g, or t
tgagtgagtgagatggctgagtgagggttatggggagcctgaggttttatgggcctgtgtatccccttctcccggccccagcctgcctccctcctgcccgcctggcccacaggtctccctctggtccctgtccctctggtggttggggatggagcggcaaaaggggtgtaatggggctgggttctgtcttctacaggccaccccgaggtcctcagtggttgcctggggagccggacggggctcctgaggggtacaggttgggtgggccctccctgagggtctggggtcaggctttggctctgctgcctctcagtcaccaagtcacctccctctgaaaatccagtcccttctttggatgtccttgtgagtcactctgggcctggctgttcgtccctccttcagcttcttgttcctggggacaagggtcaagccagggatngggcccagggctgggnattcccccaccccagggacccccag

SEQ ID NO: 175929 - DNA, 1328 bp, Homo Sapiens
ggggcgcccgttgcaagatggcggcggccatgctgggccccggggctgtgtgtgcgcagcgggcggcggcgcggcccggaaggctggcgcggcgacggcgttagcccggccctcggcccctctttgcggccgctccctccgcctattccctccttgctcgagatggatctgcccgtgggccccggcgcggcggggcccagcaacgtcccggccttcctgaccaagctgtggaccctcgtgagcgacccggacaccgacgcgctcatctgctggagcccgagcgggaacagcttccacgtgttcgaccagggccagtttgccaaggaggtgctgcccaagtactccaagcacaacaacatggccagcttcgtgcgacagctcaacatgtatggcttccggaaagtggtccacatcgagcagggcggcctggtcaagccagagagagacgacacggagttccagcacccatgcttcctgcgtggccaggagcagctccttgagaacatcaagaggaaagtgaccagtgtgtccaccctgaagagtgaagacataaagatccgccaggacagcgtcaccaagctgctgacggacgtgcagctgatgaaggggaagcaggagtgcatggactccaagctcctggccatgaagcatgagaatgaggctctgtggcgggaggtggccaagccttcggcagaagcatgcccaagcaacagaaaagtcgtcaacaagctcattcagttcctgatctcactggtgcagtcaaaccggatcctgggggtgaagagaaagatccccctgatgctgaacgacagtggctcagcacattccatgcccaagtatagccggcagttctccctggagcacgtccacggctcgggcccctactcggccccctccccagcctacagcagctccagcctctacgcccctgatgctgtggccagctctggacccatcatctccgacatcaccgagctggctcctgccagccccatggcctcccccggcgggagcatagacgagaggcccctatccagcagccccctggtgcgtgtcaaggaggagcccccaaagcccggctcagaacccccgggtagaggaggcgagtcccgggcgcccaatcttccgtggacaccctcttgtcccgaccgacctcattggactccaatcctgcgaggagagtgaacctggccacgggcatccggtcaaaaggaccatcacgtgaacggccaaggggggaccaacacaagggacaaccggaagggagccagggaactacacgatcagacaagacgccacacaagaacgacaacgacgaagaaaaaagg

SEQ ID NO: 175930 - DNA, 495 bp, Homo Sapiens
  misc_feature (478)..(478): n is a, c, g, or t
agaaatgagatttattgccttgggaggagaagggatgtggttgtgataggcaggccactctgggatccctgggatgcaagcccagggacagcagagtccccaggtgggaaatctacacacacaccccagggatgtcccagagacttcttctaccctaagaggagatcctgggcaggatgtgagaaatctgagcatcctctgtttggatggccgaagctgctggcatcaaactctggtctggaagaatcagtcacctgagcaaggcttccggaagtagatgatgagaacaatgcccacgatgatgcccagcacacccagggccaaagcaacggccacacagcacattctccagcagatctgagggcagtgcgttccggggtacccaatagggcaattgctgttttagcggtcaatttcgtgagtcacaatgcaggagaaaattttcagaaggttcttggtgtgaaagtttaagttaagnaaaagccttgggagctt

SEQ ID NO: 175931 - DNA, 1073 bp, Homo Sapiens
ttgccttaaagggtgaagggatatggttgtgatagggaggccactctgggatccctgggatgcaaacccagggacagacagagtccccaggttggaaatctacacacacaccccagggatgtcccaaagacttcttctaccctaagaggagatcctgggcaggatgtgagaaatctgagcatcctctgtttggatggcctaagctgctggcatcaaactctggtctggaagaatcagtcacctgagcaaggcttccggaagtagatgatgagaacaatgcccacgatgatgcccagcacaccccagccaaaggccacgccacacagcacattctccagcagatctgagggcagtgcgttccggggtacccaataggcaattgctgtgtagcggtcaatttcgtgagtcacaatgcaggagaaaatgtcagaaggttctggtgtgaagtttaagtaagaaaaggcctggaagctgagtccatcgacagctgagacaaaagtaggcccaaatccttccacagggacggaatgatgctgccagttcactgtcagcatgggtgggaagagattactgacaaaacagaccaaagtgttgggcttgccaaactccaggggcttcagcgtgaacacttcagcgataggaaaccctctggacaccgggattttcccatcaagttttggccctatttgctggatcatccactcgcagaactctttgtcaaataaaatggcaggagcatctccctgttcctgagcccagtcagcaaattcgggcaggcgaggcacccgagtgttctgggaaaagtcgaagaagaaaagctggtcctcgtcgtaggcctcagagagtcccacactgggactcccatcctggcagtacactgtgtgcaggaatgtgtggttttgcaggtcatctggccacattggagtaggagcttcagggacggcccaggagtggggtagcagccacagaagtggtaacatctgtagcagcgcagctccttggttctgttcatgacccataccttcttgccacacagtaggtaggagctaccaacccagccaacccagcttccc

SEQ ID NO: 175932 - DNA, 920 bp, Homo Sapiens
  misc_feature (130)..(280): n is a, c, g, or t
  misc_feature (678)..(691): n is a, c, g, or t
ggtaggagggagagcagggtgccggccctgccaccaagttgagagctggaggggaggtggggagagaacatcacagagcagccagccctggttcactcctggcagtttcttctcaagctccttccctagnnnnnnnnnnnnnnnnnnnnnnnnnnnnnnnnnnnnnnnnnnnnnnnnnnnnnnnnnnnnnnnnnnnnnnnnnnnnnnnnnnnnnnnnnnnnnnnnnnnnnnnnnnnnnnnnnnnnnnnnnnnnnnnnnnnnnnnnnnnnnnnnnnnnnnnaaaatccttccctagagctagtatcctaaagctgcagagctagcccagacctcattggtttccttgtccttggggtgcttttcctgaatctttgggggtgaagggagtgttgctcccagtccagaggcctgattctgttcggactgggttctcaagacacgaccaggttctcaagacacgagtccccttgttcctccccattaaagggggtttgtcagaagcaagaacagcccctctccccagtcacagcctgaagggaggccccgagagcttcctccttccccccacctgctccttaccttctctgccctgctttttagaactgcagttcattgttttaagggattgggggagggagcctggggacacaaaccttttatacaatacaaagctttgcnnnnnnnnnnnnnncctcccttttccctttctcggttctcttctctcctctgaatggctgaagaaccctctgccgagggaggttggggattgtgggacaaggtcccttggtgctgatggcctgaaggggcctgagctgtgggcagatgcagttttctgtgggcttggggaacctctcacgttgctgtgtcctggtgagcagcccgaccaataaacctgcttttctacacaccaaatacaaaca

SEQ ID NO: 175933 - DNA, 787 bp, Homo Sapiens
  misc_feature (125)..(125): n is a, c, g, or t
  misc_feature (164)..(164): n is a, c, g, or t
  misc_feature (226)..(376): n is a, c, g, or t
  misc_feature (787)..(787): n is a, c, g, or t
acccccttataaggggggaggaaccaaggggattggttgtctggagaaaccggttcgtgtcttggagaacccagtccgaaccagaatcaaggccttctggattgggagcaaccactccccttcanccccaaaagatccaggaaaagccaccccaaggacaaggnaacccaatgaggtcctgggctagctctgcagctttaggatactagctctagggaaggatttnnnnnnnnnnnnnnnnnnnnnnnnnnnnnnnnnnnnnnnnnnnnnnnnnnnnnnnnnnnnnnnnnnnnnnnnnnnnnnnnnnnnnnnnnnnnnnnnnnnnnnnnnnnnnnnnnnnnnnnnnnnnnnnnnnnnnnnnnnnnnnnnnnnnnnnctagggaaggagcttgagaagaaactgccaggagtgaaccagggctggctgctctgtgatgttctctccccacctcccctccagctctcaacttggtggcagggccggcaccctgctctccctcctaactcccagcctgctgctgcccccttctgggaccctaattttctggactttgagaaatgggctgcccctgggggtgcctccaagagcccatttgagggatcgggtggggctgacctctctgtcttctttggatcatcgccttctcacactgtcctccctcttgattctgaaaaatggtcctgctgcccatggagaaccacagtaagatagatttctcatgcagctagtgaggggacttctctcttcacccatttccaccgttctcctattttccttttttttccn

SEQ ID NO: 175934 - DNA, 734 bp, Homo Sapiens
  misc_feature (68)..(218): n is a, c, g, or t
  misc_feature (234)..(235): n is a, c, g, or t
  misc_feature (262)..(262): n is a, c, g, or t
  misc_feature (366)..(366): n is a, c, g, or t
  misc_feature (415)..(415): n is a, c, g, or t
  misc_feature (623)..(637): n is a, c, g, or t
ggagaacatcacagagcagccagccctggttcactcctggcagtttcttctcaagctccttccctagnnnnnnnnnnnnnnnnnnnnnnnnnnnnnnnnnnnnnnnnnnnnnnnnnnnnnnnnnnnnnnnnnnnnnnnnnnnnnnnnnnnnnnnnnnnnnnnnnnnnnnnnnnnnnnnnnnnnnnnnnnnnnnnnnnnnnnnnnnnnnnnnnnnnnnnaaaatccttccctagnnctagtatcctaaagctgcagagctagnccagacctcattggtttccttgtccttggggtgcttttcctgaatctttgggggtgaagggagtgttgctcccagtccagaggcctgattctgttccggactgnggttctcaagacacgaccagggttcttcaagacacgagtccccttgttncctccccattaaagggggtttgttcagaagcaagaacagcccctctccccagtcacagcctgaagggaggccccgagagcttcctccttccccccacctgctccttaccttctctgccctgctttttagaactgcagttcattgttttaagggattgggggagggagcctgggggacacaaaccttttatacaatacaaagctttgcnnnnnnnnnnnnnnncttccttttccctttctcggttctcttctctcctctggaatgggctgaagacccctctggccgaggggagggttggggggattgtgggggacaaggt

SEQ ID NO: 175935 - DNA, 568 bp, Homo Sapiens
  misc_feature (30)..(30): n is a, c, g, or t
  misc_feature (46)..(46): n is a, c, g, or t
  misc_feature (68)..(68): n is a, c, g, or t
  misc_feature (75)..(75): n is a, c, g, or t
  misc_feature (104)..(104): n is a, c, g, or t
  misc_feature (351)..(501): n is a, c, g, or t
aaaaacattgacttgcaagttctaaaaacnagggcaaaacaaggtnaaggaaccagttgggggcaagnaagaaanctctcggggcctcccttcaggctgtgaantggggaagagggggctgttcttgcttctgaaaaacccccctttaatggggaggaaacaagggaactcgtgtcttgagaacctggtcgtgtcttgagaacccagtccgaacagaatcaggcctctggactgggagcaacactcccttcacccccaaagattcaggaaaagcaccccaaggacaaggaaaccaatgaggtctgggctagctctgcagctttaggatactagctctagggaaggattttnnnnnnnnnnnnnnnnnnnnnnnnnnnnnnnnnnnnnnnnnnnnnnnnnnnnnnnnnnnnnnnnnnnnnnnnnnnnnnnnnnnnnnnnnnnnnnnnnnnnnnnnnnnnnnnnnnnnnnnnnnnnnnnnnnnnnnnnnnnnnnnnnnnnnnnctagggaaggagcttgagaagaaactgccaggagtgaaccagggctggctgctctgtgatgttctcc

SEQ ID NO: 175936 - DNA, 473 bp, Homo Sapiens
  misc_feature (373)..(373): n is a, c, g, or t
  misc_feature (396)..(396): n is a, c, g, or t
  misc_feature (411)..(411): n is a, c, g, or t
  misc_feature (431)..(431): n is a, c, g, or t
  misc_feature (447)..(447): n is a, c, g, or t
ggagtgttgctgcaggtgttctagaggatcccgtaggtactggtggggatgtttcggggacacgtccttcctcagcaaccacggtggcagctccgggagcacccatcgctcaccccgcagcttcctggccaagaagctgcagctggtgcggagggtggggccgcccccccgtgaggattggcatctccccctgcaccctccccggctccaccgccatctcccccatcatcaagaacgccatctccctgccccagctcaaccaggccgcctacgacagcctcgtggttggcaagctcagcttcgacagcagccccaccagctccacggacggccactccagctacggcctggactctgggttctgcaccatctnccgcctgccccgctcggaaaagncgcatgcaccgagancgggatggttccttcccctntgaggcccgggctttngcgcttctgcactttgtcttgtcctt

SEQ ID NO: 175937 - DNA, 783 bp, Homo Sapiens
  misc_feature (726)..(726): n is a, c, g, or t
  misc_feature (743)..(743): n is a, c, g, or t
  misc_feature (754)..(754): n is a, c, g, or t
agaaaaagatcagaggcccagagaagcgcggaccagatgaggacgatgagaaatgagtggggcagatgatgaagaagagcagccttccaaacgcagaagggtcgagaacagcatccctgcagctggagaaacacaaaatgtagaagtagcagcagggcccgctgagaaatgtgctgccgtagatgtggagcccccttcgaagcagaaggagaaggcagcctccctgaagagggacatgcccaaggtgctgcacgacagcagcaaggacagcatcaccgtctttgtcagcaacctgccctacagcatgcaggagccggaaacgaagctcaggccactcttcgagggcctatggggaggtggtcaagatccgacccatcttcagcaaccggtggggattcccgaggttactgctacgtggagttcaaagaagagaaatcagcccttcaggcactggagatggaccggaaaagtgtagaaggcaggccaaggttggtatcccccttgtgtggataagagcaaaaaccccgaatttaaggtgttcaggtacagcacttccctagagaaacacaagctgttcatctcaggcctgcctttctcctgtactaaagaggaactagaagaaatctgtaaggctcatggcaccgtgaaggacctcaggctggtcaccaaccggggcttggcaaaccaaagggcctggcctacgtggagtatgaaaatgaatcccanggcgtcgcagggctttnattgaaagatnggacgggcattgacttattcaaaaggagg

SEQ ID NO: 175938 - DNA, 822 bp, Homo Sapiens
  misc_feature (737)..(737): n is a, c, g, or t
ggtgagtcaccattaactttggctgcatgtggtgggcatgtggaacttgcggctttacttattgaaagaggagctagcctggaagaggtcaatgatgaaggttatacaccattgatggaagcagctcgagaaggacatgaagaaatggtggcattacttcttggtcaaggagcaaatatcaatgcacagacagaagaaactcaagaaactgccttgactctggcttgctgtggaggctttctggaagtggcagactttctaattaaggcaggagccgatatagaactagggtgttctacccctttaatggaagctgctcaagagggtcatttggagttagttaaatacttattagctgcaggagctaacgttcatgcaacaacagcaacaggggatacagcactaacatatgcctgtgaaaatggtcatactgatgtagcagatgtcttacttcaggcaggcgcagatctggaacatgaatctgaaggtggaagaactcctttaatgaaagctgcaagagctggtcatgtttgtactgttcagttcttaattagtaaaggagcgaatgtgaatagaaccacagctaataatgaccatactgtactgtccctggcttgtgcagggggtcatctggcagtggtggaactacttttggctcagggggcaaatcctactcaccgttttgaaagatggctcaactatgttgatagaagcagcaaaaaggtggccatacaagnggtggtttgctatctccctggattaaccctaataacttgctttcagccccctcaaccaaatgtcactccagttaacctcccccac

SEQ ID NO: 175939 - DNA, 630 bp, Homo Sapiens
  misc_feature (469)..(513): n is a, c, g, or t
cccgtcctgctcttcgccaagcccaggcctgctgaggaccagaggccatgaccagggccgaatcttggggtgtcctgaccctcagcttggccctgcccagccaccctggacatgaccgttatccctctgccacaccccaagccctgcgagggggctattcgagaggagcttcactgtgggatggggttgacctcctgccgcctgcctgggtatcttggcctgcccatggctgtgttcttcatgtgttgattttatgtgacccctggagtggtgggtctcatctttcccatctcgcctgagagcggctgagggctgcctcactgcaaatcctccccacagcgtcagtgaaagtcgtccttgtctcagaatgaccaggggccagccagtgtctgaccaaggtcaaggggcaggtgcagaggtggcagggatggctccgaagccagaaatgccttaaactgcaacgtcccgnnnnnnnnnnnnnnnnnnnnnnnnnnnnnnnnnnnnnnnnnnnnngtcctcctaggagcaggacccgatgaagcgggcggcggtggggctgggtgccgtgttactaactctagtatgtttctgtgtcaatcgctgtgaaataaagtctgaaaactttaaaag

SEQ ID NO: 175940 - DNA, 477 bp, Homo Sapiens
atcctcacacagctgccacagccgatgcccgattctggaaggccccagtgagccccatctggccaagcttgaggaagatgtgtggccttgcccccaattccatcagaccaaggctgcaagtggccctccattcgtgtgtgtatttaggggctggggagggggaggggcaggagcttggaccttggtactacctcagctgagggtggtgacacaaccccttccatttgtcagcactttccagcctgccaattgcttcccctctgtgatctcatttcatctgcactgccatacgtggagtgagcaagacagggcttaccatcctgtctaccagatgaggaaatggcagttctgagaagtcactggtctagatcccgcaggtggcacgtgacagctagggttcaaaacgttctcaccaaatccaatgctcctcacatattaattttataaccagacaaataaatattagagacaaccacc

SEQ ID NO: 175941 - DNA, 506 bp, Homo Sapiens
gcgtaggtaatggtgggtaggtcagcaagaaaggagccgactgcaatgaaacaaaggcttgtggagattttataggatggtgcttgtgttgtgtgccgaagagggctttgtgcagtactgataatgctgtggttgcagtgagctaacttacttacgtttttctgttagctgaggatctggtgataagttgagtacaggaaggctgtgttgtagaccatgaagaaaggcagacttacagcttattggctttctctttttgattttcctcagttccgccggctcaaacttcccctccctgataaggactctatccttcccacctttcagcattatccacccttcatgatttactcatttaataaatatttgttgagctccaggcactgcgtttgctgctagaattttacatctttatgcaagagaataggtaaaagtagaatggatggttggttttgaaagattaaaattaagaacctctgcaaaacaaccccccaaacattacccta

SEQ ID NO: 175942 - DNA, 348 bp, Homo Sapiens
aggggattaaaatgcggtacgtcagtgcacagcctgtaccagacagtgctgcctggaagatttctgggctctcctgaggcgccaccccgcacctgagccacctccttggactcctgtcctctaccccttgaggacctccctcccttctaccctagctgtcttcttgaacttgggactctcctttcccaagacttccatcactagctcctggagggactggactttgcatcttcccttcgcgtggagcctcagtgtgagaggccctgccaatgcgtgcatgtcagaggtggtggggaccacatcagaagaagaggggggtgatgaaattaacaaataaaaagtatgggg

SEQ ID NO: 175943 - DNA, 913 bp, Homo Sapiens
gggaccttgtctccattttcattagacaatgcttcttgtgtgtgttctggaagatcttctaaatggaatgcttgttgcactgttcccaggcgagtggctgccatgagacctgaggaccacacttgggggaccaatcatgtccttcaccactgtgccttagaatcgcccctggacagagttcctgggcagaggggaaagcagctcccaggccttactcaggcctcaggtccatgggttgggcagccagtctgggcccttctcaggatcctcatctccatcctcatcctcttccttcacagcatttacttggagctctttgtgacacaccatgtcagtcatgatgaatcggccaacagccagcccttgccagctgacgtcacagtctaagatgggaaactgtggtacagatagacatgaagagagcttagcagtgattgaggtggtgactaaatatacagtcattgaataaataccatgtagcaagtgtactttgtggagtgttgagtaagtggaaaatggaaagccagttgcatttagagatgataggcctaaagggaactgtcttctgtcgagaagtaaaggaaacttcatgaaggatgtagaagcttagctgcctcagagaagagagaacctgaagatctgaggcaagctggacaggagaggtggatatttgttgatggaagaattcaagtttataatcaattcccacttagcacctactgtgtgctaggaacttgaatgtgtatgtttgacaagtcctgcttggcctgatgggtgggagaaggaacctgagcctggctgagatggctaggcggagggctttgaagtccaagcagctgaactggctgggtgggtttctacctttgatactgcaagacttggttggagctcttaattacaatatctgatattt

SEQ ID NO: 175944 - DNA, 335 bp, Homo Sapiens
cgatccctacctctgacgagttccaaatcatggagggaaatctggacctggcaccgggaagggaacaaccttcccaaccttcattgctaggttggtccccagcgcctgggagggatggctcagcccactgagttattgatgatttccttcctaatttcagtttccactatctctgggttgcagctggacttgagggagagcacagtgcaagagacaggaataagcagggtaaggcagttcggaggagggtccagtacgccaacagcaagaactcttgggcagtggtgggcccagggcagcccctcactccacgttacggaactcggtcagaggtg

SEQ ID NO: 175945 - DNA, 566 bp, Homo Sapiens
  misc_feature (69)..(104): n is a, c, g, or t
tttgctggtgagagagaagcctttaatgagagatgagttggaggcttggagagctactcttgcgccctnnnnnnnnnnnnnnnnnnnnnnnnnnnnnnnnnnnntatggagagggataattggggtgaggtggaagcagggggaagaggcagctctgggagggtggagaggaagggggctgcacactgtggctgtcttgtcaactgttctcccagaagaaattgttacaggctgctgtgagagcaggcacaagcagcacatactcctggaagttgacctccccgtgtccatgctggtctagttccttcatgagcttgtccacagcatgcaaatccttctggggatgtaggaagtgagagagatccgtctgcagcagctcattcagctccttcttgctcagcatgtacttgttgccctctttgcccgagtggcgtaggaaacgattgatgagggtctccatcgacgtgctcagctcagagcccattgaagcagttcacggttgtgctgggctagatgtgggagcaggttctggacagatggacaaggttggcaattgtggctgctgg

SEQ ID NO: 175946 - DNA, 549 bp, Homo Sapiens
  misc_feature (16)..(16): n is a, c, g, or t
tcatagtaactatganacagttgtgtttaaagcaggctggtacaggtccggaatcccgggatatgtcgacccacgcgtcggccatctgtccagaacctgctcccacctcaggcccaggccaaccgtgcactgctgcaatgggctctgagctggagacggcgatggagaccctcatcaacgtgttccacgcccactcgggcaaagagggggacaagtacaagctgagcaagaaggagctgaaagagctgctgcagacggagctctctggcttcctggatgcccagaaggatgtggatgctgtggacaaggtgatgaaggagctagacgagaatggagacggggaggtggacttccaggagtatgtggtgcttgtggctgctctcacagtggcctgtaacaatttcttctgggagaacagttgagcagacagccacattgggcagcgcccttcctctccaccctcccagacctgcctcttccccctgcttccacctcaccccacttatccctctccataaccccaggtggaccgggtgataagggcggaat

SEQ ID NO: 175947 - DNA, 1414 bp, Homo Sapiens
  misc_feature (1134)..(1134): n is a, c, g, or t
  misc_feature (1282)..(1282): n is a, c, g, or t
agagaaactcaaacaatggggatgatgagtcgttttaatgaacttccaaattcagattccagtaggaaagacagcaagttgtgcagtgtgttaacacaagatttttgtatgttatttaacaacaagcatgaaaaaaacagagaatggtgtcatcccaacatcagattctgccacacaggataattcctttaataaaaatagtaaaacacattctaacagcaatacaacagagaactgtgtgatatcagaaactcctttggtattgccctataataattctaaagttaccggtaaagattcagatgttcttatcagagcctcagaacaacagataggaagtcttgactctcccagtggaatgttaatgaatccggtagaagatgccacaggtgaccaaaatggaatttgttttcagagtgaggaatctaaagcaagagcttgttctgaaactgaagagtcaaacacgtgttgttcagattggcagcggcatttcgatgtagccctgggaagaatggtttatgtcaacaaaatgactggactcagcacattcattgccccaactgaggacattcaggctgcttgtactaaagacctgacaactgtggctgtggatgttgtacttgagaatgggtctcagtacaggtgtcaaccttttagaagcgaccttgttcttcctttccttccgagagctcgagcagagaggactgtgatgagacaggataacagagatactgtggatgatactgttagtagccgaatcgcttcagtctttgttctcagaatgggacaatccagtatttgcccgttatccagaggttgctgttgatgtaagcagtggccaggctgagagcttagcagttaaaattcacaacatcttgtatccctatcgtttcaccaaaggaatgattcattcaatgcaggttctccagcaagtagataacaagtttattgcctgtttgatgagcactaagactgaagagaatggcgaggcagattcctacgagaagcaacaggcacaaggctctggtcggaaaaaattactgtcttctactctaattcctccgctagagataacagtgacagaggaacaaaggagactcttatggtgttaccacaaaaatctggaagatctgngccttgaatttgtatttccagacactagtgattctctggtccttgtgggaaaagcaccactatgttttgtggaaagagaagccaattgacttcggagaggaagatctactgtgaccaagagtattgtggaagaatttatccgagaacnactggagctactccagaccaccgggagcatccaagggaacattgccccctgactgtcccaaaaagggggttggaattcccaagccctgccctgggggcccatttaacgctcaattgaatgggcctggaactt

SEQ ID NO: 175948 - DNA, 1017 bp, Homo Sapiens
gtctaggagcgagcctgggtggcgattccgcacgaggggaaagcaagggggtggggttccgccagggtccgcgtgtcagtcccctctggtgatctcgtcgccccttctctcccaggcaacatgtcggaaggaaacgccgccggcgagcccagcacgccgggagggccccgacctctcctgactggggcccgggggctcatcgggcggcggccggcgcctcccctcacccccggccgccttccctccatccgttccagggacctcaccctcgggggagtcaagaagaaaaccttcaccccaaatatcatcagtcggaagatcaaggaagagcccaaggaagaagtaactgtcaagaacgagaagcgtgaaagggacagagaccgacaacgagaggggcatggacgagggcgaggccgtccagaagtgatccagcctcactccatctttgagcaaggcccacccgaaatgatgaacaaaaaagggaactgggataaaacagtgcatgtgtcagacatggcacctttctcatatcatcaacatcaaaaaaaagaagagagagacagacgaacaaactaaacagatcttgcgcatgctggagaaagacgatttcctcgaatcacccccgtctgaggaaattacactcgaaatatttctgccgaaccctacgcctggatccatccagcatggctcttttaacgaataaaaatgacccaaacacaatgtttaaacctttgcattgacttgacccacagggaacacgacactcggctgggggtccctaaccctcttgttaaacatcgaaccaaccccccaccaatattttttggcaatacagcccatataatgaaggggcctacccaaaatggaggcaagttaatacccccccaagctattgcactacccccacactatactaccccactacaacaattattgttagtgaacttttcacaccattaaccatgttaaataagagaacattgctcaaatctcttacaacctagtcctgagcacacc

SEQ ID NO: 175949 - DNA, 1065 bp, Homo Sapiens
gttgctggcggctgccggtgctcgggccgggggatacgagacatgccccacagtgcagccgaacatgctgaacgtgcacctgctgcctcacacacatgatgacgtgggctggctcaaaaccgtggaccagtacttttatggaatcaagaatgacatccagcacgccggtgtgcagtacatcctggactcggtcatctctgccttgctggcagatcccacccgtcgcttcatttacgtggagattgccttcttctcccgttggtggcaccagcagacaaatgccacacaggaagtcgtgcgagaccttgtgcgccaggggcgcctggagttcgccaatggtggctgggtgatgaacgatgaggcagccacccactacggtgccatcgtggaccagatgacacttgggctgcgctttctggaggacacatttggcaatgatgggcgaccccgtgtggcctggcacattgaccccttcggccactctcgggagcaggcctcgctgtttgcgcagatgggcttcgacggcttcttctttgggcgccttgattatcaagataagtgggtacggatgcagaagctggagatggagcaggtgtggcgggccagcaccagcctgaagcccccgaccgcggacctcttcactggtgtgcttcccaatggttacaacccgccaaggaatctgtgctgggatgtgcttgtgtgtcgatcagcccgctggtggaggaccctcgcagccccgagtacaacgccaaggagctggtcgattacttcctaaatgtggccactgcccaggccggtattaccgcaccaaccacactgtgatgaccatgggctcggacttccaatatgagaatgccaacatgtggttcaagaaccttgacaagctcatccggctggtaaatgcgcagcaggcaaaaggaagcagtgtccatgttctctactccacccccgcttgttacctctgggagctgaacaaggccaacctcacctggtcagtgaaacatgacgacttcttcccttacgcggatggcccccaccagttctggaccggttacttttccagtc

SEQ ID NO: 175950 - DNA, 793 bp, Homo Sapiens
  misc_feature (575)..(575): n is a, c, g, or t
  misc_feature (775)..(775): n is a, c, g, or t
ggaattacttgcagggctaacctagtgcctatagctaaggcaggtacctgcatccttgtttttgtttagtggatcctctatccttcagagactctggaacccctgtggtcttctcttcatctaatgaccctgaggggatggagttttcaagtccttccagagaggaatgtcccaagcctttgagtagggtaagcgtcatggctggcagcctcacaggattgcttctacttcaggcagtgtcgtgggcatcaggtgcccgcccctgcatccctaaaagcttcggctacagctcggtggtgtgtgtctgcaatgccacatactgtgactcctttgaccccccgacctttcctgcccttggtaccttcagccgctatgagagtacacgcagtgggcgacggatggagctgagtatggggcccatccaggctaatcacacgggcacaggcctgctactgaccctgcagccagaacagaagttccagaaagtgaagggatttggaggggccatgacagatgctgctgctctcaacatccttgccctgtcaccccctgcccaaaatttgctacttaaatcngtacttctctgaagaaggaatcggatataacatcatccgggtacccatggccagctgtgacttctccatccgcacctacacctatgcagacacccctgatgatttccagttgcacaacttcaaccttccagaggaagataccaagctcaagatacccctgattcaccgagccctgcagttggcccagcgtccgtttactncttgccagccctggacat

SEQ ID NO: 175951 - DNA, 790 bp, Homo Sapiens
  misc_feature (653)..(653): n is a, c, g, or t
  misc_feature (732)..(732): n is a, c, g, or t
  misc_feature (776)..(776): n is a, c, g, or t
gacttcccggtggagtgaggaacccagcaacacgctcctgacttcccttcccaaggactcgacctgagaaccgccatgtactcggagatccagagggagcgggcagacattgggggcctgatggcccggccagaatacagagagtggaatccggagctcatcaagcccaagaagctgctgaaccccgtgaaggcctctcggagtcaccaggagctccaccgggagctgctcatgaaccacagaaggggccttggtgtggacagcaagccagagctgcagcgtgtcctagagcaccgccggcggaaccagctcatcaagaagaagaaggaggagctggaagccaagcggctgcagtgcccctttgagcaggagctgctgagacggcagcagaggctgaaccagctggaaaaaccaccagagaaggaagaggatcacgcccccgagtttattaaagtcagggaaaacctgcggagaattgccacactgaccagcgaacagagagagctgtagggccagctgccgggctcaggccactgcccaccctggcctggacagcctccttcagcccttctgtacctggcagccctgggccccaggccctgggacgtctgtgatgttcccacctgcttctgtagaaatgtgtcaccccaganggcctggctcttcctgggaagctggggcccctaagctcctagggttttccttccaagcacccagccctctgttcaaganggataacctgcaccccttccttgcaaggggttcaaaacccaacnccaggaaccttttt

SEQ ID NO: 175952 - DNA, 850 bp, Homo Sapiens
  misc_feature (33)..(33): n is a, c, g, or t
  misc_feature (71)..(71): n is a, c, g, or t
  misc_feature (102)..(102): n is a, c, g, or t
  misc_feature (167)..(167): n is a, c, g, or t
tgcagacctggggaacttccaaaagcaagagancagcaagagagaaaggagcatgttaaacttggacttgnatcaggcacttaaattgtggagagacatgcngttttgaaccaaagatataaaaactgggttgaagtaatctttacaagtggtctaatgaatgggcnttcagaagcaaagtgaaggtgtgggttgaacctctgcccatcctttagtgctgactttcaagttttctaaatgcccataaccacagcaatggcagcagtggcggcaacggcaggaacagttctgtcatgtctgttttctgtatgtgttctgtggctgaccagaaggttttggtgtcacactaagaaggctctggggtgtggcacacctactgcccgaggttgcccagatccacgctggagccaaacatcttcaccagctgttcctcatagtgtgagatgttcctcttcatgatgtccatgcagggccccagaagcctctcgaatgcttgtacatccataactaagcatttgacatctccaactgcataagctgaggcagctctgggtttgttggtgaccagggcaagctctccaaagtactgccccttatggcagcgggcaatctcgacctcctggttcccaccatccttgtttgatttagtcctgcttctaatcaagatgctcacttcgccagactctatgatgtaaaagctatcagccttttcaccctgagtgattatgcgttctccatccttatagatcttctctcctattacatccacaatcttcattcgttctgacacctctagtgatttaaggaggggcacagactcaataaatgattcaaacatcttcctcttctt

SEQ ID NO: 175953 - DNA, 891 bp, Homo Sapiens
gttgttagccaagatggcggtagcgatcgctgcagcgagggtctggcggctaaaccgtggtttgagccaggctgccctcctgctgctgcggcagcctggggctcggggactggctagatctcacccccccaggcagcagcagcagttttcatctctggatgacaagccccagttcccaggggcctcggcggagtttatagataagttggaattcatccagcccaacgtcatctctggaatccccatctaccgcgtcatggaccggcaaggccagatcatcaaccccagcgaggacccccacctgccgaaggagaaggtgctgaagctctacaagagcatgacactgcttaacaccatggaccgcatcctctatgagtctcagcggcagggccggatctccttctacatgaccaactatggtgaggagggcacgcacgtggggagtgcccccgccctggacaaacacgggaccgggtggtttgggccaattaccgggaagcgcaggtgtgcggatgtatcgggactaccccctggaactattcatggcccagtgctatggcaacatcagtgacttgggcaaggggcgccaagatgcctgtccactacggctgcaaggaacgccacttcgtcactatctcctctccactggccacgcagatccctcaagcggtgggggcggcgtacgcgagcaaagcgggccaattgccaacagggtcgtcatcctgtaacttcggcgagggggcagcaggtgagggggacgcccatgccggggttcaacttcgctggcacacttgagttgcccaatcatcttcttctgccggaacacgcgctaaggccatctacaagccccactctgagccagaatcgggggaagggattgaagacgaggcc

SEQ ID NO: 175954 - DNA, 851 bp, Homo Sapiens
  misc_feature (570)..(570): n is a, c, g, or t
  misc_feature (645)..(645): n is a, c, g, or t
  misc_feature (653)..(653): n is a, c, g, or t
  misc_feature (742)..(742): n is a, c, g, or t
  misc_feature (818)..(818): n is a, c, g, or t
  misc_feature (829)..(829): n is a, c, g, or t
  misc_feature (835)..(835): n is a, c, g, or t
gcggccgctccaacatcaggggtgcggatatgggcggccgagagccatggcggcgctattggcggcggcggcagtgcgagcccggatcctgcaggtttcttccaaggtgaaatccagtcccacctggtattcagcatcttccttctcttcttcagtgccaactgtaaagctcttcattggtgggaaattcgttgaatccaaaagtgacaaatggatcgatatccacaacccagccaccaatgaggtcattggtcgggtccctcaggccaccaaggcagaaatggatgcagccattgcttcctgcaaacgtgcttttcctgcatgggcagacacttcagtattaagccgccagcaggtcttgctccgctatcaacaacttattaaagaaaacttgaaagaaattgccaagttaatcacattggaacaagggaagaccctagctgatgctgaaggagatgtatttcgaggccttcaggtggttgagcatgcctgtagtgtgacatccctcatgatgggagagaccatgccatccatcaccaaagacatggacctttattcctaccgtctgcnctctgggagtgtgtgcaggcattgctccattcaattttcctgccatgatcccccctttggatgtttcccatggcncatgggtngtgtggaaataccttcctaatgaaaccatctgagcgagtccctggagcaaactatgcttccttgctaaagttgcttccaggaatctggntgcccctgatggaacattaaacatcatccatggacagcatgaactgtaaattttatttgcgatcattccggacatnaaagcaatcanctttgngggatccaacaaggca

SEQ ID NO: 175955 - DNA, 937 bp, Homo Sapiens
  misc_feature (48)..(48): n is a, c, g, or t
  misc_feature (91)..(91): n is a, c, g, or t
  misc_feature (481)..(481): n is a, c, g, or t
tgatatatccatacactgaatatacccaagtttggctatcctggacanagatgcaaagaagctggacaccttcattacaatgttcagagtnaggataagtcctggcaagtactaggaaggtccaaacgtctgaaataccaaacgaggttccagaaatgattggatgttgattgatgaaagaagatgtatgaatcacctgatcaccttcattttctagcaaagattcaagttcttaacggagtactagaggactcaagtagggcacagaaacaaggggaggattgggtctttttcctaaaaggatccaacaacttccctgcagactatttggaagactaactgttgagatgccatgaaacggtcgctgggtaaagtcaatattctgcaatgggcccccaaacactgtgacttcgagtcaaagacacatttcgctttgataaactattaggcacagatgaaattttcatagtttggacatctnccactggctctctttatttcatcacttggttcaactgcagagcctgtttcttcagttatgatctggttatgttttgggaagtccataaagttgatcaagtcaggttctgctaaactggatacaggtttgtgctccaaggattcatttgccaatggaatgcttccactttgtaaactgtcaccagaggtacttggtttcaggaaaaagcttgcagaacctctcaaatctttgaattctatattgagaagaggcaagaagttgcttttacagaatggacaagctgtattcaaatttgagtcatctgctgtccatccagccataatttcttcatcataaactaaagctccacaagctctacactgtgaacaactggacatcaaaacctccattgcacaattctgatagatgctagacatgctggtattttgagaagaaccatgatctgatttttcaaag

SEQ ID NO: 175956 - DNA, 691 bp, Homo Sapiens
  misc_feature (578)..(578): n is a, c, g, or t
acttggctgcgaggagcgccacgaaaggtcagaggaaggagctgtgggaagctcgcagcaggtatcggagcttaagccagtggatttgggggccctgggctccctagccggctgcggtgtgagaatggagtgggcaggaaagcagcgggactttcagggctctgggtttgcagagagccgaaatgaccatgactgccaacaagaattccagcatcacccacggagctggtggcactaaagcccctcgggggactctgagcaggtctcagtcagtctctccacctccagttctctccccaccaaggagtcccatctacccgctcagtgatagtgaaacctcagcctgcaggtaccccagccactccagctcccgggtgctcctcaaggaccggcaccccccagctccttcaccccagaatcctcaagatccctccccagatacttccccacccacctgtcccttcaagaccgccagcttcggttatttggacagaagcccttcggcgtgcaagagagacgcccaaaaggaaagtgtccaaggcgcagcccaggatgtagcaggggtcgctgcctgcctnccccttgcccagagcacgccattcccggggccagcagctggcccccgggggcgtcttgctgacccgtaccggtacccgcgcccacaagcctgggcattccggagaagatatca

SEQ ID NO: 175957 - DNA, 629 bp, Homo Sapiens
  misc_feature (456)..(456): n is a, c, g, or t
tcagatccaggtgactgttcaaatatgcatatatactctggcatctggctgtggcctttacttgtagttctggaaaagcagcatggccttgtaccatgtggtctatctgcaggttctgcacttgtatcccggaacaattttccagtaacgctctgaccaccttcattcagccagaacccaggtaccatggctgagaaataaggcccccagacgcctggtacaaaaatcgggtctttgctgatccccatgtgacaagaagacgttccacagatgacagccagccgtgacgtcactggctgccccctcacagatgaaggccgtgccctctcacatctgccccaatcactcctagtcctcctgcatgggcatcaatgagtgaagctgcgaccgcaatcccagggagaaggccaaggtctcttgctgcctctggtgtgagcccatttccaagagaagctnccaggaggtagcacttggtttcctattttgctgtaattatctgcaacaaagtcttccaaaccaatcattttccagaaactgtcgtcccagcctttctctgctgaatatgtccacttacacaccagggagcagagagacctgactttttccatggagacagcagagcaaaatcc

SEQ ID NO: 175958 - DNA, 897 bp, Homo Sapiens
  misc_feature (20)..(20): n is a, c, g, or t
  misc_feature (76)..(76): n is a, c, g, or t
tccacggttccggttccccngaacagtgggcccaatatcttgtgctgaaaaagattttcccccaactgatgtccanctcgagttctgaattatcatttaatttgtgcaaccttgttctactacaggtgtggccagtttatttgcatctaggaataattcaccagatgcattctctaagatgtcactgggatattgcactgttttattctgccctgttttcggggagttgaaagccttcttcttctttttcgtttgagatgactttttcgctaacgcgccttgtttaggatttgcctgaatcaaatctgtagatacttctgatttctctcgattattataatctcgcagagtaagaagacaagtctgttgattcaattcaatgtttccagtaatactagatatctctgtagaagaaggattagcaataaaagcaaaatcttccatctttattttgcatttagtgaccacctcttccactttgagatagtcagcagcctgatgaatttctttaacattccaactgtcaagatttaaagttcctgtgtatataaactccaacagtttctgaaatccatcagccttcacctgactctgatcaagaaacacattgttctcagaagtgcttctgtagatcgcaccaaaatactcactaaaggaggccagcacattcctatgagctttaaactggaattccccaatcactatggtacagtcacagagaaaacctgcttcccgctgtttgttcagtctctctaaaaggtgctcacaatggtgcgaatactgcattttgatatcagaatggaattttacccttgatcgatagcaacccaaggggggaacacagtttcttcactctgtctccgccatcttcctcgtgccgaattcgccacccaggcc

SEQ ID NO: 175959 - DNA, 1197 bp, Homo Sapiens
  misc_feature (818)..(818): n is a, c, g, or t
ttcagacgtttcactttcaggcccctacgatggccacgtaccaggtggtggagctgcggatcctgactaactggggccaccccgagtacacctgcatctaccgcttcagagtgcatggggagcccgcccactagccctgcttactggtgcctgctgccagccatctgggagtgggtgaacagcaccccgccgcttcccccacacgcttgctcggcgctctgacttctaggagcacaagagaggagcctgtggccccatgcagatgaaaaggacgggcagggtctcctgagcagcaggtggctcgaggcggttggcaggctccagcagctcccttcttccttccctctgtgcccgtggcgtctgcttcccatcctgggagtgtgtatatatgtagcatatcatgggggactgggaagttgggagaggtaggacctgactggtcttggctggggtcaggggctggtgcctgggagctgatgaagcaggtgccagggctgtgggaggggcaagctacggcctgggctaggtgagctgcctctgcccctgggcaaggaagcgaggccctctgggaggagggtgcttagctccagagcaggatgggacttccccaggcaggaagcacttgatggagagctgcccagctctcctacaaggttagtgccctccacctagggaagcctgaaccacagggtccctgagggccttcgacaaaagtgtgtatttgtcccggggagggtagcagtgggccatggggcttcttgtgccctaaaggggactggctgctgtgatcttctaaggggcccagggcaaaccctgtnaggcttcccctctgctggggacggtagttgctttttctctctcctgatgctaggttggggcccaccctgctccctgttcctgctagggcctgccagtgcccctgagcttgctttccacattctcccagggtatggagacctagacctgtctttggggccattagcatctggggttatagcaagaagagtggggagcatggaactcctgggctcttgtgggggacgttcagggtatcggggtgcgaggtctgtctgcaccggcccccacatctaaccaggccctgatgtaggggtcgtccgctcaggctgcccccttgggctcttgcagctctttcaggtagtcgcccttctggtttgttctctgtggggcagttggtgg

SEQ ID NO: 175960 - DNA, 1750 bp, Homo Sapiens
atgagcatgccctctctcagtgcagtgtggatgtgtataagaaagtgggcagcctgtaccctgagatgagtgcccatgagcgctccttggatttcctcattgaactgctgcacaaggatcagctggatgagactgtcaatgtggagcctctcaccaaggccatcaagtactatcagcatctgtacagcatccaccttgccgaacagcctgaggactgtactatgcagctggctgaccacattaagttcacgcagagtgctctggactgcatgagtgtggaggtaggacggctgcgtgccttcttgcagggtgggcaggaggctacagatattgccctcctgctccgggatctggaaacttcatgcagtgacatccgccagttctgcaagaagatccgaaggcgaatgccagggacagatgctcctgggatcccagctgcactggcctttggaccacaggtatctgacacgctcctagactgcaggaaacacttgacgtgggtcgtggctgtgctgcaggaggtggcagctgctgctgcccagctcattgccccactggcagagaatgaggggctacttgtggctgctctggaggaactggctttcaaagcaagcgagcagatctatgggaccccctccagcagcccctatgagtgtctgcgccagtcatgcaacatcctcatcagtaccatgaacaagctggccacagccatgcaggagggggagtatgatgcagagcggccccccagacaagcctccaccggttgaactgcgggctgctgcccttcgtgcagagatcacagatgctgaaggcctgggtttgaagctcgaagatcgagagacagttattaaggagttgaagaagtcactcaagattaagggagaggagctaagtgaggccaatgtgcggctgagcctcctggagaagaagttggacagtgctgccaaggatgcagatgagcgcatcgagaaagtccagactcggctggaggagacccaggcactgctgcgaaagaaggagaaagagtttgaggagacaatggatgcactccaggctgacatcgaccagctggaggcagagaaggcagaactaaagcagcgtctgaacagccagtccaaacgcacgattgagggactccggggccctcctccttcaggcattgctactctggtctctggcattgctggtggagccatccctgggcaggctccagggtctgtgccaggcccagggctggtgaaggactcaccactgctgcttcagcagatctctgccatgaggctgcacatctcccagctccagcatgagaacagcatcctcaagggagcccagatgaaggcatccttggcatccctgccccctctgcatgttgcaaagctatcccatgagggccctggcagtgagttaccagctggagcgctgtatcgtaagaccagccagctgctggagacattgaatcaattgagcacacacacgcacgtagtaggacatcactcgcaccagccctgctgccaagagcccgtcggcccaacttatgggagcaagtggctcagcttaagtccctgagtgacaccgtcgaggaagctcaaggatgaggtcctcaagggagacagtatcttcagcgcccggggagccacagtacccacttgacttttgccacctttccccttcatcagccttccttcaggggccaagggaggagcaccagggattgaccaggcctacctggggcaaaagtgacccttcctcc

SEQ ID NO: 175961 - DNA, 1174 bp, Homo Sapiens
tcactgaagcagaagttgctttaatcaaggggtgaagtcctcaatcaaggggacctcacttaacctttggtggtggggtctcagcctaccccccacaagccctgaggcccctcaggaaggagggagcagttgaacaacaaattatggcagaggccagggaatgggagtgggggaacccgggtcaaggtgaaggggcaggacgctgaaagggtgggagtgaagctgaacggggcaggaagagcttaacccacgtttctacctgggggctggctgaggtggctgtgcatcgggcagagcggcaccagagggctgagggtcgaaggggacagcaggggaaaggagtgcttaggagatgaggcgactgtgaagctggtgcagctgctcctgggtcagcaccagccggtgtcgctgtccaaaaccagccgcacatgagaaggtcactttgcccatgtagactgtgtcatcctgctgctcctccttggccctgaggaaggctgatgaagggaaggtggcaaagtcagtgggtactgtggctccagggcgctgagatactgtctccttgaggacctcatccttgagcttctcgacggtgtcactcagggacttaagctgagccacttgctccataagttgggccgacgggctcttggcagcagggctggtgcgagtgatgtctactacgtgcgtgtgtgtgctcaattgattcaatgtctccagcagctggctggtcttacgatacagcgctccagctggtaactcactgccagggccctcatgggatagctttgcaacatgcagagggggcagggatgccaaggatgccttcatctgggctcccttgaggatgctgttctcatgctggagctgggagatgtgcagcctcatggcagagatctgctgaagcagcagtggtgagtccttcaccagccctgggcctggcacagaccctggagcctgcccagggatggctccaccagcaatgccagagaccagagtagcaatgcctgaaggaggagggccccggagtccctcaatcgtgcgtttggactggctgttcagacgctgctttagttctgccttctctgcctccagctggtcgatgtcagcctggagtgcatccattgtctcctcaaactctttctccttctttcgcagcagtgcctgggtctcctcc

SEQ ID NO: 175962 - DNA, 1339 bp, Homo Sapiens
  misc_feature (677)..(677): n is a, c, g, or t
  misc_feature (965)..(965): n is a, c, g, or t
  misc_feature (1006)..(1006): n is a, c, g, or t
  misc_feature (1055)..(1064): n is a, c, g, or t
gctaggtcggctttaaaatcgatgcagagtaattgcagtacatgggtagttggatgacattaacatgagaaatgtgctgtagtcgtcatccttggaacaaacacgtccaattacagtgaaattctgtgccccttacccggctaatttgaacacagctcaccgccaaggcctcctccagcatggccagccctgggcagagatcgtcacgaatggatttgacgggaatggggctggggactgtcatgttgaagcccggtggagatgtgggacagggacctcgtttgttccagagcctgttccaaccctccctggcttttgtggcatgttttctatgccgtttgctgcaaggatgcgttgggcatggagtaacattcccgagaccgtcctgcagtactgcacgtgtgcgtgtctgtgctttggtttgtctgtgtgtctaccttgttttagagtaaaaaagtgaatctgaggccagatcatcagtctgcacctgcctctcctcagtataatatcaatacagaagaattatattcctacctaaaggaattcatccacatactatatttcaggcatctattggtgaatcccagagaccgccgagttgtgattatcgaatcggtattatgtccttctcacttcagagagacactcactcgtgttcttttcaaatattttgaggntccatctgtcttgcttgcttcaagtcatctaatggctcttctgacgcttggaattaattcttgccatgggcctagattggggatatagggaaagcctggtgttacccatatatgaaggaatcccagttctaaatgttggggagcactacccctaggaggaaaagctcttcacaaagagttggaaactcaactattggaacaatgtactgttgacacaagtgttgctaaagaacagagccttccctcagtgatgggttcagttccggaaggtgtcttagaggacattanagcgcgtacttgctttgtaagtgatctgaagcgaggactanaaatccaagcagcaaaatttaatattgatgggaataatgagcgtccctnnnnnnnnnnaaatgttgactatccattagatggagagaagattttacctatcccttggatcaatcaaagaattcagttgtggaaaattctttttgaaacagaataaggaaggagcaatccggtggccccttttaaaaatggaaattccccttaaaacgggggcccgaaaaaaccaccagggaaagccaccctagcccagaaaaattttgggaaaaccataggggggggcacctttctttaggttgggcccgggaattttcccccccacaaaattggtcttggcc

SEQ ID NO: 175963 - DNA, 1129 bp, Homo Sapiens
aaaaatcagtatttaacttttgtagcactcctttttccttcttgaggaaagctaatagcccagctctgcttccaaaacaaacgtctctaagattggaccagtctttgcttttctttttgctggacaaccttgtcccaacttagaaatggaggagatatccatagccttagaccttcagattgggctcaagagcctttgtgtggacccaaaaggggaaccctaggggacaccaaggagctggaagttcaactcccccttcatctcacctgttgtggccttacaggcttagaagtgcagagttcttcagggatcctggaaaacctctggtcaaacctcatctgcaatgcatgccccttagtcaaagctcccagtatttgcccagctcctgctggagctcctccagaaagaactccatactcacaatcagcccatcccaacactgtcctgctctaaggaggagaagagctcagctgaaacctgcctcttcctcttgtccttacatgtccactccacactagtctgtaaaactcctgaagatctaaatgcagagaacgttcacctgggcagtaaagttcaaagagagctgtaccatctgctgcctctgaggttcaggaggagaattcctattaggttaatgccatttccccttttaaaatgaaacaaaatcatctgaaaagcatgtctgaacatgctttataagttaagactgctcacagaactctgactcccaggaactacaaatctaaataggataaacatgtttatatgtgagtgcctgttgtaaagctaaaaacccagcagataccaaaagatgctaataagctcaatatggaaaaattacttagaaaaggtttatgttatggtcttaacattgccaatgcctaaattatttattggtcaataaaaaaacccaatgcatcaataagagtaatattaaagtggaagttattagcaacttctaagacaggcccagcagctgacatgacaaatacaaaagctggacaccatcgggataacgggaacatcattctccccccagacaaacccaaggtgccacgtgtgtgcatggcatggcagggaagagatgaacaaccactataatctcactatctgtgtccccacaaaattc

SEQ ID NO: 175964 - DNA, 1216 bp, Homo Sapiens
gggcatgtaacatcactagcgaccggtgacctctttttcccccttgcctggctcctgtggtggcaggctgggcacgaggaccatgctgggccggagcctccgagaagtttctgcggcactgaaacaaggccaaattacaccaacagagctctgtcaaaaatgtctctctcttatcaagaagaccaagtttctaaatgcctacattactgtgtcagaagaggtggccttaaaacaagctgaagaatcagaaaagagatataagaatggacagtcacttggggatttagatggaattcctattgcagtaaaagacaatttcagcacttctggcattgagacaacatgtgcatcaaatatgctgaaaggttatataccaccttataatgctacagtagttcagaagttgttggatcagggagctctactaatgggaaaaacaaatttagatgagtttgctatgggatctgggagcacagatggtgtatttggaccagttaaaaacccctggagttattcaaaacaatatagagaaaagaggaagcagaatccccacagcgagaatgaagattcagactggctgataactggaggaagctcaggtgggagtgcagctgctgtatcggcgttcacatgctacgcggctttaggatcagatacaggaggatcgaccagaaatcctgctgcccactgtgggcttggtggtttcaaaccaagctatggcttagtttcccgtcatggtctcattcccctggtgaattcgatggatgtgccaggaatcttaaccagatgtgtggatgatgcagcaattgtgttgggtgcactggccggacctgaccccagggactctaccacagtacatgaacctatttaataaaccattcatgcttcccagtttggcagatgtgagcaaactatgtataggaattccaaaggaatatcttgtaccggaattatcaagtgaagtacagtctctttggtccaaagcttgctgacctccttgagtcctgagggggccaaaagtaattgaagttatccctttctcacaccagttatcaattgtctgctaccatggttttgtgccccttcagaaagtggcatcgaatatggcaagattgatgggctacaatatggtcacagatgtgaccattgatgtgtccactgaagccatgtatgcctgaacagaacgagaagggtttatgatgtggtgagaggaaga

SEQ ID NO: 175965 - DNA, 867 bp, Homo Sapiens
  misc_feature (752)..(752): n is a, c, g, or t
  misc_feature (754)..(754): n is a, c, g, or t
ttttccggattgggcatcccggcatctgcacgtggttatgctgccggagtttgggccgccactgtaggaaaagtaacttcagctgcagccccaaagcgagtgagccgagccggagccatggagggccagagcgtggaggagctgctcgcaaaggcagagcaggacgaggcagagaagttgcaacgcatcacggtgcacaaggagctggagctgcagtttgacctgggcaacctgctggcgtcggaccggaaccccccgaccgggctgcggtgcgccggacccacgccggaggccgagctacaggccctggcgcgggacaacacgcaactgctcatcaaccagctgtggcagctgcccacggagcgcgtggaagaggcgatagtggcgcggctgccggagcccaccacacgcctgccgcgagagaagcctctgccccgaccgcggccacttacacgctggcagcagttcgcgcgcctcaagggcatccgtcccaagaagaagaccaacctggtgtgggacgaggtgagtggccagtggcggcggcgctggggctaccagcgcgcccgggacgacaccaaagaatggctgattgaggtgcccggcaatgccgaccccttggaggaccagttcgccaagcggattcaggccaagaaggaaagggtggccaagaacgagctgaaccggctgcgtaacctgggccgcgcgcacaagatgcagctgcccagcgcggccggcttgcacctaccgacacncnagtaaaggaggagctgggccgcgccatgcaagtgggcaggtctccaccgccctcttggtggggggggcctttcagggaacgcctccccccaaggaagaaaggtgccccccggc

SEQ ID NO: 175966 - DNA, 844 bp, Homo Sapiens
  misc_feature (677)..(677): n is a, c, g, or t
  misc_feature (729)..(729): n is a, c, g, or t
  misc_feature (786)..(786): n is a, c, g, or t
  misc_feature (812)..(812): n is a, c, g, or t
  misc_feature (834)..(834): n is a, c, g, or t
agagtgtgcaaatcctgcagcagcaactgacatatccaggttctatgatcaggactgactaggtggttgccgtgacccatagagaacaaggaaagatgggctggtggattggcccacctgggagccacatggggcaaggggagccctcaccctcagccagccaagggaggcagtgagtgagcatgctacccagcctgggaaactgctttttccatggatctttgcaatccacagatcagaagatcccactcatgagaccacaccacgagggccttgggtgccaaccacagagccatgcagattctcaacagccactcagctggagtctgcctaaaactaccgagttcccaagttggggaggggtggtcatcatcactgtggctgcctgctgcctaaaccctctgagttccctgggggagggggagcaatcatcactgtggttgctggctgcctaagacaactgagcttcccaggagaggggcagtcatcatcactgcagctgcctgctgcctgaggaaactgagctccctaagaagggacagcagccatcactgtggctgctagctgcctaagacactgaactcctggggaggaagggcggcagccatttctacagatccaggctgctggttttcctttgctgatgccaggaagactggacggcttggtcccaagangtattccccacagcgcagcatactggctgtggcagatcatggccagacttgnctctttaggctgaccctgacccattccttcttacttgggtgggggccttccttgcanggaacttccagcaacttcaagcccangggaatttagggaaaagaactnttgaacttct

SEQ ID NO: 175967 - DNA, 900 bp, Homo Sapiens
ccgcgcgctgagggtctcggggcgggcgccgcgggacctctccgggccatggcagcccctgtcaaagggaacaggaagcagtccacggagggtgacgccctagacccacctgcatcccccaaacctgctggcaagcagaacggaatccagaaccccatctcgctggagttaacctgtggaagatctacaaagcagtggagaagctgggggcctatgagctggtgaccgggcgccgcctctggaagaacgtgtacgacgagctggggggcagcccaggcagcaccagcgcggccacgtgcacgcgccgccactacgagaggctggtcctgccatacgtgcggcacctgaagggggaggatgacaagccgctgcccacctccaagcccaggaaacagtacaagatggctaaggagaacaggggggatgatggggccaccgagaggccgaagaaggccaaggaggagcggcgcatggaccagatgatgccaggaaagaccaaagcagatgctgcttgacccagcaccacttcccagccaggagccccccaggaacagcacagaacagcagggcctggcctctgggtcttctgggtcctttgtgggtgccagcggctgtcctgaggcctacaagcggctcctatccagcttctactgcaaggggacacacggcatcatgtcaccactggccaaaaagaagctcctggcccaggtgagcaaagtgggagccttgcagtgcccagaaggaaggctgccgcccaggggggcaaaacccccaggcgtcccccgactgttcaccttcccagaaaagtcccccaaaacccccaaaaggggctgaactggaaaacttccagggcaaccggctgaacccctccgggaagggaatggccaggccccccgggtt

SEQ ID NO: 175968 - DNA, 869 bp, Homo Sapiens
  misc_feature (518)..(736): n is a, c, g, or t
gatttcattttatgtgaggaattattttaataaaaaaaagagggtttatgctctatagtaataaaatttaccagtaacacccaatcagaaaattttggttccttagtatttagggaagacttttgtttaaatctcttatggaattttacatgttttgatttagaaaagtagatgcaatataatatatttcaagttttatacatattagatgaattgcatggtattttaggcaacttaactataaacaaatttattcatagaagcattgttgccaacaatttagatgacctagatgaaaaaacacaccaattgacaaaactggctcaaaaggaaataaaaaatccaaacagacctgtaacaagtaaagagattgaaccagtaatcaaaaatctcccaacaaagaaagtccaggactaaatgagtttactggcaaactatgccaaacatataaagaagaattaacactaatccttctcgaactctcccaaaaaatggaagagaaaggagcaccctgtgannnnnnnnnnnnnnnnnnnnnnnnnnnnnnnnnnnnnnnnnnnnnnnnnnnnnnnnnnnnnnnnnnnnnnnnnnnnnnnnnnnnnnnnnnnnnnnnnnnnnnnnnnnnnnnnnnnnnnnnnnnnnnnnnnnnnnnnnnnnnnnnnnnnnnnnnnnnnnnnnnnnnnnnnnnnnnnnnnnnnnnnnnnnnnnnnnnnnnnnnnnnnnnnnnnnnnnnnnnaatataccatattaatagaatgaaggggaacaaaacagcatgatcacctcaacttgatcaagaaaaagcattggacaaaaaatccaacaccctttcatggtacaaacactcttgcaaactaggaagaaaaggg

SEQ ID NO: 175969 - DNA, 766 bp, Homo Sapiens
  misc_feature (134)..(352): n is a, c, g, or t
cccttttcttcctagtttgcaagagtgtttgtaccatgaaagggtgttggattttttgtccaatgctttttcttgatcaagttgaggtgatcatgctgttttgttccccttcattctattaatatggtatattnnnnnnnnnnnnnnnnnnnnnnnnnnnnnnnnnnnnnnnnnnnnnnnnnnnnnnnnnnnnnnnnnnnnnnnnnnnnnnnnnnnnnnnnnnnnnnnnnnnnnnnnnnnnnnnnnnnnnnnnnnnnnnnnnnnnnnnnnnnnnnnnnnnnnnnnnnnnnnnnnnnnnnnnnnnnnnnnnnnnnnnnnnnnnnnnnnnnnnnnnnnnnnnnnnnnnnnnnnntcacagggtgctcctttctcttccattttttgggagagttcaagaaggattagtgttaattccttcctttaatatgtttggcatagtttgcccagtaaactcatttaaccctggactttctttgttgggagatttttgattactggttcaatctctttacttgttacaggtctgtttggattttttatttccttttgagccagttttgtcaattggtgtgttttttcatcgaggtcatctaaattgttggcaacaatgcttctatgaataaatttgtttatagttaagttgcctaaaataccatgcaattcatctaatatgtataaaacttgaaatatattatattgcatctacttttctaaatcaaaacatgtaaaattccataagagatttaaacacaagtcttccctaaat

SEQ ID NO: 175970 - DNA, 534 bp, Homo Sapiens
caaaaaatggaagagaaaggagcaccctgtgacattctataaggcggacattaccttaacaccaaagccagacaaagacctcacagggaagctacagaccaatatcccttatgaatatagatgcaaaaaacttcaaaatactagcaggccaaatccagcagcttattaaaatgatcacacagcatgaccaagtgagatttatcaaagaaatgcagggatggttcctacatacaaatgtcaatcgatgtaataatataccatattaatagaatgaaggggaaaaaacagcatgatcacctcaattgataagaaaaagcatttgacaaaaatccaacaccctttcatggtaaaaacactctgcaaactaggaagaaaagggaactttcttaacctgataaagacatccataaaaacccacagctaacaacataatagcaaaacattgaaaatttttcccctaatatcatgaaaattcctgatttccccactgctattcaacattatactagaaggtctagcaagagcaattaggca

SEQ ID NO: 175971 - DNA, 712 bp, Homo Sapiens
  misc_feature (58)..(375): n is a, c, g, or t
atggatgtctttatcaggttaagaaagttcccttttcttcctagtttgcagagtgttnnnnnnnnnnnnnnnnnnnnnnnnnnnnnnnnnnnnnnnnnnnnnnnnnnnnnnnnnnnnnnnnnnnnnnnnnnnnnnnnnnnnnnnnnnnnnnnnnnnnnnnnnnnnnnnnnnnnnnnnnnnnnnnnnnnnnnnnnnnnnnnnnnnnnnnnnnnnnnnnnnnnnnnnnnnnnnnnnnnnnnnnnnnnnnnnnnnnnnnnnnnnnnnnnnnnnnnnnnnnnnnnnnnnnnnnnnnnnnnnnnnnnnnnnnnnnnnnnnnnnnnnnnnnnnnnnnnnnnnnnnnnnnnnnnnnnnnnnnnnnnnnnnnnnnnnnnnnnntcacagggtgctcctttctcttccattttttgggagagttcgagaaggattagtgttaattcttctttatatgtttggcatagtttgccagtaaactcatttagtcctggactttctttgttgggagatttttgattactggttcaatctctttacttgttacaggtctgtttggattttttatttccttttgagccagttttgtcaattggtgtgttttttcatcgaggtcatctaaattgttggcaacaatgcttctatgaataaatttgtttatagttaagttgcctaaaataccatgcaattcatctaatatgtataaaacttgaaatatatt

SEQ ID NO: 175972 - DNA, 994 bp, Homo Sapiens
acgcgcacactgacacgcgtacacgcacgcacgcgaccggggcggtggttggcggctacggacgcgcaggactgggggacgggcgggtacggctatgggcgaggcggaggcgccttctttcgaaatgacctggagcagcacgacgagcagtggctactgcagccaagaggactcggactcggagctcgagcagtacttcaccgcgcgaacctcgctagctcgcaggccgcgccgggaccaggacgagcctgtggagtgggagacacctgacctttctcaagctgagattgagcagaagatcaaggagtacaatgcccagatcaacagcaacctcttcatgagcttgaacaaggacggttcttacacaggcttcatcaaggttcagctgaagctggtgcgccctgtctctgtgccctccagcaagaagccaccctccttgcaggatgcccggcggggcccaggacggggcacaagtgtcaggcgccgcacttccttttacctgcccaaggatgctgtcaagcacctgcatgtgctgtcacgcacaagggcacgtgaagtcattgaggccctgctgcgaaagttcttggtggtggatgacccccgcaagtttgcactctttgagcgcgctgagcgtcacggccaagtgtacttgcggaagctgttggatgatgagcagcccctgcggctgcggctcctggcagggcccagtgacaaggccctgagctttgtcctgaaggaaaatgactctgggggagggtgactgggacgccttcagcatgcctgaactacataacttcctacgtatcctgcagcggggaaggaggaggagcaccctccgcccagatcctgcgagaagtaactcctattggcccgccaggaagatcccaggagggccctggaacgccttgccccccctttgggtggaccctccttggacccccccaggtggggaaaggcagaaaagcaaggggcatggcccaaggtggcgcgggct

SEQ ID NO: 175973 - DNA, 991 bp, Homo Sapiens
  misc_feature (769)..(769): n is a, c, g, or t
  misc_feature (805)..(805): n is a, c, g, or t
  misc_feature (925)..(925): n is a, c, g, or t
ttgtttttcccgcgaaactcggcggctgagcgtggaggttcttgtctcccctggtttgtgaagtgcggaaaaccagaggcgcagtcatgtcgggattcgacgatcctggcattttctacagcgacagcttcgggggcgacgcccaggccgacgaggggcaggcccgcaaatcgcagctgcagaggcgcttcaaggagttcctgcggcagtaccgagtgggcaccgaccgcacgggcttcaccttcaaatacagggatgaactcaagcggcattacaacctgggggagtactggattgaggtggagatggaggatctggccagctttgatgaggacctggccgactacttgtacaagcagccagccgagcacctgcagctgctggaggaagctgccaaggaggtagctgatgaggtgacccggccccggccttctggggaggaggtgctccaggacatccaggtcatgctcaagtcggacgccagcccttccagcattcgtagcctgaagtcggacatgatgtcacacctggtgaagatccctggcatcatcatcgcggcctctgcggtccgtgccaaggccacccgcatctctatccagtgccgcagctgccgcaacaccctcaccaacattgccatgcgccctggcctcgagggctatgccctgcccaggaagtgcaacacagatcaggctgggcgccccaaatgcccattggacccgtacttcatcatgcccgaaaaatgcaaatgccgtggactcccaaaccctgnaaactgcaggagctgcctgatgcaatcccccacggnggagatgcccagacacatgcagctctactgcgacaggtaccctgtgtgacaggtcgtccctgggaacagggttaccatcatgggcatctactccatcaagaagtttggcctgactaccancaggggccgtgacaggggggggcgtgggcatccgaaagctcctacatccgtgtcctggggcatcca

SEQ ID NO: 175974 - DNA, 945 bp, Homo Sapiens
  misc_feature (485)..(485): n is a, c, g, or t
ggaggtagaatggccccatggaagggtaaaccctgttcccccagggacggacctttgtcacacaaggtaccctgtcgcagtagagctgcatgtgtctgggcatctcccccgtggggggactgcatcaggcagctcctgcagcttcagggtctggaagtccacgcatttgcatttgtcgggcatgattgaagtacagggtccaatgggcatttggggcgcccagcctgatctgtgttgcacttcctgggcagggcatagccctcgaggccaagggcgcatggcaatgttggtgagggtgttgcggcagctgcggcactggatagagatgcgggtggccttggcacggaccgcagaggccgcgatgatgatgccagggatcttcaccaggtgtgacatcatgtccgacttcaggctacgaatgctggaagggctggcgtccgacttgagcatgacctggatgtcctggagcacctcctccccagaanggccggggccggggtcacctcatcagctacctccttggcagcttcctccagcagctgcaggtgctcggctggctgcttgtacaagtagtcggccaggtcctcatcaaagctggccagatcctccatctccacctcaatccagtactcccccaggttgtaatgccgcttgagttcatccctgtatttgaaggtgaagcccgtgcggtcggtgcccactcggtactgccgcaggaactccttgaagcgcctctgcagctgcgatttgcgggcctgcccctcgtcggcctgggcgtcgcccccgaagctgtcgctgtagaaaatgccaggatcgtcgaatcccgacatgactgcgcctctggttttccgcacttcacaaaccagcgacgcgtgggtcgacgatatcccgggattccgaccgtaccccaagggccccttggacttttttttaattatcccgctc

SEQ ID NO: 175975 - DNA, 1524 bp, Homo Sapiens
  misc_feature (1088)..(1088): n is a, c, g, or t
  misc_feature (1099)..(1099): n is a, c, g, or t
  misc_feature (1349)..(1359): n is a, c, g, or t
ggaacatgaacaagaccatgtccagcgtttttactgtgaatgtaaatggaacagcagcccaaagctgttgtctgtgccccagaggtgctacctgtagacagggaccaactccatgtgtgtgtgttaagtgtttgactccaattaagactcccaagcaaatcctgcatattccaaatgtaaagagtactcagtgggaaaaaggttgttacctcaaagtcattgcttctttcctggctgggtcacagggtgaagagatgaaggtgtctgatgtatatagacaattagggaaaaatgagcggcaaaggagctttccccttcagctgcactctaaaggggaacattttaaggaagtactagcagctttgactcttctatgctcctgttggtttacaagccaccaagaatgtcagtgttgagaatacggcctggtaaaatgggagatgtaaaatgactaaatgaaaggaagggtagtttttaatgttggaaccacccgtgctgggcactgggagctacccagaaggaatgcacaacgctcccctcaaggagctcacagtctagcctactccctggctggaagcctcaggaagacgtgctaatttattgtggaattggtagtttgcttttcatgcccctgtcttccttctcatgaccatttccccctttctgtctggcttgcattattgacttccaggaccaagtcctggcttcctcctgcctccctgagatgatgttctgctcagggagaagtggaggggtgagctgtgtgtgtccaccgaggcacggccaggaagaggcagcctttacctgtgaggggctccatgctccagcagcagagcaggttctagtgacaattcaactttttatgctatgaccagggggtggatctaaattttatggggctgaaagcttgaattatttagaaagacttctttaagaaaaacaatgttaatataaaattaggtacagggtcttggaaggggccctgaagattaagcttccttagcgtcacaataagtccgtatctggttgcaattgaaaactgatgcttcagtgagggtatctaaaaaggtaaactggcatatccaggngcaaatgtggngctgccaatgggctcatctctagggtaattttatgtctgaaagtgtatgcagttgggtcagagcatgacctttaagatagcctctctcagctaacatatttatgaaaatgaggcctggtgacccagcaggttcctttggatacctttagaaatggaaaattcttgggttcttggggccacccctagggaccccgggaattttgcgaaatttgggcccttttcgtcccctttgggggccctggggggtctnnnnnnnnnnnggggctttatttgggaaaggggcccataacctcccgggggttggggctttcccctggggggggccctataaacccctcttcccccgggagatttttttcccgggggaaaccctttgggacaccaaacacttttggggggtgttgtttctccggggggccccctaa

SEQ ID NO: 175976 - DNA, 846 bp, Homo Sapiens
  misc_feature (759)..(759): n is a, c, g, or t
cgcactcggggaggcgggagggtgacggcggtgctgcgaggtcggcgcgcagctccgccgcgggtcgctcgggcgctgtccaggcggagccggccccgcccgggctgcagccatggggccagtaccaacttcatttggaaaacgcagaggaggcccacaaacactgcctgcctcaccaggagggatgatcaagcgtttcctggaggacaccacggatgatggagaactgagcaagttcgtgaaggatttctcaggaaatgcgagctgccacccaccagaggctaagacctgggcatccaggccccaagtcccggagccaaggccccaggccccggacctctatgatgatgacctggagttcagacccccctcgcggccccagtcctctgacaaccagcagtacttctgtgccccagcccctctcagcccatctgccaggccccgcagcccatggggcaagcttgatccctatgattcctctgaggatgacaaggagtatgtgggctttgcaaccctccccaaccaagtccaccgaaagtccgtgaagaaaggctttgactttaccctcatggtggcaggagagtctggcctgggcaaatccacacttgtcaatagcctcttcctcactgatctgtaccgggaccggaaacttcttggtgctgaagagaggatcatgcaaactgtggagatcactaagcatgcagtggacatagaagagaagggtgtgaggcttgcggctcgccattgtggacacaccangttttggggatgcagtcaacaacacaagatgctggaagcctgtggcaagaatacattgatcagcaatttgagcagtatttccgagac

SEQ ID NO: 175977 - DNA, 778 bp, Homo Sapiens
  misc_feature (556)..(556): n is a, c, g, or t
  misc_feature (558)..(558): n is a, c, g, or t
  misc_feature (560)..(575): n is a, c, g, or t
  misc_feature (588)..(628): n is a, c, g, or t
  misc_feature (714)..(727): n is a, c, g, or t
gggggagtagcaagtccgcggtaagcgctgacgcatgcgcatagctaaccgcacccggttcagctcgcctttcttggccagaggcgccggttggactcacgggcggggcatgatggtggtgggtacgggcacctcgctggcgctctcctccctcctgtccctgctgctctttgctgggatgcagatgtacagccgtcagctggcctccaccgagtggctcaccatccagggcggcctgcttggttcgggtctcttcgtgttctcgctcactgccttcaataatctggagaatcttgtctttggcaaaggattccaagcaaagatcttccctgagattctcctgtgcctcctgttggctctctttgcatctggcctcatccaccgagtctgtgtcaccacctgcttcatcttctccatggttggtctgtactacatcaacaagatctcctccaccctgtaccaggcagcagctccagtcctcacaccagccaaggtcacaggcaagagcaagaagagaaactgaccctgaatgttcaataaagttgattctttgtcncncnnnnnnnnnnnnnnnnctcgagttttttnnnnnnnnnnnnnnnnnnnnnnnnnnnnnnnnnnnnnnnnncccaggggttaaagtattttattaattcaaacaaggaaacccccaccgggtgcaaaaaacagttttttttccggggaaaggggacnnnnnnnnnnnnnnaaaaaaaaagcctaaaattttcaaaaaaatttccaaaaagcttaacccccg

SEQ ID NO: 175978 - DNA, 891 bp, Homo Sapiens
cccaagatggcggcctccatgtgcgacgtgttctccttctgcgtgggcgtggcgggccgcgcgcgggtctccgtggaagtccgtttcgtgagcagcgccaagggaaaggggctgtttgccacacagctcatccggaagggggagaccatcttcgtagaacggcccctggtggctgcacagtttctctggaatgcactttatcgctaccgagcctgtgaccactgccttagggcactagagaaggcagaggagaatgcccagaggctgaccgggaaaccaggccaggttctgcctcacccagagctgtgcactgtgcgcaaagacctccaccagaactgtccccattgccaagtgatgtactgcagtgcagaatgtcggttggcagccactgagcaataccaccaggtcctgtgcccaggcccctcccaggatgaccccttgcatcctctcaataagcttcaggaggcatggaggagtattcactacccacctgagactgcaagcatcatgttgatggctaggatggtggccacagtgaagcaggcgaaggacaaggaccgttggatcagactcttttcccagttttgtaacaaaacagccaatgaagaggaggaaattgtccataaacttctgggagacaaattcaagggccaactggaacttctgcggagactcttcacagaggccctctatgaggaagcagtcagccagtggttcactccagatggattccggtctctctttgctcttggtgggaacaatggccaaggaatcgggaccagcttcctaagccagtgggtccatgcctgtgacactctggagttgaagcctcagggaccgtgagcagcttgacgccttcattgaccagctatacaaggacatcgaagcaat

SEQ ID NO: 175979 - DNA, 843 bp, Homo Sapiens
  misc_feature (780)..(780): n is a, c, g, or t
  misc_feature (799)..(799): n is a, c, g, or t
  misc_feature (812)..(812): n is a, c, g, or t
gtcagactcgattccccctcttcctcctcctcaagggaaagctgcccacttctagctgccctgccatcccctttaaagggcgacttgctcagcgccaaaccgcggctccagccctctccagcctccggctcagccggctcatcagtcggtccgcgccttgcagctcctccagagggacgcgccccgagatggagagcaaagccctgctcgtgctgactctggccgtgtggctccagagtctgaccgcctcccgcggaggggtggccgccgccgaccaaagaagagattttatcgacatcgaaagtaaatttgccctaaggacccctgaagacacagctgaggacacttgccacctcattcccggagtagcagagtccgtggctacctgtcatttcaatcacagcagcaaaaccttcatggtgatccatggctggacggtaacaggaatgtatgagagttgggtgccaaaacttgtggccgccctgtacaagagagaaccagactccaatgtcattgtggtggactggctgtcacgggctcaggagcattacccagtgtccgcgggctacaccaaactggtgggacaggatgtggcccggtttatcaactggatggaggaggagtttaactaccctctggacaatgtccatctcttgggatacaagccttggagcccatgctgctggcattgcaggaagtctgaccaataagaaagtcaacagaattactggcctcgatccagctggacctaactttgagtatgcagaagccccgagtcgnctttctcctgatgatgcanattttggagacgncttacacacatttaccagaaggtccctggtc

SEQ ID NO: 175980 - DNA, 1029 bp, Homo Sapiens
gagctgttagcaaggctgattcctgatgtacctcccataggaaacgatgactggctgggctgctggggtcaccacatgaagtctcctagtttccgatccattcgagagcatcagaagctaaaccatttcccaggctcattccagattgggaggaaggaccggctatggcggaacctgtcacgtatgcagagccgctttggcaagaaggagttcagtttcttcccccagtcctttatcctgccccaggacgccaagctcctgcgcaaagcgtgggagagcagcagccgccaaaagtggattgtgaagccaccagcatcagctcgaggcattggcatccaggttattcacaagtggagtcagctccccaagcgaaggcccctcctggtacagaggtatctacacaaaccctacctcatcagcggcagcaagtttgacctgcggatctatgtttatgtcacttcctacgatcctctgcggatttacctcttttcagatggactggtccgctttgccagttgcaagtattcgccttccatgaagagccttggcaataagttcatgcacctgaccaactacagtgtcaataaaaagaatgccgagtaccaggccaatgcagatgaaatggcttgccagggccacaaatgggcactgaaggctttgtggaactacctgagccagaagggagtcaatagcgacgccatctgggagaagataaaggatgttgttgtcaaaactatcatctcgtcagagccctatgtgaccagcctgctcaagaagtatgtgcgacggccctatagctgccatgaactctttggttttgacatcatgctagacgaaaacctcaagccctgggtcctggaagtcaacatttccccaagcctccactccagctctccactggatatcagcatcaaaggccagatgattcgtgaccttctgaatctggcaggtttagtcctgcccaatgcaagaggatatcatttccagcccaagcagctgcagcagtccacaacagctgcccaactcccc

SEQ ID NO: 175981 - DNA, 912 bp, Homo Sapiens
acccacgctgtcggccggtctttgagcgctaacgtctttctgtctccccgcggtggtgatgacggtgaaaactgaggctgctaagggcaccctcacttactccaggatgaggggcatggtggctaattctcatcgcgtttcatgaagcagaggaggatgggtctgaacgactttattcagaagattgccaataactcctatgcatgcaaacaccctgaagttcagtccatcttgaagatctcccaacctcaggagcctgagcttatgaatgccaacccttctcctccagccaagtccttctcagcaaatcaaccttggcccgtcgtccaatcctcatgctaaaccatctgactttcacttcttgaaagtgatcggaaagggcagttttggaaaggttcttctagcaagacacaaggcagaagaagtgttctatgcagtcaaagttttacagaagaaagcaatcctgaaaaagaaagaggagaagcatattatgtcggagcggaatgttctgtcgaagaatgtgaagcaccctttcctggtgggccttcacttctctttccagactgctgacaaattgtactttgtcctagactacattaatggtggagagttgttctaccatctccagagggaacgctgcttcctggaaccacgggctcgtttctatgctgctgaaatagccagtgccttgggctacctgcattcactgaacatcggttatagagacttaaaaaccagagaatattatgctagattcacagggacacatttgtcctttactgacttcggactctgggcaggggaacattggagcacaaaagcacaagatccaaccttctgtgggcacgccggagtatctcgcacctgaggggctcataaggcaggcttattgaccgggactgtgacctgtag

SEQ ID NO: 175982 - DNA, 852 bp, Homo Sapiens
  misc_feature (791)..(791): n is a, c, g, or t
  misc_feature (805)..(805): n is a, c, g, or t
  misc_feature (816)..(816): n is a, c, g, or t
gtcagaactctgtgttgtgaatgtcattcacaacagaaaacccaaaatattatgcaaactactgtaagcaagaaaaataaaggaaaaatggaaacatttattcctttgcataatagaaattaccagagttgttctgtctttagataaggtttgaaccaaagctcaaaacaatcaagacccttttctgtatgtccttctgttctgccttccgcagtgtaggctttaccctcaggtgctacacagtatagttctagggtttccctcccgatatcaaaaagactgtggcctgcccagctctcgtatccccaagccacaccatctggctaaatggacatcatgttttctggtgatgcccaaagaggagagaggaagctctctttcccagatgccccagcaagtgtaaccttgcatctcattgctctggctgagttgtgtgcctgtttctgaccaatcactgagtcaggaggatgaaatattcatattgacttaattgcagcttaagttaggggtatgtagaggtattttccctaaagcaaaattgggacactgttatcagaaataggagagtggatgatagatgcaaaataatacctgtccacaacaaactcttaatgctgtgtttgagctttcatgagtttcccagagagacatagctggaaaattcctattgattttctctaaaatttcaacaagtagctaaagtctggctatgctcacaagtctcacatctggttggggtgggctccttacagaacacgctttcacaggtaccctaaactctctgggggcanggttattcctttgngggaaccagangcccagagagagtcaactgaggccaaaagaggcctt

SEQ ID NO: 175983 - DNA, 587 bp, Homo Sapiens
gttctgcttgtctcgaagcatctttcttttaagttccagagactgctgcagtgtggagccagtggccacgctgccaagctgcttcctcagttcctcaagctcctgcatggagatcttggaggccgcggcagggacgttgatgctggtggtactgctgcccacagcagcggctgcaagctcagctctttcttttgcattctgttgtaagtactgcagagtctctttgtcttccgtgagctttgacaacaggtacaccagcgggtcaaggttccttgtatttttagatttcagttcatcatatttctttagaaagtcttctggagtacgagaaaactctgcaattttaaccttggcactgtgagcagagacagtggtagtgacgtacggggtcctgttcttttgaagcaggtcaatgtagacctcagccccatctcctccgtggacacgcagcaggctaagcagttcattgacgtcatggtgaatccgaaattcactcatagttttagctctgaggcacgaacatcacaatatgttctccgcagtcccggagccacagcccccgcgcagcccccgacggcggcggaagt

SEQ ID NO: 175984 - DNA, 744 bp, Homo Sapiens
  misc_feature (614)..(614): n is a, c, g, or t
  misc_feature (683)..(683): n is a, c, g, or t
  misc_feature (726)..(726): n is a, c, g, or t
agtgaaggtgggcgcccggcgggggggtgtggctgcaccccagcaccgggagggggcacgcacgacaccagaggaagggacagccccacccatgtcaacagcaggcaacctgtgttttcatttcaagtgggatacagtatttttttaataaggagccatacttttttttaagagtttgagatctgaatgtgatttctaattgtatcagacgttaatgttttaaagctataacaaagtttaaaatttctactttttgtttttcatttattttaactgttcttttatctattaaattgttgtatgtggatggggaagttttgtttctcctcttagcatttgtttctataaccagaaataaaattctatattaaagaaatgaccctgcggctccggtgtggtccttctgcgcaggtggctactgaaggtggcggacggacagacggcctggacacacagacaccaggcccctggacacataggctcccgaccccctggatacacaaacacctgaccccctggacacacaggctcctgacccccggacacacagacccctgagcccctagacatacaggcacctggccccctggacacagaggctcccgaccccctanacatacaggctcccggccccctggacacacaggcccctgaccccctggacacacaagcccctgaccccntggacacacagacccctgacccctggacacacagacccctganccccttgacatacaggct

SEQ ID NO: 175985 - DNA, 817 bp, Homo Sapiens
  misc_feature (534)..(554): n is a, c, g, or t
  misc_feature (563)..(628): n is a, c, g, or t
  misc_feature (762)..(762): n is a, c, g, or t
  misc_feature (778)..(778): n is a, c, g, or t
  misc_feature (802)..(802): n is a, c, g, or t
ttgctgatgtgacccatgaagggaactcattttcctcgtaattttggactgccacacattggtacctttagttctctgaaggcccacgtttttatcattaagacctatttgttagctagtagagctttatgttcgctgtccatgaaaccttctgtaaccacagtgactacaagtagttctttctctattgaattattaggtccagaatagaagatgtcattgtacactttatttccctcacactgtgttatgctctgatgtgctatgcttagctatctgtcagagattagtaaattataaaactcatgtgtactacttaagtttatatcttatgctagtttataagaacaatttaaaaggacttagaagattaactttggtttcatggtctctgaagtcactgactgctatttcagcttgtttacccttacctagcattaagactccatctacttctgtgcagtatatgaaaatttttaaactttcatttagactggtggataggactgaccattacaaattgtcgttatcaannnnnnnnnnnnnnnnnnnnnaagagccannnnnnnnnnnnnnnnnnnnnnnnnnnnnnnnnnnnnnnnnnnnnnnnnnnnnnnnnnnnnnnnnntggactcaagctgcagcctctcgagtagctgggtgcatgtgctaccacacccaattatgaatttcatcattagtttcttagtagagtccacatgtcctcagtagtaagttcatcagtgctaaatatttgaaggnatttctactggtttgnaaaagtaacttaagcctacctggnctgctatcttttgag

SEQ ID NO: 175986 - DNA, 861 bp, Homo Sapiens
gcttgcaggctgctaaacccaaccgcagttgactagcacctgctaccgcgcctttgcttcctggcgcacgcggagcctcctggagcctgccaccatcctgcctactacgtgctgccctgcgcccgcagccatgtgccgcaccctggccgccttccccaccacctgcctggagagagccaaagagttcaagacacgtctgggaatctttcctcacaaatccagagctgggctgcgatactgggagtactggcaagttcgaatggggcagtaaacacagcaaagagaatatgaaaacttctcagaaaatgtgctggggtggaaaagaatcgttcgacctgctgtctaaccagtaaaaatggaatggctgccttcaacgctttcctgaagacagagttcagtgaggagaacctggagttctggctggcctgtgaggagttcaagaagatccgatcagctaccaagctggcctccagggcacaccagatctttgaggagttcatttgcagtgaggcccctaaagaggtcaacattgaccatgagacccgcgagctgacgaggatgaacctgcagactgccacagccacatgctttgatgcggctcaggggaagacacgtaccctgatggagaaggactcctacccacgcttcctgaagtcgcctgcttaccgggacctggctgcccaagcctcagccgcctctgccactctgtccagctgcagcctggacgagccctcacacacctgagtctccacggcagtgaggaagccagccgggaagagaggttgagtcacccatccccgaggtggctgcccctgtgtgggaggcaggttctgcaaagcaagtgcaagaggacaaaaaata

SEQ ID NO: 175987 - DNA, 1482 bp, Homo Sapiens
gagctgaccgggcgacgccgcgggaggttctggaaacgccgggagctgcgagtgtccagctgcggagacccgtgataattcgttaactaattcaacaaacgggacccttctgtgtgccagaaaccgcaagcagttgctaacccagtgggacaggcggattggaagagcgggaaggtcctggcccagagcagtgtgacacttccctctgtgaccatgaaactctgggtgtctgcattgctgatggcctggtttggtgtcctgagctgtgtgcaggccgaattcttcacctctattgggcacatgactgacctgatttatgcagagaaagagctggtgcagtctctgaaagagtacatccttgtggaggaagccaagctttccaagattaagagctgggccaacaaaatggaagccttgactagcaagtcagctgctgatgctgagggctacctggctcaccctgtgaatgcctacaaactggtgaagcggctaaacacagactggcctgcgctggaggaccttgtcctgcaggactcagctgcaggttttatcgccaacctctctgtgcagcggcagttcttccccactgatgaggacgagataggagctgccaaagccctgatgagacttcaggacacatacaggctggacccaggcacaatttccagaggggaacttccaggaaccaagtaccaggcaatgctgagtgtggatgactgctttgggatgggccgctcggcctacaatgaaggggactattatcatacggtgttgtggatggagcaggtgctaaagcagcttgatgccggggaggaggccaccacaaccaagtcacaggtgctggactacctcagctatgctgtcttccagttgggtgatctgcaccgtgccctggagctcacccgccgcctgctctcccttgacccaagccacgaacgagctggagggaatctgcggtactttgagcagttattggaggaagagagagaaaaaacgttaacaaatcagacagaagctgagctagcaaccccagaaggcatctatgagaggcctgtggactacctgcctgagagggatgtttacgagagcctctgtcgtgggggagggtgtcaaactgacaccccgtagacagaagaggcttttctgtaggtaccaccatggcaacagggccccacagctgctcattgcccccttcaaagaggaggacgagtgggacagcccgcacatcgtcaggtactacgatgtcatgtctgatgaggaaatcgagaggatcagggagatcccacaacctaaacttgaaccagccaccgttcgtgatccccagacaggaagcttccctgtcgcccagctaccgggtttccaaaagcttcctggccaacagaagaatgctgacccctgttgggcccccaagtaattcgttgggatgcccccctatccacggggttaacaatcaaacacccgcccaattgttttcagcccttt

SEQ ID NO: 175988 - DNA, 973 bp, Homo Sapiens
  misc_feature (843)..(843): n is a, c, g, or t
gcctgggtggcgaattcggcacgaggcccaagatggagacggcggcggctgtagcggcgtgacaggagccccatggcacctgcccagccccacctcagcccatcttgacaaaatctaaggctccatggagccaccacggggcccccctgccaatggggccgagccatcccgggcagtgggcaccgtcaaagtatacctgcccaacaagcaacgcacggtggtgactgtccgggatggcatgagtgtctacgactctctagacaaggccctgaaggtgcggggtctaaatcaggactgctgtgtggtctaccgactcatcaagggacgaaagacggtcactgcctgggacacagccattgctcccctggatggcgaggagctcattgtcgaggtccttgaagatgtcccgctgaccatgcacaattttgtacggaagaccttcttcagcctggcgttctgtgacttctgccttaagtttctgttccatggcttccgttgccaaacctgtggctacaagttccaccagcattgttcctccaaggtccccacagtctgtgttgacatgagtaccaaccgccaacagttctaccacagtgtcccaggatttgtccggaggctccagacagcatgaggctccctcgaaccgccccctgaatgagttgctaaccccccagggtcccagcccccgcacccaagcacttgtgacccggaagcacttccccttccctgccccagccaatgcccccctacagcgcatccgctccacgtccactccaaacgtccatatggtcagcaccacggcccccatggactccaacctcatccagctcacttgggcagagnttcaacactgatgctggccgtaattaaaagaaggagggatggaaccccccccgggggagccccagcccagccaaggtggtccttcggggaagaaagtccccccatttccaggtccccagcaaaaaaaggg

SEQ ID NO: 175989 - DNA, 919 bp, Homo Sapiens
gggtcccaggttagctgcgtgtccgggtgctaggctgcagacccgccgccatgacgctgcgcgcggccgtcttcgaccttgacggggtgctggcgctgccagcggtgttcggcgtcctcggccgcacggaggaggccctggcgctgcccagaggacttctgaatgatgctttccagaaagggggaccagagggtgccactacccggcttatgaaaggagagatcacactttcccagtggataccactcatggaagaaaactgcaggaagtgctccgagaccgctaaagtctgcctccccaagaatttctccataaaagaaatctttgacaaggcgatttcagccagaaagatcaaccgccccatgctccaggcagctctcatgctcaggaagaaaggattcactactgccatcctcaccaacacctggctggacgaccgtgctgagagagatggcctggcccagctgatgtgtgagctgaagatgcactttgacttcctgatagagtcgtgtcaggtgggaatggtcaaacctgaacctcagatctacaaggtttctgctggacaccctgaaagccagccccagtgaggtcgtttttttggatgacatcggggctaatctgaagcccgccccgtgacttgggaatggtcaccatcctggtccaggacactggcacggccctgaaagaactggaagaaagtgaccggaatccagcttcttaataccccgggcccctctgccgacctctttgcaacccaagtgacatgagccatgggtacgtgacagtaaaggtgagtcagttttgtctctcagtcggctaagtgctctcccaccaggtcacctaaaacgaccagcagagacacccaagaggctgagctgtgaggatcacctgaacctgagcctgggaagtggaggttgca

SEQ ID NO: 175990 - DNA, 898 bp, Homo Sapiens
tcccaaggggctgcagctgccaaacccaataccctctatttaacccctactctgttttacaagagaaataaaagaagtatcagcagagctcaggtgctaacacctgttgagggctgacctacaaaactctgcctacaaaactctcttagacaggtgaatatgccactagaagttaggttgctggtagacctgggggtccctgcgggagggtgatggtttctttaccaccccacaggagatttcagtggcaaggcatgcctgcagtgggctttgggccatgcatcttccaagtccataggtcttcacctgggtggcagtgagaaaaagtagaaagtaatgagcctcctgtgtctctggcaaggttctagtggatagggtagagggaagaagagaacaaacaagcctggcttgtgctgaagtgtggtaggcactaccctgtttgcgtgaagagaaaacaaagcacctgttagtagggaggctttagggggaagccccgtcttgggggcatttctggagcagattgtgaattggaggaatctctttaactgaagtactctggctggaccctgaccttgtgtgaccatgtctcctattgcaccagcatttgaattccatggactcaagaaggttctggtaccatttattcacagactgtatcctcgagagagctgctatatatgggagtgtaccagccaactccttttccagtgtctgtaagtcacctcattaaagtataattagctgtctcctctgggagaatcctaccccatcagacaagggcagtgagcccaagcagtgccagaggccctcagaaagggattagggtagcatgattgcacactgaaaacacaatcgttctgtgctattggcagggatattttggagggatatagaccca

SEQ ID NO: 175991 - DNA, 1020 bp, Homo Sapiens
  misc_feature (22)..(22): n is a, c, g, or t
  misc_feature (31)..(31): n is a, c, g, or t
  misc_feature (53)..(53): n is a, c, g, or t
  misc_feature (126)..(126): n is a, c, g, or t
  misc_feature (774)..(774): n is a, c, g, or t
  misc_feature (864)..(864): n is a, c, g, or t
tgcttcaagcttacaccttccngacagattnccacagaatttcatagcttgantactttgagacgagcagccagtgctccaagcccagtgtcatgtaagtgccagtcttcctgctcacctctaggnaggtagggagtgtcagggtgggggcagaaacaggccagaaggccatcctggaaaggcccagccttcaggagcctatcggggatacaggacgcagggcactgaggtgtgacctgacttggggctggagtgaggtgggtgttacagagtcaggaagggctgccccaggccagaggaaaggaacaggaagaaggaggcagcaggacactctgagggcccccttgcctggagtcactgagagaagctctctagacggagataggcagggggcccctgagagaggagcaggccttgagctgcccaggacagagagcaggatgtcagggccatggtgggcccaggattccccggctggattccccagtgcttaactcttcctcccttctccacagcttcctaaccaagagaggccggcaggtctgtgctgaccccagtgaggagtgggtccagaaatacgtcagtgaccctggagctgagtgcctgaggggtccaaaagcttcgaggcccagcgacctcagtgggccccagtggggaggagcaggagcctgaagccttgggaacatgccgtgtgacctctacagctacctcttctatggactggttattgccaaacagccacactgtgggactcttcttaacttaaattttaanttatttatactatttagtttttataatttatttttgatttcacagtgtgtttgtgattgtttgctctgagagttccccctgtcccctccnccttccctcacagtgtgtctggtgacaaccgagtggctgtcatcggcctgtgtaggcagtcatggcaccaaagccaccagactgacaaatgtgtatcagatgcttttgttcagggctgtgatcggcctggggaaataataaagatgttcttataat

SEQ ID NO: 175992 - DNA, 946 bp, Homo Sapiens
  misc_feature (868)..(868): n is a, c, g, or t
  misc_feature (873)..(873): n is a, c, g, or t
  misc_feature (910)..(910): n is a, c, g, or t
ggggccatggaaacgaaagcggccaagtagagctccgtcctgacgcgccgcctcccgtgggctccggccggctaagccgcggcggacaactatgctgaaagccaagatcctcttcgtggggccttgcgagcaaagacctttatttgcactcattttcacagagtggaaaaactgttttggccaactttctgacagaatcttctgacatcactgaatacagcccaacccaaggagtgaggatcctagaatttgagaacccgcatgttaccagcaacaacaaaggcacgggctgtgaattcgagctatgggactgtggtggcgatgctaagtttgagtcctgctggccggccctgatgaaggatgctcatggagtggtgatcgtcttcaatgctgacatcccaagccaccggaaggaaatggagatgtggtattcctgctttgtccaacagccgtccttacaggacacacagtgtatgctaattgcacaccacaaaccaggctctggagatgataaaggaagcctgtctttgtcgcccacccttgaacaagctgaagctggtgcactcaaacctggaagatgacccctgaggagatccggatggaattcataaagtatttaaaaagcataatcaactccatgtctgagagcagagacagggaagagatgtcaattatgacctagccagcctttcacctgggactgccacatccccaggggaaatcagcatgtttctcggtgcagatctgaaatcacatccagctcctgatgttttcctctccctctgactgcaaaggaagggttcctacctgcaggaaggcacctgtcacacagggcgttcactcagaacatctgtgctctgccctgagntcagntgagaaaatcctattatcaaattttggatttcctggnccccagaacttccccaaagacctggtaaaaatggaa

SEQ ID NO: 175993 - DNA, 508 bp, Homo Sapiens
  misc_feature (18)..(18): n is a, c, g, or t
  misc_feature (484)..(484): n is a, c, g, or t
gaagtgggcgctgctganggttatcgtccctgggcaggggcgcccaagtacatagagcacttcagcaagttctccccgtccccgctgtccatgaagcagtttctggacttcggatccagcaatgcctgtgagaaaacctccttcaccttcctcaggcaggagctgcctgtgcgcctggccaacatcatgaaagagatcaacctgcttcccgaccgagtgctgagcacaccctccgtgcagctggtgcagagctggtatgtccagagcctcctgggacatcatggagttcctgggacaaggatcccgaggaccatcgcaccctgagccagttcactgacgccctgggtcaccatccggaaccggcacaacgacgttggtgcccaccatgggcacaagggcgttgctttgagtacaaggacacctacggcgattgaccccgtctccaaccagaacatccagtacttcctggggccgtttttacctnagccgatttccttccgatgttatt

SEQ ID NO: 175994 - DNA, 836 bp, Homo Sapiens
cagcactattcacaatagcaaagacatgaaatcaacccaaatgcccatcagtaatagactagataaagaaaagttggtacatatacaccatagaatacaatgcagacataaaaaagaaacaagatcatgtcctttgcagggacatggatggagctggaggctattatccttagcaaactaacacaggaatagtaaaccaaatactgcatgtcctcacctataaatgggagctaaatgatgagagcatatggacacatggaggggaacaacgaacactggggccttttgcagagtggaggatgaaagagggacaggatcaggaaaaataactaatgggtactaggcttaatacctgggtgatgaaataatctgtacaacaaacccccatgacacaagtttacctatgtaacaaacctacacatgtacccccaaacctaaaataaaagttaaaagaaatatagattgttatgttggtgagaaagggctgaactcaggactgggaaaaatgttgcaatctggaaaggggtttttgcctatttacacacttgtgcatgcttacttgtgtaagctgagcctatgacatcctatcaccttctctcacgctgccagtgggtagctcaaggttgaaaagtctctcccgattctgaagtcaggctacatacatatactcaaattgccattttgacttgaaaatcttaaaaaatattaataaatacttggacacagaggaaacacagtaagataaagtagccgtgccatcaaaatagggatgaacaaactctgtcctaaggctatatgaaatgctaactctccatgtctaccctacgcgtaaagtt

SEQ ID NO: 175995 - DNA, 976 bp, Homo Sapiens
  misc_feature (33)..(33): n is a, c, g, or t
  misc_feature (37)..(37): n is a, c, g, or t
  misc_feature (73)..(73): n is a, c, g, or t
  misc_feature (125)..(125): n is a, c, g, or t
ggggcaaagggggtttcccggactggctttttnccanccctgtcctccatggttactgcccacacttagaaanccagggggcgcttccccctggaaacgcttcttgtagttgccccctgtggctncgcttcttttaaattttgtggcattgaaatcaactctttgttctcccactctgctttccaaactcggcggaactgtgctcccggaatccttctgcgcactctctctgcaaaagtccctccgtgctgggtccaggcgctcccactcctcccaggttagagacacaaccgtgtcctcgaaagtcaccatcccctgggatgaggttccatcgagcgctcgctgcagagcccgcaccacgggccaccgcctcctccccgctctctgggcagtgctctcgcacccaggcttgaagctcctcgggcaggatggtgaggaactgctccagcaccagcagctccaggatctgctccttggagagcagctcgggtctcagccaccgacgacagagttctcggagccggctcagcgcctcttccggtccagccacctcctggtaacgcagctgcctaaagtgcagtcgagaagtttcggggtccggcgaagccgcgggatagttgggctcccaacttccgggtgagtcttcctccactttcacgggcaaaagtccgtcgcgttgggacggcgccgcgtccttggacctcgcagccatcacccagggtcccaactcggcgtcactgccgcgcctctgggcggtcaagctgcaattcatctttctccggcatgtgctgcccttcctggagtcttcttttcaggtgaagaaagagcaaacccaaggaactcatcagccgtcaacaccctccggtcccaaacaccgggccccaccacaccaggcccctctccacactctcctttcctcagctttgcgcctacaactctctcggtcaaacaaccgaaaacatcccgtgccggaagc

SEQ ID NO: 175996 - DNA, 1233 bp, Homo Sapiens
ctggctcgcccgagctcgcccgctgtccgccagcccgcgggagggaggagagaagcgaagcgtttccgcggttggctactcagtgtcttggtctcaagttgcctcattgcggctggcgttcccaatacagacgcatcgtttcttttttaatactccctaagaaagggaataaccttcaagctggcgggagcaatggttcacataaagaaaggcgagctgacccaggaggagaaggagctactggaagtcatcgggaaaggtactgtccaagaagctggaacattattatccagcaagaatgttcgtgtcaactgtttggacgagaatggaatgactcctctaatgcatgcagcatataaaggaaaactcgatatgtgcaaattactactgcgacatggagccgatgtaaattgtcatcagcatgaacatggatacacagcccctcatgtttgctgcacttttctggtaataaagacatcacatgggtaatgttagaagctggtgctgagacagatgttgtcaactctgtgggaagaacagcagctcagatggcagcctttgtgggtcaacatgattgtgtgaccataatcaacaattttctttcctcgagagagactggattattacactaagccccagggactggataaagagccaaaactgcccccaaagttggcaggcccgctgcacaaaattatcaccacaacgaatcttcatcctgtcaagatcgtgatgcttgtaaatgagaatcctctgctgacagaagaagcagccctgaataaatgctacagagtgatggatttgatttgtgagaaatgtatgaagcaaagagacatgaatgaagtattggctatgaagatgcattacataagctgtatctttcagaaatgcattaacttcttaaaagatggagagaataaactggacaccttgatcaaaagcttgttaaaaggccgagcttctgatggctttccagtgtatcaagaaaagatcattagagaaagtatcagaaaatttccttactgtgaagctacactcctccagcagctggttcgaagcattgctcctgttgaaattggttctgatcccactgcattctccgtccttacccaagccatcactggccaggtgggtttgtggatgtggaattttgcactacctgtggagaaaagggagcaagtaaaagatgttcagtttgcaaaatggtaatatattgtgatcaaacctgccaga

SEQ ID NO: 175997 - DNA, 510 bp, Homo Sapiens
  misc_feature (27)..(27): n is a, c, g, or t
  misc_feature (35)..(35): n is a, c, g, or t
  misc_feature (58)..(58): n is a, c, g, or t
  misc_feature (75)..(93): n is a, c, g, or t
tgagcacatactatgaggtatcacagngctggctntgcagacagagctgcaatgaagncagacaccgttccctgnnnnnnnnnnnnnnnnnnnatgtagctgatccctattctagttggtcctgtagaaactccacttggtttccagttggtctgagttatttggtgaactcaacaaaacttcccccgccttccagacactccacgataattcgatcacctggcaggggggaccccgacctttgcaaaccttcccagagcggtcccttggactgccaccctgccccaatggccctgcctcctggctgagccccggccgggtgggatcctcctccctggctcctgcctcttctttcataggacaatctcattcgttctgacaccttcattctcaaacccagtagttattgagtattacttataaaggtgtatttccttgaagcaaataatcaagcatgtatgttatgtaatggataataaaaactgaagtagaaatgtacacgtatgaata

SEQ ID NO: 175998 - DNA, 404 bp, Homo Sapiens
  misc_feature (22)..(22): n is a, c, g, or t
  misc_feature (24)..(24): n is a, c, g, or t
  misc_feature (347)..(347): n is a, c, g, or t
  misc_feature (350)..(350): n is a, c, g, or t
  misc_feature (369)..(369): n is a, c, g, or t
tcgccccgccacccgcagagcncncagagggaccattgaccttgggctcccccaggaaaggccttctgatgctgctgatggccttggtgacccagggagaccctgtgaagccgtctcggggcccgctggtgacctgcacgtgtgagagcccacattgcaaggggcctacctgccggggggcctgggtgcacagtagtgcttgggtgcgggaggaggggaggcacccccagggaacattcggggctgcgggaactttgcacagggagctcttgcagggggggcgccccaccgagttcgtcaaccactactgctgcgacaccaacctctgcaaccacaacgtgtccctngtncttgaggccacccaacctncttcggagcagccgggaacagattgccagcttgcc

SEQ ID NO: 175999 - DNA, 983 bp, Homo Sapiens
gggaaggactcttctatgagtttgaaggaagaaagtactgtgaacatgactttcagatgctctttgccccttgctgtcatcagtgtggtgaattcatcattggccgagttatcaaagccatgaataacagctggcatccggagtgcttccgctgtgacctctgccaggaagttctggcagatatcgggtttgtcaagaatgctgggagacacctgtgtcgcccctgtcataatcgtgagaaagccagaggccttgggaaatacatctgccagaaatgccatgctatcatcgatgagcagcctctgatgttcaagaacgacccctaccatccagaccatttcaactgcgccaactgcgggaaggagctgactgccgatgcacgggagctgaaaggggagctatactgcctcccatgccatgataaaatgggggtccccatctgtggtgcttgccgacggcccatcgaagggcgcgtggtgaacgctatgggcaagcagtggcatgtggagcattttgtttgtgccaagtgtgagaaaccctttcttggacatcgccattatgagaggaaaggcctggcgtattgtgaaactcactataaccagctatttggtgatgtttgcttccactgcaatcgtgttatagaaagtgatgtggtctctgctcttaataaggcctggtgcatgaactgctttgcctgttctacctgcaacactaaaataacactcaagaataagttttgtggagtttgacatgaagccagtctgtaagaagtgctatgagaaatttccattggagctgaagaaaagacttaagaaactagctgagaccttaggaaggaaataagttcctttattttttcttttctatgcaagataagagattaccaacattacttgtcttgatctacccatatttaaagctatatctcaaagcagttgagagaagaggacctatatgaatggttttatgtcatttttttaatt

SEQ ID NO: 176000 - DNA, 822 bp, Homo Sapiens
ggggctccgggcccgccagtagccggccgcggcggcgagggactaggacgcggctggagcggcgccgggagacgaggggctgagagacggcggcggccgaaagcggagagatgctgggcgtggcggccgggatgacccacagcaacatggccaacgccctggccagcgccacttgcgagcgctgcaagggcggctttgcgcccgctgagaagatcgtgaacagtaatggggagctgtaccatgagcagtgtttcgtgtgcgctcagtgcttccagcagttcccagaaggactcttctatgagtttgaaggaagaaagtactgtgaacatgactttcagatgctctttgccccttgctgtcatcagtgtggtgaattcatcattggccgagttatcaaagccatgaataacagctggcatccggagtgcttccgctgtgacctctgccaggaagttctggcagatatcgggtttgtcaagaatgctgggagacacctgtgtcgcccctgtcataatcgtgagaaagccagaggccttgggaaatacatctgccagaaatgccatgctatcatcgatgagcagcctctgatattcaagaacgacccctaccatccagaccatttcaactgcgccaactgcgggaaggacctgactgccgatgcacgggagctgaaaggggagctatactggcctcccatgccatgataaaatgggggccccatctgtggcgcttgccgacggccatcgaagggcgcgtgttgaacgctatgggcaaggcagtggcatgtggaaggcatttgtttgggccaaggtgtgagaaacc

SEQ ID NO: 176001 - DNA, 2375 bp, Homo Sapiens
gggccctacttcctgtgctcttgcggagacgcgcgcgtcggggtttaacgcgtttctgggccgccgtaagcccggcctaggggcagctttgactcgagagccggctataggcgcatggaaggttccctggaacgggaggcgccagcgggggcgctggccgccgtgctaaagcacagctcgacgttgccgcccgaaagcacccaggtccggggctacgacttcaaccgcggtgtgaattaccgcgcactgctggaggccttcggcaccaccggcttccaagcaaccaacttcgggcgcgctgtacagcaagtcaatgccatgatcgagaagaagctggaaccactgtcacaggatgaagaccagcacgcggacctgacccagagccgccgcccacttaccagctgcaccattttcctgggatatacatccaacctcatcagttcaggcatccgtgagaccattcgctaccttgtgcagcacaacatggtggacgtattggtgaccacagctggcggcgtggaggaagacctcatcaagtgcctggcgcccacatacttgggcgagtttagcctcagggggaaggagctccgggagaacgggatcaataggatcggaaacctgctggtgcccaatgagaattactgcaagtttgaggactggctgatgcccattctggaccagatggtgatggagcagaaccacagagggtgtaaagtggacgccttctaagatgatcgcccggctgggcaaggagatcaacaacccagagtccgtgtattactgggcccagaagaaccacatccctgtgtttagtcccgcacttacagacggctcgctgggcgacatgatcttcttccattcctacaagaacccgggcctggtcctggacatcgttgaggacctgaggctcatcaacacacaggccatctttgccaagtgcactgggatgatcattctgggcgggggcgtggtcaagcaccacattgccaatgccaacctcatgcggaacggggccgactacgctgtttacatcaacacagcccaggagtttgatggctctgactcaggtgcccgaccagacgaggctgtctcctggggcaagatccgggtggatgcaacagcccgtcaaggtctatgctgacgcctccctggtcttccccctgcttgtggctgaaacctttgcccagaagatggatgccttcatgcatgagaagaacgaggactgagcggctgcggtcccaggaaggtcttaccccctcttctatttattaatttgcagacccagcccctcccctactttttggtcagctacgtctctagaataagatggtatctgaagtccttccatgtctgtgtctcggtccttggtcctgttggtgggtcccctggcttcagcctgctccatcctctgcctcataggcctcctctcgccagcactggacgctgcctcccatggcggtcagcaggcagggctctgttgggtggtaggccagcgactgcaccacaccggaacccacaggcagggccagagccagcgcaccctccaccaggtcccagaagaacaccttcccgtcctcagaacagctgaccacatgtgtgtcacgctcgctcaggcagcagtccagcttgtattcctggttcttatggcccttgtactcgcccagcagctcccctgtgtctttgtccaggagccgcaatgtggagtccaggctggacaccagggtgcactgcccatcccggctgaagcaggtgcaggtgatggggctgcccacgtagtctgagaagagctgccccatccttaggtcatagcgtctcacgcggccatccacggagcctgccaggatctcgtggtctgacaccttcacactggacacgccatctctggcctcatccagcgtctgcactggctcaggcctccgtgagcggcaatcccaacagcggatactggaatcaatagagccggacaggataactgtggcctcttcattaaactgcaccgtgttcaccttccctgcgtggccccggaatttgcgcacgacctgccctgatgccacatcccacagaaccaccgccttgtccccgccgccggagcagagactactgttgtcaaaggagccggccgcatccagcacctcgtagccgtggccgctgtacgtccgcagcagcgtcccccgaagcgggttccacagcttcagcgtcttgtcactgccgcacgtcaggcagtaattgccatccacattaaatcgtacggctcgcactgccccctgcccgcagtccagcgtcttcaaccgtttctgcggcagctctggaggccgcggctttggctcagggaaagccatgctcccaggactccttccttgcagccttaaatcccc

SEQ ID NO: 176002 - DNA, 695 bp, Homo Sapiens
tcatacatgtgatgagtgtggaaaaagcttctgttacatctcagcccttcatattcatcaaagagtccacatgggagagaaacgctataagtgtgacgtgtgtggcaaggaatttagtcaaagctcacatctgcaaactcatcagagagtccacactggagagaaaccattcaaatgtgagcaatgtgggaaaggcttcagtcgtagatcaacacttaatgtacatcgcaaattacacacaggagagaaaccttacaattgtgaggaatgtggaaaggccttcatacatgattcccagcttaaggaacataagagaatccatactggggagaaaccattcaaatgtgatacatgtggtaagaacttccgtcgtagatcagcacttaataatcattgcatggtccacacaggagagaaaccatacaaatgtgaggactgtggtaagtgtttcacttgtagctcaaaccttcgtatccatcaaagggtccacacaggagagaaaccttacaagtgtgaagaatgtggtaagtgctttattcagccttcacaatttcaggcccatcggagaatccacactggagagaaaccatacgtatgtaaagtgtgtggtaagggtttcatttacagttcaacgttttcaggcccatcagggagtccacactggagagaagccatacaaatgcaatgagtgtggg

SEQ ID NO: 176003 - DNA, 1794 bp, Homo Sapiens
gcaggcggctgggcgcctggcgagtggactgttcgagcccttccgctgggacccgggccctggctccggccccgcgatgggagctgctctccgcgggctgagctgtcagcatcctcgacgcaccctggtccctgaagtcggagaagagcccctacccacccacacccccttgccccattttgggtcgcctgggtcctcagtcctagcggatcctcagtcctagcggccaccgggtctgaaaggagcaagacgatgatcctggcgtcggtgctgaggagcggtcccgggggcgggcttccgctccggcccctcctgggacccgcactcgcgctccgggcccgctcgacgtcggccaccgacacacaccacgtggagatggctcgggagcgctccaagaccgtcacctccttttacaaccagtcggccatcgacgcggcagcggagaagccctcagtccgcctaacgcccaccatgatgctctacgctggccgctctcaggacggcagccaccttctgaaaagtgctcggtacctgcagcaagaacttccagtgaggattgctcaccgcatcaagggcttccgctgccttcctttcatcattggctgcaaccccaccatactgcacgtgcatgagctatatatccgtgccttccagaagctgacagacttccctccgatcaaggaccaggccggacgaagcccaatactgccagctggtgcgacagctgctggatgaccacaaggatgtggtgaccctcttggcagagggcctacgtgagagccggaagcacatagaggatgaaaagctcgtccgctacttcttggacaagacgctgacttcgaggcttggaatccgcatgttggccacacatcacctggcgctgcatgaggacaagcctgactttgtcggcatcatctgtactcgtctctcaccaaagaagattattgagaagtgggtggactttgccagacgcctgtgtgagcacaagtatggcaatgcgccccgtgtccgcatcaatggccatgtggctgcccggttccccttcatccctatgccactggactacatcctgccggagctgctcaagaatgccatgagagccacaatggagagtcacctagacactccctacaatgtcccagatgtggtcatcaccatcgccaacaatgatgtcgatctgatcatcaggatctcagaccgtggtggaggaatcgctcacaaagatctggaccgggtcatggactaccacttcactactgctgagggcagcacacaggacccccggatcagccccctctttggccatctggacatgcatagtgggcgcccagtcaggacccatgcacggctttggcttcgggttgcccacgtcacgggcctacgcggagtacctcggtgggtctctgcagctgcagtccctgcagggcattggcacggacgtctacctgcggctccgccacatcgatggccgggaggaaaacttccggatctgaccccaaagcctttggcctgctcacccgaccagcctgggccgcattccctgcaggacctcccgggtcaggcagggcggccccctgctccacaaactgctgcatcttgggtctcagggacccagacagatggacttacatggagctgggcactgccctgcctcaacagggtccattgcctcctcgcctccagaacttggagcagggaagtgggcaccctgaggcctccagcaccagttccgtcattctcgttcctggggaacccccactctgacctgttattaaagttcacattttgaatgac

SEQ ID NO: 176004 - DNA, 1176 bp, Homo Sapiens
  misc_feature (53)..(53): n is a, c, g, or t
cagcccatgacttcattgacccgcagacggaaaggggaaattcaccaacacancagtggtggatgcaaggccagggacccagtggcttctggcatcggtaacacacaacaactggcagcctcagagagacaacagcagctctctcctgacccagtctcaggcctcccactgctgtccaagggacacagcttcagccaagcccatggtgctgtcatcaaagttaacgtggaagaacgaccacgactcagaccagcaaaatgcttgcgggatgaggtgtcagcctgccggacccacagccccggcaaaggcagagctattgctttcttcatggcaactgtttctcccaaacacacttctgttccatcctcacttccctatggaatgtgcctctgcagtttcctcaaggacgttctaccttttctacaaagctgaagttacgagcttctggaaagccccagtacagggccccggaatcattctctaaatggcaattgaacaactgggttcacttcattccttggtcaaatcataaatatgaatttactacaagtgctacctgagaaaacaaagttgtcaagccaatctcagggtatgttgagacaagcctgggcctggatattgggccacccggatctcaatctcagctgtcaccaagcctgtctgggactgactctcagcaatttgctctcctactgataagagcctgcatcacgtgatcactaagacccttcccagttctaaatgttctgtgattcctcaccaattatcctagaacatgtcaaggtatttttaaatggcactttcacctaggtatggcatttcattaagaaactgtttcaagcggtatcagaaacaaaggctgcatgagacacggagaagttctcaggaaacactcgctgatcaatgctgctgcttacagagcaggccggtcccactcgggcctcgggccgtcagcatcaaacccacacactccacgctgcccagcaaccctctgtcctgacccttgagtttcatttaggaaaccccagggccgctcgaggtagcctcgtgcgagtgcactggtgaaggggcagtggcctcggatccccagcactactaaggggtggggggtggaggtttgggtgtccgtggagaaaaggatctagtctcttgtttgtttaatctgaaaattgttac

SEQ ID NO: 176005 - DNA, 747 bp, Homo Sapiens
caaagtcatggccattagagtgtacttgattactgggcatccttgtaatataatttcataccactgacacattatacttgtaagagaacatctttcccagagtgcctcagaccttattgctttaaaatataataatgttttcattacttttattatttgaatgatttagtaaagttgactgaatctggtatagactttgggagtatgtgtgtgaagtttttatcaaactgtaatatttgtgaatggaatgccttgcaatatgaatgttaatataatgtgtaaagggagattaaaaagtttgaatgattatcctaccatgtagtcattaactttgctgcatttctttgggatttcagagggaaatggtgggaatggggaggctgtttgataatctaaaataaattcatgaccatttgagtagaaatgttttttcaggtgtaatggctgtacataaactcagtagagtgccagcagcatttgagatgcaaccatatttttgagagcttttaagacagaatgctgaatattaggggagcattttatgtactgattgtggaattaacaatgtgggcttattcagtgtctgtcattagaatataagctgaaggaagaaagatcttggtgtgatagttttttggttaaaagataaaacaccacactggtgataatgcttttcttagtttgggagattttaaaacaatatggactctagtctaattgcatatatctaattacaaatgttcattg

SEQ ID NO: 176006 - DNA, 782 bp, Homo Sapiens
  misc_feature (651)..(651): n is a, c, g, or t
  misc_feature (735)..(735): n is a, c, g, or t
  misc_feature (752)..(752): n is a, c, g, or t
  misc_feature (759)..(759): n is a, c, g, or t
aatacaaactcactggtttgtgaaagataattagattttaattataaagtagtaatacaaactcactggtttatgaaagataattagatccaaattacatttctgacaaaattgggcccctatatgtaattaaggctgtggaacaaaatttggggtaaagtagcctgtagaatgcagatcacgtaaaatattaaatttgacacacagaaaaccaaaagtaaattccctagaaaagacatgtctaacgaacagaatgtaaattccgtagaaactcgggtcctcaaaccacaaagacatttgtctttaaaccaggaaagacttgccagaaaagacaaaaggtcttctgtcatcccaggagagatgtaaggtcctttatttaccagatccagaataaagtcaagaggttctaccttgattttagagggagagagagtcttggcctgacaaaaggtgtgccgtggaagcagagagctccaggggctcatatgagtactgcacaccagttctaagcatcacaaaccgtgtccaaaagtaatcctattcaaggtcctacctctggacactcttcatgtcaacctaaataacaaacagagaggggctctctaaaagaaaataatggttatttgggaatagggtattggaacaggagtncacaggtcatagtaaattggttgcatattcaggaaggtaaaaggaagacaatgggtggttaaagaaaaaatggaggggggattnccttaattgggttttgnaaataantattccttggcctattaagggat

SEQ ID NO: 176007 - DNA, 1062 bp, Homo Sapiens
  misc_feature (1014)..(1014): n is a, c, g, or t
  misc_feature (1034)..(1034): n is a, c, g, or t
agcagggctcccgcgggcgtcactccggccatcgtccccacctccacctgggccgcccggcaggcaggcggtagaacgggcgtggcagacctccctgcaggcttgttgctgggcgaacgagaaggatgccatgctgacacactgacgtgctctgtctccttgcagacggaggcccgggagccatgggtgactggggcttcctggagaagttgctggaccaggtccaggagcactcgaccgtggtgggtaagatctggctgacggtgctcttcatcttccgcatcctcatcctgggcctggccggcgagtcagtgtggggtgacgagcaatcagatttcgagtgtaacacggcccagccaggctgcaccaacgtctgctatgaccaggccttccccatctcccacatccgctactgggtgctgcagttcctcttcgtcagcacacccaccctggtctacctgggccatgtcatttacctgtctcggcgagaagagcggctgcggcagaaggagggggagctgcgggcactgccggccaaggacccacaggtggagcgggcgctggcggccgtagagcgtcagatggccaagatctcggtggcagaagatggtcgcctgcgcatccgcggagcactgatgggcacctatgtcgccagtgtgctctgcaagagtgtgctagaggcaggcttcctctatggccagtggcgcctgtacggctggaccatggagcccgtgtttgtgtgccagcgagcaccctgcccctacctcgtggactgctttgtctctcgccccacggagaagaccatcttcatcatcttcatgttggtggttggactcatctccctggtgcttaacctgctggagttggtgcacctgctgtgtcgctgcctcagccgggggatgaggggcacggcaaggccaagacgcacccccgacccaggggcaccttccttcagacccttaacaagggaccagggtcttttttctaaccttcccccgttgggccaagggcttncattccccaccatgccccanttacaattgggtttttattccagtgagt

SEQ ID NO: 176008 - DNA, 1272 bp, Homo Sapiens
  misc_feature (712)..(762): n is a, c, g, or t
gaggagggccaaggggacaattccccctcaatagggaaaaaagttcccgccaagaaagtggtctgtgccccgagtccatgagccctgtttatagtggaacttaggatgaacagtcaaatttcggtcccagatctgtatgcttccattctggcaggcagctgctatgaggtttccatctctactatatgtgcacgtagtaggaatgacttttttgccttgcatcgtccgtggtttaaacacacttttttgcttctttggattttcaacttcccacgtcctcacagtcgcatcatttgagcaagtcataaattctccctttattttgggatgccatgagccagtatgaagcattgctgtatgacccttggtgttggccatgtccacaatatactggtctccttttatacattccattacttcaaaaccatctctgtcaatcaccttggcctgagagcttccagatacaacaagaatcatgtctcctgtgttactatactgtaatgactcgatctgatggcactcacagggctgaagggatcgaaatgccttaaaagaagcatccattccagcaaaatcccaaaacttaacatcatagtcatatcctcctgtcaccaaacgggcacctgagggatccagacccaaagcagacactgttttagtgccatgcttcagcgttatctcatgcgagtcaggaatcttgtgaacaggattnnnnnnnnnnnnnnnnnnnnnnnnnnnnnnnnnnnnnnnnnnnnnnnnnnnattaagaggtggaggtaaaggaccgaggatatcttcctccataaaattaactggttttcctaccattttagggggtaaaggagggccaattaactcatcatcagaagagtcagaactctgttcactttcactgctgctcgtatccctggaagatgatttggagcaatctctgaccacatttgatcttgaggatgttggctcaatatcttcattttgtcttcttaattctttctctctgttcatttcttcctctttttctcttgctcccagtgttttgcgacttctttccacagctgtccttcgagtttgttcaaacattgcttccaagtcaaatgtgcgagcttttttaccgaaccccgtgaagcccatggtgaccgcaagctgcgggtccggtcccgacgcgtctgagcctgtcacttcgctgggcccagagcgctccatggctggccgcacaccccagaaccagccacagggacagcccaaacaactgcaggggaacttgccaatccc

SEQ ID NO: 176009 - DNA, 1260 bp, Homo Sapiens
acaccatgcgcctctggtctgctcgggcaccaaatgactttaacctcagagactttaatgttggagactacattcaggctgtgctggaccgaaacctggccgagaacatctcccgggtcctctatcccaatgacaatttttttgaagggaaggagctaagattgaagcaggaatactttgtggtggctgcaaccttgcaagatatcatccgccgtttcaaagcctccaagtttggctccacccgtggtgcaggaactgtgtttgatgccttcccggatcaggtggccatccagctgaatgacactcaccctgcactcgcgatccctgagctgatgaggatttttgtggatattgaaaaactgccctggtccaaggcatgggagctcacccagaagaccttcgcctacaccaaccacacagtgctcccggaagccctggagcgctggcccgtggacctggtggagaagctgctccctcgacatttggaaatcatttatgagataaatcagaagcatttagatagaattgtggccttgtttcctaaagatgtggaccgtctgagaaggatgtctctgatagaagaggaaggaagcaaaaggatcaacatggcccatctctgcattgtcggttcccatgctgtgaatggcgtggctaaaatccactcagacatcgtgaagactaaagtattcaaggacttcagtgagctagaacctgacaagtttcagaataaaaccaatgggatcactccaaggcgctggctcctactctgcaacccaggacttgcagagctcatagcagagaaaattggagaagactatgtgaaagacctgagccagctgacgaagctccacagcttcctgggtgatgatgtcttcctccgggaactcgccaaggtgaagcaggtgaagaggatacatgagtacaagcgacagctcttgaactgtctgcatgtgatcacgatgtacaaccgcattaagaaagaccctaagaagttattcgtgccaaggacagttatcattggtggtaaagctgcccccagatatcacatggccaaaatgatcataaagctgatcacttcagtggcagatgtggtgaacatgaccctatggttggaaagcagttgaaagcatcctcttgggagactacagagtatctcttgctgaaaagtcattccagccacagatctgtcagagcaaatttcactgcaggcaccgaacctccggggacggcaatatgaagttcatgcttaatgggggccca

SEQ ID NO: 176010 - DNA, 832 bp, Homo Sapiens
ccaactcagagtccaccctgatgcagacggaaaagcacttcgttccacaaggtgagtgagcgtctctcccggccaaacatcttcatcctgaacaaccgctgggatgcatctgcctcagagcccgagtacatggaggaggtgcggcggcagcacagtggagcgttgtaccagcttcctggtggatgagctgggcgtggtggatcgatcccaggccggggaccgcatcttctttgtgtctgctaaggaggtgctcaacgccaggattcagaaagcccagggcatgcctgaaggagggggcgctctcgcagaaggctttcaagtgaggatgtttgagtttcagaattttgagaggagatttgaggagtgcatctcccagtctgcagtgaagaccaagtttgagcagcacacggtccgggccaagcagattgcagaggcggttcgactcatcatggactccctgcacatggcggctcgggagcagcaggtttactgcgaggaaatgcgtgaagagcggcaagaccgactgaaatttattgacaaacagctggagctcttggctcaagactataagctgcgaattaagcacgattacggacggaagtggagaggcaggtgtcgactgcaattggccgaggagatcaggcgcctctctgtactggtggacgattaccagatggacttccacccttctccagtagtcctcaaggtttataagaatgagctgcaccgccacatagaggaaggactgggtcgaaacatgtctgaccgctgctccacggcatcaccaaatcctgagaccatgcagcagacatgacaacgggttgaaaccctc

SEQ ID NO: 176011 - DNA, 1004 bp, Homo Sapiens
  misc_feature (23)..(23): n is a, c, g, or t
  misc_feature (38)..(38): n is a, c, g, or t
  misc_feature (66)..(66): n is a, c, g, or t
aggtccggtttctcctttctggnccccgggttcttgcntccgggtaagcataggttccggccacantgaactggtgctgaagtccttcatccttacagaagttatcatctgagctatcatcattggactcttcagggtcctctgtaccgctgttgccatcttcctggtccttcaagtctacaccactgctgtcagaggaacagggggcatcactctcatatcccttctttgaagttctccacgctctcgatatggtccagatttgcaaagtactcatcaccccattcccagaccctccttgtctgcaaagtcatctgtcaggattttgcctgcataaatacaaacaaaagagcctttggcaatgtcatccaagcagcggataccccagcccttgttctgtgtcttgaatagctgtagccgaacttgtagtccatgttgcaccaacccggtttgtgcacatgtttgggtcacatttgcagcgtttgttacactcatatacccctgtgggtagacactcttctagtctcttgtactggtagccagagttagggttgatttggcctcctggggtacaggctgtagcctggatagttagttgagggcaggcacacttggacttgtcccgacacccatccttgcagtcacagccaaccagaaattcagggcctgtgttaatgaaaacacccttgcccgggatacgttccttgctgtaggccacctggggtggaggggttgtgtcaatctcattgacacaggataggggaacatcttccttcccataagtgatgtccaaaatatagtaaaaaggcttatagggctgaaactttcggtccacaagaacatatggatccaaacagaacatctccaggaagaggaagtcacagccagtctcgaaaaggtagcgttctatctcctgcattgtccgaaggcagagaccacaaggtgtcttatagataacatgaaagcccatcttgcggttaactcgacgccgggctgtcatcccc

SEQ ID NO: 176012 - DNA, 1006 bp, Homo Sapiens
acggtcggaatcccgggatatcgtcgacccacgcgtccggcgatggagatgaggcttccagtggctcgcaagcctcttagcgagagactgggccgcgacactaagaaacatctagtggtgccgggggatacaatcactacggacacaggattcatgcggggccatggaacgtatatgggagaagagaagctcattgcatctgttgctggctctgtggagagagtaaacaagttgatctgtgtgaaagctttgaaaaccagatacattggtgaagtaggagacatcgtagtgggacgaatcacagaggttcaacagaagaggtggaaggtggagaccaactccaggctggattcggtcttgctgctctcgtccatgaaccttcctggaggagagctgaggagaagatctgcagaagatgagcttgcaatgagaggtttcttacaggaaggggaccttatcagtgctgaggtccaggcagtgttctctgacggagctgtctctttgcacacgaggagcctgaaatatggaaaactaggtcagggggttttggtccaggtttccccctccctggtgaaacggcagaagacccactttcatgatttgccatgtggtgcctcagtgattctcggtaacaacggcttcatctggatttacccaacacctgagcacaaagaagaggaagcagggggcttcattgcaaacctggagcctgtctctcttgctgatcgagaggtgatatcccggcttcggaactgcatcatctcgctggtaactcagaggatgatgctgtatgataccagcatcctgtactgctatgaagcatcccttccacatcagatcaaaagacattctttaaagccagaaataatggaggagattgttgatgaaagacgccaaagggtttgggaagaggaggaataaggggtggtcagaacacgggactgtgtgccttgcagaagtgagaagtgaattgtggcccccatatgtggtcagcaagacttgtaaa

SEQ ID NO: 176013 - DNA, 579 bp, Homo Sapiens
cccagcataaatttccatgttctctccatactgtggctcctccagtaatgtctggtattcaaacatgaggcgggagctctcccggaggcggctacattggaattggtgatattgttgcacaagttccttcaccacaagtaagagacattcaggatttgaaggattccaggaggcaagattctgcaaagctgaggggtctggcaggaattcagcatcttctccaaagataaaatcgggaggcagttctgggtattgggcattgaaaatgatatcccactttaatgtctctccagcatatggtatgtgcagtttaaatcggtcacagttgggcccaggagtcaatgatgtgcagccagattttaagtcagttatcctcaaacagtttgtagcatccagtcccacttttccattccggaccacgctagatatgaaaggggagagcattggagatattcggttcaaggccacttctggggacattttaacttgacttgtaaatcaccactggaacttagtccgatcggtaaccggcgactacgtggggtacaggtacccgagcgcgcccccgacagacgcccc

SEQ ID NO: 176014 - DNA, 848 bp, Homo Sapiens
  misc_feature (763)..(763): n is a, c, g, or t
  misc_feature (796)..(796): n is a, c, g, or t
  misc_feature (838)..(838): n is a, c, g, or t
aaaaacatgtgaggagggaagagtgtgcagacggaacttcagccgctgcctctgttctcagcgtcagtgccgccactgcccccgccagagcccaccggccagcatgtcctctgctcacttcaaccgaggccctgcctacgggctgtcagccgaggttaagaacaagctggcccagaagtatgaccaccagcgggagcaggagctgagagagtggatcgagggggtgacaggccgtcgcatcggcaacaacttcatggacggcctcaaagatggcatcattctttgcgaattcatcaataagctgcagccaggctccgtgaagaagatcaatgagtcaacccaaaattggcaccagctggagaacatcggcaacttcatcaaggccatcaccaagtatggggtgaagcccacgacatttttgaggccaacgacctgtttgagaacaccaaccatacacaggtgcagtccaccctcctggctttggccagcatggcgaagacgaaaggaaacaaggtgaacgtgggagtgaagtacgcagagaagcaggagcggaaattcgagccggggaagctaagagaagggcggaacatcattgggctgcagatgggcaccaacaagtttgccagccagcagggcatgacggcctatggcacccggcgccacctctacgaccccaagctgggcacagaccagcctcttggaccagggcgaccatcagcctgcagatggggcaccaacaaaggagccagccaggttggattgnattgcggccaggggaccaagcggcagttttttnggagccggggtttgggctttggagcattttcgaacaaggttnaattttcagg

SEQ ID NO: 176015 - DNA, 1141 bp, Homo Sapiens
gttgtagagataaatgaaaagttcacagagttacttttggcaattaccaattgtgaggagaggttcagcctgtttaaaaacagaaacagactaagtaaaggcctccaaatagacgtgggctgtcctgtgaaagtacagctgagatctggggaagaaaaatttcctggagttgtacgcttcagaggacccctgttagcagagaggacagtctccggaatattctttggagttgaattgctggaagaaggtcgtggtcaaggtttcactgacggggtgtaccaagggaaacagctttttcagtgtgatgaagattgtggcgtgtttgttgcattggacaagctagaactcatagaagatgatgacactgcattggaaagtgattacgcaggtcctggggacacaatgcaggtcgaacttcctcctttggaaataaactccagagtttctttgaaggttggagaaacaatagaatctggaacagttatattctgtgatgttttgccaggaaaagaaagcttaggatattttgttggtgtggacatggataaccctattggcaactgggatggaagatttgatggagtgcagctttgtagttttgcgtgtgttgaaagtacaattctattgcacatcaatgatatcatcccagagagtgtgacgcaggaaaggaggcctcccaaacttgcctttatgtcaagaggtgttggggacaaaggttcatccagtcataataaaccaaaggctacaggatctacctcagaccctggaaatagaaacagatctgaattattttataccttaaatgggtcttctgttgactcacaaccacaatccaaatcaaaaaatacatggtacattgatgaagttgcagaagaccctgcaaaagctcttacagagatatctacagactttgaccgttcttcaccaccactccagcctcctcctgtgaactcactgaccaccgagaacagattccactcctttaccattcagtctcaccaagatgcccaataccaatgggaagtattggccacaggcccactttctctgtcaaccccagtctgtaagtgggagaagctaaaacactggacccccgtccaaggagaggtccaccctttggcccatgccctcctgggggaat

SEQ ID NO: 176016 - DNA, 910 bp, Homo Sapiens
  misc_feature (122)..(200): n is a, c, g, or t
caagatgatgtaaccctggctcagggagtagatcaagttctaaatctcaggaataaaaaactgatactcattatccaattcatatagtcttgtattatatacatattaacagtctatgcaannnnnnnnnnnnnnnnnnnnnnnnnnnnnnnnnnnnnnnnnnnnnnnnnnnnnnnnnnnnnnnnnnnnnnnnnnnnnnnatctactccatttggcaatgtgtactgagagataaaaaacctatctacaaacagaatataacaaaaggaaaatgtgactttaaaaagtgatctcaggtccaatagctcttcggttctttccaaatttgtagatcagagtgctaaaaaaatataagtgcattttgaaaaaacacagctagtcccggataaacatcagtattttgggtaacatatgcaccaaaaagaatccacatggaagcaataagtgaccaaaacatcaacatgaaaccaatgaaaagccaaactcgagcacctgttcttcctaaacagccgctttcatagctatcacctctcacctgagcattggatacagcatttatcatgaagaaagccaatgtggaaaatacaccacatgtgtgaaaggcatggttcaactgttctggcttaggatacaccacagctgcatcaatcattatccaccagcctgtaaaaaacaatatacctgcgacaacagatgccacagcatttcttctctcactccagtcaatacattcacattctggccaacgaaaattatctaggaagcctgccatttttacttcttaagcataaatttttcattaaatgctgtatcccagcttcctcaaacgcccacgccgacttcaggcgcgcgcgcaggaaggagactgctgcgccacaaccctgccggcgtcccgcggctccacctcccc

SEQ ID NO: 176017 - DNA, 1156 bp, Homo Sapiens; identical to SEQ ID NO: 13343

SEQ ID NO: 176018 - DNA, 1017 bp, Homo Sapiens
tgtgaccacataaacagttgtgtaaaaagccggctgtacggtcggaatcccgggatatcgtcgacccacgcgtcggagtgaatgggcacctcgacctcccccagaatttgtccgagatgtcatgggttcaagtgctggggccggcagtggagagttccacgtgtacagacatctgcgccggagagaatatcagcgacaggactacatggatgccatggctgagaagcaaaaattggatgcagagtttcagaaaagactggaaaagaataaaattgctgcagaggagcagaccgcaaagcgccggaagaagcgccagaaattaaaagagaagaaattactggcaaagaagatgaaacttgaacagaagaaacaagaaggacccggtcagcccaaggagcaggggtccagcagctctgcggaggcatctggaacagaggaggaggaggaagtgcccagtttcaccatggggcgatgacaatgtttgccacagcctctgcctggaacctggctcgtgctgtgaccagaagggaaaggcggctgtttggctctttctcccccgcaaggacccgctgacccgctggatggagagcaaaggagacccctcccgagccgctcacagtcctgtatttggcaggtttgggagcctgaggggccatctccctgacactcagaggcactgccttgcagacaccatccgtgctcctggtaaagggggacagagagcctcaccttgccaacatagtttgaacagtgatgagtttggggctggttcctgggaagggaaccgtcaattaaggtaaaagaggcagaacacccccttggaagaaaggtcagagagaagagaaggaaaaaagacggacgaagaacaaaaaaagcgggggaggccggatgaaagaaccgagggcacggcaaaacgagacaggcagccaagcccagaacacgggggcacaaaaggagggacaaaaacacgagaggcgggcgcaaaagggaagagagaacagcacgaggaagggggcc

SEQ ID NO: 176019 - DNA, 571 bp, Homo Sapiens
aattttatcctggccgacttccccagtccagtccagttgaaactcaggccagggatttcatcaactatcatgttcgaatgtcttgaagacctctgggtgaaagtcaatggtggtgtcacatccccacttggtggctgaggcataccgctctctggcttcagcacagtgcccttttctgggacccccacgcaaacgcctgaagcaatcctaagatcctgcttgttgtaagactccgtttaatttccagaagcagcagccactgttgctgccactgaccaccaggtagacagcgcaatctgtggagcttttactctgttgtgaggggaagagactgcattgtggccccagacttttaaaacagcactaaataacttgggggaaacggggggagggaaaatgaaatgaaaaccctgttgctgcgtcactgtgttccctttggcctggctgagtttgatactgtggggattcagtttaggcgctggcccgaggatatcccagcggtggtacttcggagacacctgtctgcatctgactgagcagaacaaatcgtcaggtgcctggagcaaaaagg

SEQ ID NO: 176020 - DNA, 574 bp, Homo Sapiens
aatctggccgaccttccccaagtcaagatccagttgaaaactcaggccagtggattttcatcaactatcaaccttcggaatgttcttgaagacctctgggtgaaagtcaatggtggtgtcacatccccacttggtggtgaaggcataccgctctctggcttcagcacagtgcccttttctgggacccccacgcaaacgcctgaagcaatcctaagatcctgcttgttgtaagactccgtttaatttccagaagcagcagccactgttgctgccactgaccaccaggtagacagcgcaatctgtggagcttttactctgttgtgaggggaagagactgcattgtggccccagacttttaaaacagcactaaataacttgggggaaacggggggagggaaaatgaaatgaaaaccctgttgctgcgtcactgtgttccctttggcctggctgagtttgatactgtggggattcagtttaggcgctggcccgaggatatcccagcggtggtacttcggagacacctgtctgcatctgactgagcagaacaaatcgtcaggtgcctggagcaaaaagg

SEQ ID NO: 176021 - DNA, 1223 bp, Homo Sapiens
ctccccgaaaaggggccgttgtaattatgaacaacccttggcagtaaataaaaagcaaggtgtaccggtcggaatctcgggatacgtcgaccacgcgtcggtcagctaacagcggctcaagaactaatgatccagcagttggtggcggccaactgcagtgcaacaaacgctccttctccgaccagcccaaagtcacgccctggccctgggcgcagacccccagtcccgagatgcccgccagcaacgctttgcccacttcacggagctggccatcatctcagtccaggagatcgtggacttcgctaagcaagtgcctggtttcctgcagctgggccgggaggaccagatcgccctcctgaaggcatccactatcgagatcatgctgctagagacagccaggcgctacaaccacgagacagagtgtatcaccttcttgaaggacttcacctacagcaaggacgacttccaccgtgcaggcctgcaggtggagttcatcaaccccatcttcgagttctcgccgggccatgcggccggctgggcctggaccgacgctgagtacgccctgctcatcgccatcaacatcttctcggccgaccggcccaacgtgcaggagccgggccgcgtggaggcgttgcagcagccctacgtggaggcgctgctgtcctacacggcgcaatcaagaggccgcaggaccagctgcgcttcccgcgcatgctcatgaagctggtgagcctgcgcacgctgagctctgtgcactcggagcaggtcttcgccttgcgggctccaggacaagaagctgccgcctctgctgtcggagatctgggacgtccacgagtgaggggctggccacccagccccacagccttgcctgaccaccctccagcagatagacgccggcaccccttcctcttcctagggtggaaggggccctgggccgagcctgtagacctatcggctctcatcccttgggataagccccagtccaggtccaggaggctccctccctgcccagcgagtcttccagaaggggtgaaagggttgcaggtcccgaccactgacccttcccggctgccctccctccccagcttacacctcaagcccagcacgcagtgcaccttgaacagagggaggggaggacccatggctctcccccctagcccgggagaccaggggccttcctcttcctctgcttttatttaataaaaactaaaaacagaaacagg

SEQ ID NO: 176022 - DNA, 290 bp, Homo Sapiens
  misc_feature (219)..(219): n is a, c, g, or t
  misc_feature (230)..(230): n is a, c, g, or t
ataagccaccacacccagcctgtgggaactatttattggatttcaaaacaccctctgcctcattaatccactaagctttctcagcaaaaagctgtttaaataaataatgggaacatctaatttaaaacagtttttctaattatagaccagtacacgaagaagagcttaacttatccaagtatagtctagtttgggtccataatggagctgaaggctcanaggacattcanggccattacactgcaggaaaaccaaggaataagggatgtagaaatgacctaagaaaaagc

SEQ ID NO: 176023 - DNA, 544 bp, Homo Sapiens
  misc_feature (21)..(21): n is a, c, g, or t
  misc_feature (40)..(40): n is a, c, g, or t
  misc_feature (43)..(43): n is a, c, g, or t
cggccattgagttcaaggccntcaggttgtgaacttccanagncagttgcgcccagaggtgttgtgtgcatgcgaagggcccagcgttgaagcagccctcaatgttaaggcctacaagcgcagcaagcgccagtccctgcgcgaggcccgcatcactgagaagctggagaagcagcagaagatcgagcaggagcgcaagcgccggcagaagcaccaggaatacctcaatagcattctccagcatgccaaggatttcaaggaatatcacagatccgtcacaggcaaaatccagaagctgaccaaggcagtggccacgtaccatgccaacacggagcgggagcagaagaaagagaacgagcggatcgagaaggagcgcatgcggaggctcatggctgaagatgaggaggggtaccgcaagctcatcgaccagaagaaggacaagcgcctggcctacctcttgcagcagacagacgagtacgtggctaacctcacggagctggtgcggcagcacaaggctgcccaggtcgccaaggagaaaaagaag

SEQ ID NO: 176024 - DNA, 525 bp, Homo Sapiens
  misc_feature (26)..(26): n is a, c, g, or t
  misc_feature (52)..(52): n is a, c, g, or t
  misc_feature (68)..(98): n is a, c, g, or t
  misc_feature (463)..(482): n is a, c, g, or t
ccatccctaagggtccgatgtgacancaaagcaagtgaaataaacaatgatntgcttttcagtgagannnnnnnnnnnnnnnnnnnnnnnnnnnnnnntctaggttgggtggtggtagaacccttgagggtcaagtagtttcaaaacccaaaaatattcctaagaagtcttaggatggagttccttttctttctgttgttgtttccccagctacaaccaactaaagacacaaatggcgttctgcaaggggactctgggaggagttttccagaatgcaattccgagtgagcaaatcgcatagctgtagaatgtgcgtgcttttttgtggacacaggagctcctccaggagcaggctgggatcccaactatcgcttgttgcctctttttcaagtggaatttgaattttaaataaacaactttttttggcatgataaacagatcaataaaagttttgtgaattccnnnnnnnnnnnnnnnnnnnngggcggctgctcctacttcagattggtaaccctcgttccgaat

SEQ ID NO: 176025 - DNA, 747 bp, Homo Sapiens
  misc_feature (18)..(18): n is a, c, g, or t
  misc_feature (23)..(23): n is a, c, g, or t
  misc_feature (35)..(35): n is a, c, g, or t
  misc_feature (64)..(64): n is a, c, g, or t
  misc_feature (66)..(66): n is a, c, g, or t
  misc_feature (76)..(76): n is a, c, g, or t
  misc_feature (420)..(435): n is a, c, g, or t
  misc_feature (547)..(644): n is a, c, g, or t
  misc_feature (688)..(688): n is a, c, g, or t
taaaaaaaagtgggtggncacantaactgtttggnggccccaaccccagaaactgcaattctcngnctaaggttanacttttgccctccttgtgcccttttcagctttccatcccccagctaggaagaaagaatggcacttcttgggcttggcccagaattagagttattagagcaagagagagcttaggaagcatgagggcaactatagtgaggccttattgccaggagggagggttttggttgctggcgcttgtgtataaaggggcaagagcagctcctttggactattcctgggaggactctgatgcagggcgtctgttgctcccctgggtcacctcctccctgctcgctgacatctggggctttgaccctttcttttttaatctacttttgctaagatgcatttaataaaaaaaannnnnnnnnnnnnnnngtgtgagggacaaaatgcaaacctatttcccttgcctcataggcttctgggatgtcatcacctccagtttgttggttttgtttccaactgttaataaagcattgaaacagtnnnnnnnnnnnnnnnnnnnnnnnnnnnnnnnnnnnnnnnnnnnnnnnnnnnnnnnnnnnnnnnnnnnnnnnnnnnnnnnnnnnnnnnnnnnnnnnnnnttcttaaacacccttttttaaggaacacagcaaaaaaacggttngggccctcgccccgcgcgggatattaaaaaaaatttctatccctcttgcgggggccgcg

SEQ ID NO: 176026 - DNA, 989 bp, Homo Sapiens
  misc_feature (152)..(237): n is a, c, g, or t
  misc_feature (731)..(841): n is a, c, g, or t
  misc_feature (843)..(846): n is a, c, g, or t
  misc_feature (856)..(869): n is a, c, g, or t
ggtacttggaaaaactgatttgaaactttcacagatctcagctttcatctgatgtcacttttcatgatcttctcattggcccccttaacctggtctgaagttctgggatgttttcagtttgatcagtctgatactcagtggcactttattannnnnnnnnnnnnnnnnnnnnnnnnnnnnnnnnnnnnnnnnnnnnnnnnnnnnnnnnnnnnnnnnnnnnnnnnnnnnnnnnnnnnnttttgaatccatcgtggacaacatagcaagattccatctctaaaaaaaatgaaaataaacataagccacaaggaatgggtgaaagattattgtaatgggctttaactaaataggtaaatatactaaacaaatgctaaaactcagttttaggatgaaaccattgttgatatccacatcagtccctgtttagaaaacatttaaaatgacttttagttatgtacagtacgttggcaatgaatacattaagcttcaaaatttggtagtgctctcgaatatgtatatttgtatttttcaagcgaagttctcttattcacatataaattaaagtgggttggtactgatatcaaaaaatgtttatgtttttagaacagacatttcagtcactgcattcttaggtattccaaaccaaatatgatgacatcaatagattgcattttaaaaatattgtttgatttttctattttcaaaaataaaattctgtttctaactagaannnnnnnnnnnnnnnnnnnnnnnnnnnnnnnnnnnnnnnnnnnnnnnnnnnnnnnnnnnnnnnnnnnnnnnnnnnnnnnnnnnnnnnnnnnnnnnnnnnnnnnnnnnnnnnannnnatttgggggnnnnnnnnnnnnnnaaaaaaatttttaaaacctttgtttgggcgcgcggcccccaaaagggaaaggaaaaaggggcaaaaccttgttcccaaagaaaacccggggacagaaaaagagggttggatttccccccc

SEQ ID NO: 176027 - DNA, 478 bp, Homo Sapiens
  misc_feature (418)..(418): n is a, c, g, or t
  misc_feature (431)..(431): n is a, c, g, or t
gtgtgaacaagccttcattgtgcaagcgtgagcccaacaaacaaacaccaggtctgcgctggccgaagacgaagcgtcctccctggaggtgggaacaagtcacctctgaccacacctcctctgacgccatcacctcctcctggccccacccaagggctcgacacaagccccaaggtcggggggagaggggcggggcggaaccgagggcggaggccaaggtgggattccaggaaggccttccgaaggatggaggtgggtcctgtccctccaggtagcttgtgggtgtggacagcaggacttgctggctcagtgtggggcacaaggacactgtgccactggttgagtgagtgggtgagggattggaggtggctcccagaggcctccatcttgcatggccctggccctgtggctccagcangctgcctggctgngggtagcccaggagccacatgcccttaatggggccggttttggggca

SEQ ID NO: 176028 - DNA, 403 bp, Homo Sapiens
  misc_feature (27)..(27): n is a, c, g, or t
  misc_feature (33)..(33): n is a, c, g, or t
  misc_feature (114)..(114): n is a, c, g, or t
  misc_feature (127)..(127): n is a, c, g, or t
ttatcccctcccaattaactttgtggnttgtgnaacaacaagaacttgctggcctaaattgtgggcaacaaagaacactgtgccaactggtttaagtaaatggtaaggaattgnaggtggctccaanaggcttcccatctgcatgccctggccctgtggctcccagcaggctgccctggctgtgggtagccccaggagccacatgcgcttagtggggccgctctggggcaggggctctcacaggacagcatgagccactgagccgcctggggagggccaggccaggcggggagctgtggtgcaatttgctcctgtccctggaggtctgtgggcggaagctgtgggcacaggtggacatggctgtcagacgtggggtcataggctcccactccccagctcctgc

SEQ ID NO: 176029 - DNA, 871 bp, Homo Sapiens
ggccttcaaaagatcctttattcccaaagctgaggtcacaaatacaaaacttgctccttcatggcctctgtcccctgccccccaccaccagacaattccccagccatggtaagatgccttctgaacctgcaatccctttcgcaaaagaccccagtctttgctcctccaggctcccaaggccggctggatcttcattcacagctctatgtgttctgtctggggtggcttctccactgccttcttggcaaagaggttggtccagaaagctacttctttgtccttcagcttctgggccgcctgggtgttggcaccaatctgcagatacccttccttctggttgtactctggccagtggggcagcccttccccattggggtttccattgcgagcaaagttggcccagaatttcatcaccatcttgctaagtctgatctcctcttctgaggcaccctcttttaaaatggggccccaaagacggagaagagctcatccccgtggtctcctatcaccgtcttgggtttcatgtctgatgagaagcttggacggtactgaaactcatacatgtaggtgggtgctccagcatctctgtggttccgggccacaatcacagatgggacaccaaacatcacatctgctatcaagtccaggaacaggtctttctttttgacagtgtcgtctgttcctcctaagtatttctcagtggcttctggaatcagttccttagcaatgcaaacaaggggataggacttccacaggagtgacatggctgtcttctggtccagttgcccttcggagagtggatagctcatcaacattggaatcaaccagccaaactcctgcttgttaattccgaccatgtaggggacagtgt

SEQ ID NO: 176030 - DNA, 526 bp, Homo Sapiens
aagcaggctggtacggtccggaattccgggatatcgtcgacccacagcgtcgggcctccgcccatgattgggcacctggtcaggctgggagatccaaatagcacccagtgggcagctgtccgacccctggaggggcaagccaggaaagaaacttagggcccgctgtgaccagatgtccctcccagttgggaagactaaactggtttggccaatatctcccaggattcccctgtccaaattattcctgggatctgacccatttcctggaaaggggcgagcctgggttttgaagttcaaactagagtttaaatcacaactctgcccctaatcccacgtaaccctgtgcaccttatcctctgagccttcgtctcctcgtgtgtaagcctgctaactcctgagagactggacaagatgccgtggagagccttggctctgagtagctctgctgctggacagttcagttggcagtccccaaacgtaaggcgtaagagtttaagaagtatcggccaggcacggtggctcgcac

SEQ ID NO: 176031 - DNA, 1029 bp, Homo Sapiens
gagaaagcacgagtctttatggagctgtgtcagcaaaaggcaaagctgtcaggtgcccatctccacctccaccacctctgcccaggcgccgaggcccatgtccttatggattagcaccaggctgggggcggcatctggctcctctggcaccacaaagcacttctcctggctttctgaaatggtgacctcaacaacatccctggcgggggagacttcctcctctctgtgtgtgtccagcagttgtggctcagcctgcaggagcaccacagtgggctcagaagcagcagaaggcacagagggtgggctgcagggtgcctcaggccggtgactgagctgatgccgcctgaggctctgcgggagggtgtagcccatgccacaggtggggcaacggtagggcttgtcctccaagtgagatttgaggtggcgccgcagcttggtggccagcgtgtaagcacggccacactggggacagggaaagggcctctctccggagtgcaggcgctcgtgagctcggagcgtgttgggtctcggagggccttgccacacaccgggcacaagtgggcctccccggtgtgtgagatgagatggcgccgcagttcaggcagctgggggaaggcatcggcacagtgtgggcagcggtaaggacgctccccggtgtggagccgcaaatgcccacgcaggttgccccgctgacgaaacgcccggccacagtgcgggcacaggaaaggcttttctcctgtatggagcctcatatggttccgcagggagcctggttggccaggggccgcccacacacagggcatgggcaaggggcaggggcagctggcacctggtgggtcttgcgatgcagccgcagggagggccggcgggcaaaggccttgccacactggtcacaagcaaagggccgggcacctgaatgtaccacctggtgctctttgaggtctcgctgggtgccataggccttgtcgcattgtggacaggggaagggccgcaccccacggtggcccagcatatgggctttgaagctct

SEQ ID NO: 176032 - DNA, 471 bp, Homo Sapiens
  misc_feature (22)..(22): n is a, c, g, or t
  misc_feature (29)..(29): n is a, c, g, or t
cccaatcctaaaaccgccctgnaaaaaangggcccccaggtctggcaaggcaaaaggcgcggcccctgaaaacgtggaaatggccctgctcccctcctaaggaggtgcttcccatgctctttgtaaatggcactacttggtcccaaactgaaccccactgcttgctcacatccatatcagaaggggatttttaaaaaactgttatcttcttggccaggggaaaggaccacaaggcaatctggggtgtggacagacccagtagacaatggaagccccagccagcagggccaggtgacagtgaagctcaccagtgggctcctttatggtactctatgcagttaacatgtatctagctgcatagggacacccagcgcagcagtgcaccactgggaagtggcctccagtgtcacctctggccttattttatatatttaaatttttgataaagtttttcttactaaaaggaaaaac

SEQ ID NO: 176033 - DNA, 685 bp, Homo Sapiens
gggtccttccgcctccagagctgcccagccacgggctctcagggtgctggggaagccccaggtcccctcttgaactcagctggggccaggggccctcagaatgaaggcaggcaccaggcaggagcagcatccccctccttgacggtgctggcaggagggccgcgccatgctgactgcttgaacctctgctgacctgacagtgctggcgggagggccgcaccatgctgactgcctgaatctctgctgaggctgcctgcctgccgggcccagctcagcgccctctccactgcgaatcagtggcgatcatgtgatttctatttctgccccacagggtaagggacgagtcttctggaaggctctgccatggacatttgtcctcgggctcagaggccccaccctgccccacacctgcccctaatcactgcagtgtccagcccagtgttgaacagattgtagcgttctgtctcattacgagcaaataaatagactttcattggaccccccccagggaacacaccacccccaaatcttgtgcggccgcctccggccctccaaaaaagctttctaaaccattccgtttggcgcgccggccccaataaggtaagtggaaccatggcccctaacctggtttcctaaggaaaatcctgggtcaaggaactaagggcgttggaattccccccccaat

SEQ ID NO: 176034 - DNA, 663 bp, Homo Sapiens
caatttgatggaatccttactctcatccctggattcctcccttaagcccaatttgataggactttacaaagtcttgtttgccctaagtcaagagatgatttcttcccaagaggttgatttaaattccatcattgccacagacctgaaggatctctcttctcatcaattgaatgagtttttgccacagacgctccagagggcacctcttccattggggcacataaagcgaatgcaagaggtgtacaacttcaatgccattaacaattctgaaatacgattcagatggctgcggctctgcattcaatccaagtgggaggacgcaattcctttggcgctaaagatggcaactgaacaaggaagaatgaagtttacccggcccttattcaaggatcttgctgcctttgacaaatcccatgatcaagctgtccgaacctaccaagagcacaaagcaagcatgcatcccgtgactgcaatgctggtggggaaagacttaaaagtggattaaagacctgcgtattgatgattttagagatttctcttttttaaatggaattcgtaaagaaatataaaacttcagctcacaattaaaactgtctttttagttttggctttttattgttttgttggtgattttactgaaataaagttgagctacttcttctt

SEQ ID NO: 176035 - DNA, 437 bp, Homo Sapiens
aaggatctctcttctcatcaattgaatgagtttttagcacagacgctcccagaggatggctgcggccctgcattcaatcccaagtggaagaacgcaattccctttggcgcctaaagatggcaactgaacaaggaagaatgaagtttacccggcccttattcaaggatcttgctgcctttgacaaatcccatgatcaagctgtccgaacctaccaagagcacaaagcaagcatgcatcccgtgactgcaatgctggtggggaaagacttaaaagtggattaaagacctgcgtattgatgattttagagatttctcttttttaaatggaattcgtaaagaaatataaaacttcagctcacaattaaaactgtctttttagttttggctttttattgttttgttggtgattttactgaaataaagttgagctacttctta

SEQ ID NO: 176036 - DNA, 456 bp, Homo Sapiens
  misc_feature (15)..(15): n is a, c, g, or t
  misc_feature (34)..(34): n is a, c, g, or t
  misc_feature (38)..(38): n is a, c, g, or t
  misc_feature (41)..(41): n is a, c, g, or t
  misc_feature (53)..(53): n is a, c, g, or t
agttcttgtcatccntcaaaaagccaaaaaaggntccnaanccaaaaatttanttccagtattttaatagatgtaaaaaagtgggcagaaataatacgggctttaggctaaaaaaggaaatgaggttatttcttggggaagccaatattggcgatttctgagggagcgatccttacgtgaatataaaaaattgtgacagccaccattcctcctgctaacttgatctaaatccatccccttgggaaacgcccctgaggtatctatcaggtgtagttcagccagagggagtaaacccaccgggccctcgtcctttcctagcaccaccatttaaagggatgtttgaggggtagggcagcggagcattccagacacggagttaaacccgccccaccccgctggcccacgtccagcccgatcaagaattggaggagagaggagcagggcgtggtggcgcgg

SEQ ID NO: 176037 - DNA, 1264 bp, Homo Sapiens
  misc_feature (47)..(47): n is a, c, g, or t
  misc_feature (56)..(56): n is a, c, g, or t
  misc_feature (64)..(64): n is a, c, g, or t
  misc_feature (83)..(83): n is a, c, g, or t
  misc_feature (93)..(93): n is a, c, g, or t
  misc_feature (95)..(95): n is a, c, g, or t
  misc_feature (485)..(493): n is a, c, g, or t
  misc_feature (536)..(554): n is a, c, g, or t
  misc_feature (813)..(821): n is a, c, g, or t
  misc_feature (1167)..(1167): n is a, c, g, or t
tttggctcgggcacgcttgccaagttttgccaagtgcaccgaatccntgtcaaagncaggaacntccacattccccaccatgnaaaatgggcntnagctgatcctccgcttccagaaggagctgaaggagatccagtacggaatcagagcccacgagtggatgttcccggtgtgaagctgcaggctgtgctccagatccaccgacccgtagcatctcgtcacgccagcactcgcctccctaccaatgactcacctgaagtgcaatacgaaataaaaggccagcgggcggcgtctgggtctctggcgcccccatgtggttgcgacactcccaaagccgtaagggccgacccaggcatcttggcccccagcccctcgtcgcgggttcaggtccgcccattactccttgtcgtgcggtcaaggatacaccttggccccgattccggatctctccgttctcaggccagacccctggtgctgccgttgannnnnnnnnctctgtctttgctgcaattttgaaataaaatgccaaagaaacnnnnnnnnnnnnnnnnnnnctccgaggcaattctattgtcgggtggcggaaaaagaagggtaatgaaaatggccacatggtccattaacctggtttccctgaccccacctttttcttgtgtaaaaaagtggtaagatcctgccccggtcctcccctataacgggagtccgtatttaatttccaataaacccaggggttaaccctgaccttaataggaatcccgcctggcagtaacccgggggaaattttaaaccccgccctaaagggacgcgggcacnnnnnnnnngtgtgggactcccaaaaggctacctttcgtgtggaagaatcctttttttgttttctgggcagacaaaaccgcgcctggcctttgccaaacataaaagaagactaaccggcttaaccaagcgcgggggggtttgtgatttggcccggaagccatggaagcccatccccacgcctcgttttttttcctgaaaagggcaaacactggggccttttctccgccaaacacccgtccccgcaatacgcgaacaatgaccggggcgttgcttctcataacggggcaagcccccagttatttctaacggggcccaccgccactctctctcagtgagagacttcttcgtgcgagnctccccgcgggccgctacaaagttcactctacaggctttctcgcgtctacgacacccgcgcgcctaccccaccagtggtaccccctgctcttccccc

SEQ ID NO: 176038 - DNA, 418 bp, Homo Sapiens
accctgttggggccgctcgagctggtgggcagcctcttggagcagagtgccccgtggcaggagcgcagcaccatgtccctgccccccgggctcctggggaacagctggggcgaaggagcaccggcctgggtcttgctggacgagtgtggcctacagctgggggaggacactccccacgtgtgctgggagccgcaggcccagggccgcatgtgtgcactctacgcctccctggcactgctatcaggactgagccaggagccccactagcctgtgcccgggcatggcctggcagctctccagcagggcagagtgtttgcccaccagctgctagccctaggaaggccaggagcccagtagccatgtggccagtctaccatggggcccaggagttggggaaacacaataaaggtggcatacg

SEQ ID NO: 176039 - DNA, 412 bp, Homo Sapiens; identical to SEQ ID NO: 6163

SEQ ID NO: 176040 - DNA, 655 bp, Homo Sapiens
cgcaggagtctctgcacccactcaggattgggaattgtctttagtgccggctgtggagcaaaaggcagctcacccctgggcaggcggtccccatccccaccagctcgtttttcagcacccccacccacctccacccagcccctggcacctcctctggcagactccccctcctaccacgtcctcctggcctgcattcccaccccctcctgccagcacacagcctggggtccctccctcaggggctgtaagggaaggcccaccccaactcttaccaggagctgctacaggcagagcccagcactgatagggccccgcccaccgggccccgcccaccccaggccacatccccacccatctggaagtgaaggcccagggactcctccaacagacaacggacggacggatgccgctggtgctcaggaagagctagtgccttaggtgggggaaggcaggactcacgactgagagagagaggagggggatatgaccaccctgccccatctgcaggagcctgaagatccagctcaagtgccatcctgccagtggcccccagactgtggggttgggacgcctggcctctgtgtcctagaagggaccctcctgtggtctttgtcttgatttttcttaataaacggtgctatccccgccaaaaaaa

SEQ ID NO: 176041 - DNA, 616 bp, Homo Sapiens
  misc_feature (554)..(554): n is a, c, g, or t
  misc_feature (558)..(558): n is a, c, g, or t
  misc_feature (597)..(597): n is a, c, g, or t
catttcctatgttcaccgtggcccctcctgatggggctgtcagcgcagcgttgttgaacagggctattctttttacaaggtgtgaagtgtggctcttcgcttcgtctttgccatggcattaaaagaaagttccctgtcttctttcaatattagttatttcaaatgaatatgtgctacttaaaagcttgttttgtttctttgtatataatttgccttggatttattgtgcacagtttgttgagttgtatgtttttgtgaattatcaggagtaaatttgacaagtacatgtgaataacctcctgtaaatgaattttataacaaaaatgtactgaactattttttaaagttgtgcagattagcaattttttgctatagctttgacttttctatgctgtgaattaatagctgcgatttggcaaacagccctgttgtctttgttaaaccctaaattttaagaggaaatggcagaattaaaagcagaaacaagaagatggacatggattagaggttatgtattatgaagtaaactacaaggtactaacatcatttgcgtnctgnccatttggtttgctttatgctgaaattacttggtggggnatttgtgacaattcaggat

SEQ ID NO: 176042 - DNA, 535 bp, Homo Sapiens
  misc_feature (39)..(39): n is a, c, g, or t
  misc_feature (59)..(59): n is a, c, g, or t
  misc_feature (84)..(84): n is a, c, g, or t
  misc_feature (89)..(89): n is a, c, g, or t
  misc_feature (93)..(240): n is a, c, g, or t
  misc_feature (247)..(247): n is a, c, g, or t
  misc_feature (259)..(259): n is a, c, g, or t
atcatcccctccggaaaagccttcccggtccaggccttntaaccacacctacccagggntgccgcattcctgcactcaaaagtntgcancggnnnnnnnnnnnnnnnnnnnnnnnnnnnnnnnnnnnnnnnnnnnnnnnnnnnnnnnnnnnnnnnnnnnnnnnnnnnnnnnnnnnnnnnnnnnnnnnnnnnnnnnnnnnnnnnnnnnnnnnnnnnnnnnnnnnnnnnnnnnnnnnnnnnngggcganagtgcccagggntgatatatattggaaatatcacccctgaagccatcgctggcccccacctcctgtggactgatgccccagggattcccaccccacttctgcaaccccaggtatccttcattatccaccccatcccagactcccaccccagggattgcccgtgaagactttggcctagcaaattgtgttggttatgtgagtgttgttttaatcagagatgtacatgattgccaatctgcatttcttaccagtgtgaccacactgttacgatgcaattctagccaaaaa

SEQ ID NO: 176043 - DNA, 566 bp, Homo Sapiens
  misc_feature (34)..(34): n is a, c, g, or t
  misc_feature (44)..(44): n is a, c, g, or t
  misc_feature (48)..(48): n is a, c, g, or t
  misc_feature (55)..(55): n is a, c, g, or t
  misc_feature (73)..(73): n is a, c, g, or t
gcctcaaaaagttggtctggttaagcaccagtgngtttcacctnccgngtgcacntgatgacacagcaaggancagaagacggcattgggcgtctacaaccacctcaagaagcgtcctgaaggaccactgtgtgcagcacctcccagacggctctgtgactgtggagtccgtcctcctccaggccgccgccccttctgaggacccaggcaccaaggtgctgctggtctcctggacctaccaggacgaggagctggggagcttcctcacatctctgctgaagaagggcctcccccaggcccccagctgaggccggcaactcacccagccgccacctctgccctctcccagctggacagaccctgggcctgcacttcaggactgtgggtgccctgggtgaacagaccctgcaggtcccatccctggggacagaggccttgtgtcacctgcctgcccaggcagctgtttgcagctgaagaaacaaactggtctccaggctgtcttgcctttattcctggttagggcaggtggtcctagacagcagtttccagtaaaagctgaacaaaag

SEQ ID NO: 176044 - DNA, 694 bp, Homo Sapiens
tcaccaggagggccagcaagcgcatctcaagccacatccctttgatcatccagttcttcatgctccagacgtacggccagcagcttcagaaggccatgctgcagctcctgcaggacaaggacacctacagctggctcctgaagaagcggagcgacaccagcgacaagcggaagttcctgaaggagcggcttgcacggctgacgcaggctcggcgccggcttgcccagttccccggttaaccacactctgtccagccccgtagacgtgcacgcacactgtctgcccccgttcccgggtagccactggactgacgacttgagtgctcagtagtcagactggatagtccgtctctgcttatccgttagccgtggtgatttagcaggaagctgtgagagcagtttggtttctagcatgaagacagagccccaccctcagatgcacatgagctggcgggattgaaggatgctgtcttcgtactgggaaagggattttcagccctcagaatcgctccaccttgcagctctccccttctctgtattcctagaaactgacacatgctgaacatcacagcttatttcctcatttttataatgtcccttcacaaacccagtgttttaggagcatgagtgccgtgtgtgtgcgtcctgtcggagccctgtctcctctctctgtaataaactcatttctagcagac

SEQ ID NO: 176045 - DNA, 576 bp, Homo Sapiens
  misc_feature (38)..(38): n is a, c, g, or t
acccagtaggccctcaaaaaagccattggagtatcaantccatttatgaaaagcacttggcatgcattatgcttaatacatggtcactattgtcacaaatcaccagtgccacccttgctgatttgggttcatacttggagtagaaagatatcagatatgcttagtaagtggcagaactgtatgggagaatccagtgaaatcagactttgccatttccttctctgtaaccttctgagtggtggcagtgaccacccttgtggatatagtactgagcacttgggactgagtcagctgctttcccattctagccctccctgcaggaattggctctagcttgtctgatttcccacacataaaatcatgccctcttactgactttttgttaatgttctgacaatcaatctgtagcaaggttctactgttttcagtttcatattacccctatatgcatcaaagctgcaacttcccttgcctctttgtccctaggttctgtttatttcatttaccctagcaattatggatttctattacatggaactcatctcttgatttaaattaaagtgtatgtgttgagtc

SEQ ID NO: 176046 - DNA, 1140 bp, Homo Sapiens
ggcgggcaccccgtctcggagctcatctacatccacagcaaggtgctcatcgcagatgaccggacagtcatcattggttctgcaaacatcaagtgaccggagcttgctggggaagcgggacagtgagctggccgtgctgatcgaggacacagagacggaaccatccctcatgaatggggcagagtatcaggcgggcaggtttgccttgagtctgcggaagcactgcttcggtgtgattcttggagcaaatacccggccagacttggatctccgagaccccatctgtgatgacttcttccagttgtggcaagacatggctgagagcaacgccaatatctatgagcagatcttccgctgcctgccatccaatgccacgcgttccctgcggactctccgggagtacgtggccgtggagcccttggccacggtcagtccccccttggctcggtctgagctcacccaggtccagggccacctggtccacttccccctcaagttcctagaggatgagtctttgctgcccccgctgggtagcaaggagggcatgatccccctagaagtgtggacatagttaaggcccccgtcaggaagaggtcaccagctgctgtgccccaacacgtctggctccctgccccttaaacccaaggactgagggcagtgccctttgagatctgggaaggcaggcattcctgaagggaactagaggtgtcacagaggacccttacgtgagaaatagctgaaaagggcacttcccaaccctgggctggggaggaggagagagtcccagagctcatcccccctgctgcccagtgcaaaccacttctccatgctgcaaaggagaagcacagctcctgccagggtgagcagggtcaagcctcttattccaggagaagggggctctgccccaggccctactacccattgttcccttcctcttcctgcccttgaaccccctccctgtcccagggccctcccagcccattgctgccaaggtggagggaaggataaagccacttctggcttcagcccccaccaggggaaggaaggagggcacattaactccctccaccagcctgctgacagacactaactttgtatccgttcaataagcatttcataaataaaggtgtagaaaaggtt

SEQ ID NO: 176047 - DNA, 1005 bp, Homo Sapiens
  misc_feature (132)..(345): n is a, c, g, or t
  misc_feature (383)..(392): n is a, c, g, or t
  misc_feature (406)..(544): n is a, c, g, or t
  misc_feature (993)..(993): n is a, c, g, or t
ccccccccttttccccgcggggggaaatttttttccccagggggcccaggggttgtatccccctggggggtttcggttttcaccccccgcttgggggggttcccgctcccccggaaaggtttaaaaatttannnnnnnnnnnnnnnnnnnnnnnnnnnnnnnnnnnnnnnnnnnnnnnnnnnnnnnnnnnnnnnnnnnnnnnnnnnnnnnnnnnnnnnnnnnnnnnnnnnnnnnnnnnnnnnnnnnnnnnnnnnnnnnnnnnnnnnnnnnnnnnnnnnnnnnnnnnnnnnnnnnnnnnnnnnnnnnnnnnnnnnnnnnnnnnnnnnnnnnnnnnnnnnnnnnnnngggccccggccccaaaaaaaggttttaaaaaatttttnnnnnnnnnngggggcccccaaannnnnnnnnnnnnnnnnnnnnnnnnnnnnnnnnnnnnnnnnnnnnnnnnnnnnnnnnnnnnnnnnnnnnnnnnnnnnnnnnnnnnnnnnnnnnnnnnnnnnnnnnnnnnnnnnnnnnnnnnnnnnnnnnnnnnnnnnnncttaaaaatataaatgtatttatctgcattatcacgtccctggggcacccagctggccggcccgtgggccacagggcaggaagggaacagggcgtaagtctcagcaaggcggaggagagctccgccaggtggggatgtggggcagcctcacagggccccgtgctgggcctggtatcgggacagcacggcgcggtagtgggacagctcctggcgcacggacacaacttcctgccgcagcagggcgtttctccttctccaggaaggccgcccgcaccgatatctggttctccttgagccgccgggcgtaacgggaccgcttggctgcctcgttgttcctgtaccgccggctccagtatttctcatccttctgcttccttccggcacctgggatttttctttgccttcttcatgattggctggggttaaagttccctttttgagaagcgatntttttcgagggt

SEQ ID NO: 176048 - DNA, 785 bp, Homo Sapiens
ggaagtctggaaaattcacacagcaagacatcgacgaagccaaactttcggtcttctcaaccgtagaggctcctgtcgctccttcagacaaaggaatggaccacttcttgtacggcctctcggatgagatgaagcaggcccacagagagcagctctttgctgtcagccacgacaagctcctggccgtgagcgataggtacctcggcactgggaagagcacacacggcctggccatcctcggacccgagaacccgaaaattgccaaggacccatcctggatcatccaatgagcagccgtggcgctcgactgcacaggagcccgagacaatacacctccgagctgaatatgaaaagtcagaaatgctactgctttttccaagaatattatgtcattgagtgtcgccaaagcccttgactggcgagtcaaaaactcagatctatcttaagagtgaccaggaagaggttcattgaaataatcatgcatgaagcgccaaagatgcaccatgtagaattttcactttgtactggcaggctcgttttacctcattctagaatatttaagaatctaaaaataaaggggcaacttctgactttgaaaaacggcggagcgaacggcccataaaagccttggcggccgccctcggcccccgaaaaagctttccaaaaccaattggggttggggcccgggggccccagaaggtcaagagaacggggccccttacctggttgcctaagggagaaccccggggcaataaacaaagggcttgggatttccccaccccaat

SEQ ID NO: 176049 - DNA, 439 bp, Homo Sapiens
tgccatctggggtctctttgctttgctactagacctgacattccccagtcataaggtgggaagatttcatcacctggaaccagctacatcctggatccctggatgggtgacctttactgaaaggcctatgcctatgagctagacgcttcctgcagttcccctgggggcctgggtcttcagtatcaaaaatatctccttgggccatcacagagaccccctctccttgctgctatacccctcccctgaacatttagagtaaaaggattgtgctaagatggtatctcttgtgcttaatgccactgatgatgtgggacagacaagcccaaggtgcttcaaagaggatcaaggacatgagaattggtcccccttagttgtgggacaggattcagcactgcagattaggtcggacaatatcaagtctcccaactccaagagaaat

SEQ ID NO: 176050 - DNA, 567 bp, Homo Sapiens
  misc_feature (19)..(19): n is a, c, g, or t
  misc_feature (24)..(24): n is a, c, g, or t
gcatttcctggcggttaanaggtncatatccccaaaaccaagccttattcatgattgaggactatggaaatagtgacttcttgaggaggcaccaaactttcctagaactgggtacttctcagatagtggctgctatttcctattctatttcagtgacgtaggttggggctgaatgtaaaatagacatcatattactaaatagaatcctataaaatgcaatcacaggtgcccgggagtactagttttaaacatttccttaacaaggagaacaatccagcaaaaagctttctttctctatacagtgtatatctctaaactttttttcctcagttttagagaacatctgttttatctggtggttctttgtttgaatgcaaactcataactttcaagtctccggtgcaagagcataatctacagatcatgggcaaaatctagccacagtcctgagagtccaggcttctgggatgcccagctgggtataaaagtccctactaaccctgtttcaaattcagaggtttctttggtttagaatgcctcaatgagattttgatacatccaagagag

SEQ ID NO: 176051 - DNA, 567 bp, Homo Sapiens
  misc_feature (38)..(38): n is a, c, g, or t
tgcttaatgagatagaacgtaactatgcctagggttcnggtggatattaccagttagaaggaggaagaccaccaagacatgcttcccatttttttctttacttatctctcaaaaccaatattactttgtcttttcaatcttctacttttaactaataaaataagtggattttgtattttaagatccagaaatacttaacacgtgaatattttgctaaaaaagcatatataactattttaaatatccatttatcttttgtatatctaagactcatcctgatttttactatcacacatgaataaagcctttgtatctttctttctctaatgttgtatcatactcttctaaaacttgagtggctgtcttaaaagatataaggggaaagataatattgtctgtctctatattgcttagtaagtatttccatagtcaatgatggtttaataggtaaaccaaaccctataaacctgacctcctttatggttaatactattaagcaagaatgcagtacagaattggatacagtacggatttgtccaaataaattcaataaaaaccttaaagctg

SEQ ID NO: 176052 - DNA, 549 bp, Homo Sapiens
ttatgccttaggggtttctgttgaataattagcagtttagaatggaggaagaacaacaaagacatgctttccatttttttctttacttatctctcaaaacaatattactttgtcttttcaatcttctacttttaactaataaaataagtggattttgtattttaagatccagaaatacttaacacgtgaatattttgctaaaaaagcatatataactattttaaatatccatttatcttttgtatatctaagactcatcctgatttttactatcacacatgaataaagcctttgtatctttctttctctaatgttgtatcatactcttctaaaacttgagtggctgtcttaaaagatataaggggaaagataatattgtctgtctctatattgcttagtaagtatttccatagtcaatgatggtttaataggtaaaccaaaccctataaacctgacctcctttatggttaatactattaagcaagaatgcagtacagaattggatacagtacggatttgtccaaataaattcaataaaaaccttaaatt

SEQ ID NO: 176053 - DNA, 734 bp, Homo Sapiens
ggaacctggcccggctctggtgtgtggagactggagagatcaagagagagtatggcggccaccagaaggctgttgtctgcctggccttcaatgacagtgtgctgggctagcctgtgacccctcgggactgcctggtgcaggtggtggcagctggagggacccatgcagcacccaggtcagagcagaccctcccctgccggcctgcgccagctggacctgatggccccctgtggcgccttgacctgctgggccaggctgccctgggactctcagcccccagttgcttatccagatgtgacagagctcgacccaagccaggctgcacactcctggactgggctagcctgcactgcctgggaaagtcggccgagggcccaaagctgctgaggggtctgaggctggtgcccacccccaagctagtgtgttctctgcccctccctgcccgcgtttcagggcctcggtccatagagaacaccaccaccatggccaggtggaagggtttattagtccctgccagcagctgtcctccctggtgcaggtggcctggccagcccactggattggggacgggccaggctgggccaggtcgggggctcagtctgggaggtaataaaagcagaccgacacgcagatgttgctcgggaagcagatgtcgatgcagagataaatcagccgctgtctccggggcccctctgctcgccgggcccagtagatgggggtcctcatgcacaggc

SEQ ID NO: 176054 - DNA, 621 bp, Homo Sapiens
  misc_feature (499)..(499): n is a, c, g, or t
  misc_feature (524)..(524): n is a, c, g, or t
  misc_feature (532)..(532): n is a, c, g, or t
  misc_feature (536)..(536): n is a, c, g, or t
  misc_feature (572)..(572): n is a, c, g, or t
  misc_feature (586)..(586): n is a, c, g, or t
gcacatgagaagtgtcacgtttaatgaagccagcttatcagcagggcggcggagcacacctgccccctcgcaggtgtgcctggctcgggctaaagtgcctgtgcagaacgaggctgcctggcggggttaggagtcggcgccctcgtcctcctcctcgggcaggatctccaggctgctgtcgggctgcggggctgtgtccgtggagggcggcggggtgggcggggcccgggtgggcgacagaggcagcggggaggcggtgggcgaggggctgtggggctctgcgggcggggccagccccaggatctcctgcacgttgtggggcaactcggggcaggcggttagctggcggtgcagggcctcggcgcgggtcaacacgtcctccacgctcagcttcatagtcagctcgttgatgtgcttgaggatctcattggagccgaagccggacagcatgagggtgtccctctcaatgtccaggatggcgcaggccaccagcaggtgnagattggggccagggagccctgtcnacagaacntccnacagccgaaggacatccgggaaggggaattccctcntgaaccagatgagnagcaaccggaaacagaagaagagagagccggagtc

SEQ ID NO: 176055 - DNA, 574 bp, Homo Sapiens
  misc_feature (26)..(26): n is a, c, g, or t
  misc_feature (79)..(79): n is a, c, g, or t
tttttttaacgggtttttggtaccanccaaagggattaggccaaatattggaatattcccaagggcccgggtgtttccntgtcctgccagagcatgaataaagtttcgctgggtgctcgtgactggccaagttttgtgcaagctgactgtttcagccaaaccacttgatcttccctgaaggccttcgggcctgcctgcctgcctgcctgaggtccccgctgccagtcccgggcccctggagagcagatgctgtcttgttatgtacaggaggaccttttaaaaaaatcaagtttctattttttgctggtagtccgcatacccataccctctgtttttgaaaggcaaaggccaatcagtccccatttgtagcatggcaccagggtcttaggcctagtcctctcattcctcccaccctccgagatggtcagtgtgtcatgggaagcccacccccagctctgccagtgctctctgggcctggctcccagtcagtggtggccacgatgcggtacagggcatccctccttcccatctacgggtgttctcaataaacaatgtacagttgtttgggcccaga

SEQ ID NO: 176056 - DNA, 1053 bp, Homo Sapiens
ctgcttcacgaacctctcatcaaccctatgacgctacgactcgacgcacctcgaagggggctgtttacgtggccttagagtcacgaggtatccccaacttctggccgatcatccgctccgaagttttcactgacgcgataatcacccatgttctactctttgaaacaataaatcaaggcatttgacctgcttcactatgggaaacgtatccgtaccgtcacgacgttttgaggcaatagagatgccttcccctgtagcagtcttcagcctactataccctacaagatctggcgcaaccgctaggaaatatcattaattcagctcttcagagatgttatcaataaattacacatgggggctttccaaagaaatggaaattgatgggaaattatttttcaggaaaatttaaaattcaagtgagaagtaaataaagtgttgaacatcagctggggaattgaagccaacaaaccttccttcttaaccattctactgtgtcacctttgccattgaggaaaaatattcctgtgacttcttgcatttttggtatcttcataatctttagtcatcgaatcccagtggaggggacccttttacttgccctgaacatacacatgctgggccattgtgattgaagtcttctaactctgtctcagttttcactgtcgacattttcctttttctaataaaaatgtaccaaatccctggggtaaaagctagggtaaggtaaaggatagactcacatttacaagtagtgaaggtccgagagttctaaatacaggaaatttcttaggaactcaaataaaatgccccacattttactacagtaaatggcagtgtttttatgacttttatactatttctttatggtcgatatacaattgattttttaaaataatagcagatttcttgcttcatatgacaaagcctcaattactaattgtaaaaactgaactattcccagaatcatgttcaaaaaatctgtaatttttgctgatgaaagtgcttcattgactaaacagtattagtttgtggctataaatgattatttagatg

SEQ ID NO: 176057 - DNA, 295 bp, Homo Sapiens
  misc_feature (23)..(23): n is a, c, g, or t
  misc_feature (67)..(67): n is a, c, g, or t
  misc_feature (85)..(85): n is a, c, g, or t
  misc_feature (93)..(93): n is a, c, g, or t
aaaagaaaccccaataggggttnaattctcatattcattatgagtaaggaggaaaaagagatgcccncagtgtaataaggaatgnaggcaccntgcggggtcctttacctagacattaacctgagagtccggtgttgatgtttacacttctaaaaactgtattattactgccttgatgtgaaaattcgtgggtattctaccagagtatagccagattatcatgaaaccacagaaaaatatctcccaacagtttccttaaagtccataattttgggccaggcacggtggctgatgc

SEQ ID NO: 176058 - DNA, 1379 bp, Homo Sapiens
  misc_feature (14)..(14): n is a, c, g, or t
  misc_feature (31)..(31): n is a, c, g, or t
  misc_feature (615)..(636): n is a, c, g, or t
  misc_feature (864)..(864): n is a, c, g, or t
  misc_feature (1052)..(1052): n is a, c, g, or t
  misc_feature (1170)..(1170): n is a, c, g, or t
caagtctctatcantcattttcgaaaccatncaggtgaaaacccatacatatgtggtatttgtgggaaaagttttatttccctcaggagagctcaacaaacactttcgggtcccatacaggagaaagaccatttatctgcgaattatgtggaaattcttacacagatattaaaaatttaaagaagcacaaaacaaaagtccattctggtgcagataaaactctagactccagtgcagaggatcatactttgagtgaacaggattccatacaaaaaagtcctttatcagaaactatggatgtgaagccttctgatatgactttaccattagctcttccacttgggactgaggaccatcacatgcttctgcctgtcacggatactcagtctcctacatcagatacattgttgaggtcaactgtgaatgggtattcagaaccacagttgatttttttacaacaattatactgactttgtaaggaatatggaattgctaagatatcattggtagcaaacatctctggtaaggtgcatatattcatattaaattcccattcatttgagttgtgaccattatttttcatttcactgaagtaaaaagcacctgatgctgagnnnnnnnnnnnnnnnnnnnnnncagaaacttgtcgggccgcctcggcccatcgaaaaaaacttttctaagacacttccgttttggggccgcccggggcccccagtagggttaattgggaacccctgggggccataagcttggttttccctaaagggaaaaataccttgggatgccattggcaccctaatgggggctcttgtggaatatttccctcccacaccccccattttaatagagagaaaacccccncccaccccggcgttacgaggtctcaaaaaccaccccaaaaaaaagaccggggttatgtctttgtgatagccccaccagacgtctcccccgggacaaaaaagtgggggaaagggctttacccccgtgggaggggggtgcaataacattcctcccctgtgggcggcacacaccccatcctccccacccangacggcgcggtgagtgttcccccccacacaagccttcaaaaaccctttcaccgatactatattcctatgctctctattttatctggttcttctcgcacggttctccttcttggctggncaactctattgttctcccgccccccgcgcaacagtcggtgatggtggcgtccaaatttttcccctttattaagtaaaggaaatttttctcttggcacctggatacagggtaaagggacaaagggtccctaaattatacataagacacgggggtccatgtctcacgccgaaaaacccttccatgatacatcacggccgcagcgaggcgcg

SEQ ID NO: 176059 - DNA, 1198 bp, Homo Sapiens
  misc_feature (90)..(90): n is a, c, g, or t
  misc_feature (640)..(640): n is a, c, g, or t
acaagtcggttgttcctggtcattgagtacgtcaacggcggggacctgatgttccacatgcagaggcagaggaagctccctgaggagcancgccaggttctacgcggccgagatctgcatcgccctcaacttcctgcacgagagggggatcatctacagggacctgaagctggacaacgtcctcctggatgcggacgggcacatcaagctcacagactacggcatgtgcaaggaaggcctgggccctggtgacacaacgagcactttctgcggaaccccgaattacatcgcccccgaaatcctgcggggagaggagtacgggttcagcgtggactggtgggcgctggggagtcctcatgtttgagatgattggccgggcgcttccccgtttcgacatcattcaccgacaacccggacatgaacacagaggactaccttttccaagtgatcctggagaagcccatccggatcccccggttcctgtccgtcaaagcctcccatgttttaaaaggatttttaaataaggaccccaaagagaggctcggctgccggccacagactggattttctgacatcaagtcccacgcgttcttccgcagcatagactgggacttgctggagaagaagcaggcgctccctncattccagccacagatcacagacgactacggtctggacaactttgacacacagttcaccagcgagcccgtgcagctgaccccagacgatgaggatgccataaagaggatcgaccagtcagagttcgaaggctttgagtatatcaacccattattgctgtccaccgaggagtcggtgtgaggccgcgtgcgtctctgtcgtggacacgcgtgattgaccctttaactgtatccttaaccaccgcatatgcatgccaggctgggcacggctccgagggcggccagggacagacgcttgcgccgagaccgcagagggaagcgtcagcgggcgctgctgggagcagaacagtccctcacacactgggcccgggcaggccagcttcgtgctggaggaacttgctgctgtgcctgcgtcgcggcggatccgcggggaccctgccgagggggctgtcatgcggtttccaaggtgcacattttccacggaaacagaactcgatgcactgaccctgtccgccaggaaagtgagcgtgtagcgtcctgaggaataaaatgttccgatg

SEQ ID NO: 176060 - DNA, 556 bp, Homo Sapiens
  misc_feature (89)..(89): n is a, c, g, or t
taaggtgcccccttgggctcttgcaagtcttgtcaggtagtcgcccttctggtttgttctctgtgggccagttggtggggctggggaanaggctggcagaagttaccctggatagggaagggggaggaggggacttttagagccagcaggccccactgtattatgtatatatttttcaaggtctgtttttcctaactgaaaagctaagggcttgattcctagccccgttctgtggggcactgggtgatactcagtttcttgttcctggccgtggagaggggcctggggcactggttccggctgtgtctggtggtccggctgcagggaaggggcaagaaggcgggcaggccttcactgcagcactgagcctcaaatccgctctggagcatgaggctggatgcagtggtggtgaggccgccccgctccatcccgaggcagccaggctttgttttgcgctctcctgtcacaaatgctgcactattggttcttaagttttttatctccagatcctaatttatgcctatgcaaaaaataaatgacgcccaagagctgtggg

SEQ ID NO: 176061 - DNA, 203 bp, Homo Sapiens
  misc_feature (140)..(156): n is a, c, g, or t
atctttgtgttttgaacaaaggaattttcaatatttgattggtattctgttctgaagtctaggatatttttcagcctataaagccccctgttttatgcccttctaattctgatgtttgggtattgtgtgagtgcatgtgnnnnnnnnnnnnnnnnnaaagcgtgtgtgaacaaatggaaataaagcagggacgtgtgaacatt

SEQ ID NO: 176062 - DNA, 534 bp, Homo Sapiens
  misc_feature (36)..(36): n is a, c, g, or t
  misc_feature (112)..(112): n is a, c, g, or t
  misc_feature (502)..(502): n is a, c, g, or t
  misc_feature (507)..(507): n is a, c, g, or t
  misc_feature (522)..(522): n is a, c, g, or t
tccagtgaattcacccattttttcttcttcagaagncctttcctgggtgagacccacatatttaaccttttggttcctatcccatttttaaagaattagagaataacccagncctgtttcttttcccctgaaatccctgcctctggcttcctaaacccatcatctaaggtgacagagcagtgctggaatagcatctcctttcactttcccaaaactgccacagatagctgccactggcatgctctttgattcctgggaagcaaacgtgggactgtcggaggaaagggattgttctggtcttactcataactgggtggtttgagggtgactgaagtcgtgcttttcctgtgtgtgctgccagcaaagggctgttaaatgcagatattgcgcctgtgtgcgtgtgtataagtcaagctccaagaggctcctggaatgtgactggcgtgctgaggaatgtgtttacgctgtttaatgtcttgccagggtgaggggtttacactgnaaggnggcacatccctaaantaaaggtccacc

SEQ ID NO: 176063 - DNA, 528 bp, Homo Sapiens
  misc_feature (33)..(33): n is a, c, g, or t
tccctatgtggtgaagccaagttgaaagatgtnagccagtagagcgattgatagactgctacccagcattgaagagatgctctctagatgtcctgggctggcattctagcttctgacatgccagtcaaacccatagattcacacgcctgaagggaccatcagtggtaagatttatcctcctgacttcagacaaagccacatccaagccatctcaggcatttaaggatctatcctatttttgaagtctccaaaaaggatcccttggtctctcagtttaatgtcataaactctgtaagtcaggaaatttaactttagagcaagctcagattctttctatggttcaaagaccattttctttggcaatcatcctctctctgagtacccttcatgtatttgaaaaccaatactaaattggctttcagctgtctcttctccccaggtggaataatttcagttctagtcacttgaattcagaagaaaaagcatgctagcaaaattcaaatcaagtaaatataagccttttttagg

SEQ ID NO: 176064 - DNA, 534 bp, Homo Sapiens
ctggagaaaaacccctccaagtgtgagataatcgggtttacctgccgccaaaagctttccctgaactggcaccagcgcaagcatgcaaaagacggtggctgccttgcgcttcccctgtgaattctgcggcaagcgctttgagaagccagacagtgttgcagcccaccgtagcaaaagtcacccagccctgcttctagcccctcaagagtcacccagtggtcccctagagccctgtcccagcatctctgcccctgggcctctgggatccagcgaggggtccaggccctctgcatctcctcaggctccaaccctgcttcctcagcaatgagctctcctccagctttggctttgggaagccagactccagggactgaaaaggagcaacaaggagagggtctgcttgagaaatgccagatgcttggtccccaggaactaaggcgacagagtgcagggtgggggcaagactgggctgtaggggagctggactactttagtcttcctaaaggacaaaataaacagtattttatgcaggca

SEQ ID NO: 176065 - DNA, 897 bp, Homo Sapiens; identical to SEQ ID NO: 4192
  misc_feature (289)..(304): n is a, c, g, or t
  misc_feature (714)..(725): n is a, c, g, or t
  misc_feature (819)..(819): n is a, c, g, or t

SEQ ID NO: 176066 - DNA, 578 bp, Homo Sapiens
  misc_feature (450)..(450): n is a, c, g, or t
  misc_feature (557)..(557): n is a, c, g, or t
ggtcatctgagcttgagttaatcggcagcactcggctttctaacctttgaggcatttctaaatctgatcccacacactcattctttcagagcccagcaaggtaagatgaactgattacaccatacttagaaacatcctgtagaatcaaagaaaaatgcttcctgcctttgtacagaaaattaagagatgtttcaaagtgaagaaaagcaatttaattaccattaaacaaggtttaactgctgtgggcaatcattctctgcttgagaagcataatttcacttgaaagaaaccagattggcccccggccctcttttggcttatcctcagcaagaagcgactgggaacaactgactcttgggtgagctgtccagatagttagaaacatatcacacagcagtttaagggaccccaggggggggcagggaaaccccagaatcaggccactcctgnaccttgctcctggctgctgctcggaagggccccccacagcagaaacattgtgatgcctcctttcttctttgggccttttacagaagggcaaccttgggtctttatgntccaaatgtggcatgggacat

SEQ ID NO: 176067 - DNA, 206 bp, Homo Sapiens
ggaggaaggagaaggaggaggggtctggtgagggcaccacgataagtcctgtaaacttggcacctttcccggaggcagagttttgggccattctcacctctgttccaggcaccatccgtagtggttctctgtctgtagcttccgctcgtctgtgtgggtgatgattaaagcattctcatgcagcaaggtgtctgtttttaaagtat

SEQ ID NO: 176068 - DNA, 515 bp, Homo Sapiens
gggagtaagccctgtgactccttccagcgattacagagcctagcccagcactcctggatggccctcagagtgtctggtgagagaataagttgcagttccacaggcatggactttgaagggactagaggccacactcagttaataatggggcacagatgtgttcccacccaacaaatgtgataagtgatcgtgcagccagagccagccttccttcagtcaaggtttccaggcagagcaaataccctagagattctctgtaatattggtaatttggatgaaggaagctagaagaattacagggatgtttttaatcccactatggactcagtctcctggaaaaggatctgtccactcctggtcattggtggatgttaaacccatattcctttcaactgctgcctgctagggaaaactgctcctcattatcatcactattattgctcaccactgtatcccctctaccgggcaagtgcttgtcaagttctagttgttcaataaatttgttaataatgctg

SEQ ID NO: 176069 - DNA, 542 bp, Homo Sapiens
  misc_feature (52)..(52): n is a, c, g, or t
  misc_feature (55)..(55): n is a, c, g, or t
ttgatttccaaccaagcttccagtaaagagcttgaagaagttaaggcccgcnttnactcgtgcctttgaagtattctgaaccagaaggtggaagagcgtttcaataagagtggtgatccaagctgcgtgattatgcagaactgggctaggattgaggctcgactgtgcaataacatgcagaaagctcgggaactctgggatagcatcatgaccagaggaaatgccaagtacgccaacatgtggctagagtattacaacctggaaagagctcatggtgacacccagcactgccggaaggctctgcaccgggccgtccagtgcaccagtgactacccagagcacgtctgcgaagtgttactcaccatggagaggacagaaggttctttagaagattgggatatagctgttcagaaaactgaaacccgattagctcgtgtcaatgagcagagaatgaaggctgcagagaaggaagcagcccttgtgcagcaagaagaagaaaaggctgaacaacggaaaagagctcgggctgagaagaaagcgtt

SEQ ID NO: 176070 - DNA, 748 bp, Homo Sapiens
  misc_feature (519)..(539): n is a, c, g, or t
  misc_feature (548)..(586): n is a, c, g, or t
  misc_feature (633)..(705): n is a, c, g, or t
gatggccagctccatcttagaaggaaattcgaggtccccatccccatcctccagcttctggtactctcctaagacagaagcaggctgaaggtaaggcctttgagcccacaaagccttatcaagtgtcttccatcatggattcattacagcttaatcaaaataacgccccagataccagcccctgtatggcactggcattgtccctgtgcctaacaccagcgtttgaggggctggccttcctgccctacagaggtctctgccggctctttccttgctcaaccatggctgaaggaaaccagtgcaacagcactggctctctccaggatccagaaggggtttggtctgggacttccttgctctccctcttctcaagtgccttaatagtagggtaagttgttaagagtgggggagagcaggctggcagctctccagtcaggaggcatagtttttactgaacaatcaaagcacttggactcttgctctttctactctgaactaataaatctgttgccaagctgnnnnnnnnnnnnnnnnnnnnnctcgaggcnnnnnnnnnnnnnnnnnnnnnnnnnnnnnnnnnnnnnnncatggtcatagctgtttcctgacccagctttcttgtacaaagtggtnnnnnnnnnnnnnnnnnnnnnnnnnnnnnnnnnnnnnnnnnnnnnnnnnnnnnnnnnnnnnnnnnnnnnnnnntgcagtacccgggaaatttaaccccgcctaaatgagccgggcc

SEQ ID NO: 176071 - DNA, 624 bp, Homo Sapiens
agtatctgtatctctctctctttttggaggtgcttaagcagaagcattaacttctctggaaaggggggagctggggaaactcaaacttttcccctgtcctgatggtcagctcccttctctgtagggaactctggggtcccccatccccatcctccagcttctggtactctcctagagacagaagcaggctggaggtaaggcctttgagcccacaaagccttatcaagtgtcttccatcatggattcattacagcttaatcaaaataacgccccagataccagcccctgtatggcactggcattgtccctgtgcctaacaccagcgtttgaggggctggccttcctgccctacagaggtctctgccggctctttccttgctcaaccatggctgaaggaaaccagtgcaacagcactggctctctccaggatccagaaggggtttggtctgggacttccttgctctccctcttctcaagtgccttaatagtagggtaagttgttaagagtgggggagagcaggctggcagctctccagtcaggaggcatagtttttactgaacaatcaaagcacttggactcttgctctttctactctgaactaataaatctgttgccaagctggg

SEQ ID NO: 176072 - DNA, 557 bp, Homo Sapiens
  misc_feature (11)..(11): n is a, c, g, or t
  misc_feature (22)..(22): n is a, c, g, or t
  misc_feature (37)..(37): n is a, c, g, or t
tctaaaaaaanctgtccaacanttggcccccagaggnccagattccccagaaactaccttttgcccaaagacatgtcagtatttggggcatttcctcccacaaaccctgactgcttctgttacctcagggccttggtacctggatactgccacagaattggggcgggtgggggaggggcctatttttaaataaaataactgttcaaagttgggggttttttaaaaaattaagaaaaaggaaagctattctgtattgcaccttttcacaatttaatacattttcttacattttcctgtgattttcgaaactaaaccattgtgtgtcctgtagtgtcctggttgagctgccgctcagcagcttcctcggggggatttggaacacctgtgtctgtcgccgcactgcctgtgggaggggcccagagggctgctgggactggcgtctgtacacacttgtttggccttttctgtagttgatgctgtaaactctatggctttttaaaaacgatttcatgtttttatttagtattggaaatccaatacacttttttaatccaatc

SEQ ID NO: 176073 - DNA, 501 bp, Homo Sapiens
  misc_feature (23)..(23): n is a, c, g, or t
  misc_feature (36)..(36): n is a, c, g, or t
  misc_feature (38)..(38): n is a, c, g, or t
  misc_feature (57)..(57): n is a, c, g, or t
gggccacacagaactcttttggnccctttttctccntntggatcaaagtaggcaggnccatgggaccaggtcttgaagttgagcctttcacctgtactcttccgaaaaatcctcttcctctgaggctggatcctagccttatcctctgatctccatggcttcctcctccctcctgccgactcctgggttgagctgttgcctcagtcccccaacagatgcttttctgtctctgcctccctcaccctgagccccttcccttgctctgcacccccatatggtcatagcccagatcagctcctaacccttatcacccagctgcctcttctgtgggtgacccaggtccttgtttgctgttgatttctttccagaggggttgagcagggatcctggtttcaatgacggttggaaatagaaatttccagagaagagagtattgggtagatattttttctgaatacaaagtgatgtgtttaaatactgcaattaaagtgatactgaaac

SEQ ID NO: 176074 - DNA, 615 bp, Homo Sapiens
  misc_feature (76)..(76): n is a, c, g, or t
  misc_feature (589)..(589): n is a, c, g, or t
caccccccgaaccaaggcttctttcaagcctccccaccaagtgaaggataccagtccaattctcagctgacctgantaagccaaccatgaactcttcactccttggggaagccacctcccatcacacccctgagcagagttagggagaattctacttcccataaaaggacctctcctgagaggcaaaacctgttgcctccaccacggcttccctcttggctcattccaagcttggccaaattggggaagtgggatggaggttgccctgcatcccccctcctctgcctgagtgtgtctttgtaatgtcagctggcatcatacaaagagcaggagaagcaaacacccagaactcttttgctggtcagagattccctgagtgtctgtcctcacccaagcctgctctgtgtctgtgttgtgaagcttgagactctggaaagaaatggggagggggggcaggggaaatgttgccctaagaatgcttctcattcctctgttcttattgggtcctgtttttcgggagggtgggggttgggggaagcttgaccttgtgtcttcgtcaataaactcacatttacaccaaacaccatcntataaccaaaaaaacaattcttgtcg

SEQ ID NO: 176075 - DNA, 569 bp, Homo Sapiens
ccagtcttgggtctgaagtgaccaagatcattaacccagtcattctaataaaccagatacttataaattaaaaatataagtgaatcccctaggtgacagaataggacttgagtacggtaaagattctaacacttgataacatttggagcccctgaaatcattgggaggccgaacatccaaaaggaagaaaactgaggaagaaagtgaacatgaagtaagctgcccccaagcttcttttgataaagaaaatgctttcccttttccaatggataatcagttttccatgaatggagactgtgtgatggataaacctctggatctgtctgatcgattttcagctattcagcgtcaagagaaaagccaaggaagtgagacttctaaaaacaaatttaggcaagtgactctttatgaggctttgaagaccattccaaagggcttttcctcaagccgtaaggcctcagatggcaactgcacgttgcccaaagattccccaggggagccctgttcacaggaatgcatcatccttcagcccttgaataaatgctctccagacaataaaccatcattac

SEQ ID NO: 176076 - DNA, 260 bp, Homo Sapiens
ggggcatcagccggggattgccggcgccaggtgctgggggcgactcggacagcgggagcgtggggtggagtaggatggagtctccctcccgagctgggggtgtgggcctaggaagtgtggcttgctagtctgttacgttaacatgcttttctaaaattgcttcacgtgttaattcatttactcctgcattcattgactgtttttgttcttttccattcactttgtacttatttttttcattaaattttgcatttattttg

SEQ ID NO: 176077 - DNA, 844 bp, Homo Sapiens
  misc_feature (126)..(135): n is a, c, g, or t
ggggggaggaaatttgcattaaaaatcccccgccccggccacaccggaaaaatttcaagccaaaaccattgggggccaggcccaggggcccccccctggctgcttgggggccccccggaatcaaannnnnnnnnnccccgctgggtctccccaaaataaccccccgctgggcccaagttcccccggaccaagtttcttgggggatgcaggagctcccgggaagctggtcccttgaaggggctcaagggattcagcctggtggggggccagacggagggccctcatggagcagtgtgtgcatgcctgccagcagggccaccccaagctgctcttccggcaggtgggcgctgaccccaagacgctgcacagcctctcggcagtcctccccccgcaggctgctgaccacaaacttcagcaactttctgaacgtgctcctgtctaggtcccctagtagccgggccattgctgccacctctggaggaagctgggcccccaagaaactcactcgggccacggtgactatcaccaggaggatgcaggtatggagttgcagcccccacagcagacattgatgcggcgtcctctttgatcagccagcccaggaggtcggtcccagatgcagatgccggcgggcgctcctccgcggaaaagccccgcagtatccagagctctccgaacacagcggcgaagcagcctttcctaggcccacacccccagctcgggagggagactccatcctactccaccccacgctcccgctgtccgagtcgcccccagcacctggcgccggcaatccccggctgatgcagccaaaagcgggcctggtccccggaagcgccctgag

SEQ ID NO: 176078 - DNA, 1621 bp, Homo Sapiens
gccggcgccaggtgctgggggcgactcggacagcgggagcgtggggtggagtaggatggagtctccctcccgagctgggggtgtgggcctaggaaaggctgcttcgccgctgtgttcggagagctctggatactgcggggcttttccgcggaggagcgcccgccggtaggttggccccgaaccgtgggggcggcgacggccgagtgccaatttgactctgtgcaccaaggtccccgcgccccggaacgggcgacgccgcgcccccatcagagccgcgggcatctgcatctgggaccgacctcctgggctggctgatcaaagaggaagcagcagcaatgtctgctgtgggggctgcaactccatacctgcatcatcctggtgatagtcacagtggccgagtgagtttcttgggggcccagcttcctccagaggtggcagcaatggcccggctactaggggacctagacaggagcacgttcagaaagttgctgaagtttgtggtcagcagcctgcagggggaggactgccgagaggctgtgcagcgtcttggggtcagcgccaacctgccggaggagcagctgggtgccctgctggcaggcatgcacacactgctccagcaggccctccgtctgccccccaccagcctgaagcctgacaccttcagggaccagctccaggagctctgcatcccccaagacctggtcggggacttggccagcgtggtatttgggagccagcggcccctccttgattctgtggcccagcagcagggggcctggctgccgcatgttgctgactttcggtggcgggtggatgtagcaatctccaccagtgccctggctcgctccctgcagccgagcgtcctgatgcagctgaagctttcagatgggtcagcataccggctttgaggtcccccacagcccaagttccagggagctgcgggtacagcgtggccctggtcctaaaggagatggcagatctggagaagaggtgtgagcgcagactgcaggactgacccctcacttgaccagtcccattcagatccggcttggacaggcaactgagatggtgccaaagtgcagctgactcttcccacgacagccctgcccttcccatgaagcaggctcttcagtgagtgtttgaacgtaattatgcacctttctgtttacttgaaaaaaacagctatgccttttttttcatcttggaaagaacgcatgctcaaagcagccatacacaaaacccgactccgagggcatccaatgaccgactccctgacaacaacaacatagcgacagtgcacccgctacatcattccgctacatatgacccagactcactaccacacaaccccggccctaccgaacacgccgactagaaaactacaccataacaacctaaccataatctccaccccaatacagacccacggcacaaaacagataaacctacggtcgaatcaaatccactggtcaggacctcctatacttccaccattccttacgtacaccaccagcgtcaaagcctatatggagacattgagaagacaatcaaccgagtgacgctggccacatcgacaactcgttacagaccgtgctcgagacaacacgataaactgtgcaac

SEQ ID NO: 176079 - DNA, 576 bp, Homo Sapiens
  misc_feature (14)..(14): n is a, c, g, or t
  misc_feature (21)..(21): n is a, c, g, or t
  misc_feature (55)..(55): n is a, c, g, or t
ccacttcctgttgncccttgncctgcccgggaaaggtggcaacggccaccgggantgaccttccagtgacccgcgatcccgcgccacgagggacacttatggcttcattcgagagctgctgccaaaacgcctggcgccgccaccgtcgggggctggcttcgaggacgcccgcctgcctcgcgggtcgtgtccgcgggactgtgttcgtacgtgcatagtttcgatatcacatcgcggggctgtgttcgtagctgcgtcgtttcgatatcacaccctctgtgtgccgccttacttcctgcttcgagaatgtataacgtggaaatccacgggaccaaatttctgcagaggccttgccggatggttccataactgtagagtctaattgctatccattacagaaattaatcgttcagttgaaagaagtactgatgacttttcaaaacaaatgaaccaccgtagctgacagagaaccgtatcgtagaggtttgtagttagtgcttatttttgcatgttgatgttgactagctaataaactgtaaatgtaaaccatgcgaataaaatggttttctatttctc

SEQ ID NO: 176080 - DNA, 581 bp, Homo Sapiens
  misc_feature (41)..(41): n is a, c, g, or t
  misc_feature (46)..(47): n is a, c, g, or t
  misc_feature (70)..(70): n is a, c, g, or t
ccagtaatggccagcaacccctgtagtaaaggcccaaaggncggcnnagttcggggtcggcttctacccntgggcatcgtggaaagtggaaaaccagggcactgcgactttgtgaagctgaggacaatgctggtacggtaccccacatgcaggacctgaaggatgtgacacgggagacacattatgagaactaccgggcacagtgcatccagagcatgacccgcctggtggtgaaggaacggaatcgcaacaaactgactcgggaaagtggtaccgacttccccatccctgctgtcccaccagggacagatccagaaactgagaagcttatccgagagaaagatgaggagctgcggcggatgcaggagatgctacacaaaatacaaaaacagatgaaggagaactattaactggctttcagccctggatatttaaatctcctcctcttcttcctgtccatgccggcccctcccagcaccagctctgctcaggccccttcagctactgccacttcgccttacatccctgctgactgcccagagactcagaggaaataaagtttaataaatctgtaggtggct

SEQ ID NO: 176081 - DNA, 883 bp, Homo Sapiens
aaagaccgagttcattgaagcagagatgggaggtggtgaggcgtcctcacctccccccaccacagctgtggctggtaaggcaactgcttgaccactggcccagcaagcagaggcgggcaggaggatctgggcatcctgagccccttccctgaggctgtctcctgggaatgctggaccagggggattacttcccccacccacacccccatttggacatctggggaagtggagattaacccctcccccagactcgtgccttgcctctcaggacctggcacagtggctggccttatggagtatggaaaaggcctctgccttcctcaggaaggacacatagtgggtcatcaccctttctcacacctgcttcccaatgagcactcagcagcatggctaagacctggggcttgacaggcctgcgctccttagattaggatgctctggtattcctggggccagttaaaatgggtcagtgaggggctctcctggcctcaatctccatctttagggtctccacagactaacattgaagtcttccagaaacctcgaggagctgggctagatacttcgagagtagccctgtcttgtcccctcctacccccagattagcaccacccctctcactcttgggttggatgctatgggaattacaacccatcactcccaatgcctccctttcctggaggagcctgctgcattctcctgctgagggatcccagaagagggcaggtgccccaccccacaggccccttcctggaccatggagccaggggaaacctgtctggccccttaaccaattgggttcttaactccttcacaacggtcagcactcctctcccagcccccctgcccactgttctcaataaaaatgtgaatggttgaaagg

SEQ ID NO: 176082 - DNA, 563 bp, Homo Sapiens
ctgcaccattcaaattatgtgtcagctgaggattacaggctcattttcaacacctacccagagaacattattataatataatcttgagacaaaaaagaagggggagagagggattaagcaataaacgataaagcctattaagaattaattgatctagattttatatctccttgaatttgtaactttgtcatgatgcaggccaatggtagggactgtttaaaacctctgtgtttatcagaccctttcttcgtccctctccaagttacatgttcctggttgacgtctggaccacattccaatagcaagagggaatcattctaaaacatcattcatactgctgtgtagatgagtctgattcgtgccgcggaaaagcattttctgtattcttggagacttagagtaaagtttgagaaggcctcagtccgaaagatccagaattccaattaaaataggaggttctaaccaattataggctatggcccaatacgccacatgaaggaccttatttactctgggctcaaccaattattctttttcaaaggccaaacagcacttttcatgac

SEQ ID NO: 176083 - DNA, 1169 bp, Homo Sapiens
  misc_feature (81)..(81): n is a, c, g, or t
  misc_feature (103)..(103): n is a, c, g, or t
gaaggaccatttttaattagctctttgatacaaagtaactcagaacgtcaaaacctatacccactaaagggaaggctgccnggaagcaaatggaacaggaatngagcctgtctcaggaaggccagctgcaggtcctccagaaaatcaaagaagggaagaaactctgagtttgaggtacaggggcttcggggtgcagacgtccctccagggcccatggtcagtattgcacctgtgttatgaacccccagatgctgtgcagggcaggggcgggggctgctgttttattggggaggggagcatccctaaaaatggggtccaggcagacccctccagacctcacactgccgaggaggcctttcccaaagggcgtcctcccgggatgcagacggcaggtgtgtgggaagcgccgtttaaatacacagcacgacgtatccttgtaccgacttctcccggttcttgtttgaaaatactgtagttcaggctcttgatctagatggcagataggaactttcttgtcacaaaaatactggaggaaaatgttgtaaaaatagacttttggacacacagctgttggggctgcactgagctgcaatttttaacatggatttataacttaatgtttctgtttataaaatactaatgatttgcaatgtattttactggccaattaaaacagatgttttattccgagatggtacagtggacaaaaaaaatagacatgtcgcgtcgccctcggccctccaaaacgcttttctaaaacaattccttttggcgcccgcgtccccattaggccaacggcacattggcccataagctgtgttccctaaagaaaaatcctggcccatggaattaagcggtttgggatctccccccttataaacaaaccgccccgccggccaaacccgagcgctccctgaacctaatccccaaaaggggagcttcctggagggccattcaacgtggaatctatatccaccgggacaccccaaacccgcaggtttcgcaaacataagatttacccaccgccgtgcctttggccaccttcattccgcgaggaaagtgtttggtccaatttcccttacaggccctctcttggacctgaacctggtgaaagcccactctcaaaataagcgggacttgctaggcaacacaccgtcaaaatccttgac

SEQ ID NO: 176084 - DNA, 563 bp, Homo Sapiens
tgggaaaaccaaggtcctgtaaggtaagcctactacttttctaaagacggggcccaggccaaatccaagaagactcaaggtggcctttccccttatccccagaaacccagttcctcaaaggacagtgaggacaccagcaaagagcccagcctttctacccagacgttacctgtgatcaagtgctctgggcagacttcaagactttctgcttcctccactttccagtcaatcagtgactccctcctggctgtgagcccataactggcctctctccaaaagcctctgcccaggagcatgggcatcagctacctcacgggaaccagcctgctgttcagaccagtctgaccccctacccctttcaccctgtccctcctcagagtattttttgaagtggttgcattatagagatgggtatttgtagggccggagggatggtagtgatggggagaaggtgaggaagggtcaccctctgtcacctgtctgcctggctggcacctcatatctcagcagagaagccagtggtggccacgcagccttataaagcaggttttggtttctacctt

SEQ ID NO: 176085 - DNA, 231 bp, Homo Sapiens
ttttttgcattcctgataattgtatgtattgtataaagaacgtctgtacattgggttataacactagtatatttaaacttacaggcttatttgtaatgtaaaccaccattttaatgtactgtaattaacatggttataatacgtacaatccttccctcatcccatcacacaactttttttgtgtgtgataaactgattttggtttgcaataaaaccttgaaaaatatttac

SEQ ID NO: 176086 - DNA, 430 bp, Homo Sapiens
  misc_feature (151)..(151): n is a, c, g, or t
  misc_feature (173)..(173): n is a, c, g, or t
  misc_feature (243)..(243): n is a, c, g, or t
gcctaccctcctacccaggagcaaattcctccctgccctaagccccccccaagtagctggaacctaccaggcctcatgcccactgcgccccagcctaaattttgtaatttcccgtagagaacggggtttcacccacattcgtcaggttggngtcaaactcctgactttgtgancccacccgcctcggcctccccaaagtgcctgggattaccaggcatgagcccatcacaccctggtcaactntcttttgattagtgtttttgtggtatatctttttccatcatgttactttaaatatatctatattattgtatttaaaatgtgtttcttacagactgcatgtagttgggtataatttttatccagtctaaaaatatctgtcttttaattggtgtttagacaatttatatttaataaaattgttgaattt

SEQ ID NO: 176087 - DNA, 529 bp, Homo Sapiens
gggggctgtgtaaacacagtcaaaataattctaaatccctcgatatttttaaagatctgtaagtaacttcacattaaaaaatgaaatattttttaatttaaagcttactctgtccatttatccacaggaaagtgttatttttaaaggaaggttcatgtagagaaaagcacacttgtaggataagtgaaatggatactacatctttaaacagtatttcattgcctgtgtatggaaaaaccatttgaagtgtacctgtgtacataactctgtaaaaacactgaaaaattatactaacttatttatgttaaaagattttttttaatctagacaatatacaagccaaagtggcatgttttgtgcatttgtaaatgctgtgttgggtagaataggttttcccctcttttgttaaataatatggctatgcttaaaaggttgcatactgagccaagtataattttttgtaatgtgtgaaaaagatgccaattattgttacacattaagtaaatcaataaagaaaacttccatagct

SEQ ID NO: 176088 - DNA, 533 bp, Homo Sapiens
  misc_feature (32)..(32): n is a, c, g, or t
  misc_feature (82)..(82): n is a, c, g, or t
cagagttagtgaaaggtgacttcccagtttcntggtggtctggcctcggccctgctggatccacctcctagacccggggccntcaaggctcatggggtagtacccagcctgctccccgagtccagcgaccctgtgacaccggtctgcagggagttggggactaagggcttccagagagtggctggaagagactccaggcccctggggagactgtactgttcctgaacactggccttggccacactgggattcggagaggaaggaggagagccccatgcttcctgtctgcctcctccaccatccctgacctcagttgagctgcctctggccttgttgctgctgccacatcctaggtctaagagttgaacgcctctcctaggccactacaaactgacccctcagcagggctggctgccacagggctgccctgcctcataggtagccatggtgagggctatctgctgcaggggggtcttggggagagtggtgactccattgacccagcttttcattaaaggataacacactgaaaa

SEQ ID NO: 176089 - DNA, 1363 bp, Homo Sapiens
  misc_feature (454)..(559): n is a, c, g, or t
  misc_feature (566)..(573): n is a, c, g, or t
  misc_feature (575)..(576): n is a, c, g, or t
  misc_feature (578)..(578): n is a, c, g, or t
  misc_feature (580)..(580): n is a, c, g, or t
  misc_feature (584)..(584): n is a, c, g, or t
  misc_feature (588)..(589): n is a, c, g, or t
  misc_feature (596)..(597): n is a, c, g, or t
  misc_feature (599)..(600): n is a, c, g, or t
  misc_feature (602)..(602): n is a, c, g, or t
  misc_feature (604)..(604): n is a, c, g, or t
  misc_feature (606)..(608): n is a, c, g, or t
  misc_feature (613)..(643): n is a, c, g, or t
  misc_feature (648)..(652): n is a, c, g, or t
  misc_feature (658)..(666): n is a, c, g, or t
  misc_feature (669)..(685): n is a, c, g, or t
  misc_feature (701)..(701): n is a, c, g, or t
  misc_feature (703)..(713): n is a, c, g, or t
  misc_feature (737)..(737): n is a, c, g, or t
  misc_feature (739)..(739): n is a, c, g, or t
  misc_feature (751)..(751): n is a, c, g, or t
  misc_feature (756)..(781): n is a, c, g, or t
  misc_feature (785)..(785): n is a, c, g, or t
  misc_feature (1065)..(1065): n is a, c, g, or t
aatatgttttgatcacagaacttctagaataacccagatgctctttcatattcttttaatacatcttgatcacagctaggggaaaaaaagctttttaattctataccttcctagtagataagtgaagagcagggaaagagacctttaaatattttgctataaaaaaatttgtgataagtttctatcaaaatggggagattgcagaaaaggcttcccttggctcccaaggaggtgtagcaggtgtgagcaatattagtgccatgtgcctttcacacagggtttgcatttatcagtctgttttccgatgatgtgtacatgaaagagtacaccatgtgaagagaagagagaatgattgaaaatgttttagtatagaactcttcttgcagtgggttgctattttctagattttactttttagggaacaaaataaaatcctttgttaaaactggaaaannnnnnnnnnnnnnnnnnnnnnnnnnnnnnnnnnnnnnnnnnnnnnnnnnnnnnnnnnnnnnnnnnnnnnnnnnnnnnnnnnnnnnnnnnnnnnnnnnnnnnnnnnaagaaannnnnnnnannananaganaaannaaaaaannannananannnggggnnnnnnnnnnnnnnnnnnnnnnnnnnnnnnnaaggnnnnnggaaannnnnnnnnaannnnnnnnnnnnnnnnngaagaaaaagcggagngnnnnnnnnnnnagcgggggcccagagggggaagangnaaaggaggcgangtacnnnnnnnnnnnnnnnnnnnnnnnnnnaaanccgcaacccggaagcccccgcaaaatttagatattttatcctccccccgaaaactaaagccccccgccgccggcggcgaggcaaacgcgggcgggggatattttctcagataaagaaatttcatttgtagtgggccggggatttgtgggggcgcgcccctctctccgggaagaagcgctgttttccaaatacaaccgcgctgtgaaagctgaacccctccggaggcaatactacaaaaaatggtctttctcccccgccccacgggggggtaatcaccttntttcgtcgcattagtggtggtgtaaacaccaccgggtgagagaaaacaaaaggtgcgcccccctaaaattgggccccccctcttatgaacacactccgttatgtgtgcgtgacaacacgtctaccccacgagagccttccccccggcggcacgcgagactcgcgatcttagaaaaataataatctctccctctatgggcaacaaatatctgggggggaataaaccaaccgtgagtgactcttctcccgaccgcggggtgtatattattatgtggggggaaagagcgctgcccgccacc

SEQ ID NO: 176090 - DNA, 504 bp, Homo Sapiens
  misc_feature (27)..(27): n is a, c, g, or t
  misc_feature (33)..(33): n is a, c, g, or t
  misc_feature (37)..(37): n is a, c, g, or t
  misc_feature (41)..(41): n is a, c, g, or t
  misc_feature (45)..(45): n is a, c, g, or t
  misc_feature (72)..(72): n is a, c, g, or t
  misc_feature (75)..(75): n is a, c, g, or t
tagtagaatatggacctggaaaatttntcttanccantacngtangtaatatttacataaagattgtgctanaancagataagcctttttacccttccaagacttgaagctgcacaggtgacaagcgtcacttctcctgctgctcctgtttgtctgatgtggcaaaaggccctctggagggctggtggcccacgaggttaaagaagctgcatgttaagtgcccattactactgtacacggaccatcgcctctgtctcctccgtgtctcgcgcgactgagaaccgtgacatcagcgtagtgttttgacctttctaggttcaaaagaagttgtagtgttatcaggcatcccataccttgtttttaatctcctgtttgttgagtgcactgactgtgaaacctttaccttttttgttgttgttggcaagctgcaggtttgtaatgcaaaaggctgattactgaaatttaagaaaaaggttcttttttcaataaatggtttattttagg

SEQ ID NO: 176091 - DNA, 956 bp, Homo Sapiens
  misc_feature (135)..(191): n is a, c, g, or t
  misc_feature (292)..(506): n is a, c, g, or t
ctagaaggtctggaggacgtagagttattgaaaatgcagatggttctgaggaggaaacggacactcgagacgcagacttcaatggaaccaaggccagtgaataagcaactttctacagttttgcaccacggcaannnnnnnnnnnnnnnnnnnnnnnnnnnnnnnnnnnnnnnnnnnnnnnnnnnnnnnnngcaaaacccagcagactgtacttagcattgtctaaatccattctcaaattccaaatatcacagacacccctcacacaaggaatataaaaaccaccaccctnnnnnnnnnnnnnnnnnnnnnnnnnnnnnnnnnnnnnnnnnnnnnnnnnnnnnnnnnnnnnnnnnnnnnnnnnnnnnnnnnnnnnnnnnnnnnnnnnnnnnnnnnnnnnnnnnnnnnnnnnnnnnnnnnnnnnnnnnnnnnnnnnnnnnnnnnnnnnnnnnnnnnnnnnnnnnnnnnnnnnnnnnnnnnnnnnnnnnnnnnnnnnnnnnnnnnnncctactacccctgtattcaaggtaaaaattgaagtttgtatgatgtaagagatgagaaaaacccaacaggaaacacagacacatcctccagttctatcaatggattgtgcagacactgagtttttagaaaaacatatccacggtaaccggtccctggcaattctgtttacatgaaatggggagaaagtcaccgaaatgggtgccgccggcccccactcccaattcattccctaacctgcaaacctttccaacttctcacgtcaggcctttgagaattctttccccctctcctggtttccacacctcagacacgcacagttcaccaagtgccttctgtagtcacatgaattgaaaaggagacgctgctcccacggaggggagcaggaatgctgcactgtttacaccctgactgtgcttaaaaacactttcactaataaatggttataaatc

SEQ ID NO: 176092 - DNA, 963 bp, Homo Sapiens
  misc_feature (135)..(191): n is a, c, g, or t
  misc_feature (292)..(506): n is a, c, g, or t
  misc_feature (771)..(771): n is a, c, g, or t
  misc_feature (934)..(934): n is a, c, g, or t
ctagaaggtctggaggacgtagagttattgaaaatgcagatggttctgaggaggaaacggacactcgagacgcagacttcaatggaaccaaggccagtgaataagcaactttctacagttttgcaccacggcaannnnnnnnnnnnnnnnnnnnnnnnnnnnnnnnnnnnnnnnnnnnnnnnnnnnnnnnngcaaaacccagcagactgtacttagcattgtctaaatccattctcaaattccaaatatcacagacacccctcacacaaggaatataaaaaccaccaccctnnnnnnnnnnnnnnnnnnnnnnnnnnnnnnnnnnnnnnnnnnnnnnnnnnnnnnnnnnnnnnnnnnnnnnnnnnnnnnnnnnnnnnnnnnnnnnnnnnnnnnnnnnnnnnnnnnnnnnnnnnnnnnnnnnnnnnnnnnnnnnnnnnnnnnnnnnnnnnnnnnnnnnnnnnnnnnnnnnnnnnnnnnnnnnnnnnnnnnnnnnnnnnnnnnnnnnncctactacccctgtattcaaggtaaaaattgaagtttgtatgatgtaagagatgagaaaaacccaacaggaaacacagacacatcctccagttctatcaatggattgtgcagacactgagtttttaggaaaaacatatccacggtaaccggtccctggcaattctgtttacatgaaatggggagaaagtcaccgaaatgggtgccgccggcccccactcccaattcattccctaacctgcaaacctttccaacttctcaagtcanggcctttgagaattcttttcccctctcctgggtttccacaccttcaggacacgcacagtttcaccaagtggccttctgttaggtcacatggaatttgaaaagggagacgttgttcccacgggagggggagcaagggaattgttggcattgtttttaacaaccntggaattgtgggttttaaaaaacattttt

SEQ ID NO: 176093 - DNA, 459 bp, Homo Sapiens
  misc_feature (17)..(17): n is a, c, g, or t
accaaaccccctacctncccccttgtattcaaggttaaaaaattgaagttggtatgatgttaagagatgaggaaaaaccccaacgggaaaccacaggacacatcctcccagttctatcaatggattgtgcagacactgagtttttagaaaaacatatccacggtaaccggtcccctggcaattctgtttacatgaaatggggagaaagtcaccgaaaatggtgcgccggcccccactcccaattcattccctaacctgcaaacctttccaacttctcacgtcaggcctttgagaattctttccccctctcctggtttccacacctcagacacgcacagttcaccaagtgccttctgtagtcacatgaattgaaaaggagacgctgctcccacggaggggagcaggaatgctgcactgtttacaccctgactgtgcttaaaaacactttcactaataaaa

SEQ ID NO: 176094 - DNA, 915 bp, Homo Sapiens; identical to SEQ ID NO: 9170
  misc_feature (372)..(372): n is a, c, g, or t
  misc_feature (524)..(535): n is a, c, g, or t
  misc_feature (593)..(595): n is a, c, g, or t
  misc_feature (606)..(625): n is a, c, g, or t
  misc_feature (656)..(665): n is a, c, g, or t
  misc_feature (725)..(760): n is a, c, g, or t

SEQ ID NO: 176095 - DNA, 1160 bp, Homo Sapiens
  misc_feature (769)..(784): n is a, c, g, or t
ttcaccctgcagacggtgaactccaatgggaccagcgaccgcacaacctcccctgaagaagtccatgcccagccgtacattgctatcgactgggagccagagatgaagaagcgttactatgacgaggtagaggctgagggctacgtgaagcatgactgcgtcgggtacgtgatgaagaaggctcccgtgcggctgcaggagtgcattgagctcttcaccactgtggagaccctggagaaggaaaacccctggtactgcccttcctgcaaacaagcaccagctggcaaccaagaaagctggacctgtgaatgctgccggaagattctcatcatccacctgaaacgcttttcctacaccaagttctcccgagagaagctggacaccctcgtggagtttcctatccgggacctggacttctctgagtttgtcatccagccacagaatgagtcgaatccggagctgtacaaatatgacctcatcgcggtttccaaccattatgggggcatgcgtgatggacactacacaacatttgcctgcaacaaggacagcggccagtggcactactttgatgacaacagcgtctcccctgtcaatgagaatcagatcgagtccaaggcagcctatgtcctcttctaccaacgccaggacgtggcgcgacgcctgctgtccccggccggctcatctggcgccccagcctcccctgcctgcagctccccacccagctctgagttcatggatgttaattgagagccctgggtcctgccacagnnnnnnnnnnnnnnnngccctctctgcaatctcgcttctcgtgtccgccccgcttctcttattcgtgttaggtgcccccgccaggcattgcaggcttagtcgtggctactgttctcctgtgccgctgcatcgctctctcccgggaaagaacaggtcgtgtctcctcctagcagtgcgcgcccccgcctgtgtttgcccttccagcagtgaccctcccttctagtctttatttatggtcgtgcccttccctctcctcaacccaaagtggtctgccttggggggtgatgggggttccacctgaaccagagtgtatttttcttattgaagcccctgtaccttctgcctgtgtgggggaataaataaagcacccgtctgctccccaaaaaacacac

SEQ ID NO: 176096 - DNA, 1095 bp, Homo Sapiens
aaactgaccctcagcagctgcctgatgttacgcgaatctaggctttaacggaagcaaattcattattttttaaatgcagtggacttttcaaaaagtttaaattaggcaaagcagctttagcctcatagaatattatttcttgggactcaagctgaaatacaagccttacattgccttatgctttatttctttctaatttttatatgtatatagatgagggttccttaatggttgtgagcattgtgtgggaattttacacctggcctgcgtggcagcctcttccagttgaggtgttttatgtcacgcacactccatcccagtgtacaaaacctgcttctcttctcaaccgtggcagctcccgctggctcctatgccctgccctaaagggctcttgagcctctgggaatgggaggggccaagagaaggaaaaccctgtctttagcaccctttaaaagaactgtgccccccttctcagtgctgcctttgcatgggcctggcccggctcgcattcgtcagtgactccaaccctcctgcttgctgtacttgggatgaaacgaccccacaggtcaggtggagggtggggcgtgggcatcagccaggattgccgttacagtctttttctcaggagctacaaagatctcttcctgttactaaatggtcgcaccccagcagcctctctcgcacaccggggccctgcatgtcagatggcgtggtctgcagggggagctctgtgccttagtggctcttggcaggacactgagggcctgcctgtggtgtgcccggctctgccactcccgggaggggaagggctgctcagctcaaggtgtcctgttcggtagagcaagtgtcctctgacagccgtgtccccggacagttcagacacccttggggatggcactccacacacgacagagatgcaggggccagggaagcccagcgctcggtgcccttcgtccagggttaaaatcggcctgtggggtgtggtgagaaggcaggttgtgcgggtgttgaccgatgtatcttttccttaaagttattataataatgggtaatttgtcaataaagcattcctttgggggcaaaaaccaaacaaag

SEQ ID NO: 176097 - DNA, 574 bp, Homo Sapiens
  misc_feature (15)..(15): n is a, c, g, or t
  misc_feature (24)..(24): n is a, c, g, or t
  misc_feature (31)..(31): n is a, c, g, or t
  misc_feature (55)..(55): n is a, c, g, or t
  misc_feature (63)..(63): n is a, c, g, or t
taagtggacggattnccaaggaancctttgngccttttgccttggggtcctgttncccttgtnccaaaggcggcaccgtgaaaattctgttttccctgtagcatattgtgttggattgcattactggcagagaaaggacaaggtgccattcaagtcctagggtgggcttccagctgccttaatagaagtactcaagtcttttgggtagtgagctggaaagcctacaggaaaagaggggtacctgttttcatttgaaaactttgattcatggaacctttaaaactaatctcagaaaaatttttggtgcccatgcagctgtagttgttcactgctttcctggatggatgggactcttatgtcataacttctgttactcctttggcccatagctaaggtcatccttccccacaggggtggctttgggattggatgatacagcttttgcttctgtgtagtatacctgtacatacttgtttcaggcagcctttctttaatgttttcagttggtttgtattctgtagctcagtagctgctaataaagttaaagatcctgcaaacaaaacaaataaaacac

SEQ ID NO: 176098 - DNA, 1121 bp, Homo Sapiens
  misc_feature (541)..(555): n is a, c, g, or t
  misc_feature (558)..(710): n is a, c, g, or t
  misc_feature (721)..(730): n is a, c, g, or t
  misc_feature (973)..(973): n is a, c, g, or t
  misc_feature (1005)..(1005): n is a, c, g, or t
  misc_feature (1072)..(1072): n is a, c, g, or t
  misc_feature (1080)..(1080): n is a, c, g, or t
  misc_feature (1085)..(1085): n is a, c, g, or t
  misc_feature (1105)..(1105): n is a, c, g, or t
ggtctaccagggagttgcccccatcataagtagagggcattctgaatgtatactgcttttcccccaaaagtccccacatcgacccgccaaagtcggggactgtctgtgaattgtaaaagctcaattatgaaacgctgtatgggtgccaaatagacttagctgtcctggtaagccattgtttccatatgaccactatcacataccaggaagagttccatgagataagtgtgaaataaattgtagccttattccagagcacatagttttagccagaccacttaaactagtagtttaagaaactagaggttttttaaaccccaaaaggaaaaatttaccgttaaaagccatttaccggacttgataaccagagactggccaccaaaagtaggggcgttaatccaatcgttccctttgttaaggagggcagtaccaatatagaggaaaagggcctgcaataagggttttaaatcacgcttgggttcccatcctagcaccccccactttataacgccccacttgggtttggccattcctgtcaacnnnnnnnnnnnnnnnccnnnnnnnnnnnnnnnnnnnnnnnnnnnnnnnnnnnnnnnnnnnnnnnnnnnnnnnnnnnnnnnnnnnnnnnnnnnnnnnnnnnnnnnnnnnnnnnnnnnnnnnnnnnnnnnnnnnnnnnnnnnnnnnnnnnnnnnnnnnnnnnnnnnnnnnnnctgagattacnnnnnnnnnncatttggggagacgaatcccttactagcagagctgtattgagggttaacggtggtaatgggtctccagggcttggtgcagtttgtactcaacaagtacgtaattctctcctttggttgcccctgaatacaagagtggtcttgtacttccctgcctgaacagtccacagccaatggcactccagtccttgtcacatggttccactcttaggatgtaaattaggaggtaccagcttgagaggcanaggcaaaggcaaggttaagatgcagctgtgangctgggcacaatgggttcacgccctataatcccagcacccttgggaaggccgaaccgagcggaccancttgaggncaaanagttcgagaaccagcctggncaacacggggaaaaat

SEQ ID NO: 176099 - DNA, 636 bp, Homo Sapiens
  misc_feature (102)..(102): n is a, c, g, or t
gctaccgagtagtgacgacggacgcagcttcttctgcagtgccactctcgaggtggacggcgagttcttgcacaggaacagtagcgtccactgcgagtcctntatggtcccaaaattgaccgagccacatgcccccaagcactttgaaatggaaagataaaacgagacacgtcctgcaagtgccaagccaggggcaacccgttaccccgagctgcggtgttgaagaaggctccagccggaaggtgccggtggggatcccgttcttcgtcaacgtaacacataatggtacttatcagtgccaagcgtccagctcacgaggcaaatacaccctggtcgtggtgatggacattgaggctgggagctcccactttgtccccgtcttcgtggcggtgttactgaccctgggcgtggtgactatcgtactggccttaatgtacgtcttcagggagcaccaacggagcggcagttaccatgttagggaggagagcacctatctgcccctcacgtctatgcagccgacagaagcaatgggggaagaaccgtccagagctgagtgacgctgggatccgggatcaaagttggcgggggcttggctgtgccctcagattccgcaccaataaagccttcaaactccct

SEQ ID NO: 176100 - DNA, 722 bp, Homo Sapiens
  misc_feature (466)..(466): n is a, c, g, or t
aggttccagaggcagcagttagtgtttattttccctatattttggtttaacaccatagtgtagtggtagttcattctttttagggaaattacataaagtacatatagaatattattagtaagttatagaagactgtataactggaaaattaattccaagtaacagcatttcctctaaaaacacatctattattaaacgaattactttaaactagcagagaacaaaatgagcctataatttattaagtacaagatatatagtcaacttgcataaaattacatatggcattttaaaaagtctattctaaaatatcagtaattcaagcaattgggatttccacaggagagaaattgccattactttcctttttatgaagaaagatctgccttaagaacatcacaacgatgttattaagaaatgctacagcatactttaaaaatcaaaatgggtgaaacagatgcatcanggatattcttttacagataccagccctatagcagcatttcagaaggggatttaaatctaataactgacttgggtttttattctcttctagaaatacatattacatatatagtttagttaagaattttcatttccattataaatgggaacttttcatactgattatctaaaggtataagaaatgaagtgctagactatccaattactatttctatacctttagatatcagtatgaaagtttccatataaatgggcga

SEQ ID NO: 176101 - DNA, 477 bp, Homo Sapiens
  misc_feature (409)..(409): n is a, c, g, or t
atttttaaatggctttagtcaggctgccaagagtgatatcaggtttgattctcacatacataaatgccagtcccaaaaagcaactctaacttgtgcacctggcttaaaacaaaatgtactgaaaactttgtatttgttaattgggataacccacccattcaggcctcaattccctttggacttgcacacgcacttcctacacacagaagtggcctgttatgcagcaataatcatagtgaaaagcagcaattccgtgaaggctccacagagaaatcgcgtttgcatttcaaacaagtttcctcaaagtaagcgtctttcgattaaatgaaatcacaattccagcttcttatccacagaaaacagcattcactatgtaacttactgctttttataagtgcataatttctgncacagttacccacatatttataccatttaacaatactaaggtaaataatggatttatgggttggttca

SEQ ID NO: 176102 - DNA, 912 bp, Homo Sapiens
ggaggtgtgaatatgggttcccatcaaaaatggaaggttggcgaaattgagtttgaagggcttatgaggactctggacaacttggggtatagaacaggctatgcttacaggcatcctctcattcgagagaagcctaggcacaagagtgatgtggaaatcccagcaactgtgactgctttttcctttgaagacgatacagtgccactctctcctctcaaatacatggcacagaggcaacagcgtgaaaaaacaagatggctgaactcaccaaatacttacatgaaagtgaatgtgcctgaggagtctcggaacggagaaaccagtccccgaaccaaaatcacgtggatgaaagcagaagactcatctaaagttagtggtggaacacctatccaaaattgaagatccaaatccagtttgttccctttaaacacaaacccgaatgaggtactagacaaagagaacataagattcgggaacaaaatcgatatgacttgaaaacagcaggaccacaatctcagttgcttgctggaattgttgtggataagccaccttctactatgcaatttgaagatgatgatcatggcccacccagctcctcctaacccatttagtcatctcacagaaggagaacttgaagagtataagaggacaatcgaacgtaaacaaacaaggcctagaagaaaaccatgagctgttttccaagagcttcatctccatggaaagtgcctgtcatggtagtaaaatggcaaggatgatatgcatgatgttgaatgatgaggcttgctaagcgagtgagtaggttaagcacaaggtacaagccatagaaaaccatcgaagattactattaagtctcccagagaaaatcgaagaagtcctgtcacctgaaggtcccctgtgagatcggcatccaag

SEQ ID NO: 176103 - DNA, 814 bp, Homo Sapiens
  misc_feature (21)..(21): n is a, c, g, or t
  misc_feature (31)..(31): n is a, c, g, or t
  misc_feature (60)..(60): n is a, c, g, or t
  misc_feature (555)..(555): n is a, c, g, or t
  misc_feature (563)..(563): n is a, c, g, or t
  misc_feature (645)..(645): n is a, c, g, or t
  misc_feature (647)..(647): n is a, c, g, or t
  misc_feature (678)..(678): n is a, c, g, or t
  misc_feature (726)..(726): n is a, c, g, or t
caattacatccttcaagtccntgaaaaagtntgaacttgatccagttggtgccagtgacncagaagacttgctgagcgctcctaccgggagcacattgagcagcagatccagacctaccagcgcagctggttaaaggtgactgattacatcgcagagaagaatctacctgtgttccagccgggagtcaagctccgggacaaggagcggcagattatcaaggagcgttttaagggcttcaatgatggcctcgaagaactgtgcaaaatccagaaggcctgggctattccagacacagagcagagggacaggattcgccaggcccagaagaccatttgtcaaggagacctacggggcctttctacagaagtttggcagcgtgcccttcaccaagaacccggagaagtacatcaagtacggggtggagcaggtgggcgacatgatcgatcgccttttcgacacctctgcctgagcctgctgctagccctgcctggttccaccagactggcgtgtcattggacagataaaccagtgttagcttgcctctgggctgggtnagcttgangtcctctgggacagagacctgtctccacgcctccgggagctgtgtccctgagccccctagtcctggctcctgctttttcccnanagcccgtgttcccagccgaaccagcactctnccggaagcctggggtcccttcacaccttgggcttttatgaccctgatngcttctgaaacaggaaaagagagaaggaagacagaggcctttgcccacttgctgctccatgtgtaccaagagcagcagggcagaaggg

SEQ ID NO: 176104 - DNA, 580 bp, Homo Sapiens
  misc_feature (40)..(40): n is a, c, g, or t
  misc_feature (69)..(69): n is a, c, g, or t
  misc_feature (79)..(79): n is a, c, g, or t
gaacccaaggaagggaacggacttggagtcacaaaattgntgacccacaccagcggttgaacaggaccntcttgggaanaagagcatcctgcccgcagcagggcccttcatcaaagtcctcggtgttttttaaattatcagaactgcccaggaccacgtttcccaggccctgcccagctgggactcctcggtccttgcctcctagtttctcaggcctggccctctcaaggcccaggcaccccaggccggttggaggccccgacttccactctggagaaccgtccaccctggaaagaagagctcagattcctcttggctctcggagccgcagggagtgtgtcttcccgcgccaccctccaccccccgaaatgtttctgtttctaatcccagcctgggcaggaatgtggctccccggccaggggccaaggagctattttggggtctcgtttgcccagggagggcttggctccaccactttcctcccccagcctttgggcagcaggtcacccctgttcaggctctgagggtgccccctcctggtcctgtcctcaccaccccttccccacctcctgggaaaaaa

SEQ ID NO: 176105 - DNA, 295 bp, Homo Sapiens
  misc_feature (121)..(121): n is a, c, g, or t
  misc_feature (204)..(204): n is a, c, g, or t
  misc_feature (245)..(245): n is a, c, g, or t
  misc_feature (249)..(249): n is a, c, g, or t
gtgtgagctaccatgcctggcccaaagacctcttctttagtttcattcttatttaaaataatatgacgacgagcaagaatcctgtttccagcttaacaggcattaggagagaaaaaagatnaactaaacaggactggaggctgactaactggggggtaggcaggaaggagaatttcaactgtcagaataagaagggaaaagctngaaggcagacaaccggaccacctggaaatgacccaatgctnttanccagggacttaacttccatcatggatttaaaagcccccagaaatac

SEQ ID NO: 176106 - DNA, 636 bp, Homo Sapiens
tgtttttctgttttttgataattgggaatgctgaaacctcttgcgtctgcgattcataactactcagacttgtcttatattacaaaaatgggggttaaggagaagtgtttatgtgggtttaagataatacagctgttaaggaagtggtctcttgttttaatgaagcaatgtggcaacttggacccttttacatctgtcccatgtgattcgatgcgtctcccattccagggtgtgggccggccaaggagagagggggaggctccgaggacaccttctcttcctcccttcttttcagacacgcagctttcggattcagattcctttctcggacttgctgctccagactgaggatgacggccaccgactggaggaggatcaggagcctggtctggggcttgtcactcctgaggtggagctgcaccatgcggccgagctctttgaaaacctcgttgatgtcaacgacccgcaaaagctcttcgggcaatagtggccataccccgatccttattacgcactggcttctgctctggtgtcaagtcctcctcggcaataaatgcccgtaaatgaattgagaaaccctctggcgtcaacggaaattcttgtccccccaagaaatcgtggtctttaaggttttca

SEQ ID NO: 176107 - DNA, 1402 bp, Homo Sapiens
  misc_feature (798)..(955): n is a, c, g, or t
  misc_feature (959)..(962): n is a, c, g, or t
  misc_feature (964)..(967): n is a, c, g, or t
  misc_feature (989)..(989): n is a, c, g, or t
  misc_feature (1001)..(1002): n is a, c, g, or t
  misc_feature (1038)..(1128): n is a, c, g, or t
  misc_feature (1242)..(1303): n is a, c, g, or t
ggttgccaagctgtttctgagaaagtgaacgggacgctgggagacaggaaatgccttacttcactctggcccggcggacctcccaccacccagcagtgcactggggatggacaggcctggtgtgctgcgtgctcgcaaccacagatggctcctcggctttagacagaaaggggaaggggttctaagtcaagagcctttcagtgctccctcatattgagggcagtggcagaaaagtgaccactctgcaggctgggcccaggatgtggtgtcctgagatagttttgtatcttaaagactgaggcacagaagcgaaacgagaacacacggtttttgaaacacagtggtccaaatgtttctggccagctccggcccctttttgtatgacacttcttcttccaccctgcacagcacatgtgcccgtcattcttttaattttaaaagatgaaatggcagatgctagtaattcacagaatggcctcttgtgggggtgggtctgagggaagtcagctataaaacatttgctggagttttgttcaatggggctgtgcatttttatattatgtgtttgtaaatgacatgtcagcccttgtttcatgtttcctaaaagcagaatatttgcaacatttgttttgtataggaattatttgtgccacctgctgtggactgttttctttgcctagtgactagtgacctgtgttgtctaaacatgagtttcagccctttggttttgtttaataccatgtcaaatgcaaacttcaattctccccatttagctttattaaactgacgttctcttcnnnnnnnnnnnnnnnnnnnnnnnnnnnnnnnnnnnnnnnnnnnnnnnnnnnnnnnnnnnnnnnnnnnnnnnnnnnnnnnnnnnnnnnnnnnnnnnnnnnnnnnnnnnnnnnnnnnnnnnnnnnnnnnnnnnnnnnnnnnnnnnnnnnnnnnnnnnnnnggannnnannnngcgccaaaaaaaagaaaggggnaaggacggaggnngcgggcgaacccgcaagccgcgcaagggcaccgggnnnnnnnnnnnnnnnnnnnnnnnnnnnnnnnnnnnnnnnnnnnnnnnnnnnnnnnnnnnnnnnnnnnnnnnnnnnnnnnnnnnnnnnnnnnccaacaaaaccagaccacaccgggccgcgcgggcaagacggccgcggcccaggcccgacacgggcccaagcgacacccccacaaaaacagcgggcgaccgggaccaacgcggcnnnnnnnnnnnnnnnnnnnnnnnnnnnnnnnnnnnnnnnnnnnnnnnnnnnnnnnnnnnnnnacaaaaccggccgcgcggcaaagacaccgagcgccaccacaaagcaccgaaactgccgcgccgacccacccgcgaggcacaaaagcgcggcacacacaa

SEQ ID NO: 176108 - DNA, 860 bp, Homo Sapiens
agggacacccccctcggggcatctttaaaggtgaaaatacttcttcccccttggccaaggcagagcaaaggccctcggtgccttacagggtggcccgggcacgcctatgacaagctgcgtggccctgtacatccctgccagattccaaaagtccattgagctgggtaccctgaccatccgcgccaagcccttccacgacagtgaggagttggtgcccttgtgctaccgctgctccaccaacaacccgctgctcaacaacctgggcaacgtctgcatcaactgccgccagcccttcatcttctccgcctcttcctaggacgtgctacacctggttgagttctacctggaggaagggatcactgatgaagaagccatctccctcatcgacctggaggtgctgagacccaagcgggatgacagacagctagagattgcaaacaacagctcccagattctgcggctagtggagaccaaggactccatcggagatgaggacccgttcacagctaagctgagctttgagcaaggtggctcagagttcgtgccagtggtggtgagccggctggtgctgcgctccatgagccgccgggatgtcctcatcaagcgatggcccccacccctgaggtggcaatacttccgctcactgctgcctgacgcctccattaccatgtgcccctcctgcttccagatgttccattctgaggactatgagttgctggtgcttcagcatggctgctgcccctactgccgcaggtgcaaggatgaccctggcccatgaccagcatcctggggacggcctgcaccctctgcccgccttggggtctgctgggctgtgaaggagaataaagagttaaactgtc

SEQ ID NO: 176109 - DNA, 503 bp, Homo Sapiens
  misc_feature (39)..(39): n is a, c, g, or t
  misc_feature (52)..(52): n is a, c, g, or t
  misc_feature (68)..(68): n is a, c, g, or t
ccagaagggccacccccccaaaaccccacctgtacatcnccatcatcaaagnccaaaagtagataaanccccaaagatggggaaaaaccagagcagaaaagctgaaaattctaaaaatcagagcgcctctccccctccaaaggaacgcagctcctcgccagcaatggaacaaagctggacggagaatgactttgacgagctgagagaagaaggcttcagatgatcagtaataacaaacttctccaagctaaaggaggaagctcgaacccatcacaaagaagctaaaaaccttgaaaaaagattagacaaaatggctaactagaataaacagtgtagagaagaccttaaatgacccgatggagctgaaaaccatggcacaagaactacgtgacgaatgcacaagcttcagtagccgactcaatcaagtggaagaaaaggtatcaagtaattgaagatcaaatgaatgaaatgaagcgagaaaagaagtttagagaaaaaagagt

SEQ ID NO: 176110 - DNA, 452 bp, Homo Sapiens
  misc_feature (346)..(346): n is a, c, g, or t
gtgtgagccaccacacccagccagaataatctcttaattaaaaggctgggtctggcacagatcaactgaatattgcttaccacttcctggaatataggttaaatcaggttaaaattaacactaaaggcagacttgaaattgtataaaagtaactgaagggcactaagtagctgtagaaagatttgagtggaggggatttatggactgctgctttaatatattcaggccaaattcttttttccctgctcctgcatcccttaatcactgtccaagcccaacgaaacaaagttttagcctcctgggaaactaataactgctatactccagggaaggttttggccattgnactacagtttctacatctgcttctccagatccattcttcacccctcactttttcctgaaatctgggaagctgactttatagactgggttttagggaaattacggaa

SEQ ID NO: 176111 - DNA, 469 bp, Homo Sapiens
  misc_feature (66)..(66): n is a, c, g, or t
aacaaaaaatgaatgggctggggaaaaacaaaagccttgctggccccatgggaaccctcaattgcnaaagttgttccttgaaaaaacctgaaggccctccccctgggccccacccaggcacctacggccttccctctcccagaatgtggctttgccctgagcacagacagtcagcatggaatgctcttggcccaagggtactgggggccctctggccttttgcagctgatccagaggaacccagagccaacttaccccaacctcaccctatggaacagtcacctgtgcgcaggttgtcctcaaaccctctcctcacaggaaaaggcggattgaggctgctgggtcagccttgatggcacagacagagcttgtgccggatttggccctgtcaaggggactggtgccttgttttcatcactccttcctagttctactgttcaagcttctgaaataaaaaggacttgatcac

SEQ ID NO: 176112 - DNA, 568 bp, Homo Sapiens
  misc_feature (94)..(94): n is a, c, g, or t
  misc_feature (204)..(224): n is a, c, g, or t
atggaaaccttcccttttaatcttcttaaaaaaaagatacctagactaatccattgtagggcctaagtgtgatttaactcttgaagtcacaccntccgaaagatgagtagaaaccagcaccagcacagcccagatcttctctttcctctccttttcctcatttattcctaaaggaatctgaccattttacgtctctacggcccnnnnnnnnnnnnnnnnnnnnnttcctttttattcctgtcaactggatggaaacacaaatttcatggagctgtgtaccatcgaagaaacctggtgtctggcatgaaattactgtaaagaacttcctgtaaaacacgttctttaacaaactgaaatgaaaagcattggagcgtctgaatgaaagacgtgacctcctgctgggactctgatggtcttcagcattcaccttcgtgtgtcttcagtgtctcattgtcatccctgcttctgtttggtcttagagtgtttggatataactgaattgtagatggtaaaggaaatttgatgtgttttttgtttttaaataattaaaacgggtcaatttttcgaa

SEQ ID NO: 176113 - DNA, 500 bp, Homo Sapiens
  misc_feature (15)..(15): n is a, c, g, or t
  misc_feature (23)..(23): n is a, c, g, or t
  misc_feature (63)..(63): n is a, c, g, or t
  misc_feature (218)..(218): n is a, c, g, or t
gagcaaattatgggnggttaaancccacggaaggcaaaccaagctgagacttctaactcaggnctcatcatcacccctcatgccttgcctatgttccgtgagccccgccaacggagtacaaggaaacagctggagaaggacagactggatcccctgaagtcgcataaacctgaacctcctgtagcaggcccaggtcgtagtggccgagttggaacccncgggggcactctctcttcctatattgtgaagaacattgctttggacaagaccgatgacagtaatcctcgggaagccattttgcgtcatgccaaagcagcagaagacagcccatattgggtttctccagcatatgccaagactcagcccaaaaccatgtttgcccaagttgaatctgatgatgaggaagcaaagaatgagccagaatggaaaaaacgtaaaatttgaagaatctcatttgagagctgtttgcatgagtgggaggggtatgggacaggtttggg

SEQ ID NO: 176114 - DNA, 833 bp, Homo Sapiens
gggaggggccatgattcacaaggccctgggaggtcactttaaagagggctgctcaactgcaaggacgctgtaagcaggaagagaagccacagcgcttcagaaaagagtgggacagggacaagcatatctaagaggctgaacatgaatccacagatcagaaacccgatgaaggcaatgtatccaggcacattctacttccaatttaaaaacctatgggaagccaacgatcggaacgaaacttggctgtgcttcaccgtggaaggtataaagcgccgctcagttgtctcctggaagacgggcgtcttccgaaaccaggtggattctgagacccattgtcatgcagaaaggtgcttcctctcttggttctgcgacgacatactgtctcctaacacaaagtaccaggtcacctggtacacatcttggagcccttgcccagactgtgcaggggaggtggccgagttcctggccaggcacagcaacgtgaatctcaccatcttcaccgcccgcctctactacttccagtatccatgttaccaggaggggctccgcagcctgagtcaggaaaggggtccgctgtggagatcatggactatgaagattttaaatattgttggggaaaactttgggtacaatggataatggagccattcaaggccttgggaagggatttaaaacccaacttttcgacttctgaaaagaaggctacggggagagcctcccagggagggggtcttccctggggccctcaggggcctggtcccccccaaagcctcctgggctctggccggcacggggccttccccctccaccccgggaacccggttccggtttct

SEQ ID NO: 176115 - DNA, 1056 bp, Homo Sapiens
gggtctttaaagagggctgctcaactgcaaggacgctgtaagcaggaagagaagccacagcgcttcagaaaagagtgggacagggacaagcatatctaagaggctgaacatgaatccacagatcagaaacccgatgaaggcaatgtatccaggcacattctacttccaatttaaaaacctatgggaagccaacgatcggaacgaaacttggctgtgcttcaccgtggaaggtataaagcgccgctcagttgtctcctggaagacgggcgtcttccgaaaccaggtggattctgagacccattgtcatgcagaaaggtgcttcctctcttggttctgcgacgacatactgtctcctaacacaaagtaccaggtcacctggtacacatcttggagcccttgcccagactgtgcaggggaggtggccgagttcctggccaggcacagcaacgtgaatctcaccatcttcaccgcccgcctctactacttccagtatccatgttaccaggaggggctccgcagcctgagtcaggaaggggtcgctgtggagatcatggactatgaagattttaaatattgttgggaaaactttgtgtacaatgataatgagccattcaagccttggaagggattaaaaccaactttcgacttctgaaaagaaggctacgggagagtctccagtgaggggtctccctgggcctcatggtctgtctcctctagcctcctgctcatgctgcacgggcctcccctccaccctggacccgctctgcttctgcctggtcatcctgagcccctcctggcctcagggccattccacagtgctcccctgcctcaccacctcctccccgctctcccagactcttcctgcagaggcccctttctggcctccatggctatccatccacccaccagagaccccgttcccccagcctgcatgcccctaacctgccttttcccatctccccagcataaacaaatcttactaaactcatcctaggcttgcggatgggtgactcacgcctgttaattccccagcaaatttgggaggcaaaaggtggg

SEQ ID NO: 176116 - DNA, 499 bp, Homo Sapiens
gggagcctcagcttccagggcactgtgggcctgttggtctactagggccctgatgtccacctggccttcctgttcttcactcccttcagccacacgcttcatggccttgagttcaccttggctgtcctaacagggccaatcaccagtgaccagctagactgtgattttgatagcgtcattcagaagaaggcgtccaaggagctgaaggtggtgaaatttgtcctgcaggtccctcgggagatcctggagctggagcatgagtgtctgacaatcagaagcatcatgtccaatgtccagatggccagaatgaatgtgatagttcagaccaatgccttccactgctcctttatgactgcacttctagccagtagctctgcacaagttagctctgtagaagtaagaacttgggcttaaatcatgggctatctctccacagccaagtggagctctgagaatacaacaagtgctcaataaatgcttgctgattgactgatggatt

SEQ ID NO: 176117 - DNA, 545 bp, Homo Sapiens
  misc_feature (24)..(24): n is a, c, g, or t
  misc_feature (37)..(37): n is a, c, g, or t
aagccccccttggggccaaacaangaccctaacttangatggtgccccaggaccaagctcaggacagatgccacacaaggatagatgctggcccagggccaagagcccagctccaaggggaatcagaactcaaatggggccagatccagcctggggtctggagttgatctggaacccagactcagacattggcacctaatccaggcagatccaggactatatttgggcctgctccagacctgatcctggaggcccagttcaccctgatttaggagaagccaggaatttcccaggaccctgaaggggccatgatggcaacagatctggaacctcagcctggccagacacaggccctccctgttccccagagaaaggggagcccactgtcctgggcctgcagaatttgggttctgcctgccagctgcactgatgctgcccctcatctctctgcccaacccttccctcaccttggcaccagacacccaggacttatttaaactctgttgcaagtgcaataaatctgacccagtgcccccactgaccag

SEQ ID NO: 176118 - DNA, 566 bp, Homo Sapiens
  misc_feature (21)..(21): n is a, c, g, or t
  misc_feature (451)..(465): n is a, c, g, or t
aagaaaaaccagtaccagttncaaagcacttaggccttgtaatctaactttggtcactgtgactacattaccttttcagcgccagagggcacccgtgggcctcccggagcctctgcccatggcggggtggagacccggaaccagcagccccctccactggcgacacaactgcaccttccctcatttcagtctcccgcacacttattcctcctcccctcttcccggtggcacctctccacctgtacccgcccccgccccaccaccccggccccttggaagagttgttgccagaccagggttttgggggaaacctgtcttgacattcaaaacctttttcttcccgatctgaacccctgttgactaatcttgcctgggtttgtgtaggtctgcaggaaggaaggctgaaaaagcggacgaagattttgacttaagtgggactttgtgatttaannnnnnnnnnnnnnnaagtggggaggaaggggaagctagatggactaggagagacttgattttggtgctaaagttccccagttcatatgtgacatctttttaaaaaaaataacaac

SEQ ID NO: 176119 - DNA, 269 bp, Homo Sapiens
caatgtagcccctggggaatgaatgaaattttgagcttcttcaatacgtaaaattaaatttataccactgagggagagaccctttctgaaagaagtatggccaaaagcactttaatgctgctgacattgttgtttttatgttcatttgctggagcgcaagacgtgctgacacagtgagttttctctgatgtatttaaggtgatgtatttgcttgagttactcctgtatcattgctcataatattggaaactaaaataaaacctagttgg

SEQ ID NO: 176120 - DNA, 521 bp, Homo Sapiens
  misc_feature (38)..(38): n is a, c, g, or t
agtagtttcaagaatttttttctgactttccactctanggatagcgttgaaaaaagaatgcacgtgtgagttactaaaaagtcagaataatgtgcatgggaacagtgcagcaacatgctagaaaatcctcactgcactccagcagaggctagaggaatgccagtgttaccttacgcttctagaagcagagccactccagccagaacccattttgcagtcttctcttcgctcttcagcctgaaggtccagatgtagctggggcctctcagtttggttctatacacagggcactcgtaggtctgtttggtttcttgtctgtccacgggggtggcttttgcaaagatgaccggcatagggcatgccagctccttgagacgggcttcaacaatggttcctgcttgggtgtcccagcgggcgcctatggcaaaaacacagcggttgcaattgtgtggcagcttgctactaatgataatgatcaagttgtttgatgcaataaacattcaacattctggttttgtcat

SEQ ID NO: 176121 - DNA, 513 bp, Homo Sapiens
gtcaaagtcgtggccctgtgtgctggttctgggatcagcgttctgcagggtgttgaggctgacctttacctcacaggtgagatgtcccatcatgatactttggatgctgcttcccaaggaataaatgtcatcctctgtgaacacagcaacactgaacgaggctttctttctgaccttcgagatatgctggattctcacttggagaataagataaatattatcctatcagagactgacagggaccctcttcaggtggtataattgcagaaacatcaggataacacattctacaaatcagctggatgccaacttaaatttgtaacatgagtcagtgggactggtgtgcttccagagagtgtcttcgagggtatcatcatttccggtttgttaatcttattcaccaaatgttctatcgctcgtaaggtaaaactgtaatataactaccatattaaataacaaatgttcattataaactctaggaaagattgaataaaatctgtttacttaacattc

SEQ ID NO: 176122 - DNA, 542 bp, Homo Sapiens
  misc_feature (253)..(268): n is a, c, g, or t
  misc_feature (477)..(477): n is a, c, g, or t
  misc_feature (506)..(506): n is a, c, g, or t
  misc_feature (531)..(531): n is a, c, g, or t
aacaaatggcttccagagacctgctcgagtttcatggggtgggcgtgcagggacacccagctaatttatggaatgtgtactgagtgccccttggaatagatgcagggcctgaccctgactatggaaagacacagggcttggatggagggtctggcgcccaggagggatggatggagcaggccccaggatgcgagactccagtcagactccaaaacacaaggggctccccaaagaagtagaaagcagggaaggnnnnnnnnnnnnnnnntgctaagggggtctgcaaggcccagttttctggccaactgggaagtaactacacccccaccctctctaggggagccccttccaccttgaccatgttcccagactattccggaaggttctctagaattgctgacccagtctagtaggatctctgggctcactgggtactatgatgagcaggaagtcccaaggagatggaatagggaacangggacacaccaacttttccttcaccaagnctttgggttttccttttgcttggcnaaaaactttgg

SEQ ID NO: 176123 - DNA, 681 bp, Homo Sapiens
aatccctattgccaagaagcgtctatcatcatacactgagtgttataaatggtcatcatctcctgcaaatgcttgtggtctgccgtctcccatcagcactaacaggcaaatccaaaagaactgccctccatcaccattaccacttatttcaaaacagtcaccacagacttcttttccttataaaataatgcctattcaacacaccctgtctgtgcaaagtgcatcaagtactgtcaaaaagaaaaaagaaacagtttctaaaaccactaacagatgtgaggctttgagccaaaggcatatgatctatgaagagtctggtaataagagtactgcaggtattatgaatgccgaggcggcaacaaaaattttgacagaattgcgccgccttgctgatgatggcggacggcgccgcagctggcgctggcggcagcccatccttgagagagctgcgggcacggatggttgctgcagcaaacgagattgctaaggaaaggaggaagcaagatgtggttaatcgtgttgcaacccattcctcaaatataagatcgacatttaaaccagtaatcgatggatccatgcttaaaaatgacataaaacaaagatttagcaagagagcgcagagaggagaaaagggggacggcaagaccgcccaattaaggaaaaccacaaacttactttgaa

SEQ ID NO: 176124 - DNA, 800 bp, Homo Sapiens
ggtgaacagaagtgcacaggctacttgtacagagaaaaaattaatactcaaaggaaatcttccattttttagattgactttgggaatttgaattttcatcagtgcaaatataaatttctctatcctgctcttgaggctaattggtaccatattttccctttgtgtcttgtgactctgccacatcccatctcatcctggcctctgagtcaagaacccagtgaactgactttctagttctagaagttccgctgcaaggccaggaaagcttgagaaaggtattgtggaagaagcaaaggtagacccccatcactcacctttgtctgcatccctgggcctgtgaatgatgacagcacctgacattctgcaccagctacctctgcctccatggcagagaaaaggccataagaacagtggaagaggagcatggactcagacttcaaggaagaagccatttccccaggtccttccttctgcatctcaccacccctagttacaaataactccattgaacagcatctattcagaaactatgccgaataaaaagattggtggaagggctcatgtggttagcaactatgaaacagaaataggacactcagttacaaacattatctcctttagtttttcagaaaatggatccctgatttcattcatttcccgcttgaaagccagccatattactctagtccctaccaaactgctctagaaaggcattttccattttgtttgggatattttagacgcgcagacctcaggaaagttcccctttaaacttccggctttccggatgtaagttttca

SEQ ID NO: 176125 - DNA, 475 bp, Homo Sapiens
gcagcagagaaagagtttaataatctcaaagccaccagccccattgggctgccctggaggagctgaattagcatttcccattctggctggaataatacacacataacaaaacagatactagtcaccatactcaggacccaagtattgacctggcaagactcaaacttggttccattggcccttgtcatctttgatccactcaagctggagagggatgaccttcgatcagaagttcagagggtaaagctgacacggatgcatctgggagtaggagaccagccattctccatacatgtaactgtggtctgcgcttttggaagagcgtagccaggatggcaggcaacgtctatagatttaccctgtacaaactttcttccataattttgattatatccattttccaaataaggaaaataacattttctgaggcatggtactgctggcgaccatccatcttgtgtgcaatgaatgtgat

SEQ ID NO: 176126 - DNA, 1151 bp, Homo Sapiens
  misc_feature (23)..(23): n is a, c, g, or t
  misc_feature (1134)..(1134): n is a, c, g, or t
caacttgatcctgaaggaaaggnccttgacttgaggccaaaggcaaaggttaagcttggccaagatcaagcagaagaaccggcgcttcaaggagaaggtggaggagacgctgaagcgacagaaggctggcagggctggccacaaggggcgtccacccaggacaccgtctgggtcccactcaggcccagtcccctcccagggcctggtctgagccccacacggccatctgcccagtccttgactcgtccatggagctgagggtcggaggaaccttccttgggggcagcagcccttcccgggggcctacccagtgccccacagcagaacccgtgggcgctcgtgttgtgcgggccctgctcctctgccccgaaaccactggctggtcccttccctgagccctggccaagattcaggctgcaggggaagaaagaacatgaccgggaggttgtgaccccaacccaaggtcaccccccaggggtgccgcatacaggaggtgcttaataaacgggtcttttgaccttcctcgggcgggcgcgccggggaaaaacgatcgccgggggcgtggtcggggcccgcctcgggcccctgcgagaaaggcttttctacaacccatttcccttttgggcccgctccggccccccccgtatagggtaaaaattggaaaccagtgggccccactaagaaatgggctctttcccccaaccggaaagaacccccccctggggtctcccattgtgaccctcacacgggcttttgttgggaaatcctctctccgacccccacatgtagaaaccagacgtgtgctgcccggggggccggatccaaacacccgaaaggcgggttctcttgcacacacacaacattccccgtaagaggggggaaacttcccccctgaaggagtcgccatctaagcctgggggtacccgcattggcacccccggggggggtgtgcaaacaagagtgaagaggctctcgcgaacaaatccccagaaatttgtaggggacccgccggctctctctggggcaaacctttcatgtcgggatagggaagcgcggggaagagaacatatgttcattttcagaactatgtgtccctctgctgccaatatgtggggtgcggcatacccccccggnaagtgcgcgcgcccgct

SEQ ID NO: 176127 - DNA, 961 bp, Homo Sapiens
  misc_feature (40)..(40): n is a, c, g, or t
  misc_feature (265)..(265): n is a, c, g, or t
  misc_feature (272)..(272): n is a, c, g, or t
ctgtgacatttttccggagaagatttcagagctgagggantggtacccccaaccccccaatatttttggactggcagactcaaggggctggaatctcatgattccatgcccgagtccgcccatccctgaccatggttttggctctcccaccccgccgttccctgcgcttcatctcatgaggatttctttatgaggcaaatttatattttttaatatcggggggtggaccacgccgccctccatccgtgctgcatgaaaaacattncacgtgncccttgtcgcgcgtctcccatcctgatcccagacccatttccttaggttatttatccctttcctgggtttccgaaaggcaattatatctattatgtataagtaaatatattattatatgggatgtgtgtgtgttgcgtgcgcgtgagtgtgtgagcgcttctgcagcctcggcctaggtcacgttggccctcaaagcgagccgttgaattggaaactgcttctagaaactctggctcagcctgtctcgggctgacccttttctgatcgtctcggcccctctgattgttcccgatggtctctctccctctgtcttttctcctccgcctgtgtccatctgaccgttttcacttgtctcctttctgactgtccctgccaatgctccagctgtcgtctgactctgggttcgttggggacatgagattttattttttgtgagtgagactgagggatcgtagatttttacaatctgtatctttgacaattctgggtgcgagtgtgagagtgtgagcagggcttgctcctgccaaccacaattcaatgaatccccgacccccctaccccatgctgtacttgtggttctctttttgtattttgcatctgaccccggggggctgggacagattggcgatgggccgtcccctctccccttggttctgcactgttgccaataaaaagctcttaaaaacgc

SEQ ID NO: 176128 - DNA, 443 bp, Homo Sapiens
  misc_feature (54)..(54): n is a, c, g, or t
  misc_feature (89)..(89): n is a, c, g, or t
  misc_feature (220)..(249): n is a, c, g, or t
agacaaattgaaaaacgggtccagattggaacacaggcgggaaggaagaaaaanacagagggaagaaaagacccatcggggaacaatcnagaggggccgagacgatcagaaaagggtcagcccgagacaggctgagccagagtttcctagaagcagtttcccaattcaacggctcgctttgagggccaacgtgacctaggccgaggctgcagaagcgctnnnnnnnnnnnnnnnnnnnnnnnnnnnnnntccatatataatatatttacttatacataatagatataattgcctttcggaaaccaggaaagggataaatagctaaggaatgggtctgggatcaggatgggagacgcgcgacaaggggcacgtggaatgtttttcatgcagcacggatggagggcggcgtggtccaccccccgatattaaaaaatataaatttg

SEQ ID NO: 176129 - DNA, 404 bp, Homo Sapiens
  misc_feature (15)..(15): n is a, c, g, or t
  misc_feature (98)..(98): n is a, c, g, or t
  misc_feature (327)..(356): n is a, c, g, or t
ttgtaaaaattctangttcccctcagtctcactccacaaaaattcaaatcctctttgtccccccaacgaaacccccagagtccagacgacagctgganccattggcagggacagtcagaaaaggagacaagtgaaaacggtcagatggacacaggcggaggagaaaagacagagggagagagaccatcgggaacaatcagaggggccgagacgatcagaaaagggtcagcccgagacaggctgagccagagtttctagaagcagtttccaattcaacggctcgctttgagggccaacgtgacctaggccgaggctgcagaagcgctnnnnnnnnnnnnnnnnnnnnnnnnnnnnnntccatatataatatatttacttatacataatagatataattgcctttc

SEQ ID NO: 176130 - DNA, 537 bp, Homo Sapiens
tttctggaagtattttatttatcactgaagaaaaaacacagcagcaagttctgtgttggcttcaatgagaccaaatagttcatctttaacatagctactgcgctccaaaattgaagtcaacacagtcattactacaaattacttgttgaaagaatctatcttcaaaagaaagaaaattaggaaagagaatttaaacgattcctccaaaccatacatttataaatattgtcatatttaaaatgcttgaaaggcatgaattctccattaatggaaaagcagtttgctattggcaacagaaaaaaactcagcgataatttaccaaatgctttaaaatttaaaagctatactggttggattcacacttgcgcagtaatcttgtcattacaacaactgcaaattgctttgtactcaccttctctcaagtaaaatctaaagaaaaccccacccgtatccaatggttgtaatggttacttcaaggtgaatctaaaaaatttctaaatttagtttatggtaaatacctcaaaatacctaaaatag

SEQ ID NO: 176131 - DNA, 607 bp, Homo Sapiens
  misc_feature (573)..(573): n is a, c, g, or t
acccatcccaaaagccagatgaagtgttcagtaccacaaggcctgaaaaattggttgaagtcggaactcggggttttccgtcaaaagatgttgctgccatgggcttcccgagaacgtgtcggtcattgcctggggcctctccctgaagcgcccaacgatgatcaaatatggcatcaacaatatccgggagctggtgggccacaaggtgaacctgcagatggtgtatgacagtcccctgtgccgcctggatgccgagccgaggccccctcccacacaggaggctgcgtgacatgggccactctaggacaggtcatcctccccgagtccctgctgctgcgctcctttgcatccctggccagtgaccttgtatttatgaggcctctgtgaggccagcccccaccttcctctttcccacctgtcccaggaccagaatcccagggacagaggactgggtagcaggttccttctgttgtcctgtgtggtgtgtctactgtgagggtgggccctgaggagacctgtgggccacctattgtctaataaagtgggcagttgcccccatctggtggctttccnccttaacgcgcctctaaactataatccccttgtc

SEQ ID NO: 176132 - DNA, 477 bp, Homo Sapiens
  misc_feature (75)..(75): n is a, c, g, or t
  misc_feature (79)..(79): n is a, c, g, or t
  misc_feature (140)..(140): n is a, c, g, or t
agtcaggattggccctgttcattacatgtcatgagtagtgggtagcctgatggggtcgctctgtctggagcatancccncagcgttttttctgccaccccatccctgcatgcctgatccccagttcctataccctacccntgacctattgagcagcctctgaagagccatagggcccccacctttactcacaccctgagaattctgggagccagtctgccatgccaggagtcactggacatgttcatcctagaatcctgtcacactacagtcatttcttttcctctctctggcccttgggtcctgggaatgctgctgcttcaaccccagagcctaagaatggcagccgtttcttaacatgttgagagatgattctttcttggccctggccatctcgggaagcttgatggcaatcctggaagggtttaatctccttttgtgagtttggtggggaagggaagggtaaatagattgtatt

SEQ ID NO: 176133 - DNA, 1499 bp, Homo Sapiens
  misc_feature (54)..(54): n is a, c, g, or t
  misc_feature (509)..(628): n is a, c, g, or t
  misc_feature (674)..(685): n is a, c, g, or t
  misc_feature (746)..(787): n is a, c, g, or t
  misc_feature (1434)..(1434): n is a, c, g, or t
  misc_feature (1447)..(1447): n is a, c, g, or t
taccataaaagtcatcctttctgggtgtaacatgtggtagtaccagagtattgnatagccaatgttaataaaagccaaaactggaatggcagaaagtaggctttggttaatttgtggattcatttttatttttgtctttgtttaactttttaaaaaataagatttctggagtagattggtatattctgttaaagacttacagtgatccattttgcttacactgttgcatcacaagggactcacccagggaccatgacccgctggtgtgtgtgtatatttacaaaaacaaaacaaacaaacccacccattgggatataaggtagcaatcacaaactaaagactgcggcttgttgaggtgcaataccctgactcccaaagttagttacagtgggttttattgtttttgtgactgaaggatttattcagactgctgtactcttcatttgatgtaacaaaatgctattaatctaaatatttgtaaataaagtacctgtatctagattaaattnnnnnnnnnnnnnnnnnnnnnnnnnnnnnnnnnnnnnnnnnnnnnnnnnnnnnnnnnnnnnnnnnnnnnnnnnnnnnnnnnnnnnnnnnnnnnnnnnnnnnnnnnnnnnnnnnnnnnnnncacaacccctcccgccagaccgcccaacacaacaaaagcaagacannnnnnnnnnnngggggcccccaaaaaaaacaggaaaatggaacctggaggcgatctcttctacaaaaagaannnnnnnnnnnnnnnnnnnnnnnnnnnnnnnnnnnnnnnnnncagcgcgtcgaccaccccccttttagaacactatacacaggagggactgcggcgtggatagagaatctccaaacccaatcaatcagagcggggtaatttaaagaggacaatctcccagaataaaaataaacacccccagccgctctaactcaaatccaaaataaatgaccccccaagtcgcaggcgacaatatcaggccaaccacgcttactgaagaagcgcgggactacccttaaaccacaaccccctccgccataattatcatgtctcgacaaacatcctcaaggcgccgcccggccgatgacagaccgcaacccacgcaactactcccgccgctcacccaccgctccgaaagattatttaagtaacaccccctggggcggccgagcgcatactatcatacgccgcgccaccctaataactatatcaaaacattgttttcatacataatggccagcgtgtgtggcatcatatttaaagaccactcctcgctggcttggtccccctctcactccacgaggacctcaactccgcctcttcggcaggcaatatgaacacaccccacacacactcgagttttgccaccagaatagtacagccgtgcgccatccaattagcgatacaccaccagacgtgctccatatatntcccccctactcnctccgcgcccgttagtacgcccggctgtatatgatctccgacccccctccgg

SEQ ID NO: 176134 - DNA, 622 bp, Homo Sapiens
  misc_feature (96)..(189): n is a, c, g, or t
gtccaagcgatcctcacacctcagcctcctgagcagctggcatcacaggcatgtgccaccatgcccagctgcccagctaatttttacattttttannnnnnnnnnnnnnnnnnnnnnnnnnnnnnnnnnnnnnnnnnnnnnnnnnnnnnnnnnnnnnnnnnnnnnnnnnnnnnnnnnnnnnnnnnnnnngagtgagccagcccccagtgctagcagtgctcttgggtaatgaacgtgtgaatgagagcacactgaatggtcgcgtggggcggccaccctccatgagggacagctcactatggacaggtgataccaccacttggtacctcctttcttcatccataatttgcgaatggtgacagtgactgtcccacaggcctggtggggtattaattcagatagtacacgtcccacacctaagatgagcctggcacaaagcagcgctcaaaaacacacatcttcctttaacttcctcctcggttcacccaatgggggatcttgcaggcaaagtgttgacgaaaggtccgcccgttcccaagaacgaccctagagggcgccaggcagcggggcttgaatggaccgggcgggtttcgctttcccgctatgtacgcccgcgcgacgc

SEQ ID NO: 176135 - DNA, 343 bp, Homo Sapiens
ggagaaacctcgtgaagaaagaaccttccgtaactggatgaactctcttggtgtcaatcctcacgtaaaccatctctatgcgtaagccttcctactgctattgtaaacagttacgaatgtcatgaatggatgttaaataatgacagctctaaagattttctagatattaatttgtagctattatttatattggaaaatgtcaagtggtgatttccatcatcattttccaaatacacaaaagctttaagtattcctttacatgatcgttaactgtaagtgatagaatatataaatgtctttatagtaccctagggagcaaatactttatattttgaaacagctg

SEQ ID NO: 176136 - DNA, 463 bp, Homo Sapiens
ctcttttctattttgattcccgtcagtcttttctccctttctgctagaacaagcgttctgaaaggcaaatcctttcatgccgctcttctgtgtaaagccctgtcatgcttcccattgccagcagcaaacagtgaacctcctttggtgtgatttctgaggaggtcattcatgatctggcctctgccgctctccccagctctggttccctcctcttttcctgcacttgctctttcctgcacactccaagctgcatctctctctccactcttctggccaactcctactcagccttcaggtcaaatacctgacttgctctaggaaacctttcccaatcccataagactggatcaggtgttccttttctgtttttcctgggtttatcccaatcaaagcactttatccctgttttgtaattgcctgcttacttttttgtctcctccattaaactttgatatctttgaag

SEQ ID NO: 176137 - DNA, 802 bp, Homo Sapiens
  misc_feature (121)..(132): n is a, c, g, or t
ctctttcactattatgaacagtgctgctatgaacattcctttccaagtttttgtgtagacatagtttcatttctctgtgcagcctacttttaggtagttacaaattaagattgtaagtgannnnnnnnnnnncattttacacatttgttcgcttcacgatggcctcctctctcttcttacctatctcactctcccaaaaatgatttttcttgagaacatagttgtagaagggtaagaatatcaaccaacttttgctaagtatgaatgcccaggcgttctgctaagcatcatgtatgtgttacaatgtttctcactttatagacgggggctgaggtttagagaggctgctaagcctggaggtcattcagctgaaaaggtagaagagctgggatttggacccacatcctgtttactcagcaaggtccatgctgtctgttgactccctcataatatgatcccagatcatacacctgttgaaatcttagagaattctctttctattcgtgagcttctcccaattgtatcctaaaaagtaaggaatataaatcagatgctccgtcctaagcccttggacctggagcgggcatttgtgttccccgttgacaaaaagatgatgaaatacttcctctgtgtctagtgcagcggcgtcatggaccggtgttaagtttaacctgacccttctctctgccctgcagttgcttcatctcctcaccttaagacttcacctttccttcatttcagcttcccagagatactgccacaccccggacctgtgtatcaacttgaaccctcacacccaccc

SEQ ID NO: 176138 - DNA, 388 bp, Homo Sapiens
gcacgaggctctccccgccccccgttcctaagcaatggttaagttttcttggaattttttcaagccggattttgggcctgcttaaaccacttaaatgtagttaatgacagatggtttgaggtttaaaagtcttctggagaaagcccgccagagaacattccctttgaagccccatgtaaaaatacgtgtgggagagaaagtgttttctctgacttctgctgacagtggctaaaactctgaactgtcaggagtattcaaaataagactgccttgtaggtaagcctgtggtagcttttttgagcacaggataaaatacttgagtctttgcttaaatgttactttctcaatgaggctttgtatgactaaataaaatctgtataatccccaa

SEQ ID NO: 176139 - DNA, 937 bp, Homo Sapiens
  misc_feature (46)..(46): n is a, c, g, or t
  misc_feature (783)..(819): n is a, c, g, or t
atttttttcaccatccactcatgtttcaattgacctatttctgtcntcgcagttattagatagtcgttggtaataagtttctgtaactggcatttcacctgtttttctggtatcatattagttcctcatgcagaacactccccgctgtcacaagagaaacaaatgataatcacttcccaggaaagataacaagctcgataatttaacatacgcctagtgtctccaggtggagattatcacccccattaccaataccaagctgagatttctctttcattgttctttacctgagactgacttcaagttcctaaaatgagttgaaaatataagttagaataccaagtaagggatattacatgaataaatgttttgctgaatgaattggacacaataattgactatataagcaggagagttgtttttccatgggaacgactgattgacctttgtactctttctttagcctctcctctatcttccttggcatggtcctatctggattagttctcttttgtccctggcagactgaaaaaccaactctaatgcctcagagtgaggcaggagaatagggaattagggtaaccaagaatgaaggcataagcaaaagaacagcaggtgcagctagttctaggcaagatgaggcagcacacaggccacgtcctcactcctgtggtaacaagacagaagtctccacttcagcctctgattggttgtgcaccagtccttcataggattggaggcctttaaagaactcttggggtattataaaattctagcttattnnnnnnnnnnnnnnnnnnnnnnnnnnnnnnnnnnnnntaaaaccctaaaaaacattgtaatcggggttcttgagccgcttggtcgcctgctcccgcacctacattccacttctgtggagtgtactttcccctcaataaatctgcgctttcattgg

SEQ ID NO: 176140 - DNA, 456 bp, Homo Sapiens
ttcaaattctatgtggtaatgtccctgaaataagtgctcccgtaaggctctccccccaactcactgcacagttaggttaagtggtttcattttggcttttaatttttagggattgcttttacttataaaacagaattgaatatagttatttaagatagtaacctgatgccaaaacaaagcatttgggtagtttagcttttgttgctctctgtgtcctagtctcccctgtaaacgtggattgggaaatccacagtattatcacactgatagatcaacatgataatgtgttacaaacaagtttcagcttattccaagaatagaaccctccctgttatcattctaataaagatattgtaattcatgtttataaactgaaggggaaaaattatatgatcatctcaataaatggaaaatatcatttaataccaagtaaaacccattaaaaaggtttgcatg

SEQ ID NO: 176141 - DNA, 792 bp, Homo Sapiens
gcacgaggcagctcctctcctgccagagctaggcaggcgccgaagtagccgcatggccccgtcagaagaccccagggactggagagccaacctcaaaggcaccatccgtgagacaggcctggagaccagctccggtgggaagctggctggccatcagaagaccgtccccacggctcacctgacttttgttattgactgcacccacgggaagcagctctccctggcagcaaccgcatcaccaccccaagcccccagtcccaatcgagggcttgtcaccccaccaatgaagacctacatcgtgttctgtggggaaaactggccccatctgactcgggtgacccccatgggtgggggatgccttgcccaggccagggccaccctgccgctctgcagagggtctgtggcctcagcttccttcccagtcagcccgctctgcccccaggaggttcccgaggctaaggggaaacccgtgaaggctgcgcctgtgaggtcttcaacttggggaacagtcaaggactcactgaaagccctctcctcttgtgtctgtgggcaggccgattagctggaagggccgggctctgatgcccagaggctgcaattcccaggccctggccctgcttccccagctaaagcaggagtcttttgtgcttgagccaaggaaacatcaatagatccgctaaagggcattctgaaacatccgtcgagtgggcagaggcaggataatcaccctgcacattgaagagactcattcattcatacagcaaataatactggtcatcttcacatgccagc

SEQ ID NO: 176142 - DNA, 237 bp, Homo Sapiens
taaagtaatttcccccacagtaaaatacactgactcctgagtaaattgattttccagttttatggaattgggagtctgacaagtgaaaccaatttaatgtaaagtatttggctttcaaatggtttctctgtgctattttttggaattctttcagattccagagatatcttacgtctttgattcaatttaaaatttgtacttattttcttttagaaataatgtattgtgtctgtgcag

SEQ ID NO: 176143 - DNA, 418 bp, Homo Sapiens
agttctcctcctgatcacagccatcttggcagtggctgttggtttcccagtctctcaagaccaggaacgagaaaaaagaagtatcagtgacagcgatgaattagcttcagggttttttgtgttcccttacccatatccatttcgcccacttccaccaattccatttccaagatttccatggtttagacgtaattttcctattccaatacctgaatctgcccctacaactccccttcctagcgaaaagtaaacaagaaggaaaagtcacgataaacctggtcacctgaaattgaaattgagccacttccttgaagaatcaaaattcctgttaataaaagaaaaacaaatgtaattgaaatagcacacagcattctctagtcaatatctttagtgatcttctttaataaacttgaaagca

SEQ ID NO: 176144 - DNA, 467 bp, Homo Sapiens
aggatgtcaagaaggtgaaatcctaaagcctagaaataaagttttaaatgggaaactgctattttcttgttcccatcttcaaatgctaattgccagttccagtgtattcatggtactctaagaaaaatctctttggttttgatgtcttgcatattttatatattttacaatgctttctacctgaaatgtgtagctttatattttatggcattctagtatttttgtgtactgtattttgtgcatttcatgtcttcatcaaaatcctctcagtccttgttcttttgaagcttgtgctgaggttttagcttttctatgttttatatgccgctgctttgaaagagaacctagattctatagttgtattattgttgtttcatactttaaatttatatggctgtggaaaaacgaattaaaatgttttgaggagagagaactcccccgcaacaagaccgggatgaggggcctgg

SEQ ID NO: 176145 - DNA, 635 bp, Homo Sapiens
  misc_feature (133)..(148): n is a, c, g, or t
  misc_feature (473)..(518): n is a, c, g, or t
caccagtgattcagactcaggctaaggggtcaggccagatgggccaggaaggctccgcaggaaccggtaccccgtagaccaccctgccccacctgcccattcccccctttgctgtgacacttcttcatctcannnnnnnnnnnnnnnntctaggagagctggctctgcagtgggggagggatgcagggacatttactgaaggagggacatggacaaaaggggcagtgaattcccaggcccattggggagtgatctcttggacacagagcccccattcaaaatggggcagtgcaagggtgggagtgtgcaaagccctgatctggagttacctgaggccatagctgccctattcacttctaagggccctgttttgagattgtttgttctaatttattttaagctaggtaaggctggggggagggtggggccgtggtcccctcagcctccatgcggagggttgcaggggcgcctcnnnnnnnnnnnnnnnnnnnnnnnnnnnnnnnnnnnnnnnnnnnnnncttccgctccatttggggccctgggggtttcagtcatctccccatttggtcccctggactgtctttgttgattctaacttgtaaataaagaaaatattattcaagttttgagttacc

SEQ ID NO: 176146 - DNA, 406 bp, Homo Sapiens
cccagagggaggcagccatccatctgggatggtcctaagcatggaatcctaactccggattccgtctccgatttcttgcttgtacgccagttcccaaatctggtagatgtccatgcccatgtgctcctgctgggactcaattcaggctatgtatgactatgaagtcaggctcatctgcttactggctgtgtgaactttttgtatcttggttttcttcatccatgaaatccaagtaatactacctaattgttactgtggagattaagttcaaatgcaatgtatagtaatattaagcaatttctagttattattctagccagtaatggacttcagaatcttttattacacaatataagaatatgtatgtaaagacattttggaatttcctggatgagaaggaagtctg

SEQ ID NO: 176147 - DNA, 463 bp, Homo Sapiens
gggagtcagggaagtacctgagtgaccctccttcagaccttggcaggcaggatgattcagagcccgtactgtggggatcctcactgaccagccagccctatccgcaaagcagctgggcctgggcataactttgctgggtctccaaagaccatcagcagtgcatcccatcccatggggcctgggctgctgctggttcttcatcagtcccttggtctctagcctcggccagggctgctctgctctccgccctcctttgtgtatcaagtgtcgctcacagccccactcactggggagcctttcggatctacttggtctttctcatgtcccccactggtctgtaccccagggagcgggtgcttgtactgtgtgaatccagtgttcacattcacacttaatgacttccttggcaccaatcatgtatttcaccgtttgcactttttgtatttcaataaaaatgttgatg

SEQ ID NO: 176148 - DNA, 606 bp, Homo Sapiens
  misc_feature (476)..(476): n is a, c, g, or t
  misc_feature (494)..(494): n is a, c, g, or t
  misc_feature (501)..(501): n is a, c, g, or t
  misc_feature (529)..(529): n is a, c, g, or t
  misc_feature (550)..(550): n is a, c, g, or t
  misc_feature (572)..(572): n is a, c, g, or t
  misc_feature (582)..(582): n is a, c, g, or t
cgcccggccagccctgttgtctttcaaagaacctcggccccagtgatggctgatctcactcccactgtctcgtagaattacactccttcctggggatccctcttcctgcagccttgtccttggggagtacagggaagtacctgcagtgaccctgcccccatgaccttggccaggcaggatgattccagagcccgtactgtggggatcctcactgaccagcccagccccatccgcaagccaggctgggcctggccataaacttcgctgggctctcccaagaccatcagcagtgcatccagccccctggggcttggggctgctgctggttcttcatcagtcccttggtctctagcctcggccagggctgctctgctctccgccctcctttgtggtatcaagtgtcgctcacagccccattcactggggagccttttcggatctatttggtctttctcatgttcccccactggtctgtnaccccaggggagcgggtngtttgtnattgtgtggaattccagttgtttcaaanttcaaaatttaatgaatttcnttggggaacaatcatgtatttnaacgttttgnatttttgtattttcaataaaaatt

SEQ ID NO: 176149 - DNA, 725 bp, Homo Sapiens
gaacgaggcctgggtggcgaattcggcacgaggctgccccttcgcggacgtggccccgctacagctcaaggtccgcgtgagccagagggagttgagccgcggcgtgtgcgccgagcgctactcgcaggaggtcttcgagaagaccaagcgactcctgttcctcggggcccaggcctacctggaccacgtgtgggatgaaggctgtgctgtcgttcacctgccagagtccccaaagcctggccctacaggggccccgagggctgcacgtgggcagatgctgattggaccagacggccgcctgatcaggagccttgggcaggcctccgaagctgacccatctggggtagcgtccattgcctgttcctcatgcgtgcgagccgtggatgggaaggcggtctgcggtcagtgtgagcgagccctgtgcgggcagtgtgtgcgcacctgctggggctgcggctccgtggcctgtaccctgtgtggcctcgtggactgcagtgacatgtacgagaaagtgctgtgcaccagctgtgccatgttcgagacctgaggctggctcaagccggctgccttcaccgggagccacgccgtgcatggcagccttccctggacgagcgctcggtgttcacactgaactgtggggtcgacgggaggggtgccttttacatgttctattttgtatcctaatgacagaatgaataaacctctttatatttgcccaagagacc

SEQ ID NO: 176150 - DNA, 741 bp, Homo Sapiens
ggccggggagctgcgtagctcccggccccgcggccatgcccaagcggagctgccccttcgcggacgtggccccgctacagctcaaggtccgcgtgagccagagggagttgagccgcggcgtgtgcgccgagcgctactcgcaggaggtcttcgagaagaccaagcgactcctgttcctcggggcccaggcctacctggaccacgtgtgggatgaaggctgtgctgtcgttcacctgccagagtccccaaagcctggccctacaggggccccgagggctgcacgtgggcagatgctgattggaccagacggccgcctgatcaggagccttgggcaggcctccgaagctgacccatctggggtagcgtccattgcctgttcctcatgcgtgcgagccgtggatgggaaggcggtctgcggtcagtgtgagcgagccctgtgcgggcagtgtgtgcgcacctgctggggctgcggctccgtggcctgtaccctgtgtggcctcgtggactgcagtgacatgtacgagaaagtgctgtgcaccagctgtgccatgttcgagacctgaggctggctcaagccggctgccttcaccgggagccacgccgtgcatggcagccttccctggacgagcgctcggtgttcacactgaactgtggggtcgacgggaggggtgccttttacatgttctattttgtatcctaatgacagaatggaataaacctctttatatttgccccagaaaa

SEQ ID NO: 176151 - DNA, 837 bp, Homo Sapiens; identical to SEQ ID NO: 15848

SEQ ID NO: 176152 - DNA, 443 bp, Homo Sapiens
  misc_feature (266)..(266): n is a, c, g, or t
aggtcaggaccaagccctggcctctccccaaatcccccaacctcctccctgggtggctgcctgaatatccctcaggcagggcctctcaatccttgtgggtctgtgtcacctccatctcagtcttggcctggctatgaggggaggaggaatgggagagggggctcaggggccaataaactctgccttgagtcctcctagcctgtgtgcaaaccacccaagcccaccctgacgcccagagccccacagccccactgtggccgcttgancccccacgccaaccccctggcccattgacccgcctcatctgttcattcacttatctaagctgagggtgtagcaggtaagatgccgcagcccctgcctccaatgtgctggttcagccggggcagtgcccatgtgaatctggcaaggtgtttaacaatgtgggcttgaaagtccaaacc

SEQ ID NO: 176153 - DNA, 571 bp, Homo Sapiens
  misc_feature (28)..(29): n is a, c, g, or t
  misc_feature (37)..(37): n is a, c, g, or t
ccaaactgagccctcgcaaaacacgctnngtgcattnggcatactgccccttacaggtggagtatcttcgtcacacatctaaatgagaaatcagtgacaacaagtctttgaaatggtgctatggatttaccattccttattatcactaatcatctaaacaactcactggaaatccaattaacaattttacaacataagatagaatggagacctgaataattctgtgtaatataaatggtttataactgcttttgtacctagctaggctgctattattactataatgagtaaatcataaagccttcatcactcccacatttttcttacggtcggagcatcagaacaagcgtctagactccttgggaccgtgagttcctagagcttggctgggtctaggctgttctgtgcctccaaggactgtctggcaatgacttgtattggccaccaactgtagatgtatatatggtgcccttctgatgctaagactccagaccttttgtttttgctttgcattttctgattttataccaactgtgtggactaagatgcattaaaaaaaacatcagagtac

SEQ ID NO: 176154 - DNA, 913 bp, Homo Sapiens
  misc_feature (230)..(398): n is a, c, g, or t
  misc_feature (412)..(422): n is a, c, g, or t
  misc_feature (462)..(470): n is a, c, g, or t
  misc_feature (514)..(568): n is a, c, g, or t
  misc_feature (697)..(708): n is a, c, g, or t
  misc_feature (782)..(782): n is a, c, g, or t
  misc_feature (791)..(791): n is a, c, g, or t
  misc_feature (853)..(853): n is a, c, g, or t
ggtatgtattttgtggtattgagagtatagaaagtttagagtgtcaaacatgcgtttaatgtgtatttttaaacaaatttatggcaattaaaatatttggaagacaagggtatcacatttcaatttgtaaagatctttttaactctactgtgtcattaagatgctttgtacaatgccaaaccatagttggagaaactaagtttaataaatatcaaatagattttctgtannnnnnnnnnnnnnnnnnnnnnnnnnnnnnnnnnnnnnnnnnnnnnnnnnnnnnnnnnnnnnnnnnnnnnnnnnnnnnnnnnnnnnnnnnnnnnnnnnnnnnnnnnnnnnnnnnnnnnnnnnnnnnnnnnnnnnnnnnnnnnnnnnnnnnnnnnnnnnnnnnnnnnnnnggggggggggcggnnnnnnnnnnnagaaaaaaggagcacaagcaccgcggccgcggcgcggcgnnnnnnnnngggcgggaacaacaaggccgccccaacacccaccccacaaaaannnnnnnnnnnnnnnnnnnnnnnnnnnnnnnnnnnnnnnnnnnnnnnnnnnnnnngccggggaccacaaccagcaccctccaacaacaaccaccagaggggaagcgagtcgagggggagccaataggggcacccaccacccggccccgccacacacagggagacttgcctaaatacattatttnnnnnnnnnnnntcgcataccactcccatatcaaatcttggatttgattactatgaacaacctttctctcccggcgctgggaaccntctctttcntggcggctcggtggtcagcaacatctcctcccccccgggggctacaaccaccaaaaccgccngccatcaacacataaatacagtttctctcctgcgccgagaaataaacaaccgccgcacct

SEQ ID NO: 176155 - DNA, 581 bp, Homo Sapiens
gctccgcgactcggcctctccaccccctccccagcctttctctcgccctcttctcccacactcccggccggcgcctcggctttgtgcgaggagatggtgtagccccctggccgccgaagaggagccggacacttgtctcccgtctccgagctgctccccacccctggaggagagacccccccctcggctcggcgccttctgcgtctcccggctggtggggaagcctctgcgccgccggcaccatgagtgaacagagtatctgtcaggcaagagctgctgtgatggtttatgatgatgccaataagaagtgggtgccagctggtggctcaactggattcagcagagttcatatctatcaccatacaggcaacaacacattcagagtggtgggcaggaagattcaggaccatcaggtcgtgataaactgtgccattcctaaagggttgaagtacaatcaagctacacagaccttccaccagtggcgagatgctagacaggtgtatggtctcaactttggcagcaaagaggatgccaatgtcttcgcaagtgccatgatgcatgccttagaagtgtctctccag

SEQ ID NO: 176156 - DNA, 753 bp, Homo Sapiens
gggggcggggagttgttgctgccgcgatgctggtggcggcggccgcggagcggaacaaggatcccatcttgcacgtgctgcggcagtacctggatccggcccagcgtggcgtccgcgtcctcgaggtggcctcgggctccggccagcacgcagcgcacttcgcgcgggccttccccctggccgagtggcagccgtcggacgtggaccagcgctgcctggacaggggctcttcagagcagcaggacacctgctcaaacccagggccctgctcatcacctacgggggagggggtgccctttcattctccaaaccccagcctgcaagtctgtcccaggctctctgggaaataccccgaccttggtccagtgggctgtgtccccatgcccacagccctatgccatcaatgggaagatctccccccagagcaacggtggactttgacctgatgctcaaaatgcaggaacccagaatgggggcttcgggacacagccctcctggaggacctgggaaaggccagtggcctgctcctggagaggatggtggacatgccagccaacaacaaatgcctgatcttccggaaaaactaagcccctccttcacccccgcacacctgcatccctccggaggctctgtgaggcacgaaccctgcctccctaggccggaccttgtggacgacagccccacccagtctgtgctctgcagccgctgccgaagggcccagcctgctcagaataaagcatgtcctgctgccgg

SEQ ID NO: 176157 - DNA, 1480 bp, Homo Sapiens
  misc_feature (524)..(571): n is a, c, g, or t
  misc_feature (579)..(600): n is a, c, g, or t
  misc_feature (623)..(661): n is a, c, g, or t
  misc_feature (715)..(725): n is a, c, g, or t
  misc_feature (776)..(793): n is a, c, g, or t
  misc_feature (925)..(938): n is a, c, g, or t
  misc_feature (958)..(958): n is a, c, g, or t
  misc_feature (1056)..(1056): n is a, c, g, or t
  misc_feature (1133)..(1133): n is a, c, g, or t
  misc_feature (1137)..(1137): n is a, c, g, or t
  misc_feature (1259)..(1259): n is a, c, g, or t
  misc_feature (1307)..(1307): n is a, c, g, or t
  misc_feature (1402)..(1402): n is a, c, g, or t
gggcgtccgcggcggggagttgttgctgccgcgatgctggtggcggcggccgcggagcggaacaaggatcccatcttgcacgtgctgcggcagtacctggatccggcccagcgtggcgtccgcgtcctcgaggtggcctcgggctccggccagcacgcagcgcacttcgcgcgggccttccccctggccgagtggcagccctcggacgtggaccagcgctgcctggacaggaacccagaatgggggcttcgggacacagccctcctggaggacctgggaaaggccagtggcctgctcctggagaggatggtggacatgccagccaacaacaaatgcctgatcttccggaaaaactaagcccctccttcacccccgcacacctgcatccctgccggaggctctgtgaggcacgaaccctgcctccctaggccggaccttgtggacgacagccccacccagtctgtgctctcagccgctggccgaagggcccagcctgctcagaataaagcatgtcctgctgccgnnnnnnnnnnnnnnnnnnnnnnnnnnnnnnnnnnnnnnnnnnnnnnnngaacctcnnnnnnnnnnnnnnnnnnnnnncaagggcgttaggtccgccaaannnnnnnnnnnnnnnnnnnnnnnnnnnnnnnnnnnnnnntcttttctcagacacccgccgcaggggaaaaaggacacccgcccttttgggcgnnnnnnnnnnnggcgtttcgaagaaacttttttattaacacccgccttcggttttgtggcgnnnnnnnnnnnnnnnnnntggagttataaggggagacaaccggtggggcgccacatagcggtgtgtgtgtgtccgctataccgaaatacacacctccgcctcagcgccgcaacagaagacacacacagctggcctctgtgcagaatagtnnnnnnnnnnnnnnaccacgtaaaataaataaanaaacacgccccccgccggcgcgcggtgggcggaaacaacaacgcgcaagagtagttttatttttttatgaagcagaatcgacgcccccccgcggccanagtggttagaggcgcccgtcctcgctgagaagtgtatgtgcacagtagacacgggggcggatttctcctcacggccncgcncggcggagggaggtttgtttctatcgcgggccgggctcgtttctatatagtatgacccacactcgttttcactcgcccccgcgcgccccgcgcgatagcaatcctctgcccagcgcgaggcnacaacaagccgtttgtgtggtaagcttatattatcatccatacagcantccgtctccgcgccgccaccacgcgccgcggggcgagatatcatctctaacaaaaacacaatcgcgaggctgtacggagagatagcatgatctangcaccacccgctactccgcgcgcccggtagataatagatatcgcctacgtgcagtattgtagctgagagagacaaaaa

SEQ ID NO: 176158 - DNA, 954 bp, Homo Sapiens
  misc_feature (115)..(160): n is a, c, g, or t
  misc_feature (892)..(892): n is a, c, g, or t
tctgccctcccagcccacttctgcctgttttaaacgagtttctcaactccagtcagaccaggtcttgctggtgtatccagggacagggtatggaaagaggggctcacgcttaacnnnnnnnnnnnnnnnnnnnnnnnnnnnnnnnnnnnnnnnnnnnnnnttgctaagggcaaatgaacgaagcgccaaccttcctttcggagtaatcctgcctgggaaggagagatttttagtgacatgttcagtgggttgcttgctagaatttttttaaaaaaacaacaatttaaaatcttatttaagttccaccagtgcctccctccctccttcctctactcccacccctcccatgtccccccattcctcaaatccattttaaagagaagcagactgactttggaaagggaggcgctggggtttgaacctccccgctgctaatctcccctgggcccctccccggggaatcctctctgccaatcctgcgagggtctaggcccctttaggaagcctccgctctctttttccccaacagacctgtcttcacccttgggctttgaaagccagacaaagcagctgcccctctccctgccaaagaggagtcatcccccaaaaagacagagggggagccccaagcccaagtctttcctcccagcagcgtttcgccccaactccttaattttattctccgctagattttaacgtccagcccttcctcagctgagtggggagggcatccctgcaaaagggaacaaaaaagccaagtcccccaagcccacggcccggggttcaaggctaaagctgctgggggaggggctgcctggttttacttcacccaccagcttccgccctcccccattctgggggggccccctccttccagctttaacttgtcaantggtccattaccttcttccccccaccttttccccatttggggcgcttttttttctcctccgc

SEQ ID NO: 176159 - DNA, 1110 bp, Homo Sapiens
  misc_feature (132)..(221): n is a, c, g, or t
  misc_feature (325)..(370): n is a, c, g, or t
ggcctgggtggcgaattcggcacgagggccagagggccccagagttccttgcatctaatttcacccccaccccaccctccagggttagggggagcaggaagcccagataatcagagggacagaaacaccagnnnnnnnnnnnnnnnnnnnnnnnnnnnnnnnnnnnnnnnnnnnnnnnnnnnnnnnnnnnnnnnnnnnnnnnnnnnnnnnnnnnnnnnnnnagcccacttctgcctgttttaaacgagtttctcaactccagtcagaccaggtcttgctggtgtatccagggacagggtatggaaagaggggctcacgcttaacnnnnnnnnnnnnnnnnnnnnnnnnnnnnnnnnnnnnnnnnnnnnnnttgctaagggcaaatgaacgaagcgccaaccttcctttcggagtaatcctgcctgggaaggagagatttttagtgacatgttcagtgggttgcttgctagaatttttttaaaaaaacaacaatttaaaatcttatttaagttccaccagtgcctccctccctccttcctctactcccacccctcccatggagaagcggggactgtctgaccctcatccctgccttctcccgggaacaggagcagaaaatatatgtgcagcaccggctccgggagctggggctcgcttgtgtgggaactgctggaccgccagggtgcatacttctacctggcaggcaacgcccaagctccatgccagcggacgtctcggaagccctgatgtccatcttccaggaggagggtggactctgcagcccggacgcagccgcgtatctagccaggctccaaccaaaaacggcgcttccaaaaacaaaacgtgggccctaaagcccgcggcttggcccgtgccccctctgacagccatcctccggggagcccaggaaagcattccacgaagggagcttccgggacagaaaaccggtcatcccttctcgggaacaaacaaactggggcacccggggaaaaaaccagcttcccgaagaaaaggcccgaactcctgggtgaacctgggaaccccaccccttttagagcctgaaccccactgcgaacctctgggccaagccaggccccggccgctccccca

SEQ ID NO: 176160 - DNA, 784 bp, Homo Sapiens
gctgactttggaaagggaggcgctggggtttgaacctccccgctgctaatctcccctgggcccctccccggggaatcctctctgccaatcctgcgagggtctaggcccctttaggaagcctccgctctcttttttccacaacagacctgtcttcacccttgggctttgaaagccagacaaagcagctgcccctctccctgccaaagaggagtcatcccccaaaaagacagagggggagccccaagcccaagtctttcctcccagcagcgtttccccccaactccttaattttattctccgctagattttaacgtccagccttccctcagctgagtggggagggcatccctgcaaaagggaacagaagaggccaagtccccccaagccacggcccggggttcaaggctagagctgctggggaggggctgcctgttttactcacccaccagcttccgcctcccccatcctgggcgcccctcctccagcttagctgtcagctgtccatcacctctcccccactttctcatttgtgcttttttctctcgtaatagaaaagtggggagccgctggggagccaccccattcatccccgtatttccccctctcataacttctccccatcccaggaggagttctcaggcctggggtggggccccgggtgggtgcgggggcgattcaacctgtgtgctgcgaaggacgagacttcctcttgaacagtgtgctgttgtaaacatatttgaaaactattaccaataaagtttcgtctaaacaccacccacccaag

SEQ ID NO: 176161 - DNA, 459 bp, Homo Sapiens
  misc_feature (66)..(94): n is a, c, g, or t
  misc_feature (260)..(260): n is a, c, g, or t
  misc_feature (338)..(338): n is a, c, g, or t
  misc_feature (356)..(356): n is a, c, g, or t
tatgtttacaacagccacactgttcaagaggaagtctcgtccttcgcagcacacaggttgaatcgnnnnnnnnnnnnnnnnnnnnnnnnnnnnnagggcctgagaactcctcctgggatggggagaagttatgagagggggaaatacggggatgaatggggtggctccccagacggctccccacttttctattacgagagaaaaaagcacaaatgagaaagtgggggagaggtgatggacagctgacagctaagctggangcggggcgcccaggatgggggaggcggaactggtgggtgagtaaaacaggcagcccctccccagcagctctagccttnaaccccgggccgtgcttngggggacttgcctcttctgttcccttttcagggatccctccccactcagctagggaaggcttgacgtaaaatttaccgagaataaattaggagttggggaaac

SEQ ID NO: 176162 - DNA, 373 bp, Homo Sapiens
  misc_feature (310)..(310): n is a, c, g, or t
tgcttatgaatctatttaattgctcagactgtgctagagaatacgtaccatgaaatacatatatttcataaggttcagttacaaaatggattgtttcaaatggcaatttcttacactaacctgattatgaaaaaaagaagtctgtatcatctgcttccaagtctgttatgtccaaatatattttaattatgcatttattttgctacttttataaatattagagatttcaccttaaattatttttgtaactagttctaggaacatgttttccaattattattttcctaatgggggacatataattgacccnatggtttatggcatatatggttcccctacacaggtggaaacttttttttaaaagggattggga

SEQ ID NO: 176163 - DNA, 474 bp, Homo Sapiens
gggaccgcaggtacgatagatcctcctggcccgccgtgtcccacagcgccctccacctgcttgccgtccacctcaatgtcggccacatagttctcgaagacggtgggcacgtacacctcggggaactcgtccttactgaacacgatcagcaggcacgtcttgccacacgcgccgtcgcccaccaccaccagcttcttgcggatggccgccatgagcggccggcgcccgggcaggcaggagggggcccgcgaacgcctcgctgccctcccgctcgccgctcactgctcacctcgggctgcgcgcaggtggcgagagggtcgctagctgcacccgggccccgcggtggcgcgttctctcgctgcgcttcggctgccgcggcgggggcggtgggggcgcgggggcatagggcgcaccgtgcgtctcgccgcgctgctcccgggcggtggtcgctctgctcaccccaggccggggatc

SEQ ID NO: 176164 - DNA, 489 bp, Homo Sapiens
ttttcacattctagcactttattggaacttggttgtgtacatcaatgagatcacatcaaagtaaaagcagcattttcacacaataatatcccgatatctgtgctatcttcttacataatttaataaatcccaagatgctcctgattttggtatcgaagagcttgagtggtccagaaatatctctacataaatataaatcatcacatctaaaataaccatcattgttttagtaggtcccaaaagtcctgggaacacctcttaaaatataattgccataggctggctgcagagctggtgggagggagtgaagggggtacacgtggagctaattacagcaggagctgggcagagggacacacacaaggggatgggggccagagatcccgaaagctgggcagggaactcagtcaccctgcattttccaacattgcttgagtgtcaaagctaacagatgtgagactccagtgcagaaagaagcccatcaccccc

SEQ ID NO: 176165 - DNA, 635 bp, Homo Sapiens
aagatgtggaagtccttctaaacgagatgtggacataccatccgagacattctaggatggatccgctctacgtgtacctatgtgggagcagctaagctcaaagagttgagcaggagaactaccttcatccgagtcacccagcaggtgaatccaatcttcagtgaggcgtgctagacctgagcagttctaccctcccaaggcaccagtactctaccatggggcatcccaagtggggtcctcacccatcccagctactgcagctctgtattactttgtcatttcctgttgtctcactcctgagggctcctgcagtaactctgtacttctctatctgcacacacaaaacgcccaaggcactcactggggaggaagcaaggaagcaaacagtctgagaaaatgatgcaagaaaatcaaatgggaatctggggacccaacacaacatcctgaagattattaaaaggaaaagatgctgattggtacataaatcttttacatggccttggtctagaggaggcaggcttttagaatcatgttttgttaatccgcttcactaaattggaccttcacatatctaaaaagctctgaagtgtttgtatatttgaaatacctcaataaagagagagctcattgactgt

SEQ ID NO: 176166 - DNA, 674 bp, Homo Sapiens
ggggcccttccgtgctgagccgcctgcaggacgcggccgtggtgcggcctggcttcctgagcacggcagaggaggagacgctgagccgagaactggagcccgagctgcgccgccgccgctacgaatacgatcactgggacgcggccatccacggcttccgagagacagagaagtcgcgctggtcagaagccagccgggccatcctgcagcgcgtgcaggcggccgcctttggcccggccagaccctgctctcctccgtgcacgtgctggacctggaagcccgcggctacatcaagccccacgtggacagcatcaagttctgcggggccaccatcgccggcctgtctctcctgtctcccagcgttatgcggctggtgcacacccaggagccgggggagtggctggaactcttgctggagccgggctcactctacatccttaggggctcagcccgttatgacttctcccatgagatccttcgggatgaagagtccttctttggggaacgccggattccccggggccggcgcatctccgtgatctgccgctccctccctgagggcatggggccaggggagtctggacagccgcccccagcctgctgacccccagctttctacagacaccagatttgtgaataaaggttggggaatggacagccctgaaacaccacca

SEQ ID NO: 176167 - DNA, 328 bp, Homo Sapiens
aacctgtttctgagccacggagacagggaggaaggagcgcgacagtgccacctgttcggcatcataaatgcccctgcagcccatgggggaggagatggggaagtggagccaccctgcctctgcagggcaaggcagggcctcgccagtggggcttgggaccatctcgaaccaccagcgtggagaagcagaagcaaaagcactcgccaggctgcagcctcaggcactggcaggggctggtgcggccccactcccctcccccgctcccatttgtgcccatcctgttgtgaccaaccccgttttaaacatgtttcaatagatccagattctc

SEQ ID NO: 176168 - DNA, 889 bp, Homo Sapiens
  misc_feature (266)..(279): n is a, c, g, or t
aaaaaagcgggggggaaatgcgaggaaccattttattacacctccctgattttcaccccttgagttttattttctccccttgtttatttgtttaatgctagaaactgtattcctaagagagcatacctctttcaggtgagcatgataattggaagattttgatacttagagtatgaacatataattaagaagtgattacctaataaagataacaatgtgactattttaattattttggtggcagggagttggttttacatcacccnnnnnnnnnnnnnngccctggtttcaaattcattggtaataaatatgctaactttctgaatcaaaatggagagcctctcaagaaaaagagctatgcagtcagcaatgacttaaattagtcaggatagcaggcatctggggttaaggctgtttccaccattttggtctcaccaccatatacgagtgggaccacagctgtgtagcacttgtttctgtcataagtgtagcaggtctctgtagcactgtcttcatcacagatattgctctgggtagcagtaactatctgattatccagctccacttctgtaggatcacattttttacagaggtcagacaaatggtacacaaatctggttctcaatggtgaggtgggatcagagatattctccctgttgttcagaggaacaataattcggatgtttctctccacaatgtcctcattaggatcttcggaagaacggatgatcctggaagtaatccgggcacacttacatttgttgtcaacaagaacaatcctttcatcttcttgggctttcacatgaacagccttaataaaaaccgccaggactccccagaaaagcaaatggttcttcatcttgacttcacttcttctgaaaaactggag

SEQ ID NO: 176169 - DNA, 891 bp, Homo Sapiens
  misc_feature (138)..(138): n is a, c, g, or t
gaaaattcaagctactcatgtttattaactgatctacatttgacaaaacaaagataggggcacaaagagctgtttgacaaagtcaaatcccaggtatcgaacaatagtattcccctggctgccctagaggcactttgntcgactcccacgggggatgtcctctgccatgcgaccgctcagttatcacactgcactgctgttgggttgcatgtggagtacaggtctgcatgcatctgacatcagagaagtggcccactaaacactaagagccctagttctagatgtcacaagttgatgttagtaaccaccaagtactaattctgtactaaaatggtcagaaaagataacaagctttgagtactgtgtaaaattataccctttatagggaataggctcttgtaagctgccttttaacttatttcctcccttgccaaagtctattcatttatgtcaaatcaagaacatacagcacaacattttctaaaaaagcactttaaccatggtcattaacttctccctaaggactcatgcctaaggttatttacataagatttgggatcttcataatttaggagaacttttaattctgagctcgggaagatatttctcctattagacaataggacactcagaaatacctgaggtataatcactgaaaaccttcttaaaggcgaaaaaaaacaaagattgaggtttcctatactggcatgaaagtacacatacaatttttatcgtagaaaagactaaaatgtgaatagtgacaaaacataacagataaattgggaggaatcagctattaggctccaattcttcttactatattttgcagacaattctagtattatagagattatcaggatataccaaaaatgattttaggtagaaacttca

SEQ ID NO: 176170 - DNA, 696 bp, Homo Sapiens
  misc_feature (83)..(99): n is a, c, g, or t
gttttttggctctttcaaaggtaatggcccatcgatgagcatttttaacatactccatagtcttttcctgtggtgttaggtcnnnnnnnnnnnnnnnnnccagggggctggggtgggggtttgtcatgggggaactgccctttaaattttaagtgacactacagaaaaacacaaaaaggtgatgggttgtgttatgcttgtattgaatgctgtcttgacatctcgtgccttgtcctccggtatgttctaaagctgtgtctgagatctggatctgcccatcactttggctagtgacagggctaattaatttgctttatacattttcttttactttccttttttcctttctggaggcatcacatgctggtgctgtgtctttatgaatgttttaaccattttcatggtggaagaattttatatttatgcagttgtacaattttattttgttttgccaagaaaaaagtgtaatgtatgaaataaaccaaagtcacttgtttgaaaataaatctttattttgaactttataaaaagcaatgcagtaccccatagactggtgttaaatgttgtctacagtgcaaaatccatgttctaacatatgtaataattgccaggagtacagtgctcttgttgatcttgtattcagtcaggttaaaacaacggacaataaaagaatgaacacattcctcgtgtgtgacc

SEQ ID NO: 176171 - DNA, 979 bp, Homo Sapiens
  misc_feature (894)..(904): n is a, c, g, or t
ggggctcgcgtcaagtgactgaggcctgtggtggagaaggacgtgccgtgccgctgggttctgagccggagtggtcggtgggtgggatggaggcgaccttggagcagcacttggaagacacaatgaagaatccctccattgttggagtcctgtgcacagattcacaaggacttaatctgggttgccgcgggaccctgtcagatgagcatgctggagtgatatctgttctagcccagcaagcagctaagctaacctctgaccccactgatattcctgtggtgtgtctagaatcagataatgggaacattatgatccagaaacacgatggcatcacggtggcagtgcacaaaatggcctcttgatgctcatatctgttcttcagcagcctgtcataggaactggatcctacctatgttaattaccttatagaactactaaagttccagtagttaggccattcatttaatgtgcattaggcacttttctgtttatttaagagtcaattgctttctaatgctctatggaccgactatcaagatattagtaagaaaggatcatgttttgaagcagcaggtccaggtcactttgtatatagaattttgctgtattcaataaatctgtttggaggagcaacaaccaaccactcacaccaaacaaaactcgaggcatctatgtcgggggcggaaaaaagaggtaatgaaactggcacatgggtccttagctggtttcctggacccaccctttccttggaacaaaagtgggtaaatactggccgggcctccctaataagggagtcgtatttattttccaaaaacccacggttaacccggcatttaaggaatccggcttgcaataacccgggtaaatttaacccccccctaatggaggcgggcnnnnnnnnnnngggatcccaaaaggtaccttctttgaaaatccctctttttttccgcgcagcaaactttgtctgctttttcaaacc

SEQ ID NO: 176172 - DNA, 1147 bp, Homo Sapiens
  misc_feature (912)..(1000): n is a, c, g, or t
gggctcgctcgacacagccagagctggaggtgggtgcccggcacggaggggcctgcggaccaatggctctgccctgcaccttagggctcgggatgctgctggccctgccaggggccttgggctcgggtggcagcgcggaggacagcgtgggctccagctctgtcaccgttgtcctgctgctgctgctgctcctactgctggccactggcctagcactggcctggcgccgcctcagccgtgactcagggggctactaccacccggcccgcctaggtgccgcgctgtggggccgcacgcggcgcctgctctgggccagccccccaggtcgctggctgcaggcccgagctgagctggggtccacagacaatgaccttgagcgacaggaggatgagcaggacacagactatgaccacgtcgcggatggtggcctgcaggctgaccctggggaaggcgagcagcaatgtggagaggcgtccagcccagagcaggtcccccgtgcgggctgaggaagccagagacagtgacacggagggcgacctggtcctcggctccaccaggaccagcggagcgcaaggggacagtgctgaggccctgctgagtgacctgcacgcctattgctggcagcgcagcctgggatgacagcgccagggcagctgggggccagggcctccatgtcaccgcactgtagaggccggtcttggtgtcccatccctgtcaaagccgctcactccccgtgcctctgcttcccaagatgccatggctggactggacccccagcccacatgaccatgcctcagactgtcaccccctaccagttcccaagtccatgtgtaccccgctcaccacgggaacggctccccccaaccacaggcatcaggcaaccatttgaaataaaactccttcagcctgtgnnnnnnnnnnnnnnnnnnnnnnnnnnnnnnnnnnnnnnnnnnnnnnnnnnnnnnnnnnnnnnnnnnnnnnnnnnnnnnnnnnnnnnnnngaccacggggtcccattgaacccccaaaaaacccaaccctcattggtggggccccctgggccccccaaaaaattttttcaaaacctttcgtttgggggcggcggcccccctaaggtaaagggaaactgggcccaaaccttgtttccc

SEQ ID NO: 176173 - DNA, 335 bp, Homo Sapiens
ggagttgtaactgtttaaaaaataacacttggaataagatttgtaagctcacaaagccttcttccaaagttgcttgagccaagtgcttaaaaagttaataaaataaaatgatctgtatgatacctgcaattgaaaagccgaaaagattatactgtcaagtccagtaaatgacatttttagagatgcttttgtagacaagcatatggaatatgtgattgtatatattttctgcaactaaaaaaggaataaaaacttgtgtttgtgtgtttttctaaaactttgtgttttggcaatcgttttataactaaaataaaatgaaagctaaatctaaaaag

SEQ ID NO: 176174 - DNA, 109 bp, Homo Sapiens
caaaccacctctacatattatggaaagaaaatatttttgtcgattcttattcttttataattatgcgtggaagaagtagacacattaaacgattccagttggaaacatg

SEQ ID NO: 176175 - DNA, 492 bp, Homo Sapiens
aaaattagctaggcatagtacctgaggccaggaggtccaggccgcaatgagatgtgtttggccattgcacaccagtctgggtgacagagaaagaccctgtctcaaaaacaaattaaataaaatatcttcatatataaattaagctaattaaaaatatttttccctgtatttatttaatattttctaatctgaacccatatacagctgactaattcattcttagaaatgtgttatctgtaatctttcctaaacagagtagcccacaagaatcatgcactttttaaaattatttctaagaagccataacaaagctgtgtactaataaagactgcagcaagcacttgtgttatttaaattatgtaagtagattgtcatttgtcaggctcctgtacatttacatagcatgttatattaataataaatgtaaaatatgactaaagttttcattggaacacaatgtagacaggaggtttattatgagcattttgcaga

SEQ ID NO: 176176 - DNA, 853 bp, Homo Sapiens
  misc_feature (667)..(667): n is a, c, g, or t
  misc_feature (677)..(677): n is a, c, g, or t
  misc_feature (682)..(683): n is a, c, g, or t
  misc_feature (686)..(686): n is a, c, g, or t
aataaaaagggcagccctccttaccactgtggaagtccctcagaggccttggggatgacccagtgaagatgcaggtttgaccaggaaagcagcgctagtggagggttggagaaggaggtaaaggatgagggttcatcatccctccctgcctaaggaagctaaaagcatggccctgctgcccctccctgcctccacccacagtggagagggctacaaaggaggacaagaccctctcaggctgtcccaagctcccaagagcttccagagctctgacccacagcctccaagtcaggtggggtggagtcccagagctgcacagggtttggcccaagtttctaagggaggcacttcctcccctcgcccatcagtgccagcccctgctggctggtgcctgagcccctcagacagccccctgccccgcaggcctgccttctcagggacttctgcggggcctgaggcaagccatggagtgagacccaggagccggacacttctcaggaaatggcttttcccaacccccagcccccacccggtggttcttcctgttctgtgactgtgtatagtgccaccacagcttatggcatctcattgaggacaaagaaaactgcacaataaaaccaagcctctggaatctgtcctcgtgtccacctggccttcgctcctccancagtgcctgnccctnnccncttcgctggggtctccacgggtgaggctggggaacgccacctcttcctcttccctgacttctccccaaccacttagtagcaacgctaccccaggggctaatgactgcacactgggcttcttttcagaatgaccctaacgagacacatttgcccaaataaacgaaaaa

SEQ ID NO: 176177 - DNA, 436 bp, Homo Sapiens
  misc_feature (264)..(299): n is a, c, g, or t
tgttcaaggatatttattgcaacaatatttatgaaaatgacctgaaattccaacaatagagacaggcttaaataatgcataaaacattcatatcatagaatattttacagctgtttaaaatcatgtttttgtagaataatcaatgatttcagaaaatgtttataaagttcaagatttaaaaagtataatacaaaactgtacatagagcaggattccaaaatttcaaatgcaaatacatataggtacatatatacatataccacnnnnnnnnnnnnnnnnnnnnnnnnnnnnnnnnnnnntgttaacgcttgttatttctatgcagtgggattatgagaggtttcattttctcgtttaaagtttcctatattttccaattttccctaaattatgtattgctttcacatttagaaaaataataaataaatgttaataa

SEQ ID NO: 176178 - DNA, 300 bp, Homo Sapiens
ttttgcctttaagcttatttattaatgggatctggtttcactgtgggtgacacttccactttaacgcaacgatcaaaaacattaagatctacgacaggatggatattgggacaataagcatgacaatgtcattgttgccaagccaaattttacaagaggtgaagggaagcaaagggtaactagaatgcagaggttcttcatcatcatcttcaatcagctgtcacagaattccccactactgaacctcccttacaattcttacttctccccacccctccaggtatctaaaatagaaaagaa

SEQ ID NO: 176179 - DNA, 850 bp, Homo Sapiens
ccgcaaagcgaacggcggtcgcggcgcgggccccgcgggggttagaggtcaccatgctgagggtcgcgtggaggacgctgagtttgattcggacccgggcagttacccaggtcctagtacccgggctgccgggcggtgggagcgccaagtttcctttcaaccagtggggcctgcagcctcgaagtctcctcctccaggccgcgcgcggatatgtcgtccggaaaccagcccagtctaggctggatgatgacccacctccctctacgctgctcaaagactaccagaatgtccctggaattgagaaggttgatgatgtcgtgaaaagactcttgtctttggaaatggccaacaagaaggagatgctaaaaatcaagcaagaacagtttatgaagaagattgttgcaaacccagaggacaccagatccctggaggctcgaattattgccttgtctgtcaagatccgcagttatgaagaacacttggagaaacatcgaaaggacaaagcccacaaacgctatctgctaatgagcattgaccagaggaaaaagatgctcaaaaacctccgtaacaccaactatgatgtctttgagaagatatgctgggggctgggaattgagtacaccttcccccctctgtattaccgaagagcccaccgccgattcgtgaccaagaaggctctgtgcattcgggttttccaggagactcaaaagctgaagaagcgaagaagagccttaaaggctgcagcagcagcccaaaaacaagcaaagcggaggaacccagacagccctgccaaagccataccaaagacactcaaagacagccaataaaattctggttccatcatttaaac

SEQ ID NO: 176180 - DNA, 894 bp, Homo Sapiens; identical to SEQ ID NO: 15040

SEQ ID NO: 176181 - DNA, 875 bp, Homo Sapiens
  misc_feature (690)..(701): n is a, c, g, or t
tcatcctcctccagggttgggcctgccgccagccagctacccacctcctgccgtcccccctggaggacagcctcctgtgcccccgcccattcccccacccggcatgcctccagttggggggctggggcgggcagcctggatgagataacgtgagccttttttccctctttgtttttttaacaagattttctaatcgacttgcagagtagttgaagtgggtaagcagcagggtaccttgtataatgcacgacagttgcagtatgggaagaatggaccgggcccctgggataaaatcagagtggtcctcacacctagaggacggggacaaccagctttcagagtagcctcatcagtgcccttgcagtctgactgtgtacacttggttcagctaatgtctgagagtcctgcactgggttactttatactagtgaggacgttaaccagccatattggctcaataaatagcttcggtaaggagttaatttccttctagaaatcagtgcctatttttcctggaaactcaattttaaatagtccaattccatctgaagccaagctgttgtcattttcattcggtgacattctctcccatgacacccagaaggggcagaagaaccacatttttcatttatagatgtttgcatcctttgtattaaaattattttgaaggggttgcctcattggatggcnnnnnnnnnnnncctccagggagaaggggagaaatgtacttggaaattaatgtatgtttacatctctttgcaaattcctgtacatagagatatattttttaagtgtgaatgtaacaacatactgtgaattccatcttggttacaaatgagactccttcagtcagttatccaaataaaagcagttct

SEQ ID NO: 176182 - DNA, 543 bp, Homo Sapiens
cttgcacctggcagatccaccaggggccatgcccccgcagcagcttatgccaggacagatgccccctgcccagcctctttctgagaatccaccgaatcacatcttgttcctcacaaacctgccagaggagaccaacgagctcaggctgtccatgcttttcaatcagttccctggcttcaaggaggtccgtctggtacccgggcggcatgacatcgccttcgtggagtttgacaatgaggtacaggcaggggcagctcgcgatgccctgcagggctttaagatcacgcagaacaacgccatgaagatctcctttgcaaagaagtagcacattttccccccatgcctgccccttcccctgttctggggccacccctttcccccttggctcagccccctgaaggtaagtccccttgggggccttcttggagccgtgtgtgagtgagtggtcgccacacagcattgtacccagagtctgtccccagacattgcacctggcgctgttaggccggaattaaagtggctttttgaggtttggtttttccc

SEQ ID NO: 176183 - DNA, 718 bp, Homo Sapiens; identical to SEQ ID NO: 14355
  misc_feature (688)..(688): n is a, c, g, or t
  misc_feature (700)..(700): n is a, c, g, or t

SEQ ID NO: 176184 - DNA, 935 bp, Homo Sapiens
attaaataaaccagtagaaaggctcctatttacatccaggttgtcagtttaagctccaagtaatatgcaaggcacaattcttcctttctccagctttagaaaaatcaacccacatggcccagccctgaaggactgaagggagcttgtgcgggatcccgtcatcctggactctccacacagcgtccacgcatggatggccatgggcatgagtctctggatctccctgagggtagcccagcctcggcctggagcacaggggcctgtgatctgagaatctcagatccagaatcaggagctgggaagagaggacttttccaagggtctcctcccccaggccctggggagtcccttctggatgggcaggccctgggctggtggccgccctccatcattggcccaggccgggctctagggccggctgggaagctgtctggggccctgcgcctgataagctgccatgaaagtggccgcctctcacactggcaggcggtggctcagatctgctgaggttctggagtggcacaggaacaggaggagcaaatgacactgggtctttgtgctgaggcaggacacagcggctttccgaaacacacacacagaaaatatgactcctgctgccatctcaaggacattttcctaaggacagtcctggtgtcctgatggagtgaaagggatcacacgtgggatgtcccagcagggcctaagccaagtccatcagatgtctcaacggcttatgaaacaaaaacagaggactgaagtctgttcacagtggcccatggttgggcagcagccctgggtgagctcctgtgttctccagcctctcgctcacccagggcttggctatcctggcctccaggtgctggttcctgaggcttcccttgcggcagtggcgcagatacagggacactcatgtcccattgctcctcagaagtcct

SEQ ID NO: 176185 - DNA, 836 bp, Homo Sapiens
gagaaacaagcatttgtgtttattaaccaaggagagggaagtcaaagcaatgcagactcctaaccagtccctcctatagtctgcccacctaggccagctgccaaggactaggaagagcagtggataggcccctccccactgccccgaccccagggtgagttctgctgggtaaggaagaggaagtcagcaaaggacagaggccaaggaaagaaggaggaaacagagccgctggggagacaggattgaggagatcccttggcccctcactcacagtggggagggcaaagcaccgcaaatgcagccccacaagaggaactaagcaggagtacactcatgtcaaaaaccttgtattgggggaggggaggagggggttctcaggtgtccaaagccaagaacaaaacccttggagagtcagtccttgcccaagaatgctggtccagcctctaagcctttgcctccataccaagttcacaacagggtggagcctctgacacggccgtctagagaatggatgcaagagaggtccagggaccacttgcctctgtaagatccgtcctgtggcgaattccaggcccagtggcgcctagccttcagctgctgggctctcccgagcctgccttagcccatacaaccacttgatcacgcgggcattgcgctccaccaccgacacgccatagggaacgcgctcccgggcccgctcctcaacagtcaccgagctgcggcgggagcagcccccttcagagctgcccggcccagcactgggccctgccagggacacgatatccgagctggcccgtgccaggtgggccacacccaaccctctcgcctcctccgtg

SEQ ID NO: 176186 - DNA, 420 bp, Homo Sapiens
  misc_feature (37)..(37): n is a, c, g, or t
aacaaaaactgtacattcccctcaattgcccgcctanaaacaaccccatgtcataaccttgttgcaaatatttttcccctatagcagtaagtacagcattagaaggtgattagagagtctgttgatgaaacacaaatgtatgttttattgattttactttagaacactacagagtccctggaccgggtgaaggcattagctgggtgtttgtgtgggataaatactaccactgcaagtgactgctgtccgctgcggaatctgttcttggtggaagcacaggtccgtgtcgctgctgtggtgtcgctgtccgcggttcaacacggaagctcgccccgcgggtttcagctgttggtcgttctgaggggcctttggaagtgaccggtctggttcctaagcaataaaattgaccgtggtgaaaat

SEQ ID NO: 176187 - DNA, 443 bp, Homo Sapiens
ttcagctggggatggggaatggattattggaaaatggaaagaagaaagtaactaaaagccttcctttcacagtttctggcatcactaccactactgattaaacaagaataagagaacattttatcatcatctgctttattcacataaatgaagttgtgatgaataaatctgcttttatgcagacacaaggaattaagtggcttcgtcattgtccttctacctcaaagataatttattccaaaagctaagataaatggaagactcttgaacttgtgaactgatgtgaaatgcagaatctcttttgagtctttgctgtttggaagattgaaaaatattgttcagcatgggtgaccaccagaaagtaatcttaagccatctagatgtcacaattgaaacaaactggggagttggttgctattgtaaaataaaatacactgttttga

SEQ ID NO: 176188 - DNA, 182 bp, Homo Sapiens
gcctactactactatacggctgcgagaagacgacagaagggagacttggctcggcctcctgaaatgatagcagggagacttgggtgaccccccttccaggcgccatctagcacagcctggcacctgatctccgggcagccaccacctcctcggtctgccccctcattaaaattcacgttccc

SEQ ID NO: 176189 - DNA, 478 bp, Homo Sapiens
  misc_feature (451)..(451): n is a, c, g, or t
gggactctgggcaggatccaacgtcgctccagctgctcttgacgactccacagataccccgaagccatggcaagcaagggcttgcaggacctgaagcaacaggtggaggggaccgcccaggaagccgtgtcagcggccggagcggcagctcagcaagtggtggaccaggccacagaggcggggcagaaagccatggaccagctggccaagaccacccaggaaaccatcgacaagactgctaaccaggcctctgacaccttctctgggatcgggaaaaaattcggcctcctgaaatgacagcagggagacttgggtcggcctcctgaaatgatagcagggagacttgggtgaccccccttccaggcgccatctagcacagcctggccctgatctccgggcagccaccacctcctcggtctgccccctcattaaaattcacgttcccaaaaanaaaggaaggacagaaagaaaacgtgtc

SEQ ID NO: 176190 - DNA, 1217 bp, Homo Sapiens
  misc_feature (450)..(593): n is a, c, g, or t
  misc_feature (665)..(673): n is a, c, g, or t
  misc_feature (701)..(712): n is a, c, g, or t
  misc_feature (807)..(815): n is a, c, g, or t
  misc_feature (951)..(964): n is a, c, g, or t
acactcattaccgtctgtgattgccatttcttcccaaggccagtctgaacctgaggttgctttatcctaaaagttttaacctcaggttccaaattcagtaaattttggaaacagtacagctatttctcatcaattctctatcatgttgaagtcaaatttggattttccaccaaattctgaatttgtagacatacttgtacgctcacttgccccagatgcctcctctgtcctcattcttctctcccacacaagcagtctttttctacagccagtaaggcagctctgtcgtggtagcagatggtcccattattctagggtcttactctttgtatgatgaaaagaatgtgttatgaatcggtgctgtcagccctgctgtcagaccttcttccacagcaaatgagatgtatgcccaaagacggtagaattaaagaagagtaaaatggctgttgnnnnnnnnnnnnnnnnnnnnnnnnnnnnnnnnnnnnnnnnnnnnnnnnnnnnnnnnnnnnnnnnnnnnnnnnnnnnnnnnnnnnnnnnnnnnnnnnnnnnnnnnnnnnnnnnnnnnnnnnnnnnnnnnnnnnnnnnnnnnnnnncttcgcggcgggcccgccgccccaggaaaagttttaaaaaatttctttttggggcggcggccccgcgccccnnnnnnnnnttttggccaattgttctgttccccacgnnnnnnnnnnnntaaaaaaaaagcgcgcggacttcccccctaataaaacaagcggcgcgggggaccaagcgggcggtggggaatcccccccaaagagaaaaaacccnnnnnnnnnatacccgggagtctttattcgaagagggcgccccgccaggggggcctccaaattaccaaaatataacggcgccccctcctccaacagggacgtctctcccaaaagagcgggggacaataaaaccacatacagccannnnnnnnnnnnnngggctgtttgcatgaaccctctcttaatctctagcggcgggtgtgtctgtacataaccaggaatccgcgccccgcgcgcgtcgcgtgaccacccacccacatggggaagcgcgcggtgggggtggaaaaaatacaattgccacgcccggggagggaataataacaccgcgcgccctacacaaaccacaccccgggtacacaaataaaatgcgccacccccccgctcagaagaaaaacaacaggggtggggaag

SEQ ID NO: 176191 - DNA, 416 bp, Homo Sapiens
ctccttgtctgcacaactgcatgcacttctctccccatcgctccacaacctgaaaccgagaaggagttgctgaccagtgcccaccccggcagcccgggaggaacacaggcagctcctttcccttcacgtggtctgcagagagcagggtgagctgccagctgcccctctccaccagggtaccctgtcttggtggttaggggccacttttcctttgaggctctagtggaggtggatgtccttctctgccaggcttggcacatgatgtgaagaataaatgcccaattcttactgttcaggtttgatgtggaatcacagctgcagtgatatatattttttatcagtgcttggttggttttaaataaagtgcacgctattttattatcttgttctgaataaaatgtatttactccaaaaaa

SEQ ID NO: 176192 - DNA, 544 bp, Homo Sapiens
gccgatggtggcctctcctaaccagaggcaccaggatcatctacgaccgaaagttcctgctggagtgcaagaactcacccattgcccggacacccccctgctgcctccctcagattcccggggtcacaactcctccaacagcccctctctccaagctggaggagctgaaggagcaggagacagaggaagagatacccgatgacgcacaatttgaaatggacatctaatccagtgcagatgacctggcatgtggagttacagagggatccctcatgccactgctgccaccacctcttcctggggcatccaaaggccagctggcctcatctaatctggaagggagtgacttgttagttccaggcctcctttagttctgaggcagctagaccagggataggagtgggcaacttgccaagcccttaactctacttcctcttcagtctgtggtactcctcctaaccctaaaccctctatgctcaggggctggaactggggaatggagtaagtcaccttctgactgcttagtaaacattcaaagaaaaaa

SEQ ID NO: 176193 - DNA, 787 bp, Homo Sapiens
  misc_feature (672)..(672): n is a, c, g, or t
ggaccactttggcgtgaggcaccgcttctgtacccagaccctgggtgtcgacaagggctacaagaaccagtccttctacaggaagcactttgacacagaagagacccgggtgaatcagctgtttgcacaagcaaaggcctgcaaggtgctggtggagaaatgcacagtgagtgtgaaggacatccaggcgcacctggctcagggccatgtggccatcgtgctggtgaactcgggggtgctgcactgtgacctgtgctccagccctgtcaagtactgctgcttcacccccagtggccaccactgcttctgccgcactcctgactaccagggccacttcatcgtgctgcgtggctacaaccgggccactggctgcatcttctacaacaacccagcctatgccgaccgaatgtgcagcaccagcatcagtaactttgaggaggccagaaccagctatggcacagatgaggacatcctctttgtctacttggacagcggacagcaggagcctggtgcgcctaggccctcggaacccatccccaccccagccgggcccgctcaagacgccctggcccaggcttggggctgctggggttggaatgtggaactgcagcctcagcccatctgggagagtcccaggaactcggagactggcacccctgctttgtctgccantggccgtgtggttgtcatgtcaactcaaccccaagcaccctgctggcctgctgggaaccatacccccaggacccccaagccttggactccagcctgcggccccacagggaaatca

SEQ ID NO: 176194 - DNA, 822 bp, Homo Sapiens
ctacagtttgtaaaaaaaactaattttattaagacagaactttttttccttccaaattgtaaatctgtctataaatgtaacgcatgtggttgtgtaagacattgtttaataggaaaagttgtaccagcatcttcatattattgagaaaattttttccagcatgggcacttagaaaaagcacatggcaaatggctctttgttcctttcagatattatttcagtagaacctggcattctcctttcaccttaaaagatccatctaagtctcagatctggaaacgttttgtaccgattatccacagcaaaacaaaaataagcttttattttattaacaatttcgttcctcttgtgcccaatcaaatcttttaggaacaaactgcaagaaaagctaagaatgttttagagtgaactaaatacagacattgcttacttgttttgaagagggtttaggttagggttattgtgtcttttaagttttctgatatgccccctttcaatatttagatatttatttgctgggaagaataccttaaaatgagggttcttattccagattctgggcagtggtctgtgagtagtttttcctggatgaaaaagggagcaagccccacttgtcactaacatgaattgtgtgaacatgtgctcactttggactccatcaacaatggtgctggctcccagatttgccatgccagagggtctcggattcttccttctaataactctgctctaagcaaatcttgtagaagggcatgccttggccttaggcagattggggaataccaaattcactacaggaatacagattttaacaacattgcc

SEQ ID NO: 176195 - DNA, 829 bp, Homo Sapiens
ctggtaccggtccggaattccgggatatcgtcgacccacgcgtccggctttccactatggcttccagcactgtcccggtgagcgctgctggctcggctaatgaaactcccgaaataccggacaacgtgggagattggcttcggggcgtctaccgctttgccactgataggaatgacttccggaggaacttgatactaaatttgggactctttgctgcgggagtttggctggccaggaacttgagtgacattgacctcatggcacctcagccaggggtgtagccaagtagacaaatggaatcctgtgctgaacccgaatcttccaaaaaacagcctacaatctgtgaccaccacaagatgtgccctgatggcagctgaagtttgattcagatgggcacttttcttccccttccctgcctagtttccttttgttccttgagtccacgcagaattccattctctggtcagcagacaggcttaagctaaagtattgcctctattctgtaaagttctgtacatagttcccaagcttctgcagggggtgatttttgctcttgtcctgagaaataacagtgctgttttaaaaaacatttgaaataaataccgcacacaaaggcggaacaagagaaaagcgacaataaagaaaaactctgtcgggccgccttcggcccccaaaaaaactttctagaaccctttcgtttgggcgccgcgggccccattagggcaggggaaacagggcccatacccggctctccgagggaaatcccggcgcccaggaactgagcggctggggtactcccgaacagacacgaaaacccccccgcgcccct

SEQ ID NO: 176196 - DNA, 492 bp, Homo Sapiens
  misc_feature (27)..(27): n is a, c, g, or t
aaaaggaatgacttccgggggaactgnatactaaattgggactctttgctgcgggagtttggctggcccgggaacttgagtgacattgaccctcatggcaccctcagcccaggggtgtagcccaagtagttcctaatgcccacctgtcgtcttatcatctgattgcagacaaatggaatcctgtgctgaacccgaatcttccaaaaaacagcctacaatctgtgacccacccacaagatgtgccctgatggcagctgaagtttgattcagatgggcacttttcttccccttccctgcctagtttccttttgttccttgagtccacgcagaattccattctctggtcagcagacaggcttaagctaaagtattgcctctattctgtaaagttctgtacatagttcccaagcttctgcagggggtgatttttgctcttgtcctgagaaataacagtgctgttttaaaaaacatttgaaataaataccgcacaca

SEQ ID NO: 176197 - DNA, 847 bp, Homo Sapiens; identical to SEQ ID NO: 15048
  misc_feature (731)..(735): n is a, c, g, or t
  misc_feature (737)..(745): n is a, c, g, or t
  misc_feature (748)..(751): n is a, c, g, or t

SEQ ID NO: 176198 - DNA, 801 bp, Homo Sapiens; identical to SEQ ID NO: 74066

SEQ ID NO: 176199 - DNA, 1190 bp, Homo Sapiens
  misc_feature (182)..(209): n is a, c, g, or t
  misc_feature (211)..(213): n is a, c, g, or t
  misc_feature (215)..(215): n is a, c, g, or t
ccttataggttccatggggccccaagggagttttctccctaaggggaaaacccaggttttaggggcccccctggtttccctttaaccccttaccggggggccgcgcgcggccccccaaaaacgaaattggtttttaggaaaagctttcttcgaaggggcccgaaggccggccggaccagggnnnnnnnnnnnnnnnnnnnnnnnnnnnngnnntncaaaagaaagcccccattttatttccagagaaaaattcaaagccggtttcctcacaggggaaaagtacagtttcccttcctccagggtgacagatgagccttttccgaagttctcagctttctcttctatcgaaacttcccatgtcggttaaagtgtttgtagagatagcggatgcgtttattaaggttgtgcaggtcatcagcgaacattctacttccaaccattttcctctttcggatacaacgttgcaattcattccctttccaacctcgaagccatatgggccccctgatcagttctttggggtgcttttcaaagtttcccaggatcccgatgttgtcatacactccgaacatggcccttttctcgttccaacgatcaaccactttggggggcgggagagtgagccttataccgatcaatctaggcacaccaagagagaagcttctgcacgccagaggcacccagtcccacaggcgcctacctgccccggataagaggttccctgccatttctctagtctccccccttcaacagcacaccaaataagcccaagaagatgacaggaaccgtccccgccaacttcacacgagtactaaggcgaagacagccatcttgggccttacccaggcagctgtgggcgcaccgcccacctacgccccatccgcaacagccacgagccccgccccccgggttccggcaggaggggcctctaccacccttcccgcctcagtgcttccggtccgcctgccggaagttttggagcgccggacaagctgaggtccgcgactcgtcgctaagattccccaaaaccgagacttcaagaaaattcaccctttccgctttctttggcgtccttcaaccgtgaaggaaatgaaggttgagaacctggaacccgcttccaatgaccaagccccttctctgtgccccaccccagtcctccgctgtagctgtttccatcacccctattttac

SEQ ID NO: 176200 - DNA, 733 bp, Homo Sapiens
gggacagctacctgggtaaggcccaagatggctgtcttcgccttagtactcgtgtgaagttggcggggacggttcctgtcatcttcttgggcttatttggtgtgctgttgaaggggggagactagagaaatggcagggaacctcttatccggggcaggtaggcgcctgtgggactgggtgcctctggcgtgcagaagcttctctcttggtgtgcctagattgatcggtataaggctcactctcccgccccccaaagtggttgatcgttggaacgagaaaagggccatgttcggagtgtatgacaacatcgggatcctgggaaactttgaaaagcaccccaaagaactgatcagggggcccatatggcttcgaggttggaaagggaatgaattgcaacgttgtatccgaaagaggaaaatggttggaagtagaatgttcgctgatgacctgcacaaccttaataaacgcatccgctatctctacaaacactttaaccgacatgggaaagtttcgatagaaagagaaagctggagaacttccggaaaaggctcatctggtcacccctgggaaaacgggaaaactggtactttttcccttggggagggaaaaccggcctttggaatttttcccccgggaaaataaaaatggggggctttccttttgggccttggcccgatcccattactatctcccagcggcgagcacatcaccgcgacgtccccgtcgggcccgt

SEQ ID NO: 176201 - DNA, 802 bp, Homo Sapiens; identical to SEQ ID NO: 15292
  misc_feature (695)..(695): n is a, c, g, or t

SEQ ID NO: 176202 - DNA, 770 bp, Homo Sapiens
cagggtaccgggctggttacagcagctctacccctcacgacgcaaacatggcagcgcagaaggaccagcagaaagatgccgaggcggaagggctgagcggcacgaccctgctgccgaagctgattccctccggtgcaggccgggagtggctggagcggcgccgcgcgaccatccggccctggagcaccttcgtggaccagcagcgcttctcacggccccgcaacctgggagagctgtgccagcgcctcgtacgcaacgtggagtactaccagagcaactatgtgttcgtgttcctgggcctcatcctgtactgtgtggtgacgtcccctatgttgctggtggctctggctgtctttttcggcgcctgttacattctctatctgcgcaccttggagtccaagcttgtgctctttggccgagaggtgagcccagcgcatcagtatgctctggctggaggcatctccttccccttcttctggctggctggtgcgggctcggccgtcttctgggtgctgggagccaccctggtggtcatcggctcccacgctgccttccaccagattgaggctgtggacggggaggagctgcagatggaacccgtgtgaggtgtcttctgggacctgccggcctcccgggccagctgccccacccctgcccatgcctgtcctgcacggctctgctgctcgggcccacagcgccgtcccatcacaagcccggggagggatcccgcctttgaaaataaagctgttatgggtggccatcagggaaac

SEQ ID NO: 176203 - DNA, 467 bp, Homo Sapiens
  misc_feature (14)..(14): n is a, c, g, or t
  misc_feature (21)..(21): n is a, c, g, or t
  misc_feature (32)..(32): n is a, c, g, or t
  misc_feature (49)..(49): n is a, c, g, or t
  misc_feature (75)..(75): n is a, c, g, or t
  misc_feature (82)..(82): n is a, c, g, or t
ctttgtgaatgcgnaccggantgcccgcaagngccttctgccctgaacncccagggcatgatgcagttcaacganatcctanagaacctcaagcgcagcaaacagaccaaggagctgtggcagcgggtctcactcgagatggccaccttctccccctgagtctttcacccttagggtcctatacagggacccaggcctgtggctatgggggcccctcacacagggggagtgaaacttggctggacagatcatcctcactcagttccctggtagcacagactgacagctgctcttgggctatagcttggggccaagatgtctcacaccctagaagcctagggctgggggagacagccctgtctgggagggggcgttgggtggcctctggtatttatttggcatttataaatatataaactccttttttactctgaactcctgcctgctactgaaacaaaaaagcatgt

SEQ ID NO: 176204 - DNA, 481 bp, Homo Sapiens
gcaaattgcttttcaaattcagcaagttctcagcttgtgtgacggaaggtccttcagaggacctgaggaatgcctgggagaggctaagcctcaggcttcaatgcttctggggttgggcatgaggatgtacacagacacccactaccttactactcacacttcatttcactccttttgtaaatttccaatttaaaaatcaagcacgtctttttagtgagataaaatctgagctcttctgtagaaaaatcaatctctaccagtagaaaatgccagggcttgatggaagagctgtgtagccctttctatgccaaagccaggaaatttggggggcaggaggaggttctcagaatccagtctgtatctttgctgtatgccaaactgaaaccactgggaataatttatgaaacataaaaatcttctgtacttcactccaaggtacatttgcttactgacagcatttttgttaaaactgttattcttg

SEQ ID NO: 176205 - DNA, 735 bp, Homo Sapiens
  misc_feature (538)..(538): n is a, c, g, or t
tcaggaccactttcgaattcaggcagccacactccaagccaagtcttccctagagaacagcagcagatccatggtctcatcagtgtccttgtagctttgtgcagcagttccgggctggaagacagagacagctggacagagctcctgaaaacatttcaaaataccccctccccctgccctgccctgcctttggggtccaccggcactccagttggatggcacaacatagtgtatccgtgcagaagccgagctggcattttcaccagtgtagccaagggcctttgccaagggcagagcaggtggagccctctgcctgccctatcacacatacgggtacttgcttttcactgtgatgtttaagagaatgtatgaacagtttacattttccttagaaatacattgatgggatcacagttggctttaaaaaccaacaacaatcaaccacctgtaagtctttgtcttcacctattatcatctggaggtaaatctctttatatgatgatgccaaatggcaaattgcttttgcaattcagcaagntctcagcttgtgtgacggaacgtccctcagaggaactgaggaatgcctgggagaggctaagcctcgagctcaatgccttctggggttgggcatgaggatgtacacagaacaccactacctttaatactcccacttccttttcactcctttttggaaatttgcccattttaaaaaccacccccggctttttttaaggg

SEQ ID NO: 176206 - DNA, 622 bp, Homo Sapiens
gacaaccccccgcctataaaaatccccctgtttgtattcccttcaatttaaactaaggtctttgggtttcacacaatataacttatttggccagtagatctatctaggaacagagttcatcagatcatcagagcccccagatggctacagaccagagattccacgctctcaggctgactagagtccgcatctcatctccaaactacacttccctggagaacaagtgccacaaaaatgaaaacaggccacttctcaggagttgaataatcaggggtcaccggaccccttggttgatgcactgcagcatggtggctttctgagtcctgttggccaccaagtgtcagcctcagcactcccgggactattgccaagaaggggcaagggatgagtcaagaaggtgagacccttcccggtgggcacgtgggccaggctgtgtgagatgttggatgtttggtactgtccatgtctgggtgtgtgcctattacctcagcatttctcacaaagtgtaccatgtagcatgttttgtgtatataaaagggagggtttttttaaaaatatattcccagattatccttgtaatgacacgaatctgcaataaaagccatcagtgctatttggatgt

SEQ ID NO: 176207 - DNA, 608 bp, Homo Sapiens
  misc_feature (153)..(153): n is a, c, g, or t
  misc_feature (157)..(208): n is a, c, g, or t
ggggggggaagcccgacccctattttatgttccccggggtttcgttgggaaccaggtttggccccgggtgccgtttcccttatgggggccccggcacccaaggaaatgttttgaaaaagcttttttgagggcggaagggttcgaacatgttgngttnnnnnnnnnnnnnnnnnnnnnnnnnnnnnnnnnnnnnnnnnnnnnnnnnnnnttttctaccatgaacatttatttttgttaaagcagattataaattttcatcagtacaaatatatataacttacatttgattgtaaggccaacgttcaaaagtaaaaatgagatgagctctcttattgttatccgaggtcaagaggctgcaactgtcaaggggatgttctcaccaaaagggggtttgggggaagaggacacacacaaagctaataaaaccagaatccccatccccacaaaactcatgggaacaaaatttaaaggataaaacaaaacccaccaagacccatattacaaaccaatatggtaacctgtgttcccttctatggtatgattatgtcatgttaccttaggtggttaaaagatttaacataaggggaaactgccggccaatatataaa

SEQ ID NO: 176208 - DNA, 371 bp, Homo Sapiens
tggcgctgtgccttgtggcaccgagtgtggcaagggcggcggcgagcccgtagacgcttgcagcagcaaaccaaggagggagctggaggtggcgctggcacaagagcagggtggctggcgactgaggctcaggtcacccaggagctgaaaggactgagtggtggcgaagagaggccagaaactgagcccctgctgagctttgtggcgtctgtctccccggctgaccgaatgctcactgtgaccccgctccaggatccccaaggcctgttccctgatctccatcatttcttacaggttttcctccctcaagcaattcgacatctcaagtgaagacatgtgcccctgaagggcaataaagctgctagtttatt

SEQ ID NO: 176209 - DNA, 489 bp, Homo Sapiens
  misc_feature (281)..(298): n is a, c, g, or t
  misc_feature (301)..(301): n is a, c, g, or t
agcagtttgagttggtgtagtgtattcttggttatcagaatactcatatagctttgggattttgaattggtaaatattcatgatgtgtgaaaaatcatgatacatactgtacagtctcagtcccataaaattggatgttgtgcctacacacaggatctagaagaatatgtcaaactataaactgcttgtgattgtgaatgactttgttctttgcttgtgtttttcaatttcctataatgcacatactaacttttaaaaaataaaggttattttaaaagccnnnnnnnnnnnnnnnnnnganagcgtccgaattcggcacgaggcgcgcgggaggccgcggaggatggaggagcggaaggaggagggcgaggccgagatccaggagcacgggcccgagcactggttctccaagtgggagcggcagtgcctggccgaggccgaacaggacgagcagctgccccccgagctgcaggaggaggcggcggccgc

SEQ ID NO: 176210 - DNA, 442 bp, Homo Sapiens
gtcaaagaagtcggactctttgccgccaaaagggacctttccggaagctgttcacctgtggttgctgcttgcagggcccccgccgcgacccgtgccgctttgggcggcaggaggcccgaaccgcccggggagcggcgtggagagatagactcctcccctctatacttgtggaatgccctccgctctgagaagggggaggagtgttttggtaaggaggaaggaccggcggcggctccgggaaaagggagggctaccgccgcagccgccgcccgccaggggctggcgagggaaaggcgtacgcgctcagcagaggggcggcagcggcgggaggggcctccccttctccatcctcctcttctgcgggcaaaaccccaggaaccggcagcagaaactccggaagcggcgttgcggggggcaacagcggtggtggagggagctactg

SEQ ID NO: 176211 - DNA, 504 bp, Homo Sapiens
  misc_feature (317)..(440): n is a, c, g, or t
  misc_feature (443)..(443): n is a, c, g, or t
tctccagccaacaagaaaggcctgtcacccttgccttgggtgtccctctcctgcctcagcttaattttagaggatattgggcctggttttcttgtcccttcataccctagtccctggacagctgaggagatgaaaggagccacaccacaacaatggcggcctgcccctccacacaggggagaagcacgctcaggcttcctctgctttgtctcttcagacctgtggttgctctgctcatccatgcccaaggttcccaggtgcaggacagaggtgtggcctattgtaccttgttctgaaataaagcatctcctgcttcnnnnnnnnnnnnnnnnnnnnnnnnnnnnnnnnnnnnnnnnnnnnnnnnnnnnnnnnnnnnnnnnnnnnnnnnnnnnnnnnnnnnnnnnnnnnnnnnnnnnnnnnnnnnnnnnnnnnnnnnnnnnttnaaaacacccttcgacccccaaaaaacttttaaaaaccaaacctttggcaagcggggccccc

SEQ ID NO: 176212 - DNA, 365 bp, Homo Sapiens
cacctgaactaaaaattgggtcttcaaaaaatcatggcgtattaacattttcccaaacatgccctgctgactagaaggtcctgttattctttcttttgaacttcccagtaagtttccttgttccctattcctaggatttaaagtgcaaatggtactttttatgagctattaggacaagtattctgcattgaaaataaacttttgcagaaaacaaatcctgtgcttgactaacagcaaagacatgttaagaaatttctgagctccaaaccatgaggaatcagaatcacaactttcagagtaataactcacattttttctaaagcataggaagctaattttgtataatgaacaaatgtggttgtgcc

SEQ ID NO: 176213 - DNA, 1123 bp, Homo Sapiens
  misc_feature (808)..(868): n is a, c, g, or t
  misc_feature (898)..(898): n is a, c, g, or t
  misc_feature (927)..(939): n is a, c, g, or t
  misc_feature (1052)..(1052): n is a, c, g, or t
ggatccttgcctgattcccatctgctgctctttgtagaaaaggtttcctctagaactgaattcctctggaattgagtgatggacttcacaacaactagccaggaagggtgacaagtaccttctgcctcctccattcttcctgggtgcagaactgtagaagaccctgaggactcctgggctagtgtgagcagctattctgcatgggtgcagatggctggatgtgaaagagacatgctctagctgcagaggcaaatttgaagtgccacggaacgttgtcaagaggtagtgagattgttgctgtgagcaaggctctgggagagtcacctcaggctcaggattctgaaccattgagatcagaaaccagatacttagccttctactgtagctacggaaccagattctggtgaatttgtccacaatcagccattggcctgtctggggagtttttggaagacagcaaagaggggcaatggctgctttcagctttgaggacagatgctatcctaagggcatggcagtacccatgttgatttgacatctctctagcccatccattgcttacagtagaagagtggggctgtatgcttgataatcttgaacattgaacttaatagatgacttgacaaggtagagatctgatattttgagattttggagaccatttcctgtgccagaatcactgctctattccataccgtgccatggaggctgttttagaagtggttggataacatgttaaataaaatattaagtgtaaaaaacaaaccccccatatcatcttttcttccgcccttcctccccaccttgnnnnnnnnnnnnnnnnnnnnnnnnnnnnnnnnnnnnnnnnnnnnnnnnnnnnnnnnnnnnngccctctcctgggtcgcgcggatttcactngacctatactttgctatttttttcggcgnnnnnnnnnnnnntcaaaaaaatcttttctaaaattttttttgtttgggagggggcggccccccctaccacaaaacaaaaacaaatgggtaaataatttttcttccccacaaagagacatccgcgngcccacaacaaaagagttgggttgtgttttctcctccgcccccaagaataacacaccccccggcggcgcga

SEQ ID NO: 176214 - DNA, 368 bp, Homo Sapiens
  misc_feature (114)..(114): n is a, c, g, or t
ggtgaaatttgcccccacaatccagcccattggccctgtccggggagtttttgggaaagaccagccaaagaggggcaatggcctgctttcagcctttgaggaccagatgcctanccctaagggcatggcagtaccccatgttgatttgacatctctctagccccatcccattgccttacagtagaagagtggggctgtatgcttgataatcttgaacattgaacttaatagatgacttgacaaggtagagatctgatattttgagattttggagaccatttcctgtgccagaatcactgctctattccataccgtgccatggaggctgttttagaagtggttggataacatgttaaataaaatattaa

SEQ ID NO: 176215 - DNA, 581 bp, Homo Sapiens
aacttcaatgatcctcctgcagtgtggatgcgctaccggcactgtctggcatgctctagacacaggcagagggctgcccaccacgctgcgacgcctcaaagcccctgttcatgcctggacagcgcccaaggaccttgctcatgcctgggacagccccagggcccccactggctgcagtcagcagcgggcagggtggtgggggaaggtatggacactccgtgggccggagctgggagaacaaggcctattattggacacctggtggccatggcaaccacacaaggatgcctgagactgaaaatctgtgggcttcaaggagctccagctcttgcactggctgagtcacagtgactatataactcttactcccacttttgggacactttttgagagggacagggagcctatctaactacacgggatagacatcgcccaagaccgtcctgagcaagcctggacgctgtgaccctaacgatgaaggtgtcccgcagacaatgtccggggcaggcaccatgctctcccaacctaccacagccagatgtttttgtaaagaacaataaaaatgaattactagaaaagca

SEQ ID NO: 176216 - DNA, 175 bp, Homo Sapiens
cccccctccccgagtgtgcccaggaactcagacgaggcgcggccctccgagattcacccccgagggtgcccaggactcggaaggggcgccccggactcgacaagctggaccccctgctcccgggggggcgagcgcatgacccccactcccatccgctacctctttcccccagcgc

SEQ ID NO: 176217 - DNA, 595 bp, Homo Sapiens
  misc_feature (351)..(490): n is a, c, g, or t
acattcttttgttaacaggtttgtttctttttaatgttttacctaaaatttgacatgcttacaggacaggtttgcctcttactttatttaacattgtagaaatgtaattaataaacaatgctcactacacagtttagaatagacgttctcatttatattatcttccaaatttgatcagttagcaaaacttaatacaccaattaaaatatttctacatatgagaatgtttacaatttaaattttagaacttgttttggatgtgattatatgtacgaaaatcgtgtaacactatgctcatgctaagaaccgacataacagaattactgaaataaatgtgctgtgaggaatggnnnnnnnnnnnnnnnnnnnnnnnnnnnnnnnnnnnnnnnnnnnnnnnnnnnnnnnnnnnnnnnnnnnnnnnnnnnnnnnnnnnnnnnnnnnnnnnnnnnnnnnnnnnnnnnnnnnnnnnnnnnnnnnnnnnnnnnnnnnnttgggggcccgcctcgcccccccgaaaaatgtttttaaaaccccttttggggggcgcgggcgcccacaaggggagaacgaaacatggcgtaacaagtgggttccc

SEQ ID NO: 176218 - DNA, 363 bp, Homo Sapiens
agcattactgtcactctccctaatgaaatgtacttcagagaagcagtattttgttaaataaatacataacctcattcctgaataatgtccctcattttgactataactgtgcttggtttcaaaagcaaaattaaacaaaaatctcagtcccctccgaagtgaactttgtgttaccctgcgtcagaaatgccaagttgtgtttacttttcattcagattttgtgaatatgaacatgctgttataggatctacagatgaatatttaactcaatagaaaaattattttagaacacattgtattggtattacaaccagattatattcttgacgttgacttcattaaaattatctacaatttcctaat

SEQ ID NO: 176219 - DNA, 378 bp, Homo Sapiens
gaaaataatgagtgtgggaggtgggatgggtattggttaaaggggacttcagctttttatataaacatccacttctctttcaaaagacttcaagtaaatataagaagatactgattgattctggattgtggtatagggatatcttgtcttattttttgtacttttccgtatttttaaaatttcccaaaataggaatgggagtgaggatgggaatgctgtatctgtggaagtcatgttatactggattcatttccaattaaatactaaacattttatagaaaatatttctaaaattttatcacggatgaatggatggacttgctctctatgtaatatgaaattaatctattttattaaaatttaaaaggacagcacaaa

SEQ ID NO: 176220 - DNA, 549 bp, Homo Sapiens
tttaggtaaaacaggatgtaaagtttatatacaagaatataatgtttatctgaaatatttacagtgttggttaaagcaatatttttacaacttttaaaggtaaactactatgtatattacaggtaagctacaatgggtttaatttgcaaaagttaagtaagaaatgttttaaacaaggcttaaagtactcaagtcaattataaaatttatatcttttgccttttacttgaagaaatcatgctatagaaatggttaatgtgcttctaataaatggaagtattgtagctggaatgtgatacatgtaacagtttaagttcccattgaaggtataaaatgatgaattgttgtaagacttagacactgagtctcagtctggagctgatgaagatgttgagataacagccagctttatctcaacagggtttgtgacccacaagtttgggccacagagaaaattgaagcaatttgcatgttatgacaacctcagtgggaagtgaaaatccgctgactcaaaaccacaaacaacaaccaaccaggcccaagtcccag

SEQ ID NO: 176221 - DNA, 711 bp, Homo Sapiens
gggacagtcggcggccgcgcgcagcacgctcaaggccgggatggcggcggcggcggcggcaggaagcgggacgccccgagaggaggaggtacctgctggggaggcagcggcctcgcagccccaggccccaacgagtgtgcctggggctcgtctctcgaggttgcctctggcgcgagtgaaggccttggtgaaggcagatcccgacgtgacgctagcgggacaggaagccatcttcattctggcacgagccgcggaactgtttgtggagaccattgcaaaagatgcctactgttgcgctcagcagggaaaaaggaaaacccttcagaggagagacttggataatgcaatagaagctgtggatgaatttgcttttctggaaggtactttagattgattgccgagcggggcagttttgtgagccttcatctgaagccttcagttcacccctctgcacaggcctcagctttgaagaacggagtctttgcacttacacacactcttcctgttctgccttcacctatgccgggataagcagagatctcatcaattagctcttctctgcaaggtcttccactatttctgtctgtcttccatatcaagcctggatgcagctgctgctgcttagagcagagatgaagaaagtgttctgcataagtggcttcctgaatgatgaggaccagaataaaggtttttgatcaacctccccaaaaa

SEQ ID NO: 176222 - DNA, 221 bp, Homo Sapiens
tgcacacagatgtgaaatgaatgtaacctaatagaagcctaatcagcccaccatgttctaaaatgaaaaatcctctttctgtggggttaatctcactacctttgggcgatttagcactggacggtgacgtcagccatgtacaggatccacaggggtggtgtcaaatgctattgaaattgtgttgaattgtatgctttttcacttttgataaataaacatgt

SEQ ID NO: 176223 - DNA, 432 bp, Homo Sapiens
cgactgaagatccaagtgcgaaaggcagctataaccagctatgagaaatcagatggtgtttacacgggcctgagcaccaggaaccaggagacttacgagactctgaagcatgagaaaccaccacagtagctttagaatagatgcggtcatattcttctttggcttctggttcttccagccctcatggttggcatcacatatgcctgcatgccattaacaccagctggccctacccctataatgatcctgtgtcctaaattaatatacaccagtggttcctcctccctgttaaagactaatgctcagatgctgtttacggatatttatattctagtctcactctcttgtcccacccttcttctcttccccattcccaactccagctaaaatatgggaagggagaacccccaataaaactgccatggactggac

SEQ ID NO: 176224 - DNA, 298 bp, Homo Sapiens
ctaaatggcggccgcgtcgaccagtccctgcccccggaagtgaagccgtccttccaggaacatagaatatcaggggaacatgggtagcaacatcaaaattgctgtatttggcccattctccatgttcacctagagcccacccatgatccgaggtaaatgcaatgatggtgctgttggccagctgaagaccgtccaaagcactcaagaggcggccgacctgtgtatccaaatatgacacagaggcaaagtagctctggcggattttccgctgaaagtccacaggaagtcgacgcggccg

SEQ ID NO: 176225 - DNA, 964 bp, Homo Sapiens
  misc_feature (671)..(778): n is a, c, g, or t
ttggtaaaaaaaacccccgggagggaaaggttggagaaactcccttccccccttaggaaagagaagaaaattttccaccttggaaaattaccctcagaaaaggggtttattttcaacctggaatggttgctttatttcaaaatccaggtattggttcctcaggagggaaaccatgatcggaggtaaatgcaaatgatggtgctgttggccaggctaaagatcgtccaaagccctcaagaggcggccgacctgtgtatccaaatatgacacagaggcaaagtagctctggcggattttccgcggaaagtccacaggaattggaccatacggcacactgatgtttaaggcttggacgtcttcccgttgcctgatgtccatccaggggttgtaggccacagggggtaggccatcagggacctcgggatcgggggccagggtgatgttctccaagggatacaacttctgaaattccttggggtatctgaaggggatgtgtggcttatgatacccaacggccaggaagaaaggactggctgacgttttcatcttttccaacaactgtatggcttgctcagtgctctgtttgtcaggcaaggtgccctcgggaacatccagcacatccacagggcaaagcaggttggcatggagttctccatctggccctcgacatnnnnnnnnnnnnnnnnnnnnnnnnnnnnnnnnnnnnnnnnnnnnnnnnnnnnnnnnnnnnnnnnnnnnnnnnnnnnnnnnnnnnnnnnnnnnnnnnnnnnnnnnnnnntgacaagagtgaaactccatcttagtgttttcatacttctcagaggaaggatgataaggtggaaaagaccagctatacggagaatcatcggtatggttagaagatatcccagggtgaaagacttttcccaccgacatggtcacatagccattctccttgaagtactgggggatggtggagaagttt

SEQ ID NO: 176226 - DNA, 411 bp, Homo Sapiens
  misc_feature (56)..(56): n is a, c, g, or t
  misc_feature (411)..(411): n is a, c, g, or t
gaaccttaattgttcacatcagagtcccacacagccctgaagcccctatgcctgtncccagtgcaggaagagtttcccacccccagggggaattgtattctgcatggcaaaatccacacaggagagacaccctatctgtgcggccagtgtggaaaaagcttcacccagagagggagtctggctgtgcaccagcgaagctgctcacagaggctcaccctttgaccactttcctgaagagaagttctctttatgaattaagagtacaaaatcctctgagatgaagcaacctatccagttctatggaatgaatggagaatctttcagaaagaccatcattgggtagggcaaactgatttttttcctttcccccaaaagagtatgaaaaataaatgtcttgtttattatcattan

SEQ ID NO: 176227 - DNA, 474 bp, Homo Sapiens
  misc_feature (253)..(253): n is a, c, g, or t
  misc_feature (265)..(265): n is a, c, g, or t
  misc_feature (270)..(306): n is a, c, g, or t
  misc_feature (375)..(375): n is a, c, g, or t
  misc_feature (390)..(390): n is a, c, g, or t
  misc_feature (418)..(418): n is a, c, g, or t
  misc_feature (437)..(437): n is a, c, g, or t
  misc_feature (456)..(456): n is a, c, g, or t
ctctgtccatttaaaatgttttatttttttaaaactagatgacgtgccactgaaataggcaatgttggcaaaacaatgtctgttacaataaaatacattagacatttaaataaataaccttaaaaactatgtgaagggacataaacccagtcgattgaatctggaacaatgttttctgcacaagcgagtacaggcatacctctcgttaaaactgattgatgtaaacagaacgaaccatcacaatcctaaagangaagccaagcgnggcgnnnnnnnnnnnnnnnnnnnnnnnnnnnnnnnnnnnnnaacggaggccaaagtggggtgaggggaagtaggcaaacccaaaacaatactgactgagggtaggcaagnctctgcttcggtgcnggaaaaattgggccttttggattaaaanttagggctttggatttccnaatttaaatccccgttccntccttggcaaaagggccc

SEQ ID NO: 176228 - DNA, 2022 bp, Homo Sapiens
  misc_feature (46)..(46): n is a, c, g, or t
  misc_feature (118)..(118): n is a, c, g, or t
  misc_feature (135)..(135): n is a, c, g, or t
  misc_feature (155)..(155): n is a, c, g, or t
  misc_feature (1195)..(1270): n is a, c, g, or t
  misc_feature (1811)..(1870): n is a, c, g, or t
  misc_feature (1984)..(1984): n is a, c, g, or t
cttttgcaaatattggttctttgcgctaccatttaagtatagttgnatatatgtgcaggcaaaaaaaggtttccagccatggtggtgagggaaaaaggagctagaaatcccagttggncacagacctgggcaagncgccacttccccttcagggnctaacggcactgttcacacagggatcctcaggaatcagccgggccacctgcctccaccttctgcctgggagggcatggggctgttgtaggaacctatggtaggcaaatgtatatgtatgagtttgtattctgtagtgttggtgtagcacagaagaaagacctgtgtcctagagagtaggccaaggtgatctgcctcttctattgggagaaattctaatttctttcccactttctcaacaagcccaatattccctccaagttcttcttggtgctgagggctgtaggaattattgaaagcttctgcctcacttagtatcgtctggggcccagcacccagcaataactctaataatgtttcttaatggtatagcctcctgagattaaatgtaaaatcaaaaattaggaaatcttggagggagtcctcaagttgtattgctttgctgtgcttttggaagaagggacgacctggaggacacaggctcatgtgtgggtcttcatcctgcctgaccggcagatcttcctctacaccttgggcaaagtctatgcgaagatggtttcttagctctccatttgccatgattttcctcccattcatcatgagggagtttctcaaaccaggagtttatatttattttttagaaaatacacacttttcaggagaaacctgagcatgattttggattctccacctccccccagtctctgcacctgggattcagctcaaggattcagtgtcttcatttttacaaaagttcccccaagaaatcagcaaccagcctctgtttcatctgggagcccctcccttggccccctgggtttgggggtgctgccctactgggaacagcgggggtctgtcacccgtctgagccgcacccccctgtgtggatttcaggaagagcctccctttctttgcgtctccctttctttaattaacattttcaaaagtaataaattcttactgacgacttgtaacttagtcatattttatacttgtagcctttaataaagccatttaacaaaatgctacaacaacaacaacnnnnnnnnnnnnnnnnnnnnnnnnnnnnnnnnnnnnnnnnnnnnnnnnnnnnnnnnnnnnnnnnnnnnnnnnnnnncgttggtcgccccgttcggcccccgcaaaagctttgagagaacctttcttttggccccgggcctccccccaaggaagagggaaccctgggccgtagccctggttaccacgagaaaaccgccggcccgctggagatagccgcggtggccttccgcccccaaagaaaacaccactctccgggggcgcccccccgggagcgctttcttcaaaacacatttccctgatgaccgcgcgtccccggccggtccgcccaccgcgccccaatcacaccccggataggttgctttcccaccactaccccctgtctgcacgcgctgaatccggcccggggcgtggggtggtggggcgcccgccgtccgcgcttagcccacgtggtatgtaaagatcgccgccagaacgcaacgtgtgctcccgccgccgcggttggcgtagcggccgtcgagagcgacgaggcgcccggcgagccgacgtcctgccgacccctctgttgagccggggaacagcattgacccgcgcagccgttctttcatcgccctcctgannnnnnnnnnnnnnnnnnnnnnnnnnnnnnnnnnnnnnnnnnnnnnnnnnnnnnnnnnnnatccaccagtcttttgcggagcacctcccgccgcgtccgcgtgattgtgagaggggcagggcgcgcgcccccacgcgatgctctacctcctacctccgccacccgcggcgccangcgccccgcggggcgcgagcgtcgcccgcgcctcggtg

SEQ ID NO: 176229 - DNA, 497 bp, Homo Sapiens
ccactgcgcccgcacacattcagttcgtatcaaagaaataacccagacttaatcttgaatgatacgattatgcccaatattaagtaaaaaatataagaaaaggttatcttaaatagatcttaggcaaaataccagctgatgaaggcatctgatgccttcatctgttcagtcatctccaaaaacagtaaaaataaccactttttgttgggcaatatgaaatttttaaaggagtagaataccaaatgatagaaacagactgcctgaattgagaattttgattttttaaagtgtgtttctttctaaattgctgttccttaatttgattaatttaattcatgtattatgattaaatctgaggcagatgagcttacaagtattgaaataattactaattaatcacaaatgtgaagttatgcatgatgtaaaaaatacaaacattctaattaaaggctttgcaacacagaccccgaaacccgcgagagcaaagaattgccttg

SEQ ID NO: 176230 - DNA, 549 bp, Homo Sapiens
gcggccgcctggtgcagtaccgcggcgaggtgcaggccatgctcggccagagcaccgaggagctgcgggtgcgcctcgcctcccacctgcgcaactgcgtaacggctcctccgcgatgccgatgacctgcagaagcgcctggcagtgtaccaggccggggccgcgacgccgatgcgcggcctcagcgccatccgcgagcgcctggggcccctggtggaacagggccgcgtgcggcggccactgtgggctccctggccggccagccgctacaggagcgggcccaggcctggggcgagcggctgcgcgcgcggaatggaggagatgggcagccggacccgcgaccgcctggacgaggtgaaggagcaggtggcggaggtgcgcgccaagctgggaggagcaggcccagcagatacgcctgcaggccgagagcttccaggccgcctcaagagctggttcgagcccctggtggaagacatgcagaccagtgggccgggcttgttgagaaggtgcaagcttcctgggaaaagcgccgcccttttccaggacaat

SEQ ID NO: 176231 - DNA, 583 bp, Homo Sapiens
acctcagaagcgcttgcagtgtaccaagccggggcccgcaagggccgagcccgccctcagcgccatccgcgagcgcctggggcccctggtggaacagggcgcctgcgggacgccactgtgggctccctggccgccaagccgctacaggagcgggcccaggcctgggggcgagcgctgcgcgcgcggatggaggagatgggcagccggacccgcgaccgcctggacgaggtgaaggagcaggtggcggaggtgcgcgccaagctggaggagcaggcccagcagatacgcctgcaggccgacgttccaggcccgcctcaagagctggttcgagcccctggtggaagacatgcagcgccagtgggccgggctggtggagaaggtgcaggctgccgtgggcaccagcgccgcccctgtgcccagcgacaatcactgaacgccgaagcctgcagccatgcgaccccacgccaccccgtgcctcctgcctccgcgcagcctgcagcgggagaccctgtccccgccccagccgtcctcctggggtggaccctagtttaataaagattcaccaagtttcacgcaaaaaaaa

SEQ ID NO: 176232 - DNA, 510 bp, Homo Sapiens
ccatcccgagaccctgggcccttgttgaacagggccccttcggcccccactttgggatcctgggcggccagccgctaaaggagcgggcacaggcctggggcgagccgctggcgcgcggatggaggagatgggcagccggacccgcgaccgcctggacgaggtgaaggagcaggtggcggaggtgcgcgccaagctggaggagcaggcccagcagatacgcctgcaggccgcagcttccaggcccgcctcaagagctggttcgagcccctggtggaagacatgcagcgccagtgggccgggctggtggagaaggtgcaggtctgccgtgggcaccagcgccgcccctgtgcccagcgacaatcactgaacgccgaagcctgcagccatgcgaccccacgccaccccgtgcctctctgcctccgcgcagcctgcagcgggagaccctgtccccgccccagccgtcctcctggggtggaccctagtttaataaagattcaccaagtttcacgc

SEQ ID NO: 176233 - DNA, 455 bp, Homo Sapiens
tggccgcccaagcgcttacaggaaccgggcccaggtccttgggccggacgttgcccgcgccgcttgaaggagatggccagccggaccccgcgaccgcttggaagaagttgaaggaccaggtggcgaaggtgcgcgccaagctggagggagcaggccccagcagataacgcctgcaagccgaatgttccatgcccgcctcaagagctggttcgagcccctggtggaagacatgcagcgccagtgggccgggctggtggagaaggtgcaggctgccgtgggcaccagcgccgcccctgtgcccagcgacaatcactgaacgccgaagcctgcagccatgcgaccccacgccaccccgtgcctcctgcctccggcagcctgcagcgggagaccctgtccccgccccagccgtcctcctggggtggaccctagtttaataaagattcaccaagtttcac

SEQ ID NO: 176234 - DNA, 465 bp, Homo Sapiens
catcatgcatcctccccttacccctccaacacccctctgcctctggctcaggttgctcaaaagcacagatcctctcttaccccgtccccccaggtttgaaacacatagcctcatttcaaggtgtagcccaggttcccccgactttcctctgggatataaaaaagggggtaagggggcaaagaagaacctctgggcctctcctcccatacacactacactgccccttctccccccatcaaaacgctcagagacgttgtgatgatgcgactgaggattatgcaacgtggtccaaccggagcggccagcatgaccagctgtccaggggctgcctcctgccttttcttttgtaaagacaagacccttgggagttttaattctgttttgtaactgccctgtggggcctccactgcttttctatgggagacactcttaatttaacagatgagaatattttgaaactctgaa

SEQ ID NO: 176235 - DNA, 374 bp, Homo Sapiens
  misc_feature (47)..(59): n is a, c, g, or t
gccgcttttatgtacacatattacatacgagtaggcagcagactttnnnnnnnnnnnnncctaggcatgttgatgttgcaaaatgctgtataaagctgaaacctgttcattcagtgccattgtagttgacatgaagcgattgtaaaactgtctccgatttttctctggtttattaaaatgctaactataacattttttgtgaatactttgaatgtttcctaacagttgtgatgttactgttccgttttatgctcttattccaagttcatttttaatggtttggaagccatttttgtaatgaataaatgttcatgctgtacagtatctgtagcatgccgttctggattaataaaagcaacttagtatgtgcagat

SEQ ID NO: 176236 - DNA, 420 bp, Homo Sapiens
  misc_feature (354)..(354): n is a, c, g, or t
  misc_feature (387)..(387): n is a, c, g, or t
  misc_feature (410)..(410): n is a, c, g, or t
gttatagaaatctgtttaatggtttaggaatgtgtacactctggctctgcaagttttccataaaggcaacttttccatgttttaaaaaatagatttggtataaagatttatatattcataaataggtggcatgaaaaattaccaaatgcaaatggaatacttgcgctgactgaagccctgttcaccccaagtccaggccctgcaggggtccgagggtctctgctggaggaggccccaactccggcagcctcttagggaagagaaactgaattaaatgtgtattaggaacccctccagctccttaagccagcgtcgcactggccccaccgaggcctcagcccacctcccttctgnttccccccgccacctccaccattgccccctccnctgcattttgggcccctgacccnacctgtttcc

SEQ ID NO: 176237 - DNA, 840 bp, Homo Sapiens
gggaggttgggctggaggcctgtccactggcttctggagctgaaggtctgcgtcacggtgaaaattcgggatgtttacagagcatcacaaatgcctctctctcgccgctctctcattttctttgtataactatgcagccttccctctctttctgggatgtttgggacttcactcgacctgcacgggctctgcccgacatgccgtgggagctgctgggattcctttagaaaccgctgcccgcatgctttgaaaacagacctttctcagctggctgtggggacctgtcagagtctggggactcggcgtgcagggcgggctccaagcgctttgcttccggaactccggcttcccaaggggtactgtgcagactgaccatccggcctcccgcctgcaggtcagaggctctgacactgtctggtttccaatgcttctggagacttcctgcctaggcctcatcctcctctttgccagtcacctgattaaccaattctccagcattaggacttacctccttctttttgtaaggtctcttgtatgttgttaaatgtttggcttaaacaatttataaaagcctttctagaaggcagacttagccccagcagagcctgggaggaaggcggccgctggggctcctgggcatcctctctggggagctgctggccgcttagcgttgtttgatttttgaccttgacatagtagataggcttgtggtttttttaatttaaagatattaagacttaattcactaaaatttattctaaggggatatttatacttttatactttttttaggtatcgtattttatcagcttacagttttatgcctaagtttccccctgg

SEQ ID NO: 176238 - DNA, 355 bp, Homo Sapiens
taatctgcaaagtcctttgcacaagtctcccaactggtttggagttttcccttctgaggtttttcaccctattcttcgtagaccctgcgcttctcgttccaggcgttgtaccacttgatgaagcgcttggtgctctgcagcttggggtgcaggcagtgctcctgacctcggtacctggacacgctcttggtggtgatgataaccatcttctcctcgcagtgcgggtactttggcttcatttccagcttcttcacgtcgctgtagcggatcttgggtccttccgggagcacttgcatttggacccgtccacacgcgcggtgtacagcgccagcagcagcaggagcagcgcggacgc

SEQ ID NO: 176239 - DNA, 406 bp, Homo Sapiens
ctcacggggccttggagcatgagaccagtgaccccgagttttgcccatatcaggacagtggctccttctcactcccctttctcaggccaggcaggccgagggccacacgggtgccacagcccaggtcggagtggcccagccggcaggcttgttcttcagcatccgacgggaacatctccaacagaagcaaaacggaaagtgcctcccggacccccagagggccacccaacctcaccagtcaccagccccagaccacccacagcccctcccagacaccccgcctcatctggaaatagttccgtttgtttctctaaaaagacttgtaggtgggaaaaaaaatcttttgttctcatggaattggcctattggcaagatcgcatgtttttttaataaacgttgtatttta

SEQ ID NO: 176240 - DNA, 1724 bp, Homo Sapiens
  misc_feature (1014)..(1014): n is a, c, g, or t
  misc_feature (1040)..(1040): n is a, c, g, or t
  misc_feature (1145)..(1145): n is a, c, g, or t
  misc_feature (1249)..(1249): n is a, c, g, or t
  misc_feature (1327)..(1327): n is a, c, g, or t
  misc_feature (1471)..(1471): n is a, c, g, or t
  misc_feature (1476)..(1476): n is a, c, g, or t
  misc_feature (1496)..(1496): n is a, c, g, or t
  misc_feature (1523)..(1524): n is a, c, g, or t
  misc_feature (1537)..(1537): n is a, c, g, or t
tttcataattcaagttaatgcaaatgactgtcagttgccaaatatcttgatcctatgagtgtagttgatgactgtttgttagtcagtagagtaaaatgctgtgtccacggggtgtcacagcctcaccataccctgttgaggtgtgaaatgccccgtcagaaattaaatacaaacttaaatgtgcctattggtgtctaaacttcatacaatgtaaggtcagattccttttaggaatactgggtgctgtcaccaggtttgatagttagacttaaaaacttgaaattcactttttggggggagggatatactgaaatagagagttgagacttgccagttgggggaaaatagcatttaaaatggaaagctgtgtttggaaaattgtgtatgagtatttttgtattaaaaacattttaaaggcttttttcttaacttaaaccgaaccacgctgcagcccgcgcttactcccccccgtgccggtgtctctcctactccgcattaccaccctcctccttccttttacctcggtatcccccgctcctccgccgccccattgcttactctagggttcgggccgccccccggcccttctaaaaaagcttttctctaaaacaccttcttgttttgggggcccggggcgcccctcaccctgaggtccacccgaaccctgtgcccccactatcctctgtttcccctccatgaagatactcctcgcgcgcacatcagaacaaagcccgggctgtggtatttctctccacaccaaatacaacagacactgggccgccgcgggaggcgagaaactcacaacgcgcgctttcttcgcaccacacacttcctcacagaaatgggtggaggctcctcttcgaggagggtggttatctgtctgcggcgtgtgtctttctatcttacaccacgcggaggcattctctccacagcgcccggcgtcgcgcttctcacgtttatcatctcttatattgtatatgacgcgctcccctccgcgcgcgtcgtcttgtccancatatgtctcacccgcgagcacccgngatgttgctgtgtctcggccagccttcctacgtatatataagacccacatttgttccgcgcgccacacatctggtgggagacacgcgtgctacactctacacacnaacacgctgtcgttatctgccactatacacacacctcctttaaataatattctcgcgctcgcgccgcgcgctccatctcgtgtggcaaccatccccgtgtatangcgcggcgttgcttgtctgtccgcgctatactcatcaatatccacatttgtcgcgtgcgcccgcgggcgtgtcgccantgaatcacacgcgagcgttgtgtgggtgtccacgtcgaccgtagagcgcgctcgtgttacatcacttcttgttgttgcgcggctgtcttcacccgacgcgtctcgtcagatatctctactgaaatgtggtgcgtgtcgcggggncgagnagacactcttctttcgactnactctacctgtgactatatatgtgtgnnctcgttccgcctnactacgcatttagcacactatccctcgttagtctctcgtctccccataatacgagtaccacgcgctcgtctgtcatatcagataggatacatagtctggggcctctcgtatgattcatttcgctcgcccgccacgagtaacaatcttgcgttcccaccctccttcgtccctctgtcgttggaaggcc

SEQ ID NO: 176241 - DNA, 751 bp, Homo Sapiens
gggggaaatcacggggacagaggaggaattcacgggatcagagcactgagaaactccagaggcttctggttcaccgccctgattccacagatgtgggtcagaggcagagatggaagttggaatggacaagcctgccctctcctcagctctccatggctctgtcctcaggctgtttctgcaatttgacatgaggcctggccccagggaaaccagtggggcctcatctcctccctgtgctgctctgaggtggagccttctcagggtcagtccagctctggagcccctctccagctcggtcaccaaagctgtctggtcccagggcggtgtggagtgacaggcacgccagccaatccaatcggccatttcatacccaatgcatgtgactgataaagagataacaccctgtctccaagacacaggctttacataaacagctttaatgacttcttcacttagggacaagactccttagtggtggaacctcaggcatccatgcaggatgtaagaaacctcccgtatatacatgaactgagaagtgtgtagaagagtaaatactgtaataggtaataaaatggatggatttttatttatgcgctactttggcctttctccctctctggggatatacccatacataccaaaatggatttccttctatgggaaacctggaaagatgtaatattcctttacatatgaaaatttaaattaaatgaattttttttccggatcctattgaaccccccaaattata

SEQ ID NO: 176242 - DNA, 948 bp, Homo Sapiens
  misc_feature (48)..(48): n is a, c, g, or t
ggggtcactcccaagatggcggacctactgggctccatcctgagctcncatggagaagccacccagcctcggtgaccaggagactcggcgcaaggcccgagaacaggccgcccgcctgaagaaactacaagagcaagagaaacaacagaaagtggagtttcgtaaaaggatggagaaggaggtgtcagatttcattcaagacagtgggcagatcaagaaaaagtttcagccaatgaacaagatcgagaggagcatactacatgatgtggtggaagtggctggcctgacatccttctcctttggggaagatgatgactgtcgctatgtcatgatcttcaaaaaggagtttgcaccctcagatgaagagctagactcttaccgtcgtggagaggaatgggacccccagaaggctgaggagaagcggaagctgaaggagctggcccagaggcaagaggaggaggcagcccagcaggggcctgtggtggtgagccctgccagcgactacaaggacaagtacagccaccttcatcgggcaagggagcaaccaaagacgcagcccacatgctacaggccaataagaccctacggctgtgtgcccgtgggccaataagagggacacacgctccattgaagaggctatgaatgagatcagagccaagaagcgtctgcggcagagtggggaagagttgccgcccacctcctaggcgccccgcccagctcccttttgaccctggggcagggcaggggggaagggagagacaagggctgcctgctattaaaaccccatccctggaagcccccacctcttgaaccacctccctaccaggctggtcccctcagggttggggggaaaaacaggggtggtttggtattttgtccccccggtttgggaggctttgggaataatggggccgtggggcaaatggcgttgctgctccccgccggcgc

SEQ ID NO: 176243 - DNA, 768 bp, Homo Sapiens
  misc_feature (644)..(659): n is a, c, g, or t
agatcgagaggagcatactacatgatgtggtggaagtggctggcctgacatccttctcctttggggaagatgatgactgtcgctatgtcatgatcttcaaaaaggagtttgcaccctcagatgaagagctagactcttaccgtcgtggagaggaatgggacccccagaaggctgaggagaagcggaagctgaaggagctggcccagaggcaagaggaggaggcagcccagcaggggcctgtggtggtgagccctgccagcgactacaaggacaagtacagccacctcatcggcaagggagcagccaaagacgcagcccacatgctacaggccaataagacctacggctgtgtgcccgtggccaataagagggacacacgctccattgaagaggctatgaatgagatcagagccaagaagcgtctgcggcagagtggggaagagttgccgccaacctcctaggcgccccgcccagctccctttgacccctggggcagggcagggggcagggagagacaaggctgctgctattagagcccatcctggagccccacctctgaaccacctcctaccagctgtccctcaggctgggggaaaacaggtgtttgatttgtcaccgttggagcttggatatgtgcgtggcannnnnnnnnnnnnnnnagagtgtgaatgcacaggtgggtatttaatctgtattattccccgttcttggaattttcttccccatggggctggggtactttacattcaataaatactgtttaacccg

SEQ ID NO: 176244 - DNA, 373 bp, Homo Sapiens
aaccaagaacatttcctggggcatgttccagttttgaggggtgatatatctgccagatagggggtatctgacccagtcttcttttcagctggtctctggggggagctgagaactcgcttgctacctcacatacttttccccagactttttatctcctatgcatccctttgctttctatagctggtgtttcttcccgaaaatggcgttcccatgcttacctttctcacattctagacaatgatggacaaagacgcatgcaagactcagacccggggaatggtgtggtgctaatctcaacacctgacattcacagcaagcatggcccagcccaaccgcatgtctatctcaaaccgcagaaaggctttaatactgg

SEQ ID NO: 176245 - DNA, 580 bp, Homo Sapiens
  misc_feature (80)..(80): n is a, c, g, or t
atatgaaagccctactgaggtgctatgtcttaagggatgtctgacccggcttcaaatatttccctcactttcccatctcncaaggtattaaggaatctttctgctttggggtttatcagaattctcagaatctcaaataactaaaaggtatgcaatcaaatctgctttttaaagaatgctctttacttcatggacttccactgccatcctcccaaggggcccaaattctttcagtggctacctacatacaattccaaacacatacaggaaggtagaaatatctgaaaatgtatgtgtaagtattcttatttaatgaaagactgtacaaagtagaagtcttagatgtatatatttcctatattgttttcagtgtacatggaataacatgtaattaagtactatgtatcaatgagtaacaggaaaattttaaaaatacagatagatatatgctctgcatgttacataagataaatgtgctgaatggttttcaaaataaaaatgaggtactctcctggaaatattaagaaagactatctaaatgttgaaagaccaaaaggttaataaagtaattataactaag

SEQ ID NO: 176246 - DNA, 947 bp, Homo Sapiens
gggataacaagaggattattctcccgttctcaagggagtcagatcaggggaactattctagggtatgttgcggggtattaagcaggaaaccactgtgtggtggggggcactgggcttgttggggccagaaatgtccacgtcctgagctttctcctggagcatgtgcagagagtttggcaacgttcgctctcttgaccagaccccttctccctgacctggctcttccagccagggcacgagccctccttctatacctgctccccttcccccagtggggactgagttatgggagaaggggacatatttgtggccaaaatgatactaaccaaaggggcttccttgtcagggcctggtggagttggtgggtcatcggggctcactgcctcctgcccttctctcctgtctgacccccacttagcccttctctccttgcagcctagcagtttatagttctgagatggaaagttgaagggggcaagcaagacctctcctcagcccatgcccagctgtcaggagagaggtgcagggaggaaggccttgtgctgggacaacctctctcttgccttacctcagagagggactatgccctgacccctcctttctgaaaatcagtgccctccctgttgctctaggaggctcctgctggcttggtagaagacagaattcgatctgcctgtccctttttcccctggggtttgacacacaggctcctctcagcatgaggtggagcagtgaccaggtggagcagtgaccaggacggcctctggcccagtgctgcccagcctccccgcccgctcccaggcgccccatgtcctcacaggccaggacgccatggcaggatggagaggacttggtggatttttgtttcttgcctgacctcagtttcatgaaagaaagtggaagctacagaattattttctaaaataaaggctgaattgtctgaaaaa

SEQ ID NO: 176247 - DNA, 509 bp, Homo Sapiens
ctctgtctcagctgtccagcgctgagggccaggctcttgtgctgtgggctggggatgccctcttttctatatttatttcatagaaagtctctgcgggagcggaaatgcagtccggcctaggctcccagcccttgactgtcctcctgtgagggcctgaaagcctgccagggcccgtcgacagcggagccccctctgcagcagaccaaccgggtccctcccaagctgctgcccgtgcgtggtctttctcctccttttcaaagcaatagccgccgggtctgcaaagccctgtcagacagactgggcccttccaaggtcaagccatgtgtctgatgacattcctggtgaagcaaaggagaggaggatgggtcagccctcactgggtgtcacacactgagagaagtcctattgtaaagaaacggaaaaagtcacaaaaaagtttgtataaagacatatttttgtactacatggggactcttcctgcatgtcagcaataaaacttcctgatctgg

SEQ ID NO: 176248 - DNA, 966 bp, Homo Sapiens
gggggaggggtggggaatactggaaataatcagggcaatttttttctttcccataattggactagataccttggtactgttgaccttctcagcatctcccttttgccttagatggcaacaccctccagtctgtagcagagcagtccaacccagattagtgcagcccggaggcttagggtgcagcctccctggtcttcctccacacagttgttcaccaacagaccagacctcctctaaccacagtgtcaacatagtatcggaaagagagccatttcttaggggaataaaacagtttcgcttctttagctcatctgtggtgtcagaatccttggagctgaagagagaaatcaaaagagcatgatgatggctgcctggtttcaggtggaacttaatgcattgatctttagaagctccttctgttggaagttgagtacctgtgatctaaaatgtcctggaggcagatgacatctaaaatatgtgctttccaacacagcacagctggcgctcttagctcctgattggttgtgtgttttattaaggatcagtgcagttaagtcgtattttaaagtgttacctccccctcctaaccctcccccttcttgaacactgaaggaaaaggccaactagggtgttagcactctggggcaccaaggaaactaacagctttctcaaagcggtgaccactcaggccagcccaaacaaatctgaagggatggccagtgcactccaatgatgggacaggcctaacaacacatgtaagcttccccgatgagtttcagctggttcacctctttgttctctagactcttaagtactgactgctttgacttttgtgattatgttatggtgatgtgtagtcagtgtaccaatatgttcacaacctaggatcatgataatggagtgtgttttgggttttttttaactgttcagaaaaaaagtaaattacaaatataagattaaagtgaa

SEQ ID NO: 176249 - DNA, 496 bp, Homo Sapiens
cctcaagagctaattcctattgaagattttattacccctctaaagttcttggataaagcaagagagcggcctcaggtggagctcacctttgaggagactgagaggagagctctgcttctgaagaagtggtccttgtacaagcagcaagagcgtaagatggagagggacaccatcagggctatgctagaagcccagcaggaagctctggaggaactgcaactggaatccccgaagctccatgctgaggccatcaagcgggatcctaacctgttcccctttgagaaggaagggccacattacacaccaccgatccctaactaccaaccccctgaaggcaggtacaatgacatcaccaaggtgtacacacaagtggagtttaagagatagacttgcaggctgctatccttaacatgctgcccctgagagtaggaatgaccagggttcaagtctgctttccacagaatcaggcatgctgttaataaatactggtttaatc

SEQ ID NO: 176250 - DNA, 848 bp, Homo Sapiens
  misc_feature (823)..(823): n is a, c, g, or t
ggggcgcacgcccggaagcggcgagggtagccatgacggcctccgtgctgcgaagtatctcgctagccctgcgcccgactagcgggcttctgggaacttggcagacgcagcttagagagactcaccagcgagcgtcattgttgtctttctgggaactcattcccatgagatcagaacctcttcgaaaaaagaagaaggtagatcctaaaaaagaccaagaagcaaaggagcgcttgaaaaggaagatccgaaaactggaaaaggctactcaagagctaattcctattgaagattttattacccctctaaagttcttggataaagcaagagagcggcctcaggtggagctcacctttgaggagactgagaggagagctctgcttctgaagaagtggtccttgtacaagcagcaagagcgtaagatggagagggacaccatcagggctatgctagaagcccagcaggaagctctggaggaactgcaactggaatccccgaagctccatgctgaggccatcaagcgggatcctaacctgttcccctttgagaaggaagggccacattacacacccaccgatccctaactaccaacccccctgaaggcaggtacaatgacatcaccaagggtgtacacacaagtgggagtttaaagagatagaccttgcaggcctgctatcccttaaacaggctggccccctgaagagtacggaatgaacccagggtttcaaggtcttgccttccccccagaaatcaaggcatggctggttaataaaataactggctcttcagcccacaaaaatacaagacccgcatgatatttccngtatttctttgtgtcgcgccccgcc

SEQ ID NO: 176251 - DNA, 564 bp, Homo Sapiens
gcagccaggcccctgaagcagagaagacaaaatcggtgtgggaaatcctggtgtctgagcgggacatcagagcacttatcccactggccaaggctgaggagctggtgaatacagcaccactgactggagtgccccagcatgtccccgtgcgccttgtcactgtggacggcgggggggccttggtggaggtgacagagcatgtcggctgcgagtctgccaacacacaggtcctgcaggtgtctgaggcctgtgatgccgtgttcgtggctggcaaggagagccggggcgcccggggggtgcgagtggacttctggtggcgcggctcgcgcctcgctgcggctgaccgtgtgggcccccctcgtaccgctgcgtatcgagctcaccgacaccaccctcgagcaggtccgcggctggagggtacctagccctgctgaagggcctcggaacccgctgcagaggcgtcggatgaggccgagcggcgcgccgtggctgccacctgcagtaccagcgggccggtgtcgcttcctcgcccccttcgcggcccacacgctggacggcggccgc

SEQ ID NO: 176252 - DNA, 961 bp, Homo Sapiens
  misc_feature (858)..(858): n is a, c, g, or t
  misc_feature (868)..(868): n is a, c, g, or t
  misc_feature (874)..(874): n is a, c, g, or t
  misc_feature (891)..(891): n is a, c, g, or t
aaatctcccaaagccccaaattcctgttagccaggtggaggcttctgatacgtgtatgagactatgcaaaagtacaagggctgagattcttcgtgtatagctgtgtgaacgtgtatgtacctaggatatgttaaatgtatagctggcaccttagttgcatgaccacatagaacatgtgtctatctgcttttgcctacgtgacaacacaaatttgggagggtgagacactgcacagaagacagcagcaagtgtgctggcctctctgacatatgctaacccccaaatactctgaatttggagtctgactgtgcccaagtgggtccaagtggctgtgacatctacgtatggctccacacctccaatgctgcctgggagccagggtgagagtctgggtccaggcctggccatgtggccctccagtgtatgagagggccctgcctgctgcatcttttctgttgccccatccaccgccagcttcccttcactcccctatcccattctccctctcaaggcaggggtcatagatcctaagccataaaataaattttattccaaaataacaaaataaataatctactgtacacaatctgaaaagaaagacgctctaactgctcagataggtgctgcggtccagcccccagctggaggagaccctgagtccaacccaggcctcccgagggggccagtgaagggatcccacacccaccgcccctatgtagggcagggaagaaattgcaaaggacttgggggatagatgggaatgggagggcaaactgcaggcacttgttaaattaattaaagaaacaaaccagaagcacaaaaacggggaaggagaggggagaaggagcaggtccagtnttcccagggnccccanttttggggggaaaaatntttgccactttttagctgggaccttcccaggggaagttccccttttcccctttttccaaattgagtccaa

SEQ ID NO: 176253 - DNA, 937 bp, Homo Sapiens
  misc_feature (161)..(303): n is a, c, g, or t
cacgcccagcgagttccagaggcgccagtggaagctgcggcggcggtgtctcgcgttcggcgggatttctcttcgctccggctcggcctaggtctacgtccccagctccagccgccggctcggactcggtctctgacccccaactcggtcccctagtccgnnnnnnnnnnnnnnnnnnnnnnnnnnnnnnnnnnnnnnnnnnnnnnnnnnnnnnnnnnnnnnnnnnnnnnnnnnnnnnnnnnnnnnnnnnnnnnnnnnnnnnnnnnnnnnnnnnnnnnnnnnnnnnnnnnnnnnnnnnnnnnntcgccttcctcttcccggcgcggccccccggcttccgcgcgccgcccgccaccaatcctcttgctaccatgtccgtggagctcgaggaggccctgccagtgacgaccgccgagggaatggccaagaaggtgaccaaggctggcggctcggcggcgttgtccccatctaagaagaggaagaatagcaagaagaagaaccagccgggcaagtacagccagctggtggtggagaccatccgtaggctgggcgagcgcaacggctcgtcgctggccaagatctacaccgaggccaagaaggttccgtggttcgaccagcagaatgggcgcacctacctcaagtactcgatcaaggcgctggtgcagaacgacacgcttctgcaggtgaagggcaccggcgccaacggttccttcaagctcaaccgcaagaagctggagggcggaggggcagcggcgcggaaactccggaggccggccaccttcacaggacccaactgctgcaaaaataaaacaaagtgagcccccggggcgcggccggcctcccggaaacatgccgatattattggcccgccataggggcgctccaaaaccggcaccgcacctccgcccgccggcgcaatgtgcgtacccactcaccc

SEQ ID NO: 176254 - DNA, 1122 bp, Homo Sapiens
  misc_feature (161)..(320): n is a, c, g, or t
  misc_feature (664)..(664): n is a, c, g, or t
  misc_feature (769)..(769): n is a, c, g, or t
  misc_feature (802)..(802): n is a, c, g, or t
  misc_feature (1048)..(1048): n is a, c, g, or t
  misc_feature (1111)..(1111): n is a, c, g, or t
cgagttccagaggcgccagtggaagctgcggcggcggtgtctcgcgttcggcgggatttctcttcgctccggctcggcctaggtctgcgtccccagctccagccgccggctcggactcggtctctgacccccaactcggtcccctagtccagccccggctnnnnnnnnnnnnnnnnnnnnnnnnnnnnnnnnnnnnnnnnnnnnnnnnnnnnnnnnnnnnnnnnnnnnnnnnnnnnnnnnnnnnnnnnnnnnnnnnnnnnnnnnnnnnnnnnnnnnnnnnnnnnnnnnnnnnnnnnnnnnnnnnnnnnnnnnnnnnnnnncccggcttccgcgcgccgcccgccaccaaccctcttgctaccatgtccgtggagctcgaggaggccctgccagtgacgaccgccgagggaatggccaagaaggtgaccaaggctggcggctcggcggcgttgtccccatctaagaagaggaagaatagcaagaaggaaaaaccggccgggcaagtaacagccaggtggggggtgcgaaaccatccgttaggattgggggagggccaacggctcgggcgattggtcggggatcttatcccccacggccccgcacacggcccccgataggctacttacgggagcggagagggggggtcacacttatccccacccgntaatttcgaattcgcagggtcactagggggcgcccgcaagctggtcataatattttttctgccatcacttataaactggatccgcccgcgatacgcccaaaaaancggcccccgggccttatattattattattgtgnctgctctcggcactcacccacaactagggtctagcagttaagcccggcaggtcagggagtaaatggacagccgcccgtaccgggtaatttggctgcccgatctctcggtactccacagccgccatttagagctgcttagacagaggcgttagggactagataaaactaatatatactcgccagcccgccgcagcttacgacagtaagtaacgtactgacttagaggacaacaaacgccacccgccncgcgcagcaatgattacgcgcccctcactcgtataacgaacaccgaatacaacgcgaggaatnaactccccccc

SEQ ID NO: 176255 - DNA, 517 bp, Homo Sapiens
ttgccacctggccagcctacttccaccacagattctcccagatggccttggtaacactcctggcttctcccaccgcagcaacgctgcctgccttgccgatcctcaacatcttgccgctgaccagcagagctggcttctgggtccacctgagcactggacggtgctcccagggcgttggagcaggcggaggggtgtgtggccaggtactaggaggcaccaggaaatcccgcggggtggcccatgcagaccaggcgcacgtggctcatggggcagaattgccaaggacagctcacgacagtgccaccttctcaccattccagccaaggagagatgtgacgttggaactgctctggcacttctgtcaagcctcccccgccccaattgccttgagatctctgctctttgtcagagatttgcaaagactcacgtttttgttgttttctcatcattccattgtgatactaagaaactaagaagcttaatgaaaagaaataaaatgcctatgttgttgttctag

SEQ ID NO: 176256 - DNA, 768 bp, Homo Sapiens
  misc_feature (61)..(61): n is a, c, g, or t
  misc_feature (137)..(138): n is a, c, g, or t
  misc_feature (360)..(395): n is a, c, g, or t
  misc_feature (580)..(584): n is a, c, g, or t
  misc_feature (587)..(593): n is a, c, g, or t
  misc_feature (598)..(598): n is a, c, g, or t
  misc_feature (600)..(600): n is a, c, g, or t
  misc_feature (603)..(603): n is a, c, g, or t
  misc_feature (648)..(648): n is a, c, g, or t
ctccaaccctgtgtgctggggttgtatcccggccacctcctgtccagtctccatccccctntgatgggagcctctctgttacagccctccccatgctgtccctgccatatacgtgggggactcagggtcctgactcnnaggccctgccccctccacttggtactagctgtaagcggaacaccctgccccagggccggacttccagcccccagagccctctccctgtcactccctgaaacactattaatagctctgccgatagctggtgttgtcacaactgcctggaatccgaaggtggaggacaggcagccccgcgcccctgagactggagaccctccccagtgtggcatttcctgccannnnnnnnnnnnnnnnnnnnnnnnnnnnnnnnnnnntcttccttcaccagctcccctcgactcaagcccttgtcctcattatccggcccagaccaaagattccctcatccctgggggcagccctgccgctgtgtctcctttgtatcctaaatctttattttttctaggacatgttatgcctccattttcaattaaaataaagttatcggattacacccgcnnnnnaannnnnnncgtananaanaaaaaaatgtcgggccccctccgcccctcgaaaaaactttctaanaccctttcgtttgggggccgggggcccccagtaggtaaaggggaccagtggccctaacccggtttccctaaagaagaacccggggcaatgaactaggggcttgggaattcccccccaaat

SEQ ID NO: 176257 - DNA, 602 bp, Homo Sapiens
  misc_feature (69)..(82): n is a, c, g, or t
  misc_feature (105)..(158): n is a, c, g, or t
  misc_feature (256)..(334): n is a, c, g, or t
ctggtttttgtcactatggacttaccaattctgaatatttcccataaacagaatcatacaatatttgannnnnnnnnnnnnngaaactaagccttgctctgtctnnnnnnnnnnnnnnnnnnnnnnnnnnnnnnnnnnnnnnnnnnnnnnnnnnnnnnagatcaagagattctccagtctcagctcccaagtagctgggattacaggcatgtactaccatgcctggctaattttcttgtagttttagtagggacannnnnnnnnnnnnnnnnnnnnnnnnnnnnnnnnnnnnnnnnnnnnnnnnnnnnnnnnnnnnnnnnnnnnnnnnnnnnnnataatatgtgatcttttgtgtctggttgctttcatgttgaatgctatttttgaggttcgtgcctgttgtagaccacagtcacacactgctgtagtcttcccccatcctcattcccagctgcctcctcctactgtttccctctatcaaaaagcctccttggcgcaggttccctgagctgtgggattctgcactggtgctttggattccctgatatgttccttcaaatccactgagaattaaataaacatccgtaaagcatgacctcccc

SEQ ID NO: 176258 - DNA, 594 bp, Homo Sapiens
  misc_feature (69)..(82): n is a, c, g, or t
  misc_feature (105)..(158): n is a, c, g, or t
  misc_feature (256)..(334): n is a, c, g, or t
ctggtttttgtcactatggacttaccaattctgaatatttcccataaacagaatcatacaatatttgannnnnnnnnnnnnngaaactaagccttgctctgtctnnnnnnnnnnnnnnnnnnnnnnnnnnnnnnnnnnnnnnnnnnnnnnnnnnnnnnagatcaagagattctccagtctcagctcccaagtagctgggattacaggcatgtactaccatgcctggctaattttcttgtagttttagtagggacannnnnnnnnnnnnnnnnnnnnnnnnnnnnnnnnnnnnnnnnnnnnnnnnnnnnnnnnnnnnnnnnnnnnnnnnnnnnnnataatatgtgatcttttgtgtctggttgctttcatgttgaatgctatttttgaggttcgtgcctgttgtagaccacagtcacacactgctgtagtcttcccccatcctcattcccagctgcctcctcctactgcttccgtctatcaaaaagcccccttggcccaggttccctgagctgtgggattctgcactggtgctttggattccctgatatgttccttcaaatctgctgagaattaaataaacatctctaaagcctg

SEQ ID NO: 176259 - DNA, 569 bp, Homo Sapiens
  misc_feature (40)..(40): n is a, c, g, or t
  misc_feature (117)..(117): n is a, c, g, or t
  misc_feature (144)..(144): n is a, c, g, or t
  misc_feature (146)..(146): n is a, c, g, or t
  misc_feature (168)..(168): n is a, c, g, or t
  misc_feature (186)..(186): n is a, c, g, or t
  misc_feature (199)..(199): n is a, c, g, or t
gagccaagattcgcacgaggagagtctgcctgagatcacntcatcatcaccaggcaaccacatcaaggagggccctacgagtgcgccgaatgcgagatcagcttccggcacacagcnaacagtcacgctgcacccagcgcatcncnaccgtgcgcggaggctgcgtgntcaccgaaagcgggcccnacgttcaaccccnaagcaagcgctcaagccgcgtcccaagtcacccagctctggtagcggcggcggtggccctaagccctacaagtgccccgagtgcgacagcagcttcagcccacaagtccagcctgaccaaacaccagatcacgcacacgggtgagcggccctacacgtgccccgagtgcaagaagagttccgcctgcacatcagcttggtgatccatccagccgtgcacgcgggcaagcatgaggtctccttcatctgcagcctgtgcggcaagagcttcagccgcccctcgcaccctgtgcgccaccagcggactcacacaggcgagcggcccttcaagtgccccgagtgcgagaagagcttcagcgagaagtccaagc

SEQ ID NO: 176260 - DNA, 464 bp, Homo Sapiens
  misc_feature (271)..(271): n is a, c, g, or t
  misc_feature (331)..(331): n is a, c, g, or t
  misc_feature (381)..(381): n is a, c, g, or t
  misc_feature (450)..(450): n is a, c, g, or t
gcccagtgaaaaggctggcgccctccgtgcacggtgagcggcacctgagcgagaaccgcgggggcctcgagccagcagcagcggaaccggcgcggcgagcgccctttcacatgcatggagtgcggcaagagcttccgcctgaagatcaacctcatcatccaccagcgcaaccacatcaaggaggggccctacgagtgcgccgaatgcgagatcagcttccggcacaagcaacagctcacgctgcaccagcgcatccaccgcgtgcgcgagngctggcgtcttcacccgaacgcgggcccacgttcaaccccaagcacgcgcttcaagccgngttcccaagttcacccagctttggttagcgggcggcgttgggccttaagnccttacaagttgccccgagttgcggacaaggcttttcagccacaagttccagcttgaccaaacaccagnttcaaggacaaggg

SEQ ID NO: 176261 - DNA, 618 bp, Homo Sapiens
  misc_feature (531)..(561): n is a, c, g, or t
gggaattcaaacctctcacagagtacactagacatacactagagacaccttgtagtattttgggagcaaaaaaataatcttctcttaacaagactttttgtactgaaaacaatttttttgaatctttcgtagcctaaaagacaattttccttggaacacataagaactgtgcagtagccgtttgtggtttaaagcaaacatgcaagatgaacctgagggatgatagaatacaaagaatatatttttgttaaggctggttaccaccagcctttcttcccctttgtgtgtgtggttcaagtgtgcactgggaggaggctgaggcctgtgaagccaaacaatatgctcctgccttgcacctccaataggttttattatgttgtttaaattaatgaacatatgtaatattaatagttattatttactggtgcagatggttgacatttttccctattttcctcactttatggaagagttaaaacatttctaaaccagaggacaaaaggggttaatgttactttaaaattacattcnnnnnnnnnnnnnnnnnnnnnnnnnnnnnnntaaaataccagttttttttctctgggtgcaaagatgttcattcttttaaaaaatgtt

SEQ ID NO: 176262 - DNA, 115 bp, Homo Sapiens
tatacggctgtgagaagacgacagaagagagatgggaccctcctcctcagtagtggctgccagtccctcgttgcaggacagggtcatcataaccataaataacccttcacgtggc

SEQ ID NO: 176263 - DNA, 639 bp, Homo Sapiens
agtcgagccatctgaccccactctggtctgaggtatacaggccttcacaaatatctgccatagctgaaggtgtgacctgaaatggtgttgactgggcttctaaaagtaaaggcattaggctgtaaatgtgcttttctgcaacatgttccgtaaacagctttataaggtcatcttttaagtctctgttaagcttggtttcgatgtaaaacttattcatatatatgaaaagaggcacaatgctctgcaatgctcccatatattgtccaagagctatattaaatctttcaatatagagatctggagggctggcctgcagctcctttgagactctctctaagtgattagttatctttttaatcagatcactatacatctgttccgagtgctgctggcatacacatttatacacacaactgtatatctgttcataggatatggggatatagtcaccaggactctgagtgaaaagttgatctatggcaccatccaattgtggccagtatgtgctcttataatcttcaatagttataacattcattaagaacttggaggtggaggtgttgatgttgatggtggagctgacggtgggggcgggggccgccttggccacggcggcggccgcaagcttattcccttagt

SEQ ID NO: 176264 - DNA, 605 bp, Homo Sapiens
acattgccttgaagacaccggaattccaaggcgagcccaattccgttcgaagcaaccccgaattagggagaagggttccttcttaaggccaagcttaaaagcaaccggacattgccaattgaaaacggaagcttaaacttccagagggtccaacaagttcccaagagctggaaacttggcttattgcccgagccccagctcgagctctgaaagttaaccagagctccagccagcttggctgaaggtggaagtgaaagaagttcaaagcagatgaccagagccataggcccccagcaccatcaagggaccttgatgtggctgggcctgagatgcaggtaaaactgctccagtccctgggcctgaaatcaaccctcatcaccgatggctccactcccatcaacctcttcaacacagcctttgggctgctggggatggggcccgagggtcagcccctgggcagaagggtcgccagtggcccagccctggggaggggatatccccccagtctgctcaggcccctcaagctcctggagacaaccacgtggtgcctgtactgcgctaactcctgattaatacaatggaagtttctgggcatttacaattgc

SEQ ID NO: 176265 - DNA, 656 bp, Homo Sapiens
cctggcttcttagtgaagacaatgtacagtatcccattagatcagggctacacagtctatgagcaataatgtgatttgtggacattgcccatgtattgtcctcactgatgatttcaagctaaagcaaaccaccttatacagagatctagaatccctctatgttctccagaggaaggtggaagaaaccatgagcaggagcaggaattgagtgataaacaaatgggctaaagaagaaaacttttcttcttgttcagttcatccagattataactttaatgggacactttagaccattagacagttgacactggattaaacaaagtcacataatgccaattacacactgtatttatggcaatgtataatttgcaaagattgactttaaaagatgctgtgtaacagaattgaattaattcaattacttattatttagaatgctaaagcttatgctagtcttttctaattcttaacactcatacttgaaatcttgctgagtttccccagaagagaatatcggatgttttttgacatttttgacccatttaataatgttcttgtgtttacttagtatacatagactttatctcatgtgtcaaaagtcctaggaaagtggttgatgtttcttatagcaattaaaaattatttctgaactgtaa

SEQ ID NO: 176266 - DNA, 1680 bp, Homo Sapiens
  misc_feature (11)..(11): n is a, c, g, or t
  misc_feature (318)..(343): n is a, c, g, or t
  misc_feature (548)..(548): n is a, c, g, or t
  misc_feature (550)..(550): n is a, c, g, or t
  misc_feature (552)..(552): n is a, c, g, or t
  misc_feature (556)..(560): n is a, c, g, or t
  misc_feature (1296)..(1305): n is a, c, g, or t
ccgccgcgtancacccagaggggaggattggtatttcgtcgagggggcagacttgggggaggtggtcagtaaggggacatcgcgaagcgtatatcgagcccgggtatgggcgggtggttttcctatagccggcttaaggcgcatccacgcacggagagtgcttattgctgggcgaaggcactgacactcccattgcggttttccccgtgtatcctttcggctcccatagcgcggcgccgcggcgtaaaaggccgatgtggaggccctcgcagcggtccgaatggagggttgttcgcacgtcgagcgcggtcgcacttnnnnnnnnnnnnnnnnnnnnnnnnnnttcccccccgcgtcgggcgtttcccagggacttcgtgggaagacccttgcggccctttggggccctgcgctcacgggggcaggggggtatataacgatttggtcaggcgaggtttttgggcggccccgcccaagcacaaccaggatggtgcatgctatgcatgcctcgcgcctcggggttttcgtgtttgtttgttttttctatntntntggnnnnngtgcattaaacagagtcatatatttatttcaaaacattaagttgacttcccattaataaatactttaacactgagtgtagaaaaacttgtgccatattctataaagataatttattaaagaatcagagaaaaaggacagttctttacctctaggctattgataaaaccatctgggagtgggaacagcttcaggaatgttacaggggaattgagggagggcaagagaggatttgataaaatgaggaaaaatgttctactctcctttctttcctggagccttaaaattaaaaatctggaattgaaaaatatactttcacacacatatctgcttcaatgggtgctgtctttctcaattttggagaagaatcactagttagtggtcagggtcaaaaattgcaaataagttcccaattttagtctaggttagatcactctggttaatcatagggccatgatgccctcagaactcaagcaggagctgctgctacttgtgcttaaagctgaggcacgaacgcaatatcatttactggagaactgaagatgctgcgcaatgctaacagcccctctcagaagttctgtgtggctctgagtccttacagtgcagttgttgtattaacccatcatccagtgagctggccagtagttcagcccctccacttgctgcagctgccgcaagacacattcaccaggcagttgcccaggcctctcacccatggggggaacacatctggccacnnnnnnnnnnctgtaaacctcaaatgaaacagaatctcacagatgtggggtccccctcctaattgtaataaacgttagagaaatgctccagaaaggaacaaagggagaccctctcagatcagcctaaaaccagagtggaatagggctcctctgggcggtttaagggcacagaaaggaccctcagctactcctggcctccccgggtctctttcccagaagacacaactttccaggctgccaaaagtaatagaagtcaaaaccctcaaaaccaccactgctctcgggaagtttttgagtaggatgaggaagaaagaagagagccctccttcattttgttacacgatctcaaggccaagagcaagtagaagatgtctaaagagaaccc

SEQ ID NO: 176267 - DNA, 911 bp, Homo Sapiens
  misc_feature (635)..(803): n is a, c, g, or t
  misc_feature (814)..(828): n is a, c, g, or t
gggggacacccctgccaccttgggatctgcctccaagctggtgcagggtatcgagagtggattccagatggaggtcctggtcccagcacgcagcagtcctggtagctctgcagaggagacaggaacccgagaagtagctgaagcagaagccagcctcagtccccttgccacatagaggcgggcttctcccagccatggtgtcccctctgcctcccctcccccgaccctcctgccttccgcgtggagggtggtggtcctgtagtgtcagcaccagcaccatgggcttggaccccctccctggacacaggcaggtgtcctagggctgggggtgcagcccgagggaatggagaccacactcatggctcaggtctgccggggccggcagggggttggggaagaagagggctcaggcccagcaggggtggaagcccctgccactgccactacccgctccagagctttaaggaaaatgaagtgagacccctccccttaggcctggggagccatagggctggcttctctgtgggtgcgtggacgtggggttgggagctgggaatctattttttgtattatgttttgagctactgtagttttggcgtggcactattgtaatggaaataaaatacttgtacggnnnnnnnnnnnnnnnnnnnnnnnnnnnnnnnnnnnnnnnnnnnnnnnnnnnnnnnnnnnnnnnnnnnnnnnnnnnnnnnnnnnnnnnnnnnnnnnnnnnnnnnnnnnnnnnnnnnnnnnnnnnnnnnnnnnnnnnnnnnnnnnnnnnnnnnnnnnnnnnnnnnnnnnnnttttgggccgnnnnnnnnnnnnnnnaaaaaatttttttaaaaccttttttgtgggggccgccggcccccaaaagaaaaaagagaaagggggcaaaagccggtttctcc

SEQ ID NO: 176268 - DNA, 825 bp, Homo Sapiens
  misc_feature (546)..(631): n is a, c, g, or t
  misc_feature (683)..(683): n is a, c, g, or t
  misc_feature (721)..(754): n is a, c, g, or t
  misc_feature (767)..(775): n is a, c, g, or t
ggggactgaggggtcagtggttccgggtaggagctaggtgaccctcggctgctgcagggatctgcagcgactgcagccatgggggcgcacctggtccggcgctacctgggcgatgcctcggtggagcccgaccccctgcagatgccaaccttcccgccagactacggcttccccgaacgcaaggagcgcgagatggtggccacacagcaggagatgatggacgcgcagctgaggctccagctgcgggactactgcgcccaccacctcatccggctgctcaagtgcaagcgtgacagcttccccaacttcctggcctgcaagcaggagcggcacgactgggactactgcgagcaccgcgactatgtgatgcgcatgaaggagtttgagcgggagcggaggctgctccagcggaagaagcggcgggagaagaaggcggcagagttggccaaaggccagggacccggggaagtggaccccaaggtggccctgtagggggtgcaccccccaccctatggaccagtcaaataaaagccttcaggcccctcnnnnnnnnnnnnnnnnnnnnnnnnnnnnnnnnnnnnnnnnnnnnnnnnnnnnnnnnnnnnnnnnnnnnnnnnnnnnnnnnnnnnnnccccccccacaacccaaacaccggaacaaaaacacccgcccccagggaagcnaaaagggaaattttggggggccgcctttgggccccccnnnnnnnnnnnnnnnnnnnnnnnnnnnnnnnnnnggggcccggccgnnnnnnnnntttttgttaaatgcgcgaacccgggggccaaaaaaaaggggtttttttcc

SEQ ID NO: 176269 - DNA, 1986 bp, Homo Sapiens
  misc_feature (1049)..(1050): n is a, c, g, or t
  misc_feature (1055)..(1056): n is a, c, g, or t
  misc_feature (1233)..(1243): n is a, c, g, or t
  misc_feature (1433)..(1468): n is a, c, g, or t
  misc_feature (1536)..(1544): n is a, c, g, or t
  misc_feature (1669)..(1669): n is a, c, g, or t
  misc_feature (1798)..(1798): n is a, c, g, or t
ggggtgcttcgtggtcggcggctgctgggctccgcgccggggtccggagtccacgaagccccggcccgagccgccggatgcccgcgcgcagcggggcccagttttgccgacggatggggcaaaagaagcagcgaccagctagagcagggcagccacacagctcgtccgacgcagcccaggcacctgcagagcagccacacagctcgtccgatgcagcccaggcaccttgccccagggagcgctgcttgggaccgcccaccactccgggcccataccgcagcatctatttctcaagcccaaagggccaccttacccgactggggttggagttcttcgaccagccggcagtccccctggcccgggcatttctgggacaggtcctagtccggcgacttcctaatggcacagaactccgaggccgcatcgtggagaccgaggcatacctggggccagaggatgaagccgcccactcaaggggtggccgccagaccacccgcaaccgaggcatgttcatgaagccggggaccctgtacgtgtacatcatttacggcatgtacttctgcatgaacatctccagccagggggacggggcttgcgtctttgctgcgagcactggagcccctggaaggtctggagaccatgcgtcagcttcgcagcaacctccggaaaggcaccgccagccgtgtcctcaaggaccgcgagctctgcagtggcccctccaagctgtgccaggccctggccatcaacaagaagctgtgaccagagggacctggcacaggatgaagctgtatggctggagcgtggtcccctggagcccagtgagccggctgtagtggcagcagcccgggtgggcgtcggccatgcaggggagtgggcccggaaacccctccgcttctatgtccggggcagcccctgggtcagtgtggtcgacagagtggctgagcaggacacacaggcctgagcaaagggcctgcccagacaagattttttaattgtttaaaaaccgaataaatggtttattttctcgaaaaaaaacactccatctcacnnaccannaaacctgtccgcgccgcccccgccccttcaaaaagcctttctagcaccatttcgtttgggccgcgcggggccccagcaagggaaacgggaaccatgggccataagctcgtttccccaaaagaaaataccctgggccccttgaacctaaatggccttgggaatttccttcccaccacnnnnnnnnnnnccgcccccgcgcggcggaaccacccgcagccgtattccttccgaaacacaaaattctccccgaattgggagaagttctctctcgcaagaggtcgcccctctatacttcgggggaatctcttcctatcccccacccacgagggagggtcttcctcacatacgcgcgcaagcgtctctcctcaaattatttnnnnnnnnnnnnnnnnnnnnnnnnnnnnnnnnnnnnacgcgcgcgcacttggtggtcacacacatctctctaactgtcattcgcgagaataaacaaaggggtcnnnnnnnnnaacaatttccccccccctatattaaacgcgcctattttctctggtgcgcggcccacacaccttgtgggcgcaaatactcccccttctcttcccccaccaatcccgggagcgccgtcattcaccgncgagacacacccctcataaacacatttgcgcctccactagcggctgtcgtcatctctcaccaccctccctctattgtcctcccctgcctctggtgcggcccgatataaacagaataatctattttcccnccccctctgtgcgcgcggtacatataacacacggcgcggggcggcgcacgcaaaaccaaacacacatttgtgcctcctctcacaatattatcgtgcgcgcgcccaccctctctcttataaaatatcttccacaaccaccggtgtggccgagaaaaacacccccactccccacgccccgcgagcccgcg

SEQ ID NO: 176270 - DNA, 1052 bp, Homo Sapiens
  misc_feature (459)..(534): n is a, c, g, or t
  misc_feature (559)..(599): n is a, c, g, or t
ggggaagttccggtccagggctctgacttcgggcttgttcgctggtggcgtcggagccgagccggactggtcaggatgatcacggacgtgcagctcgccatcttcgccaacatgctgggcgtgtcgctcttcttgcttgtcgttctctatcactacgtggccgtcaacaatcccaagaagcaggaatgaaagtggcgctttctccgccccagggttccaggacatagtctgaggcaagatggagggtatgaggggccttcacacttcacttcatcccttctacccatcacaacatacaaagcaactacacctggatttttccaaacaacttttatttcctcagagtcttccttaatcctatggaacaagaagctgccactgaatagggcccagtataggggcttgcttttctactccctccccccaatataaaaatatagacttttttttgtggtcccnnnnnnnnnnnnnnnnnnnnnnnnnnnnnnnnnnnnnnnnnnnnnnnnnnnnnnnnnnnnnnnnnnnnnnnnnnnnggggggcgccagcgaacaaaatccnnnnnnnnnnnnnnnnnnnnnnnnnnnnnnnnnnnnnnnnngcgctgttctccgcggcaaaccagcggcgcgccactataggcacgcagggctcgttctatatatacacaccagtgccgcgagcagcgtgcgcggcagcctccactacacaaagcaacagcccacgcagcccagggaagacaaccgcgcggcacaacaaccggcaccacttctgcgcacgaacacaggacacccaacacctgcctagcagcgcgcccacacaccacatgctcagcccacagaccgccacccatccgcagacacagatactagcacccgccccgccagccagcaccatgccacaccacagcccctgccagccagcaccaagcgtgccagtacaaccacaagcgacaggtcacacaccgctgcacccccgaacaaccagcgcaccgtcccgcccgccagtactgcccctcccagcaccaatctcccccgcggcagcccgtcacgcg

SEQ ID NO: 176271 - DNA, 381 bp, Homo Sapiens
ctagatgtcttgcggcaaattgaggttgccccagataccaaggcatcaaaagccaggggatccagaaaaaacaaagatggccaagagcgaaactgggggaaaagccaaaaggttgagagccacaccatctagaagcttccctgctgcggtgcggcacagaaacaaggagagtcagcaattaccagccagccaaggtcctggaagctgacgtagagctcgtccgacgcagacctgccggccgtgggagccgcggacgtcatctgcagggacagaaggggcaaggtcttttctggggttcctactgtgtgcagctactatggggtaccagggtgggggatgccctgatgagcacatttgtcaaataaatgaatgacaggaaac

SEQ ID NO: 176272 - DNA, 600 bp, Homo Sapiens
tgaaggataaaataagtttttatttatagtcttatagtaaagggggaagccttaacttgcaagacaattcttcggcagtatgtacaacatactttttatttccatggaatggaatcaaacacgaactgagactacagagtatacactagaaatcagcaaatgccaggaacggagtaggaaaaagacaaagaaatgaggcctaaacacacaaaacccttcactgggatctgctgaccacagccagaaccagggctggatcacacaatggagacaggttccaggacagtaggaaaggaagtgggatgagggctgggaagggtccgcactggggtgccggtctagtaccaggtaaattgctcttggtatttacatacaaaatcagttggctctatttcttagaaatacacacgggaagaaagaaagatttcatcattactttatgaatctgtcgctttgcaagaccgacatcatcagaaataggtacaattcactcagattcaaatttaagtagcaggaaataaatatccaaacatcatcactggccctcaatacaaaacctctatgccacccaaaacaccctccctgtcccaaccccaaatg

SEQ ID NO: 176273 - DNA, 598 bp, Homo Sapiens
aaacccccccttatcaagtggactttttctgttaccctcccgaaaaattttttggagtgggccgcccaaatttccaaaccccccgggaacccagggagattttaaaacccacttcccaaccaggtgaattttttcagggaccccttccccagcgttgagctttacgtcctgtgccggatcctgcatgactggccagacgacaaagtccacaagttactcagcagggtccccgagagctgcaagccaggggccggcctgctgctggtggagacgctcctggatgaggagaagagggcgtgagcgcgccctgatgcagtcactgaacatgctggtgcagactgaaggcaaggagcggagcctgggcgagtatcagtgcttgctggagctgcacggcttccaccaggtgcaggtggtgcacttggggggtgtcctggatgccatctctggccaccaaagtggccccctgaagcccaggcagcatgttcattatagggatgtcctcccccaggctgcaaggtggaccgcccggtccccaagtaccataggacagtcacataggagcgtgtagtcgtgactgaataaagaaagcaaaagacca

SEQ ID NO: 176274 - DNA, 519 bp, Homo Sapiens
gcgagaccttttgaaacccctctgtaaactcccctccctccagttggccaccagtctgccaccaaacatgaacaaattctgctgctaatcggtttcccttgtgatctggttcctgaggtcttcggatctgtgcaatgaattatttattgttttattaaaccgacagtggtgtcccagagaggaaccataaataaaatggaaatctggtgctgtgataaagtaataactagcattaatgagacctggttttcctttcagaaagtccagtatacctgtaacaaaggttaaagcaatttatatttaatttgcattctgatgttaacatttaaacagcaattctaacaaaaatgcatcgagtctaattcttacctctatcaaaaaacaactgtataaatttatgaccaacattaaaacaaaaacaaaatgtaaattttctctttagaaatgattaactggaaatgagtgagacagcaccttgtgggttttttagtaataaaaagctcttttcaaccaaaaaaa

SEQ ID NO: 176275 - DNA, 714 bp, Homo Sapiens
ggtgctgtcaaaattgagcaggagtttttaacagaagccttgccagttggcctcattggaatgaattgcattttgatgaaacagtacattgagtttgtagctgacagattacttgtggaacttggattctcaaaggtttttcaggcagaaaatccttttgattttatgggaaaacatttctttagaaggaaaaacaaatttctttgagaaacgagtttcagagtatcagcgttttgcagttatggcagaaaccacagataacgtcttcaccttggatgcagatttttaaaaaacctctcgttttaaaactctataaacttgtcattggtaaatagtagtctattttcctctgcttaaaaaaaattttaagtatatcctttaaaggactgggggtttgctcaaaaggaaatccaaaacctattctaaacaatttgcatttatataattttcctgtttaacaacaagagtgtgacctaaatgcttttgtcttgtcactgaaataaaagatggcattatgtggttaagagcatggggcgaggggtcagacatgagtctaaggttctgcccttactccagtgtgtgacccttggcaagtcagttaatcttggtaaacctcggtgtacttatctttaaaatgggagtaatagtaggtcctaaattcatagagtggatattaggattaggatgcaaaaataaatgcttaaccaacactaa

SEQ ID NO: 176276 - DNA, 805 bp, Homo Sapiens
  misc_feature (667)..(667): n is a, c, g, or t
  misc_feature (758)..(758): n is a, c, g, or t
  misc_feature (760)..(760): n is a, c, g, or t
gggccgcttggcccaagatggcggcctccgtgtgcagcgggttgctggggccacgggtgctgtcctggagccgagagctgccttgcgcttggcgcgccctgcacacctccccggtctgcgccaagaaccgggcggcccgagtacgcgtaagcaagggggacaagccggtgacctacgaggaggcacacgcgccgcactacatcgcccaccgtaaaggctggctgtcgctgcacacaggtaacctggatggagaggaccatgccgcagagcgaacggtggaggatgttttccttcgcaagttcatgtggggtaccttcccaggctgcctggctgaccagctggttttaaagcgccggggtaaccagttggagatctgtgccgtggtcctgaggcagttgtctccacacaagtactacttcctcgtgggctacagtgaaactttgctgtcctacttttacaaatgtcctgtgcgactccacctccaaactgtgccctcaaaggttgtgtataagtacctctagaacaatccccttttttccatcaagctgtagcctgcagagaatggaaacgtgggaaaggaatggtatgtggggggaaatgcatcccctcagaggactgaggcatagtctctcatctgctattgaataaagaccttctatcttgtaanggaaaccgaacggtcctgaccaaatccgacgggcgccccggggcccatacggggactaatcccccgggagcccaggccgcctccaataatnanttttttggggccccctttggcccctggaaaaattttcttaaacct

SEQ ID NO: 176277 - DNA, 592 bp, Homo Sapiens
gagcgtcttcgtcccaccccgcgacggcttcttcggcaacctcggcaagtcaaagctcatctgccaggccacgggtttcagtccccggcagattcaggtgtcctgcctgcgcgaggggaagcaggtggggtatggcgtcaccacggaccaggtgcaggctgaggccaaagagtctgggcccacgacctacaaggtgaccagcacactgaccatcaaagagagcgactgctcggccagagcatgttcacctgccgcgtggatcacaggggcctgaccttccaggccggtacttcgcccacagcatcctgaccgtgtccgaagaggaatggaacacgggggagacctacacctgcgtgggtgcccatggggccctgcccaacagggtcaccgagaggaccgtggacaagtccaccggtaaacccaccctgtacaacgtgtccctggtcatgtccgacacagctggcacctgctactgaccctgctggcctgccacaggctcgggcggtggccgctctgtgtgtgcatgcaaactaaccgtgtcaacggggtgagatgttgcatcttataaaattagaaataaaaagatccattc

SEQ ID NO: 176278 - DNA, 684 bp, Homo Sapiens
  misc_feature (23)..(23): n is a, c, g, or t
  misc_feature (30)..(30): n is a, c, g, or t
ccacaccaacatctccgagagcnaccccanatgccactttcagcgccgtggttgaggccagcatctgcgaggatgactggaattccggggagaggttcacgtgcaccgtgacccacacagacctgccctcgccacgtgaagcagaccatctcccggcccaagggggtggccctgcacaggcccgatgtctacttgctgccaccagcccgggagcagctgaacctgcgggagtcggccaccatcacgtgcctggtgacgggcttctctcccgcggacgtcttcgtgcagtggatgcagagggggcagcccttgtccccggagaagtatgtgaccagcgccccaatgcctgagcccccagccccaggccggtacttcgcccacagcatcctgaccgtgtccgaagaggaatggaacacgggggagacctacacctgcgtggtgcccatgaggccctgcccaacagggtcaccgagaggaccgtggacaagtccaccggtaaacccaccctgtacaacgtgtccctggtcatgtccgacacagctggcacctgctactgaccctgctggcctgcccacaggctcggggcggctggccgctctgtgtgtgcatgcaaactaaccgtgtcaacggggtgagatgttgcatcttataaaattagaaataaaaagatccattcaaaagata

SEQ ID NO: 176279 - DNA, 556 bp, Homo Sapiens
  misc_feature (23)..(23): n is a, c, g, or t
  misc_feature (26)..(26): n is a, c, g, or t
  misc_feature (66)..(66): n is a, c, g, or t
  misc_feature (104)..(104): n is a, c, g, or t
  misc_feature (404)..(404): n is a, c, g, or t
  misc_feature (512)..(512): n is a, c, g, or t
  misc_feature (540)..(540): n is a, c, g, or t
atctcctggacccgccagaatgntangctgtggaaaacccacaccaacatctccgagagccacccnaatgccactttcagcgccgtgggtgaggccagcatctncgaggatgactggaattccggggagaggttcacgtgcaccgtgacccacacagacctgccctcgccactgaagcagaccatctcccggcccaagggggtggccctgcacaggcccgatgtctacttgctgccaccagcccgggagcagctgaacctgcgggagtcggccaccatcacgtgcctggtgacgggcttctctcccgcggacgtcttcgtgcagtggatgcagagggggcagcccttgtccccggagaagtatgtgaccagcgccccaatgcctgagccccaggccccaggcgnttactttcgcccacagcatcctgaccgtgttccgaagaggaatgggaacaagggggagacctacaactgcgttggttggcccatgagggccttgcccaaacaaggttnaccgaggaggaccgttgggacaagtttncaaccgttaaaaccca

SEQ ID NO: 176280 - DNA, 583 bp, Homo Sapiens
  misc_feature (456)..(456): n is a, c, g, or t
  misc_feature (476)..(476): n is a, c, g, or t
  misc_feature (491)..(491): n is a, c, g, or t
  misc_feature (521)..(521): n is a, c, g, or t
ggcaagagacttagtcgacctcgcgttcgatctctggggccgtggaccctggtcactgtctcctcagggagtgcatccgccccaacccttttccccctcgtctcctgtgagaattccccgtcggatacgagcagcgtggccgttggctgcctcgcacaggacttccttcccgactccatcactttctcctgggaaatacaagaacaactctgacatcagcagcacccggggcttcccatcagtcctgagagggggcaagtacgcagccacctcacaggtgctgctgccttccaaggacgtcatgcagggcacagacgaacacgtggtgtgcaaagtccagcaccccaacggcaacaaagaaaagaacgtgcctcttccagtgattgccgagctgcctcccaaagtgagcgtcttcgtcccaccccgcgacggcttcttcggcaacccccgcaagtncaagcttcatctgccaggcncacgggttttcagtncccgggcagatttcaggtgtcctggggttncggcgaggggggaaggcaggtgggggtcttggcgtttaaccacgggaccagggtgcaggctt

SEQ ID NO: 176281 - DNA, 383 bp, Homo Sapiens
  misc_feature (251)..(251): n is a, c, g, or t
  misc_feature (357)..(357): n is a, c, g, or t
  misc_feature (371)..(371): n is a, c, g, or t
gtgacccacacagacctgccctcgccactgaagcagaccatctcccggcccaagggggtggccctgcacaggcccgatgtctacttgctgccaccagcccgggagcagctgaacctgcgggagtcggccaccatcacgtgcctggtgacgggcttctctcccgcggacgtcttcgtgcagtggatgcagagggggcagcccttgtccccggagaagtatgtgaccagcgccccaatgcctgagccccaggncccaggcggttactttcgcccacagcatcctgaccgtttccgaagaggaatggaacacggggggagaccttacaacttgcgttgttggcccattgagggccttgcnccaacagggtttancgagaaggaacc

SEQ ID NO: 176282 - DNA, 420 bp, Homo Sapiens
  misc_feature (235)..(331): n is a, c, g, or t
  misc_feature (333)..(345): n is a, c, g, or t
atactgtgtgtgcatggttgtgtctgcgtacgcttcatatttacacggttgtgtgtgcttgtggaaagttctagaaggatacaccatgctgttactagtagctgactctgtggagttggtaggagggtcactggagaggaacttgcaacatatatacacttcagtggtgtcttttttgggcagacggggcaacaagtaatatatactagtaataagataatacacgttaaaaacnnnnnnnnnnnnnnnnnnnnnnnnnnnnnnnnnnnnnnnnnnnnnnnnnnnnnnnnnnnnnnnnnnnnnnnnnnnnnnnnnnnnnnnnnnnnnnnnntnnnnnnnnnnnnncttagctgggtgtggtggtgtgcacctgtagtccagctactcaggaggctgaggtaggaggataacgtgagccca

SEQ ID NO: 176283 - DNA, 1235 bp, Homo Sapiens; identical to SEQ ID NO: 13743
  misc_feature (701)..(710): n is a, c, g, or t
  misc_feature (964)..(1075): n is a, c, g, or t
  misc_feature (1077)..(1077): n is a, c, g, or t
  misc_feature (1080)..(1081): n is a, c, g, or t
  misc_feature (1091)..(1106): n is a, c, g, or t
  misc_feature (1150)..(1167): n is a, c, g, or t

SEQ ID NO: 176284 - DNA, 1207 bp, Homo Sapiens
ggagagtctggaaatcgtgaaagagcttgaccgatgaaatgggcctggctgtcgtatcggtaatttggtgaatgttgcttaagatcagcctggaaaggtagttagtcagatccgaagtgacatatttgcactgccaaaggaggctctggaggttaaagtatgtgttttaatttcgttgttgaggccatataatgcagagttgacggaccgaccttatgagtcaccttggagcggagtagtggagacttaaagacagactaccctggagctggcttcaaactagttcttaatattgtgactcgaactccccatccccagaaattctcagatcttagaagccaaagactggcaaggatactagagggaactactcgagtaggcgaggtcagactacataccgaataggagtccttccaaaaatacagaaggctgaggccggggtgctagagaaccttgccgtgctggaattcacgttgacgcccccacggagctctgctgcagagccctcgagtcccgcacttccggccgccaggtggcgctggttctgttgccaactcggagagactgagctgggccacgcaagatggcgccgtccgccttgctgcgtcccctttcccggctgctggcccccgccaggctcccgagcggcccttcagtgcgatcaaagttctacgtgcgagagccgccgaatgccaaacctgactggctgaaagttgggttcaccttgggcaccactgtcttcttgtggatctatctcatcaaacaacacaatgaagatattttagagtacaaaagaagaaatgggctggaataaacttttgaaacactaatgtagtatgctccgtatagtgattgtagctgttcctctggattcaccatctgttgagttgtaaatgtgagagaaaaagttatatgtgaatatatatcaagccagcatttgtattttgcatcattaaataaaaagaaataaaaatacttctgtattcttccaaatacagcatatttgggaccccttaccttcgtacactctcccccccactaattgttggcccgcccctccggcccctcaagaaacttttccaaaacctttccctttcgggcgcccggggccccatccagggaaagtgaacaccgcgccatagcttggtttcccaaagcagcatcccaggtccagggcacacaagagcatcggccaccctcccccaat

SEQ ID NO: 176285 - DNA, 744 bp, Homo Sapiens
  misc_feature (555)..(555): n is a, c, g, or t
gggggattacaggcgtgagcaatcgtgcccagccttgttcttaattttgtatcatccagtcatcgctaatattacacgcaccttctcacttaatcctcacgacaagcctgtgaggcagatgctcattgttcccatcttgatgaaacttgagtctcagggaagtgaagtgacttgcccagggtcactcaggtagagttgagattcaaacccacatgtggctccaaagtctgcatctggatttgggggtgttttttggcatggcaccctcacctctctccctgcctgttttccccaaagtggaaaggaaggcctttcaaaccagagtgtctcactcccctctgacctccagaccagatggggcatgagccagccagctcagccaggctccctgtgtcctgggaggaagtgtccccatcccccatgccccttatggggagggagggcgtctgatgctctctctctgcctcccccccatcctgtcaggcacaggtgacgggggcagcccatgcgagcccttctcctgctgctctggggagggccagttccacattgagnccagccgggtcccatgggaaaatgatggcctgggctttctgaggccttatctgatgcctctgcagttcatgtcccccaccaggcctcgaggctcagggtgggagagggccccgggctgccctgtcactcctctaacacttccctcccctgtccccaacatgccctgtaataaaattagagaagactaaa

SEQ ID NO: 176286 - DNA, 404 bp, Homo Sapiens
  misc_feature (13)..(13): n is a, c, g, or t
  misc_feature (25)..(25): n is a, c, g, or t
  misc_feature (40)..(40): n is a, c, g, or t
aacttccaaaccnaaatggggcatnagccaagccaagctnagcccaggctccctttgcccctgggagaaagtgtcccccatcccccatgccccttatggggagggagggcgtctgatgctctctctctgcctcccccccatcctgtcaggcacaggtgacgggggcagcccatgcgagcccttctcctgctgctctgggagggccagttccacattgagccagcctggtcccatggaaaatgatggcctgggctttctgaggccttatctgatgcctctgcagttcatgtcccccaccaggcctcgaggctcagggtgggagagggccccgggctgccctgtcactcctctaacacttccctcccctatccccaacatgccctgtaataaaattagagaagact

SEQ ID NO: 176287 - DNA, 968 bp, Homo Sapiens
  misc_feature (18)..(18): n is a, c, g, or t
  misc_feature (141)..(164): n is a, c, g, or t
  misc_feature (166)..(289): n is a, c, g, or t
  misc_feature (306)..(432): n is a, c, g, or t
  misc_feature (688)..(689): n is a, c, g, or t
  misc_feature (813)..(813): n is a, c, g, or t
  misc_feature (861)..(863): n is a, c, g, or t
  misc_feature (865)..(865): n is a, c, g, or t
  misc_feature (867)..(867): n is a, c, g, or t
  misc_feature (872)..(881): n is a, c, g, or t
  misc_feature (893)..(893): n is a, c, g, or t
  misc_feature (946)..(947): n is a, c, g, or t
gtctaagtacgagcctgngtggcgaattccgcacgaggggcagacatctccgcagccactcctgggccttttatgtgccgagttaccccacttgccttgggcgtgtccactgagccttccccagccagtcttgttctcaannnnnnnnnnnnnnnnnnnnnnnngnnnnnnnnnnnnnnnnnnnnnnnnnnnnnnnnnnnnnnnnnnnnnnnnnnnnnnnnnnnnnnnnnnnnnnnnnnnnnnnnnnnnnnnnnnnnnnnnnnnnnnnnnnnnnnnnnnnnnnnnnnnngtgcatgccaccatggnnnnnnnnnnnnnnnnnnnnnnnnnnnnnnnnnnnnnnnnnnnnnnnnnnnnnnnnnnnnnnnnnnnnnnnnnnnnnnnnnnnnnnnnnnnnnnnnnnnnnnnnnnnnnnnnnnnnnnnnnnnnnnnaatcgtgcccagccttgttcttaattttgtatcatccagtcatcgctaatattacacgcaccttctcacttaatcctcacgacaagcctgtgaggcagatgctcattgttcccatcttgatgaaacttgagtctcagggaagtgaagtgacttgcccagggtcactcaggtagagttgagattcaaacccacatgtggctccaaagtctgcatctggatttgggggtgttttttggcatggcaccctcacctctcnntcctgctgttttcccaaagtggaaaggaaggcctttcaaaccagagtgtctcactccccctctgacctccagaacagatggggcatgagccagccagctcaggcaggctccctgtgtccctggngaggaaatgtccccatcccccatgcccctttttgggggaagggaaggnnntntnaaagnnnnnnnnnngggcattccccncaaatttgtgtaagggaaagggtgtgaaggggggtagaccattggggaaaganncttttttccgtggagagctcg

SEQ ID NO: 176288 - DNA, 497 bp, Homo Sapiens
  misc_feature (458)..(458): n is a, c, g, or t
  misc_feature (464)..(464): n is a, c, g, or t
  misc_feature (485)..(485): n is a, c, g, or t
cactggtttcaaatagtgatgttagacttaacctaatttataaacaagagattaatatctccatgcatagttttagacaaaaaaagatgtttcaataaaattactgtcttgtaatataaatgttgtccacttcccttttccacaggcctagaacagttaaagggaacataatttgtttaggctcccacataaatgtgaatctggccaacaactttggttcatcctttagtgaattagaggatttggctaccctgagtatatttatattcatttcttctgttctccttctgttattatacttaatcttctaaactaaactaatgtgaacagtagggaagcaagggcccaaatgcataagtttctttgcactgttgcacttacttaatacaaataaatgttttttaaagcttttgtagtatgttttttatgagttaaccatcctaattgtgggtagggtnttaggnaatgtgctgttcatggagtanaatttggaggac

SEQ ID NO: 176289 - DNA, 323 bp, Homo Sapiens
gcttgactgcttcaaagcttccctggacctgaagccagacagggcagaggcgtccgctgacaaatcactcccatgatgagaccctggaggactccaaatcctcgctgtgaacaggactggacggttgcgcacaaacaaacgctgccaccctccacttcccaacccagaacttggaaagacattagcacaacttacgcattggggaattgtgtgtattttctagcacttgtgtattggaaaacctgtacggcagtgatttattcatatattcctgtccaaagccacactgaaaacagaggcagagacatgtactctggtgtgcc

SEQ ID NO: 176290 - DNA, 359 bp, Homo Sapiens
  misc_feature (201)..(228): n is a, c, g, or t
tgcggccgccgcgcgatcgccgggccctcccggttccccgggccaagcacacgccgaacgggaagacgcgcgcggcggccgaactggcccctcaactcctcgcaggggcggaggtgggtaaagagagaaaagtccccaaaagatttggggaaggagttctccgcctctcgcagaggagttatagttcccaggctggagagnnnnnnnnnnnnnnnnnnnnnnnnnnnnaccgcgctgcagtttgctgtctctcggctgagtctggagaccgtgctaaagtagagaggagtttctcgaatgctggttgctgaagcttccaatgcaagtttctcgcggcctcccaggcaagtctttttttt

SEQ ID NO: 176291 - DNA, 1085 bp, Homo Sapiens
gggaggttccgggctgcttaggttggcaccggtccgtggtccccgggggcgcagtcgcagcgctcccgccctccaggcgtcagcgagtgcgcggtccagtgcggccggaacctggcgcaactcctagagcggtccttggggagacgcgggtcccagtcctgcggctcctactggggagtgcgctggtcggaagattgctggactcgctgaagagagactacgcaggaaagccccagccacccatcaaatcagagagaaggaatccaccttcttacgctatggcaggtaagaaagtactcattgtctatgcacaccaggaacccaagtctttcaacggatccttgaagaatgtggctgtagatgaactgagcaggcagggctgcaccgtcacagtgtctgatttgtatgccatgaaccttgagccgagggccacagacaaagatatcactggtactctttctaatcctgaggttttcaattatggagtggaaacccacgaagcctacaagcaaaggtctctggctagcgacatcactgatgagcagaaaaagcttcgggaggctgacctagtgatatttcagttcccgctgtactggttcagcgtgccagccatcctgaagggctggatggatagggtgctgtgccaaggctttgcctttgacatcccaggattctacgattccggtttgctccagggtaaactagcgctcctttccgtaaccacgggaggcacggccgagatgtacacgaagacaggagtcaatggagattctcgatacttcctgtggccactccagcatggcacattacacttctgtggatttaaagtccttgcccctcagatcagctttgctcctgaaattgcatccgaagaagaaagaaaggggatggtggctgcgtggtcccagaggctgcagaccatctggaaggaagagcccatcccctgcacagcccactggcacttcgggcaataactctgtggcacgtgggcatcacgtaagcagcacactaggaggcccaggcgcaggcaaagagaagatggtgctgtcatgaaataaaattacaacatagctacctgggaaaaa

SEQ ID NO: 176292 - DNA, 1340 bp, Homo Sapiens
  misc_feature (1132)..(1160): n is a, c, g, or t
ggggtttggtaagttccgtttttagccccggcctttttctagccaggctctcaactgtctcctgcgttgctgggaagttctggaaggaagcatgtgctccagaggttgggattcgtgtctggctctggaattgctactgctgcctctgtcactcctggtgaccagcattcaaggtcacttggtacatatgaccgtggtctccggcagcaacgtgactctgaacatctctgagagcctgcctgagaactacaaacaactaacctggttttatactttcgaccagaagattgtagaatgggattccagaaaatctaagtactttgaatccaaatttaaaggcagggtcagacttgatcctcagagtggcgcactgtacatctctaaggtccagaaagaggacaacagcacctacatcatgagggtgttgaaaaagactgggaatgagcaagaatggaagatcaagctgcaagtgcttgaccctgtacccaagcctgtcatcaaaattgagaagatagaagacatggatgacaactgttatctgaaactgtcatgtgtgatacctggcgagtctgtaaactacacctggtatggggacaaaaggcccttcccaaaggagctccagaacagtgtgcttgaaaccacccttatgccacataattactccaggtgttatacttgccaagtcagcaattctgtgagcagcaagaatggcacggtctgcctcagtccaccctgtaccctggccccggtcctttggagtagaatggattgcaagttggctagtggtcacggtgcccacccattcttggcctgttacttacctgagatgagctcttttaactcaagcgaaacttcaaggccagaagatcttgcctgttggtgatcatgctcctcaccaggacagagactgtataggctgaccagaagcatgctgctgaattatcaacgaggattcccacagcataacttttaaacactggttattatacaattttatatccctttgttgttttctagtacacagagatatagagatacacatgcttttttcccacccaaaattgtgacaacattatgtgaatgttttattattttttaaaataaacatttgatataattatcaattaactgnnnnnnnnnnnnnnnnnnnnnnnnnnnnnccttggtcggccgccttcggccccttgagaaagctttctaagaaccattccttttgggccgccccggcccccaggaagggtaaagtggaaacatggggccaaaaacctggttttcccctagggggaatccccgggggcccagggaacctaaggggctttgggaaattttttccccccaat

SEQ ID NO: 176293 - DNA, 400 bp, Homo Sapiens
aatgtttcctcagggaatgtaactgaaggccccaggagggacctgtgaagggtctgtttacagaggctgggcaggggccgcttggctgtggggtgtgcgctgccccggcacctgcttgccctccgcgctcatctggggccgcagcatgcctatggttccgcttccggccgggagccctgaacacgggtgtgcagactcaccctaaagggcggcccaggccccacgctagaaggctggcgagaccgaaggcagcatgtgaggcctctcctgggagtgggggttgtgtttcccacagtggcctcagctgcgcccccgctcaggtgagcccgaaggcaggagccgggaggcactcctcccaaacactccactcagaccataaagcactcctgtttcactctgc

SEQ ID NO: 176294 - DNA, 932 bp, Homo Sapiens
  misc_feature (163)..(285): n is a, c, g, or t
cggatacacggcgacgtgccgcagcgaaaagcattaatggcgaggggcgaaaggggggagacaaaggcggggggtgttgcggaaaatgcggaccaggggggggcgaaggtctgtgggccatttttcggccggggtgaaacggggctcaagagcgcggcccaannnnnnnnnnnnnnnnnnnnnnnnnnnnnnnnnnnnnnnnnnnnnnnnnnnnnnnnnnnnnnnnnnnnnnnnnnnnnnnnnnnnnnnnnnnnnnnnnnnnnnnnnnnnnnnnnnnnnnnnnnnagggggccgcaacacaaggtgcgcggttgcccctactgggaggaggccaactcaaacgagagcgacggggagggcaaacatggacacggcggaggaggagaccccgcccgcagggcccaggcctggcccggagccgggtggagtcggccgccggccctggccgtacgaacgggcgcaggggggagacgggccagaggaacaatgagggggcgcctggtcgccgggctcagcctccctcctcgccggcctcagtttaccacgtctgaggtcggggggaccccctccgagtcccgcgctgtcttcaaaggcgcctgtctcccctcccccacgttggggacgcccctcccagagcccaggtcgcctccgggcttccgcagccccctccaaggcggagtggagccttgggaacccctcggccaagcacaggggttggaaaatacagctgaaaccccgcgggcccttagcacgcgccccagcgccggagcacggtcagggtcttcttgcgacccggcccgctccagatccccacagctctcggccgcggacccgggccgcgtgtgagcgcactttgcacctcctatccccagggtccgcggagagccacgattttttacagaaaatgagcaataaagagattttgtactgtc

SEQ ID NO: 176295 - DNA, 941 bp, Homo Sapiens
  misc_feature (454)..(466): n is a, c, g, or t
  misc_feature (471)..(487): n is a, c, g, or t
gggaaggctgggagggctgcgcgggctgcgcgtcgccatggagcccgacgggacttacgagccgggcttcgtgggtattcgcttctgccaggaatgtaacaacatgctgtaccccaaggaagacaaggagaaccgcattctgctctacgcgtgccggaactgtgattaccagcaggaggccgacaacagctgcatctatgtcaacaagatcacgcacgaagtggacgaactgacccagattatcgccgacgtgtcccaggaccccacgttgccgcggaccgaggaccacccgtgccaaaagtgcggccacaaggaggctgtgttcttccagtcacacagtgcgcgggccgaggacgccatgcgcctttactacgtgtgcacagccccacactgcggccaccgctggaccgagtgacctcctctctcccccgagtgtaataaacaccagattccnnnnnnnnnnnnntacannnnnnnnnnnnnnnnnacagacaacaacaaaccttgtcgggccgcctcgcgccctcgaagaagcttttcaaaaccatttcgttttggccgcgcggggccccagaaaggtaaagggaaacatgggtcaataccctgctttcccaaggaaaatccctgggtcatggcactagtgggcttgggattttctctaccaaataaaaaaaccgcccgcgggggggaaccccggaagcggttcctggaaaaaaatccccacaaagggagaggtcccgggagggcctctctcaccggggattccatacccaccaggggaagtcccaaggccggagcctttctgaatattccaaatatcaatggtcccccgcccgccctggacgcccatcgtctatcccgggcgataggtgggtgtgtttcttcctcgcactttatcgcgccgtttctctgtcaccctcactattggggtggatataccc

SEQ ID NO: 176296 - DNA, 834 bp, Homo Sapiens
ggggcatgcgcactggccttcaaccaagccaagcgccttggcttctgtcctggatgctcagtgttttgcggtttacgatgcgcatcgttttcccggctctggcaccagatccatactattctgtaaactgaggcggcgatgcccaaaaattggaagcaattactctaagatatcaaaagattgaagcaagccatgaaacctctgcgcggagagagccgaccccgacgcggcggggagccagcacgtgtgcgcagctccgccctcttttggcgaagcacctaggcctggcccctcccgcgacctgtagcgcggcggaccaagcgcagaaggctgggagggctgcgcgggctgcgcgtcgccatggagcccgacgggacttacgagccgggcttcgtggtaacaacatgttgtaccccaaggaagacaaggagaaccgcattctgctctacgcgtgccggaactgtgattaccagcaggaggccgacaacagctgcatctatgtcaacaagatcacgcacgaagtggacgaactgacccagattatcgccgacgtgtcccaggaccccacgttgccgcggaccgaagaccacccgtgccaaaagtgcggccacaaggaaggctgtgttccttccagtcacacagtgccgcgggccgcaggacgccatgccccctttactaccgtgtgcacaggcccccacactgccggcccccccctgggaccgaaatgacactccctcctctcccccccgagtgggaaataaaacaccccacaattcccaaaaaacccgccttaggacaattaccacaatgacacgccctcttgttcgggggcga

SEQ ID NO: 176297 - DNA, 449 bp, Homo Sapiens
  misc_feature (44)..(44): n is a, c, g, or t
  misc_feature (53)..(53): n is a, c, g, or t
  misc_feature (221)..(221): n is a, c, g, or t
aaaaacggaagacttgtttgtgtgggcccccaaaaaccccatanggaaccccnggctttaggcccccggggagcagtggaggtaagggctcccacccccatccttaagctctgtccttcccgtggcacaattcccaagttcttgacgttagtaattgttaaaggaatggcaaactgttttgttttgaaggatctttctacagtctggtcttaccccatgtncctagcaaccctgagatgattttcttccatttaccaaagcagccgggtcagtgctttctcacgttgccgtattcttcaggtattagtcagcttcagaagccctgctcccatttttccacccacccattcccccataaaacagcttattgtctccaagacaatagacatttaaaatgtgatgcgggtttatgatccagaccacaatcagaattatatcttgggtcattt

SEQ ID NO: 176298 - DNA, 521 bp, Homo Sapiens
aaccatgtggttggcccctggatccataccaattgatcaacggcagcttgtgtatgtggagtgttcccagaatctctactgacaccacgcttggcccccagcaaacccttcacaggctgcatacgccactttgtgattgatggacacccagtgagcttcagtaaagcagccctggtcagcggcgccgtaagcatcaactcctgtccagcagcctgacatgacagagcacagctgcccaaatacaaagttctttagagcactgaaagaaacacaaagccagccaggaggaacagtaactcttccttcgggtggaagctttcatcgagttgaacaggacttaaacgaatcatcagggaccggatatttcttatttctcatgtggattcttaaccttgaatccaaagtgtctgcaatggacaacaattgaaggagtggcaaacttactggtattgagagcacacgcaatgcctactggtgaaattactgtggctgtttctaataaaatagaagggattccaaat

SEQ ID NO: 176299 - DNA, 607 bp, Homo Sapiens
caggagtatatcatcgagcccactgcggacgatgcggagaccagtgaggccacggagatcatcgagggcacccagacagaggtggacagccacatcatgaaggtggtgcagcagatcgtgcaaccaggctagcgccggccaccagatcatcgtgcagaacgtcaccatggacgaggagacggcgctgggcccagagacggctgccgccgacaccatcaccattgccacccccgagagcctgacagagcaggtggccatgacgcgggcctcggccatcagcgagggcactgtgcttgccgcccgggcagggacaagtggcactgaacaggccactgtgaccatggtgtcatcagaggacatcgagatcctggagcatgcaggcgagctggtcatcgcctcgccggagggccagctggaggtgcagacggtcatcgtctagcatgaggtctgcggggtcctggccgggcagggacagggcagaggactctgagcgccccacccatgcctgcctggcctggtagagaagatggcacaggatggaggcgccccaagacggacagtgtacataagagtttcttgttgctttacaataaaacatgagaacctg

SEQ ID NO: 176300 - DNA, 1078 bp, Homo Sapiens
ggggctgtttttcgtcttccctaggctatttctgccgggcgctccgcgaagatgcagctcaagccgatggagatcaaccccgagatgctgaacaaagtgctgtcccggctgggggtcgccggccagtggcgcttcgtggacgtgctggggctggaagaggagtctctgggctcggtgccagcgcctgcctgcgcgctgctgctgctgtttcccctcacggcccagcatgagaacttcaggaaaaagcagattgaagagctgaagggacaagaagttagtcctaaagtgtacttcatgaagcagaccattgggaattcctgtggcacaatcggacttattcacgcagtggccaataatcaagacaaactgggatttgaggatggatcagttctgaaacagtttctttctgaaacagagaaaatgtcccctgaagacagagcaaaatgctttgaaaagaatgaggccatacaggcagcccatgatgccgtggcacaggaaggccaatgtcgggtagatgacaaggtgaatttccattttattctgtttaacaacgtggatggccacctctatgaacttgatggacgaatgccttttccggtgaaccatggcgccagttcagaggacaccctgctgaaggacgctgccaaggtctgcagagaattcaccgagcgtgagcaaggagaagtccgcttctctgccgtggctctctgcaaggcagcctaatgctctgtgggagggactttgctgatttcccctcttcccttcaacatgaaaatatatacccccccatgcagtctaaaatgcttcagtacttgtgaaacacagctgttcttctgttctgcagacacgccttcccctcagccacacccaggcacttaagcacaagcagagtgcacagctgtccactgggccattgtggtgtgagcttcagatggtgaagcattctccccagtgtatgtcttgtatccgatatctaacgctttaaatggctactttggtttctgtctgtaagttaagaccttggatgtggtttaattgtttgtcctcaaaaggaataaaacttttctgctgataagat

SEQ ID NO: 176301 - DNA, 331 bp, Homo Sapiens
gcggcggaggcggcggcaggcgcggcgggaggctgaggctgacaagccccgaaggctgggacggctcaagtaccaggcacctgacatcgacgtgcagctgagctcggagctgacagactcgctcaggaccctgaagcccgagggcaacatccttcgagaccggttcaagagcttccagaggaggaatatgatcgagcctcgagagagagccaagttcaaacgcaagtacaaggtgaagctggtggagaagcgggcgttccgtgagatccagttgtagctgccatcagatgccggagactcgcccttcaataaaaaatctcttctagctgta

SEQ ID NO: 176302 - DNA, 486 bp, Homo Sapiens
atcaacagtgtgggttcctgtcctgtttccccttcctctttggggctgaggaggaggttaaaggccaaatgctgtttcccaacaccccaaagtctgcacacgtctcatgaatgcatcacatttctgtcatatggatattagccattccgaaatctgtgtaatcaacttcacattattcaagttacaaatcactgtgtccatagaaaaactgtgctggtatttgctggacaaagggttgggccccttttatttttacctgccacccagcatctcccccacctgccccctctgggtgacacagccggtaaacggaatcacgtatggttctttctgtgggtctgtggcacagcaggaagagcctcgtgccgccagcaccttgtggaagaccacacatgggtggtcccacagcatgggaccaggctggcctgagggatgcccagttgtaacaatgctgctgtcactgtctcattaaatatacatccttta

SEQ ID NO: 176303 - DNA, 739 bp, Homo Sapiens
gggggcacagacgagatctcgatcgaaggcgagatggcggacgtgctagatcttcacgaggctgggggcgaagatttcgccatggatgaggatggggacgagagcattcacaaactgaaagaaaaagcgaagaaacggaagggtcgcggctttggctccgaagaggggtcccgagcgcggatgcgtgaggattatgacagcgtggagcaggatggcgatgaacccggaccacaacgctctgttgaaggctggattctctttgtaactggagtccatgaggaagccaccgaagaagacatacacgacaaattcgcagaatatggggaaattaaaaacattcatctcaacctcgacaggcgaacaggatatctgaaggggtatactctagttgaatatgaaacatacaaggaagcccaggctgctatggagggactcaatggccaggatttgatgggacagcccatcagcgttgactggtgttttgttcggggtccaccaaaaggcaagaggagaggtggccgaagacgcagcagaagtccagaccggagacgtcgctgacaggtcctctgttgtccaggtgttctcttcaagattccatttgaccatgcagccttggacaaataggactggggtggaacttgctgtgtttatatttaatctcttaccgtatatgcgtagtatttgagttgcgaataaaatgttcccatgttgcgtattctacaaaaaaacacatcaaagc

SEQ ID NO: 176304 - DNA, 838 bp, Homo Sapiens
  misc_feature (718)..(741): n is a, c, g, or t
gggacagacgagatctcgatcgaaggcgagatggcggacgtgctagatcttcacgaggctgggggcgaagatttcgccatggatgaggatggggacgagagcattcacaaactgaaagaaaaagcgaagaaacggaagggtcgcggctttggctccgaagaggggtcccgagcgcggatgcgtgaggattatgacagcgtggagcaggatggcgatgaacccggaccacaacgctctgttgaaggctggattctctttgtaactggagtccatgaggaagccaccgaagaagacatacacgacaaattcgcagaatatggggaaattaaaaacattcatctcaacctcgacaggcgaacaggatatctgaaggggtatactctagttgaatatgaaacatacaaggaagcccaggctgctatggagggactcaatggccaggatttgatgggacagcccatcagcgttgactggtgttttgttcggggtccaccaaaaggcaagaggagaggtggccgaagacgcagcagaagtccagaccggagacgtcgctgacaggtcctctgttgtccaggtgttctcttccagattccatttgaccatgcagccttggacaaataggactggggtggaacttgctgtgtttatatttaatctcttaccgtatatgcgtagtatttgagttgcgaataaatgttccatttttggtttctacccnnnnnnnnnnnnnnnnnnnnnnnnaaaatggcgggcccgcctcggcccctcgaaaacttttctagaccctttcctttggcgccccgggggcccccgtagggaaagatggacattgggcccc

SEQ ID NO: 176305 - DNA, 876 bp, Homo Sapiens
  misc_feature (756)..(757): n is a, c, g, or t
  misc_feature (777)..(777): n is a, c, g, or t
ggggaggtacctagtgtctgagcggcacagacgagatctcgatcgaaggcgacatggcggacgtgctagatcttcacgaggctgggggcgaagatttcgccatggatgaggatggggacgagagcattcacaaactgaaagaaaaagcgaagaaaccgaagggtcgcggctttggctccgaagaggggtcccgagcgcggatgcgtgaggattatgacagcgtggagcaggatggcgatgaacccggaccacaacgctctgttgaaggctggattctctttgtaactggagtccatgaggaagccaccgaagaagacatacacgacaaattcgcagaatatggggaaattaaaaacattcatctcaacctcgacaggcgaacaggatatctgaaggggtatactctagttgaatatgaaacatacaaggaagcccaggctgctatggagggactcaatggccaggatttgatgggacagcccatcagcgttgactggtgttttgttccggggccaccaaaaggcaagaggagaggtggccgaagacgcagcagaagtccagaccggagacgtcgctgacaggtcctctgttgtccagggggttctcttcaagattccattttgaccatggcagccttggacaaataggactggggggggaacttgccggggcttatatttaaatctccctaccggataatgcgtaatatttggagttggcgaaaaaatggtccccttttgggtttcaacccgccgnngagcggcggctggacgcagngggaaacttggtgggccggccccgggccctcaagaagtttttcaaagacccttcgcgtttggcggcggcggggcccccccggaggtagaggggaccctg

SEQ ID NO: 176306 - DNA, 801 bp, Homo Sapiens
  misc_feature (710)..(710): n is a, c, g, or t
  misc_feature (756)..(756): n is a, c, g, or t
ttgcttttctgaacattgtgaatattacacatgtctttctaaattattctagggtatgcaaatgtcaatggtatgaaacaccactgtactggaagaattaatatattactttagtatgtacctgagctaaatgactgaagctttaggggtgcatagaaaccaccataatttgtatgacattttgaagtgaattaaatatttttgaacatgcttcttcgacagccagtgttatatttttcagatcaacacaaagcacaatgattactcgaaattcagtattttcaaatttacatatttaaagtcatgcaagctgtaacttccctgtcaaaattactggctgccaaatttatacctgtttcttcagctgtaccttttgatatttaaagtttttaaatttctgtaaagtagattttgtagaatgtaatgtgttcactgcctttgtgaagcggtatataattgtataatttctgtgtgtaaactgaatgcttgggctttcaatacagtattcatataaagcaataaatattaatgttatgaaatatttgactacatttttatcaaaatatgaaagaatccccccttttttagtttcagatacctgaactacacagatgagcttctaaaactgatgcaaacagtttctgacactgtataatatgcttttgggtgatttggggggcaaccacaagttttgcgttttgactacttanatcatcatggctataaataccaaaacgatttgggatccatttatgntttgaagggataatatactactgactgactttgactgtcaggttc

SEQ ID NO: 176307 - DNA, 338 bp, Homo Sapiens
cacgctcctagtccgccttcatgttccatcctgtacaccgtgctctgccttttagataacaatagcaaattagtgaaagtactaaaagtctctgataagcagaaataatggcataagctgtctctctctctctgccttggtgccaggcaggcaagggccccctgtccagtggacacatgacccatgtgaccttacctatcattggagatggttcacactccttaccctgcccctttgtcttatatccaataaatatcagtgcagcctggcatttggggccactaccggtctccgcgtcttggtggtagtggtcccccaggcccaggtgtcttttcttt

SEQ ID NO: 176308 - DNA, 353 bp, Homo Sapiens
ggggtgacggagcggggccaagggaggggtccggagggagtcagggatggagggcagagggagtggatgtgggggtttgaggacgtgtgacaagctccagcaggggtgggggccgggctgagggtgggggtgcgaggcggtcactcccatgcgtgcccctggccgtccctccactcacccacacctggcccagtccacgttgaggtccaggactgggaaggaccgggtgagtgcaccggggacccaggccaggtgccccccggagcctgctggggtggccagagcaggagggggtgtgtttcctttttgtgggtgttgcatgcaaatcaagtggacaagaaaaaataacaaaa

SEQ ID NO: 176309 - DNA, 596 bp, Homo Sapiens
  misc_feature (347)..(371): n is a, c, g, or t
tattagatgaattgtaattagtatattaaggagacaatacatttcaagaattgcttaaattctgatacccagatttaagcatgtgaacatatgagacttttaaacatacaattaaagctattcatcataatttgctatactaccaacataactttggagcgaaagtcaaatggtttaaagtaatcctgtaacatacctaaagaacaccttcctatattacgcatgcaaattctccacgtaaaggtcttttcactttaatttctgttacccagctctgaagtcactacttgggcttatcatggtccacagacaaggaggggagcaaatgaccaggactggtcaagatnnnnnnnnnnnnnnnnnnnnnnnnngaatggcacagcagaaggaaacacaattctggaagtgcaagccttcaagaagcagcatattatgataaacccctcctacagaaaggtatcatttttatcactgataccacaggataaattatatattacgccatcttcaagtaacagctgaggcaacagaataaatgcagaggcattacaatgaatcccacttaatataaagaactatacagaccaacacttctc

SEQ ID NO: 176310 - DNA, 552 bp, Homo Sapiens
ccctaggcagggaagagcccccggaggaatggcgggaggaggcattcttgaactgctgaggatgggggtgtcccctcagcggaggccaagggaggggagccagcctagttggtcttggagagatggggaaggctttcagctgatttgcagaagttgcccatgtggcccacagccatcagggctggccgtggacgtgcccctgcccactcacctgcccgcctgcccgcccgcccgcatagcacttgcagacctgcctgaacgcacatgacatagcacttgccgatctgcgtgtgtccagaaggtgcccttggccgagcgccgaactcgctcgccctctagatgtccaagtgccacgtgaactatgcaatttaaagggttgacccacactagacgaaactggactcgtacgactctttttatattttttatacttgaaatgaaatcctttgcttcttttttaagcgaatgattgcttttaatgtttgcactgatttagttgcatgattagtcagaaactgccatttgaaaaaaagttatttttatagcagcaaa

SEQ ID NO: 176311 - DNA, 954 bp, Homo Sapiens
  misc_feature (327)..(327): n is a, c, g, or t
  misc_feature (380)..(380): n is a, c, g, or t
  misc_feature (641)..(641): n is a, c, g, or t
cgaactgctcttcctgtgcaactacagtacccacatgtagaaagtaatgtcccttcagaaacagtctctgaggcctcccaaagactccgaaagccagtgatgaagagaaaggtgctgcgcagaaagccagatggggaagtattagtaacagatgagtcgattatcagtgaatcagaatctggtacagaaaatgatcaggatctctgggacttaagacaaaggctgatgaatgtacagttccaggaagacaaggaatcttcatttgatgtttcacaaaaatttaacctaccacatgaataccaaggaatttctcaagatcagctcatntgctctctacaaagagaaggaatgggctctccagcttacgaacaagacctgantgttgccagcagacccaagtcctttattctcccaaagctggaccagttaagccgaaaccggggcaagacagaccgggtagcccggtattttgagtacaaacgggactgggactcaatacgtttacctggtgaagatcatagaaaggaattacgctggggtgtccgagagcagatgctttgtcgagcagaaccccaatccaaacctcagcatatatatgtcccaaacaattatctagtaccaacagagaagaaaaggtctgncactccgttggggtgttcgttgtgaccttgcaaatggtgtcatacccaggaagcttcccttccctcgttctccttcttaaatctttttaaacttctttcacaggactgtttgagataacctagctctttatatctttccctttttaaattaggtatacaaacggtcttggagaaggctcttcgaaaacatttaagggtaagggactttcacctattcatggtctttcctagctaatgtattaccatgggtttccgatggatacttccagattggcacttcaaatcaggcatggaggataactcttcagcgaag

SEQ ID NO: 176312 - DNA, 428 bp, Homo Sapiens
actcaactttccagcatcctcctctgttctaaccacttcagaaatatatgcagctgtgatacttgtagatttatatttagcaaaatgttagcatgtatgacaagacaatgagagtaattgcttgacaacaacctatgcaccaggtatttaacattaactttggaaacaaaaatgtacaattaagtaaagtcaacatatgcaaaatactgtacattgtgaacagaagtttaattcatagtaatttcactctctgcattgacttatgagataattaatgattaaactattaatgataaaaataatgcatttgtattgttcataatatcatgtgcacttcaagaaaatggaatgctactcttttgtggtttacgtgtattattttcaatatcttaataccctaataaagagtccataaaaatccaaatgct

SEQ ID NO: 176313 - DNA, 393 bp, Homo Sapiens
  misc_feature (378)..(378): n is a, c, g, or t
cctatttatatcaccaggtagcccactgagttaatatttaagttgtcaatagataagtgtcccctgttttgtggcataatataactgaatttcatgagaagatttattcccacccaggggtatttcagctttgaaaccaaatctgtgtatctaatactaaccaatctgttggatgtgggttttaaaaaatgtttgctaaactacccaagtaagatttactgtattaaatggcttcgggtctgaaaagcttttttaacttcttgcttaaaatgcgttttattttgataagatacttcaaatagcctccaaaagtgtagatccaatcatttaaataaacctgtatgtatatgcatatgtgtacatgcatatcccattttnctaaaactcataatt

SEQ ID NO: 176314 - DNA, 314 bp, Homo Sapiens
gctggcagcttttgttacagaagattctcaggatgaaggcaggggctgaggcctctgctactggctgcccctttccatccagtggctgctgtttcccaagacgggctaagcgtttcttatctgaaatgcttgggacaggagtgttacagattttggattttttcagactttggaatatttgcatatatacataatgaggtatcttggtaggtctcatgtctaaacatgaaattcattcatgttttatatataccttatacatgtagcctgaaggtaactctatacagtattttaaataattttgtacatgaaac

SEQ ID NO: 176315 - DNA, 628 bp, Homo Sapiens
  misc_feature (15)..(15): n is a, c, g, or t
  misc_feature (134)..(134): n is a, c, g, or t
  misc_feature (433)..(433): n is a, c, g, or t
ggcctgtactatcanacgtgaatgggcctgacgggcaaatccatccctctctccctcacagttccaggagcggcttccctcgtctccccttactccacagggagcctcccttgccaggaccagggctgcgacgnccatgctggggcaggtgagtgctctgttagctgctcccagtgctgtccccaggctgcagttctggtccctggttgtcaggtaggaagggtgcacttgaagcaggtgctcatctcggttccttaacgtttatagtctgacccctcacttaggctttcctctgccaccccggtccagggaagaggcatcgctcccgcccatggtcatcactggtctgtctgctctgttgtctgttctttccctgactcccttcccaccgaaggcctgatggcttactcaaacctctggaatgggctatggngagaggaggagtgatgggggaccgccaccttttctgcaggaaatgtgcccagcagctcttggtcaaagcactgttgctataagctatctctgggatcctctaggcccccttccctctacacacctctgggaaaagattacactgtattaactctcgaggagtttcctcaccaataaacagacaacctcaactgcc

SEQ ID NO: 176316 - DNA, 842 bp, Homo Sapiens
ccgggcgcggggccgccatgtggagcggccgcagctccttcaccagcttggtggtgcggcgtgttcgtggtctacgtggtgcacacctgctgggtcatgtacggcatcgtctacacccgcccgtgctccggcgacgcaaactgcatccagccctacctggcgcggcggcccaagctgcagctgagcgcactcctacaccacgacgaggtcccacctgggtgctgagaacaacatcgacctggtcttgaatgtggaagactttgatgtggagtccaaatttgaaaggacagttaatgtttctgtaccaaagaaaacgagaaacaatgggacgctgtatgcctacatcttcctccatcacgctggggtcctgccgtggcacgacgggaagcaggtgcacctggtcagtcctctgaccacctacatggtccccaagccagaagaaatcaaccttgcctcaccgggggagtctgatacacacgcagatcgaggcgggagaaagaagccgacgagtgcccctgggatgaggccaggtgttcccacctgggcgaccgccgggctggccgctgaaacggggatggccgggacaacttttgtcttttgaacggggccctcccctggcctggccgatgtgccattcggctacctggcagatggatcccagcctgggcggaacacccggtggcctttaccctgccccatccttggttccttcgaaccaggcctcagccaacccgccgctgtaaggcaccctgaaatgggtccttaaaaccggcctcccacccaccgaagctttggctcccccccaccgctggttccccaccgaacaagaggtcctctcacct

SEQ ID NO: 176317 - DNA, 658 bp, Homo Sapiens
cgcgtctgtgctgcttccacctggtgcttcctgttcccaaatcacaagggcctgaaggtggtccctgctttctctttctctttctctgtgtctcagatggcgattttgctgacagctgccaagaaaatgcttcactcaacagtcctcatgtgcccagagatgtttatagaactgtttgaattgcagccatcccctgccccctcccaggctgaagatctgttctttttaagttgattcgggagtggcattcttttatacccaaagactgtagtgcatcttgaagagctcaaagcacatgaccgcacaaatgcttacagggtttcctcccgagtaatccaatctcactccccttgtaagggaattctggggcagctatggtttgagtatgcagtttgcatcgtgtttctacctttagtaccttgccactcttttaaaacgctgctgtcatttcccatttcttagtactaatgattctttgattctccctctattatgtcttaattcactttccttcctaaatttgttatttgcatatcaaattctgtaaatgttttgtaaacatattacctcacttggtaatacaatactgatagtctttaaaagatttttttattgttatcaataataaatgtgaactatttaaaacacaaaagcaaaa

SEQ ID NO: 176318 - DNA, 382 bp, Homo Sapiens
accccttaacctcctctcccctttaagccaactatgcagcccacatagacagtgcggcccccccattgcccagcactgtctcatagaaggctctggtggtacctctgggccccaggagcatcagccccttgatcatctggggtttgtcatcaccatattttctccctgctgttcccaccatgcccttctgccatcttctgggagaaggaaaccaaaggatctaaaactggggtttgggggaaggtttcagcctctccccactccccttgccccacaccctttactccccagcccagagagacgctgcttttaccaggaaagactattgaaagatgttttattttatttttctctgacctttccatccttgaaaaaatgggga

SEQ ID NO: 176319 - DNA, 772 bp, Homo Sapiens
  misc_feature (493)..(493): n is a, c, g, or t
  misc_feature (672)..(680): n is a, c, g, or t
gggagtctctttgcggcgctacactagagcagagtacgagtctgaggcggagggagtaatggcaggacaagcgtttagaaagtttcttccactctttgaccgagtattggttgaaaggagtgctgctgaaactgtaaccaaaggaggcattatgcttccagaaaaatctcaaggaaaagtattgcaagcaacagtagtcgctgttggatcgggttctaaaggaaagggtggagagattcaaccagttagcgtgaaagttggagataaagttcttctcccagaatatggaggcaccaaagtagttctagatgacaaggattatttcctatttagagatggtgacattcttggaaagtacgtagactgaaataagtcactattgaaatggcatcaacatgatgctgcccattccactgaagttctgaaatctttcgtcatgtaaataatttccatatttctcttttataataaactaatgataactaatgacaanaacacaccaaccccaaaacataaaataccttgggggccgcccccgggcccctcaaaaagttttctaaaacatttccttttgggcccccggggccccggtagggtaaggggaaaccggggcccataagctggtttccccagggaaaaacccggggccatggactaaggggtttgggattnnnnnnnnnaatttaaaaaaaccccccggggggggaaacccgagaaggttttttctgaaaaaaatcccccaaagggggaattccctggagggcgcttttta

SEQ ID NO: 176320 - DNA, 704 bp, Homo Sapiens
  misc_feature (441)..(446): n is a, c, g, or t
  misc_feature (448)..(454): n is a, c, g, or t
  misc_feature (456)..(463): n is a, c, g, or t
  misc_feature (541)..(567): n is a, c, g, or t
  misc_feature (573)..(589): n is a, c, g, or t
gagtaatggcaggacaagcgtttagaaagtttcttccactctttgaccgagtattggttgaaaggagtgctgctgaaactgtaaccaaaggaggcattatgcttccagaaaaatctcaaggaaaagtattgcaagcaacagtagtcgctgttggatcgggttctaaaggaaagggtggagagattcaaccagttagcgtgaaagttggagataaagttcttctcccagaatatggaggcaccaaagtagttctagatgacaaggattatttcctatttagagatggtgacattcttggaaagtacgtagactgaaataagtcactattgaaatggcatcaacatgatgctgcccattccactgaagttctgaaatctttcgtcatgtaaataatttccatatttctcttttataataaactaatgataactaatgactgannnnnnannnnnnnannnnnnnnaaaaacatggccggcggccccggcctctcaaaaactttctaaaaccttccgttggcgcccgggcccccataaggaaannnnnnnnnnnnnnnnnnnnnnnnnnnttgtgnnnnnnnnnnnnnnnnnaaaaaatttttaaaaaccttttttttgggcccgggcccccaaaagaaaagaaacaaggcccaaactttttccaagggaaaacccggggcaagaaaaagggtttggattcccccac

SEQ ID NO: 176321 - DNA, 824 bp, Homo Sapiens
  misc_feature (505)..(526): n is a, c, g, or t
  misc_feature (530)..(530): n is a, c, g, or t
  misc_feature (532)..(684): n is a, c, g, or t
  misc_feature (688)..(696): n is a, c, g, or t
  misc_feature (698)..(699): n is a, c, g, or t
  misc_feature (702)..(703): n is a, c, g, or t
  misc_feature (705)..(714): n is a, c, g, or t
  misc_feature (742)..(742): n is a, c, g, or t
  misc_feature (765)..(766): n is a, c, g, or t
gggactagagcagagtacgagtctgaggcggagggagtaatggcaggacaagcgtttagaaagtttcttccactctttgaccgagtattggttgaaaggagtgctgctgaaactgtaaccaaaggaggcattatgcttccagaaaaatctcaaggaaaagtattgcaagcaacagtagtcgctgttggatcgggttctaaaggaaagggtggagagattcaaccagttagcgtgaaagttggagataaagttcttctcccagaatatggaggcaccaaagtagttctagatgacaaggattatttcctatttagagatggtgacattcttggaaagtacgtagactgaaataagtcactattgaaatggcatcaacatgatgctgcccattccactgaagttctgaaatctttcgtcatgtaaataatttccatatttctcttttataataaactaatgataactaatgacggccgcgaagaaaagggaccttggccacagcgannnnnnnnnnnnnnnnnnnnnngaanannnnnnnnnnnnnnnnnnnnnnnnnnnnnnnnnnnnnnnnnnnnnnnnnnnnnnnnnnnnnnnnnnnnnnnnnnnnnnnnnnnnnnnnnnnnnnnnnnnnnnnnnnnnnnnnnnnnnnnnnnnnnnnnnnnnnnnnnnnnnnnnnnnnnnnnnaaannnnnnnnncnnccnncnnnnnnnnnnaaaaaatttccctcaaaaaaactctccngggggcgcccgggcgcccccccnngggggagaggaaaaaaggggggaaaaattgtttttccctcaagaaaaaacccccggcg

SEQ ID NO: 176322 - DNA, 761 bp, Homo Sapiens
  misc_feature (473)..(473): n is a, c, g, or t
  misc_feature (612)..(653): n is a, c, g, or t
  misc_feature (656)..(656): n is a, c, g, or t
  misc_feature (660)..(662): n is a, c, g, or t
  misc_feature (664)..(679): n is a, c, g, or t
gggagagcagagtacgagtctgaggcggagggagtaatggcaggacaagcgtttagaaagtttcttccactctttgaccgagtattggttgaaaggagtgctgctgaaactgtaaccaaaggaggcattatgcttccagaaaaatctcaaggaaaagtattgcaagcaacagtagtcgctgttggatcgggttctaaaggaaagggtggagagattcaaccagttagcgtgaaagttggagataaagttcttctcccagaatatggaggcaccaaagtagttctagatgacaaggattatttcctatttagagatggtgacattcttggaaagtacgtagactgaaataagtcactattgaaatggcatcaacatgatgctgcccattccactgaagttctgaaatctttcgtcatgtaaataatttccatatttctcttttataataaactaatgataactaatggaaaaanaaaaacaaaccaaaaaagtaaacatcaccgccccaccacgcacatcaaaaaaacttagccaaaccaactcaccgatcgggccaccaggacccccccaaggggaaagcccacacgtggggccaaaaagcgggttttcccnnnnnnnnnnnnnnnnnnnnnnnnnnnnnnnnnnnnnnnnnnaantttnnngnnnnnnnnnnnnnnnnaaaaaattttataaacaacatttttgttggggccgccgcgcccccagggggagaggggaaacgggcgaaaattttgttcccc

SEQ ID NO: 176323 - DNA, 1051 bp, Homo Sapiens
  misc_feature (815)..(815): n is a, c, g, or t
  misc_feature (819)..(819): n is a, c, g, or t
  misc_feature (838)..(838): n is a, c, g, or t
  misc_feature (864)..(864): n is a, c, g, or t
  misc_feature (938)..(938): n is a, c, g, or t
ggggggaggggacgaaggggtagttctttcacctcggctgggcgcctagaaaagcctagaaacagctccttttttcttccgcctccgagtcttcgcgtcagcgtcctgcgcagggcccttgtgttgaatcgcggtgcgcgtcggggcgaccgccctccctccctgggaggggcgagggggctagcggcgaccgctggggcgagcgcgcctgcgcgctgggtgattttttcacgtgtcgccagggccggactgcgagtctctttgcggcgctacactagagcagagtacgagtctgaggcggagggagtaatggcaggacaagcgtttagaaagtttcttccactctttgaccgagtattggttgaaaggagtgctgctgaaactgtaaccaaaggaggcattatgcttccagaaaaatctcaaggaaaagtattgcaagcaacagtagtcgctgttggatcgggttctaaaggaaagggtggagagattcaaccagttagcgtgaaagttggagataaagttcttctcccagaatatggaggcaccaaagtagttctagatgacaaggattatttcctatttagagatggtgacattcttggaaagtacgtagactgaaataagtcactattgaaatggcatcaacatgatgctgcccattccactgaagttctgaaatctttcgtcatgtaaataatttccatatttctcttttataataaactaatgataactaatgacatccagtgtctccaaaattgtttccttgtactgatataaacacttccaaataaaaatatgtaaatgagtggctngcgnataataattggcccatggnagaaaacatggtcggacgacctcggnccctcgtagaagcttttctaaaaccaattccgtttgggcgacgcgggccccaagtagggtaaggtgaacatggnacattagctggtttcccagggcagatccctgggacatgaacctagggggcttggatttcctccacccaattaaaaaaactgcccggggcgggctaaaccggaaccggtttcgg

SEQ ID NO: 176324 - DNA, 868 bp, Homo Sapiens
gggggggcttcgcgtctccttctacggatatctgtggaccttatggaagcaaagactcttggaactgtaacgcccagaaaacctgtcttatctgtcagtgcaagaaaaattaaggacaatgcggctgattggcacaatttaatcctgaagtgggaaaccctcaatgatgcaggttttaccactgcaaataatattgccaacttgaaaatcagtttattgaataaagacaagatagaactagacagcagcagcccagcctcgaaggaaaatgaagaaaaggtgtgtctggaatataacgaggaactggagaagctgtgtgaggaactgcaggccaccttggatgggttgaccaaaatacaggtgaaaatggaaaagctgtcttcaactaccaagggaatttgtgaactagaaaactaccattatggggaggagagtaaacgaccccctctgttccacacgtggcctacaacccatttctatgaggtttcgcataagctcttggagatgtacaggaaggagctgctcctgaagcgcacggtggccaaggagccttgcccacaccgggggatcccgacctcaccctgagctacctgtccatgtggctgcaccagcccctatgtggagagcgacagcaggctgcatctggagagcatgctgctggagacaggccaccgagctctctgacgtcctgagacggctgcgggacactggctccttcccacgtctcaccaggaagaacggcctgcctaagacccacgggccgcaggcttggatcagacccccggaatcagaccttggggtcttcttgcccagagctggtccccagccccatgggcctctccagggtggctcatggccacaaccgcgg

SEQ ID NO: 176325 - DNA, 1308 bp, Homo Sapiens
  misc_feature (504)..(546): n is a, c, g, or t
  misc_feature (653)..(724): n is a, c, g, or t
  misc_feature (879)..(879): n is a, c, g, or t
  misc_feature (1262)..(1262): n is a, c, g, or t
  misc_feature (1266)..(1266): n is a, c, g, or t
ttgaaaactaattgtattaaatgtcttttgataagccttctgctcacatttttgtgaatgtctgaagtatatagtttgtgtatattgacagagctcttttataactaaagcaaatttaatttttttgtactagaaaaaaatttgaacattttagttcttggttataaaaatgttaattcagaattagtttaatgccttaattaaactaattaatagctttggacacttaaaagagctctaaatttgcttgtacataaaggcttaatttgttttccttgttagggtcaagggtgtcctccactctttaacagctgctggacagacacattagagcagctgtttgttattgataataaaatattatacacctaggaaaaaaaacaaacaaacgcatcaaaccacaaaataaacccgtccaccatccgcatcccgcaaacactccttcacacccacgcattccggcctctgataccctattcgcgccacgcgaccccagcccgtacnnnnnnnnnnnnnnnnnnnnnnnnnnnnnnnnnnnnnnnnnnntcggcttccctatcacaacccccccacgcccctccgcttcttcccctctccgcgaccatctccccgtccttgccatacccaccgcagcttgcccgcgcgcgttatgnnnnnnnnnnnnnnnnnnnnnnnnnnnnnnnnnnnnnnnnnnnnnnnnnnnnnnnnnnnnnnnnnnnnnnnnttgacgaatttccccgaccgctccccccctcgcgccctattctctcctgtctcgtattgcgcatacccgttttccgctacgacctcgccgcgcccgccccacattccctattctcccgccgcgttcggtttatcgccctttccatccccgttaantccctgcccgcgcgcccgccctcttgtttgaccgccgcgccctccaccgccttatccgcgcccgccctattcatcacccatttataccctcatgccacgctgttcgtaccgcgcgcatcctctttatctccccctatccccaccccttctctttgtcccgccctacatgtgccaccaatctcaccttcctctggctgtcccgcccctatataaaccactctgccaagcgctctcgtttcccgcttacgcggcgttattccataccgccacgcggcgctatgtctccgcctatatttacctatttaccgcttcacctctgttgatacgccccgtgtcgtgcgccggatatcccaccccgtactctaaccgccccgcctccctgnctancgcccgcatatttttcccctctttccgccgccctgttgtccc

SEQ ID NO: 176326 - DNA, 392 bp, Homo Sapiens
catgttatggacacggtctttcttattcagtacctgttcctgacttttccacggattgtcttcatgctgggctttgtcgtggttctgagcttcctcctgggtggctacctgttgtttgtcctgtatctggcggccaccaaccagactactaacgagtggtacagaggtgactgggcctggtgccagcgttgtccccttgtggcctggcctccgtcagcagagccccaagtccaccggaacattcactcccatgggcttcggagcaaccttcaagagatctttctacctgcctttccatgtcatgagaggaagaaacaagaatgacaagtgtatgactgcctttgagctgtagttcccgtttatttacacatgtggatcctcgttttccaaaa

SEQ ID NO: 176327 - DNA, 507 bp, Homo Sapiens
ggggttcagatcgatggccttgtccatgttgtcctttctggcttccctgatggtgtcatgtttcagcgcatgcgccccagcctttcccatgtgccaaaccagaagctccactgcccgtaggctgtccctgtagccctgctccctccctggaggctgctcttctgattctgagagctggcctagtggtgctgagggcccctttctgcttctctgcccacctgctgagttgccactcgcagtgttgtcagttcccgtgttctgagaagaggtcatgcctgggaggaagggatcgtcatgctgcatcgaatcctctctccgccgtgtggcccccaggagagtagctgcctgttgcacctgctccacacctccccacagcctccctgcaggtgctgtgtggccgtgatgtgcagagagcagtgagggagggttcatgaaccaggtggatcctctttaaaaaaacaaagtttttggtatatctccgttacaatcacaagaactggcctttgg

SEQ ID NO: 176328 - DNA, 823 bp, Homo Sapiens
  misc_feature (703)..(709): n is a, c, g, or t
  misc_feature (711)..(712): n is a, c, g, or t
  misc_feature (716)..(717): n is a, c, g, or t
  misc_feature (719)..(719): n is a, c, g, or t
  misc_feature (727)..(730): n is a, c, g, or t
ggggagagaggtttccgctgtaggagcagagcttccgggctgcgctcttcgttgcccagtttccgctcagtggtcgcgtctccgccccccacccaccagtcccgctgcattctcggccgggctctaggcgccatggctccccgcgggaggaagcgtaaggctgaggccgcggtggtcgccgtagccgagaagcgagagaagctggcgaacggcggggagggaatggaggaggcgaccgttgttatcgagcattgcactagctgacgcgtctatgggcgcaacgccgcggccctgagccaggcgctgcgcctggaggccccagagcttccagtaaaggtgaacccgacgaagccccggaggggcagcttcgaggtgacgctgctgcgcccggacggcagcagtgcggagctctggactgggattaagaaggggcccccacgcaaactcaaattccctgagcctcaagaggtggtggaagagttgaagaagtacctgtcgtagggagatttgggtagaagccctcatgctgagctttgtgtccctggtgatgttggaacattaatgatggaacatggccaaacttcagtcatgatcctgaagccatggtttcttccctgccagaaatgaaggttcagttatgaggcaaccctctagtaaggcattgtaaaagttactggatttggtttaataaaaagttgaaatnnnnnnngnngggnngnaaaaaggnnnnccttggcgggcggcctcggccctccaaaaagttttctaaaccattctttgggggcgcgggccccgtaggtaagtggaacggggccctaactgg

SEQ ID NO: 176329 - DNA, 851 bp, Homo Sapiens
gtcaagacgagctggtgcatccccagggaggagccatttggaaggaagggactgctgacttcttcttgaaggcggataactagcaccttcccaatggcccctctgtcacactgcccccaccaggtggtggacaactcctgaatgggcctcgagcctgcaacagtccaaaccggaagggagaatttattttttgaaactgaaggaagtcccgaccttcctggattgaagtgcacactcatggactttaggtttagaaacctcctcagccttcatttgttcgtggatgtgtgagctctgagggtggccctgctattcctctgcgtgcctgtagtgtccccagcataggggtcttaggcatagggctgaacagtccttccagagccctcgttccaatccctgccgtccttgcccctgagggaccctgaccactgtgagcaggagggtggcagagctgggacaaagctgcctttgccgctgggctttccgggactgtggagggagcacaggcggggaagctccacttcagacagggcttggtggggcaggacatggctcccattttgaagggaggtctccatgtggtccgagtgaggtgagacggccctcgtcctggtgttcctgatcatcttgaaaggttcttctggaactcctgtccccttagtcatgagaacagaaagtgcaatatttcctttcacctggcaggggagggggggatttatttctgaaaggaaaaatatttaaccggatcttctacatttaaaattttaaatcttcctggaaaatacacttttcccgaaattgcccttgcctttttgagctccttgctacagtcgccctttggtaactgcttt

SEQ ID NO: 176330 - DNA, 1029 bp, Homo Sapiens
ggggatagcccagcagcagcagcggcggcggcggctgcggagcgggcgtgaggcggctggaccgcgctgcaggcatccgcagggcgcggcaagatggaggtgacgggggtgtcggcacccacggtgaccgttttcatcagcagctccctcaacaccttccgctccgagaagcgatacagccgcagcctcaccatcgctgagttcaagtgtaaactggagttgctggtgggcagccctgcttcctgcatggaactggagctgtatggagttgacgacaagttctacagcaagctggatcaagaggatgcgctcctgggctcctaccctgtagatgacggctgccgcatccacgtcattgaccacagtggcgcccgccttggtgagtatgaggacgtgtcccgggtggagaagtacacgatctcacaagaagcctacgaccagaggcaagacacggtccgctctttcctgaagcgcagcaagctcggccggtacaacgaggaggagcgggctcagcaggaggccgaggccgcccagcgcctggccgaggagaaggcccaggccagctccatccccgtgggcagccgctgtgaggtgcgggcggcgggacaatcccctcgccggggcaccgtcatgtatgtaggtctcacagatttcaagcctggctactggattggtgtcccgctatgatgagccactgggggaaaaatgatggcagtgtgaatgggaaacgctacttcgaatgccaggccaagtatggcgcctttgtcaagccagcagtcgtgacggtgggggacttcccggacgaggactacgggttggacgagatatgacaccctaaggaattccccctgctttcagctcctagctcagccactgaactgcccctccctgtgtggtgcccatggcccctttttcctcttgcaccccatttctaaattttctatatcacctttttttccccttttgcccatttgaattcttttgaagaacctccatggccatttaaaatttccatctaaacaaaaccct

SEQ ID NO: 176331 - DNA, 947 bp, Homo Sapiens
ccaacccctggcccaaggaaaaagcccaggccagctcccatccccgtgggcagccgctgtgaaggtgcgggcggcgggaaaaatcccctcgccggggcaccgtcatgtatgtaggtctcacagatttcaagcctggctactggattggtgtccgctatgatgagccactggggaaaaatgatggcagtgtgaatgggaaacgctacttcgaatgccaggccaagtatggcgcctttgtcaagccagcagtcgtgacggtgggggacttcccggaggaggactacgggttggacgagatatgacacctaaggaattcccctgcttcagctcctagctcagccactgactgcccctcctgtgtgtgcccatggcccttttctcctgaccccattttaattttattcattttttcctttgccattgatttttgacactcatgcattaaattcactagaacccctcccgcatttattctaaaataaacacaaattttgtcggccgctttaggcctatctagaagtttttcaagacccattctgttgggccccccgcggcccaccaatgttcacccggaaccttggccaattatgccgtcttccataaggagaatcccttggttcctttaacttaagggccttgggatctccccacttaaccaacaacaccccctcgctggtgcaacccaaaacctttttcccgaccaaacccccaaatgcgaatttcctgaaggaccatttactggcctcccacttaaccccggttccccacccgccccctctaaatatccaaccttacattcccttccgcctggccccttcctccgccatataaccgtctgccaattcccatataaatattctctcggccgaacctcggaaagaccttctccacaccgcggacttgccataaaccccttgaatccccatattcgtataattcaccccccc

SEQ ID NO: 176332 - DNA, 556 bp, Homo Sapiens
  misc_feature (407)..(425): n is a, c, g, or t
tttttaaggtttgacatttattgtagcagaacagtaatatcacagtatgggacaaaggtttacactttgcagggtattctttgggggaatgttaaatactgtaataaaaacatgttcaatcatggtaaaatgttcaacttgttaaaattacaaatgaacaaaaaaaatttttttctcatatattgcctaaataccaaatgaagagcttaaacttaagattcaatgtgaaaacgagtaaatatgttcctaaatttgcagaaaataaaagataaactgtagaaaaaggtattttgatttacagttcacaaaactgtatctgaacatttccccagaaaaatctaagtttcatttcaagatcgtaaactacgttcactgtgtccatagttaacaaataactaccccaaatnnnnnnnnnnnnnnnnnnncttgcagccacattgcaaagttcacagatcctgcggcaaccgctagtgttctgcagaggcccctcctgcactcagaagctcgatttcctccaatccaatgcagctggtcgggtgggcggttacggactgcc

SEQ ID NO: 176333 - DNA, 455 bp, Homo Sapiens
ccaaaaatggtattgctttattttttaaaaatatatttcttttttgaaatatcaatcgaatcaattttattcccacaacaaccatgagtaaatatttttaaaaaatatattttttgaggaaacagattaaaagctttaaaaaatgtgattcactgaaaatcaaatagtgaatacatgatagagtcagcactaaaaaggcagatatatcaaagagagactgaaataagcaactcattttttgcatcgacttcgaaacacctctttaccatcagtgtttgtaataatcattcttgatctttatacttcacatttcttggtaatccaaatgcttcataaattctcttacacatcctgaatctcttgcttcattcagcgagataattcctggtgagcaggaatgcatatggttttcagatgtagaaactgggatctccagagacaaacaagttggccat

SEQ ID NO: 176334 - DNA, 1066 bp, Homo Sapiens
tcgcggtgcagcggtgggcggcatgtctgtggccggtggggagattcgtggggacacggggggagaggacactgctgctcccggccggttcagcttcagcccggagcccacgctcgaggacatccgccgcctccatgctgagtttgctgcggaacgagactgggaacagttccatcagcctcggaatctcctcctggccttggttggggaagtgggggagctggcagaactctttcagtggaaaaccgatggggaacctggcccccaaggctggtcccccagggaacgggcagcccttcaagaggagcttagtgacgtcctcatctacctggtggcattagcagcccgctgccgtgtggatctgccgctagcagtgctctccaaaatggacatcaaccggcgacgctacccagcccatctggcccgcagctcttcccgcaagtatacagaattgccccatggggccatctctgaagaccaggctgtggggcctgcggacattccctgtgactccacaggccagacctcaacctagaaagatggccacaggacttgcaactcagggtggtgtctgaagagcagagagtggcctggccctggagcctttttctagtcttttcagaatagatcatgggcctgaggcctccacttcttgaggtctgaggcccagcagcctctagaaggtagcctcctggtgtttgttctcccagtaaaatggttttgggcgataacttctagattattcctggatggccagggaggctctctgtctcagcaggtgatgacgggggtaccaggggtgcctctgagacccattctcgtgtttccctgttgtaccttttgcctgcagggcagagagatctggtttctagcaaattcccagtaggatgtcatgtaagttccttccccctcttagagattgaaggctgtaagagtccagatggtggagccaggctgtctgggttcaaatgccatctttgacacttgcaagctaaatgacattactcaaattaatcgttctgcacttcagcttccttgtctatcaaataaaaagaatagtacctgc

SEQ ID NO: 176335 - DNA, 714 bp, Homo Sapiens
gggacagcgaggccaagatttcagctgcgggacggtcaggggagacctccaggcgcagggaaggacggccagggtgacacggaagcatgcgacggctgctgatccctctggccctgtggctgggcgcggtgggcgtgggcgtcgccgagctcacggaagcccagcgccggggcctgcaggtggccctggaggaatttcacaagcacccgcccgtgcagtgggccttccaggagaccagtgtggagagcgccgtggacacgcccttcccagctggaatatttgtgaggctggaatttaagctgcagcagacaagctgccggaagagggactggaagaaacccgagtgcaaagtcaggcccaatgggaggaaacggaaatgcctggcctgcatcaaactgggctctgaggacaaagttctgggccggttggtccactgccccatagagacccaagttctgcgggaggctgaggagcaccaggagacccagtgcctcagggtgcagcgggctggtgaggacccccacagcttctacttccctggacagttcgccttctccaaggccctgccccgcagctaagccagcactgagatgcgtggtgcctccaggaccgctgcgggtggtaaccagtggaagaccccagcccccagggagaggaacccgttctatccccagccatgataataaagctgctctcccagctgcctctcacaaa

SEQ ID NO: 176336 - DNA, 685 bp, Homo Sapiens
gggggcctgacttctccgcctcggtgggctgggtcggcggctggagcattacccctactgcgggtcccgctgctggcagcgctggaaactgggtggacggcatgggttggtctcaggatttgttccgcgccttgtggagatcgctgtcaagggaagtgaaagagcacgtgggcacggaccaattcgggaacaaatactactacatcccgcagtacaagaactggagaggacaaactattcgagagaaaagaattgtagaagcagcaaataaaaaagaagtagactatgaagcaggggatattccaacagaatgggaagcttggattagaagaacaagaaagactccacctactatggaggaaatactaaagaatgaaaaacacagagaagaaatcaaaataaaaagccaagatttttatgaaaaagaaaaactccttagtaaagagaccagtgaggaactcctgcctccaccagttcaaactcaaattaaaggccatgcctctgctccatactttggaaaggaagaaccctcagtggctcccagcagcactggtaaaacctttcagccaggatcctggatgccacgagatggcaagagccacaatcaatgaatgcattatggtcaaatcttttcatgtatatggatgtgactattttaacaaataaaagaagtgaaaagccaaaa

SEQ ID NO: 176337 - DNA, 176 bp, Homo Sapiens
tccgtcccatctgaaccatttgtttcttttctttccgtcagattttggaaaaattctcctctcctccccgccccctccacaccatcctccccaatttaaatatagtcactgctacaagtaacagatgcactgtgaagattccagtattaataaaggtgtactgtaattaaaaaaaa

SEQ ID NO: 176338 - DNA, 346 bp, Homo Sapiens
  misc_feature (95)..(95): n is a, c, g, or t
caagaaagtgaaaaatgcccactctcttccacccccattttacagaggagaacacccaaggcccagaggaagttaagggagagtcaatgggcagnagacaggctaggccctggtggtgtgtggagcaccccaggcagacccagtcctggttgggatcacacccacgggtgctactgcacgtaaaactcctcctatagcctggaggccaaggtgtgggtccccacgcctgatctttgaaaacactacacagggctgctgtcacttcccaggcccaggcctcagcccaggcctcgggaccaactctttgtataacctacctgaatgtattaaaaactaattttggaga

SEQ ID NO: 176339 - DNA, 431 bp, Homo Sapiens
tttcagcccgtagacacatctcctaacttaatatattagacgggtcagggaggtggacaggggcgccgggctctccacgccccccagctccacttctgctcaccacacacagaagcagcgagggcacgcgaagtgacagctttgacagggaggggattcggcccggcctggctcctcagggatgctagcccttgagactaaggaatgttccttcagggaaactagggtggggtttgaatgagatgaggggggcaggcatggccctgagtccctactcagcgccccccaccctcacacctctgcccttcagcaggttggggcagccagaacccttccattccagaactgccagagactgggacgctgggaaaggtaagggcgcaagacagcagcgagagattgaactggggccactgagctcccaggccccg

SEQ ID NO: 176340 - DNA, 830 bp, Homo Sapiens; identical to SEQ ID NO: 4124
  misc_feature (747)..(747): n is a, c, g, or t
  misc_feature (749)..(749): n is a, c, g, or t
  misc_feature (752)..(752): n is a, c, g, or t
  misc_feature (754)..(754): n is a, c, g, or t
  misc_feature (761)..(765): n is a, c, g, or t
  misc_feature (768)..(772): n is a, c, g, or t

SEQ ID NO: 176341 - DNA, 384 bp, Homo Sapiens
ttgggttggctggcactggggcgggcatctagggtacagcctctgctcatggcactgggcctccagttcttccacatgtgtgcacccccagcttggccaaccctcagccttgcggtggggcccgaagcatcttcccttccgcttggcgtctctgggattgggatgagtgcctggctcccatctcctcctcaccttttgttgctatcggcagctgctggctcaggggcatcccacctccgggctctgggttcctcttccctggaagggctccaggacccgtcccaataaccacccacggccagggagccaaggccccgtgctggatatttaaatttaggggccggtctccagggcgcgtagataaataaatacactcagcgtcgt

SEQ ID NO: 176342 - DNA, 455 bp, Homo Sapiens
gttccctgccctgaagctgtgctccgggacggtcaaggttcggccaccaaggctcaggctgctcctcgtggatggaggtgccccagaaagggcctgtgcagactctgtctccccggggcctactaactccctggggtgctccacgaaggcctagacccccctacacctacctcagtctgttccctgactgccaccgcctagaaaggaaagcaatgccctgtggaccttgcagtgctagagaaggtggccgtggcaagggaggagctgctcccatggcagagcattcctgcagatttgcctggatttgcccttcctggggttccctctaggcttcctccccacccggccttcctgggaacaagtcccgcccacctggcttctcactcagcttcctcagcctggctcatgggcgctaggttgaactccaaagagaatgctgagaaagaaagttaaaa

SEQ ID NO: 176343 - DNA, 240 bp, Homo Sapiens
acacttttaacttagcatgtggtgttgaagtattactgtagatcaagtttgtcttccgcactaagatgtgaggaaattgtgatttgttctctccaccacaaatgaattacacatttattatcttctatcattttgaaacactgcagtttaccatgggacactgtatatatttcttgccataatggtaaaggactgattgatatatttaagagttaataaatttgtgatttctgctgaaaa

SEQ ID NO: 176344 - DNA, 362 bp, Homo Sapiens
  misc_feature (122)..(180): n is a, c, g, or t
cagtttctaaatttataaaaatcaggagtgcaaaccagagcaagatttgtcaaagtctccagacacccagacatttgttactttcagctattgcagcttcatccttctgagtataattttannnnnnnnnnnnnnnnnnnnnnnnnnnnnnnnnnnnnnnnnnnnnnnnnnnnnnnnnnntcaactgttttgcactcaacaaagacatacctctgagttggcaaccagcagggtggataacgggccagtggtgataaaatcaaagaataggtaatgaaacaatcatccagttaacaatcagcaaggttcttcagagcctaattaatgtttaattctaaataaattgcaacaattaagaaaag

SEQ ID NO: 176345 - DNA, 511 bp, Homo Sapiens
ttcgccgccatgcaggcgcagcagggccgcagcagcctggtgtggctcttctcccagctctacctttactccttcatcagcctcttcatctacatggtgctcagcctcttcatcgcgctcatcaccggcgcctacgacaccatcaagcatcccgtcagggcaggcgcagaggagagcgagctgcaggcctacatcgcacagtgccaggacagccccacgtccggcaagtgtgtcgcgggagcggcatggcctgcagccttctctgctgctgcggaagggacccctcggaggagcattcgctgctggtgaattgattcgacctgactgccgttggaccgtaggccctggactgcagagacccccgcccccgaccccgcttatttatttgtagggtttgcttttaaggatcggctccctgtcgcgcccgaggagggcctggacctttcgtgtcggacccttgggggcggggagactgggtggggagggtgttgaataaaagggaaaataaaaa

SEQ ID NO: 176346 - DNA, 390 bp, Homo Sapiens
tgtctccaggcccatgggcccttggccggcgcgcacgatggtgctgaagcgcacgttgacagagccggcgatgtggccggtgtggaaagcgaagaaggagcggcagtccagcagcaggcattgcgccgctcgctcccccagcagcgcccgcagcctccagcgtccagggtgcccacttccatgaccatggccggcctcagcgcccccagcgtgatcggccctgcggtgctctttgtctgttctcggggccaagggcagggcggcgcttttcgaggaaaagctagacccccgggtctctctgcgccgaaccaaaagccgcttttggactgagagaggagcgtcacgcgaggctccgggctcctcggcttcttcgcggttcccccgactgcc

SEQ ID NO: 176347 - DNA, 452 bp, Homo Sapiens
gaggccgcatataaacgcgctccccgggccaggctcgctgcgaaggacatttgggctgtgtgtgcgacgcgggtcggaggggcagtcgggggaaccgcgaagaagccgaggagcccggagccccgcgtgacgctcctctctcagtccaaaagcggcttttggttcggcgcagagagacccgggggtctagcttttcctcgaaaagcgccgccctgcccttggccccgagaacagacaaagagcaccgcaggccgatcacgctgggggcgctgaggccggccatggtcatggaagtgggcaccctggacgctggaggcctgcgggcgctagctgggggagcgagcggcgcaaatgcctgcttgctggactgccgctccttcttcgctttcaacgccggccacattcgccggttcttgttcaaacgttgcggtttcagcaccattcgttgcggg

SEQ ID NO: 176348 - DNA, 845 bp, Homo Sapiens
  misc_feature (561)..(715): n is a, c, g, or t
  misc_feature (725)..(739): n is a, c, g, or t
  misc_feature (787)..(804): n is a, c, g, or t
ttgctcccgagtgctacatttctcttccctagggccttttgtggatgtacagtagtcccctccgtagaagctcacagtctagattgaagtgttttaattctacacacccatagtgcacacttgtatattgaaaagatagggaagagagaaacatttatggaatcagtcgttggcaccttcaatacttcatgatttttgtcgagtttacttcatgaggaggtcagcccattggctcccatctgaaccactttgcctctgaaacttaattacatccagaaagaaggacacttgtatgctagtctatggtcagttgaggaatatgactgtttttatatgcacatgtaacccaaatgtccaatataaattggcttattttttaaaataattttaaaagttgggaaaagtgttattatttggcatgcttaaatattgaataagtattcttcatcagcatttaataaatgtataggcagatgtaaggtaatttctgtgtattttgagataatgtcaaaatcatgaatatttcaaaataaactggggagttataaaaatacaactagnnnnnnnnnnnnnnnnnnnnnnnnnnnnnnnnnnnnnnnnnnnnnnnnnnnnnnnnnnnnnnnnnnnnnnnnnnnnnnnnnnnnnnnnnnnnnnnnnnnnnnnnnnnnnnnnnnnnnnnnnnnnnnnnnnnnnnnnnnnnnnnnnnnnnnnnnnnttgggggcgnnnnnnnnnnnnnnnaaaaaaacattttttaaacaacccttgttggcgcgccggccccccccnnnnnnnnnnnnnnnnnncaggtttccttttttctttccacaaaaaaacacccgcggac

SEQ ID NO: 176349 - DNA, 587 bp, Homo Sapiens
  misc_feature (153)..(153): n is a, c, g, or t
  misc_feature (472)..(515): n is a, c, g, or t
ggccctcagcgccaggatcgcctcacagtgggggtgtacgagtcggccaagttgatgaatgtggacccaaaaaacgtggtcctctgcctcttgcccattgacgaggaggaggaggatgaaaacgccctgcaaattcaacttcacgctcatccnagtccttctgcttgtgaacaacgaacatcaacatcgtgcgggtgtcgggcatgcacgcgcctggcgcagctcctgggagagccggccgagacccagggcaccaccgaggcccgagacctgcattgtctcctggtcacgaaccctcacacggacgcctggaagagccacggcttggtggaggtggccagctactgcgaagaaagccggggcaacaaccagtgggtcccctacatctctcttcaggaacgctgaggcccttcccagcagcagaatctgttgagttgctgccacaaacaaaaaatacaataaatatttgaannnnnnnnnnnnnnnnnnnnnnnnnnnnnnnnnnnnnnnnnnnngaggaccatcgggggcagagtcgttggagactgaagaggaagaggaggaggagaaggggagtgagcggtcgc

SEQ ID NO: 176350 - DNA, 419 bp, Homo Sapiens
ctgtaatttcgccttaaactctggacactctatatgtagtgcatttttaaacttgaaatatataatattcagccagcttaaacccatacaatgtatgtacaatacaatgtacaattatgtctcttgagcatcaatcttgttactgctgattcttgtaaatctttttgcttctactttcatcttaaactaatacgtgccagatataactgtcttgtttcagtgagagacgccctatttctatgtcatttttaatgtatctatttgtacaattttaaagttcttattttagtatacatataaatatcagtattctgacatgtaagaaaatgttacggcatcacacttatattttatgaacattgtactgttgctttaatatgagcttcaatataagaagcaatctttgaaataaaaaaaga

SEQ ID NO: 176351 - DNA, 559 bp, Homo Sapiens
agacttagagagaacccacattggtgctgtctcttgccgacaagaccaacgtcaaggccgcctggggtaaggtcggcgcgcacgctggcgagtatggtgcggaggccctggagaggatgttcctgtccttccccaccaccaagacctacttcccgcacttcgacctgagccacgctctgcccaggttaagggccacggcaaaaaggtggccgacgcgctgacccaaagccgtggcgcacgtggacgaaatgcccaacgcgctgtccgccctgagcgacctgcacgcgcaaaagcttcgggtggacccggtcaacttcaagctcctaagccactgcctgctggtgaccctggccgcccacctccccgccgagttcaaccctgcggtgcacgcctccctggaaaagttcctggcttctgtgagcaccgtgctgacctccaaataccgttaagctggagcctcggtagccgttcctccctgccgctgggcctcccaacgggccctcctcccctccttgcaccggcccttcctggtctttgaataaagtctgagtgtttggtt

SEQ ID NO: 176352 - DNA, 433 bp, Homo Sapiens
  misc_feature (400)..(400): n is a, c, g, or t
agattcggcacgatggagaacccaccatggtgctgtctcctgccgacaagaccaacgtcaaggccgcctggggtaaggtcggcgcgcacgtggcgagtatggtgcggaggccctggagaggatgttcctgtccttccccaccaccaagacctacttcccgcacttcgacctgagccacggctctgcccaggttaagggccacggcaagaaggtggccgacgcgctgaccaacgccgtggccaacgtggacgacatgcccaacgcgctgtccgccctgagcgacctgcacgcgcacaagctttcgggtggacccggtcaatttcaagctcctaagccactgcctgcttggtgacctgggccgcccacttccccgccgagtttcaaccttgcggttgcaagnttccttgggacaatttcttggttttttttgaag

SEQ ID NO: 176353 - DNA, 428 bp, Homo Sapiens
  misc_feature (16)..(16): n is a, c, g, or t
  misc_feature (415)..(415): n is a, c, g, or t
aaaacctatttcccgnaactttcgaaccttgagccaaggctctgccccaggttaagggccacggcaaaaaggtggccgacgcgctgacccaaagccgtggcgcacgtggacgaaatgcccaacgcgctgtccgccctgagcgacctgcacgcgcaaaagcttcgggtggacccggtcaacttcaagctcctaagccactgcctgctggtgaccctggccgcccacctccccgccgagtttcaacccctgcggtgcacgcctccctggaaaagttcctggcttctgtgagcaccgtgctgacctccaaataccgttaagctggagcctcggtggccatgcttctttgcccttgggcctccccccagcccctcctccccttcctgcacccgtacccccgtggtctttgaataaaatnaataatgggcggc

SEQ ID NO: 176354 - DNA, 843 bp, Homo Sapiens
  misc_feature (655)..(655): n is a, c, g, or t
  misc_feature (657)..(662): n is a, c, g, or t
ccatttgatttcacaccagaaaactataagaggatagaggcaatgtaaaaaactatccagaaggccataaagcagcagctgttcttccagtcctggatttagcccaaaggcagaatgggtggttgcccatctctgctatgaacaaggttgcagaagttttacaagtacctccaatgagagtatatgaagtagcaactttttatacaatgtataatcgaaagccagttggaaagtatcacattcaggtctgcactactacaccctgcatgcttcgaaactctgacagcatactggaggccattcagaaaaagcttggaataaaggttggggagactacacctgacaaacttttcactcttatagaagtggaatgtttaggggcctgtgtgaacgcaccaatggttcaaataaatgacaattactatgaggatttgacagctaaggatattgaagaaattattgatgagctcaaggctggcaaaatcccaaaaccagggccaaggagtggacgcttctcttgtgagccagctggaggtcttacctctttgactgaaccacccaagggacctggatttggtgtacaagcaggcctttaatttatattgaactgtaaatatgtcactagagaaataaaatatggacttccaatcttccnannnnnncacgcccccccacaaaccacccttgtgggcccgcctccgcccctccaaaaagtttctaaaaccattcctttgggcccccgggcccccgaaagggaaaagggaaaatggccctaacctggttccctaaggaaaacccggggccaggacataagggttgggaatccccccccataaaaaaacg

SEQ ID NO: 176355 - DNA, 862 bp, Homo Sapiens
ggggggcgcgctcgggattctcgcctggcgcggctggggaaggtgaacagtgtggcccgccatgttcttctccgcggcgctccgggcccgggcggctggcctcaccgcccactggggaagacatgtaaggaatttgcataagacagctatgcaaaatggagctggaggagctttatttgtgcacagagatactcctgagaataaccctgatactccatttgatttcacaccagaaaactataagaggatagaggcaattgtaaaaaactatccagaaggccataaagcagcagctgttcttccagtcctggatttagcccaaaggcagaatgggtggttgcccatctctgctatgaacaaggttgcagaagttttacaagtacctccaatgagagtatatgaagtagcaactttttatacaatgtataatcgaaagccagttggaaagtatcacattcaggtctgcactactacaccctgcatgcttcgaaactctgacagcatactggaggccattcagaaaaagcttggaataaaggttggggagactacacctgacaaacttttcactcttatagaagtggaatgtttaggggcctgtgtgaacgcaccaatggttcaaataaatgacaattactatgaggatttgacagctaaggatattgaagaaattattgatgagctcaaggctgggcaaaatcccaaaaccaggggccaaggagtggacgcttctcttgtgagccaagctggaggtcttacctcttttgactgaacccccccaagggaacctggaatttggggtacaaaccagggcctttaattttaatatggaaactggaataattgtccctaaagaaaaaaa

SEQ ID NO: 176356 - DNA, 580 bp, Homo Sapiens
ctatgccatggacccagaagatgagagtcctgcaaggagaatctggggagcagtttccttgagcggagattcaggttttttcaggtgggtatgatgagctggggtctatacaacccctgccttggctctgctgacaaaaactcccgcaaaagggcccctcgtaagcaaggtcccgccgccacgagactttcacatcaatctcttccgcatgcagccctggctgaggcagcacctgggggatgtcctgaattttttacccctctagccatggccactgagccctctgctgccctgccagaatctgccgcccctccatcttctacctctgaatggccacccttagaccctgtgatccatcctctctcctagctgagtaaatccgggtctctatggatgccagaggcagcgcacacaagctgggaaatcctcagggctcctaccagcaggactgcctcgctgccccacctcccgctccttggcctgtccccagattccttccctggttgacttgactcatgctcgtttcactttcacatggaatttcccagttatgaaattaataaaaatcaatggtttccac

SEQ ID NO: 176357 - DNA, 395 bp, Homo Sapiens
  misc_feature (330)..(330): n is a, c, g, or t
  misc_feature (340)..(340): n is a, c, g, or t
  misc_feature (345)..(345): n is a, c, g, or t
tctgttaaaatttgatatagtaggcactgacaaaagaggtcaaatgcaggactgatttctaagcttgcaatctatctaaatgcagatgctaatttagagtgcataattattacacaagtacagacctaggttagggcttaaatttcattatgtgcaataaaaaggttaagtgatggttaagcaaggtgtagattatccttacctctcctaatgacatgggctcacattggcattccttttcatacttttacgtattaaagtggggcagttgtttcctgaatgactgtttgctggggccttcaggccttgcttttgtgcttgggggctttnccagactttnctccnttatttccccttcacccttatacgtactcaccaaaggagccagtgttggg

SEQ ID NO: 176358 - DNA, 1276 bp, Homo Sapiens
ggctagggcggcctggccactgagccggggtgcagtggcagcgggagagtacctggcgatggcgatatgagcggtgcgggggtggcggctgggacgcggccccccagctcgccgaccccgggctctcggcgccggcgccagcgcccctctgtgggcgtccagtccttgaggccgcagagcccgcagctcaggcagagcgacccgcagaaacggaacctggacctggagaaaagcctgcagttcctgcagcagcagcactcggagatgctggccaagctccatgaggagatcgagcatctgaagcgggaaaacaaggatctccattacaagctcataatgaatcagacatcacagaagaaagacagcctctccatgtcaagcttccagtctgtcaagtccatctctaattcaggcaaggccaggccccagcccggctccttcaacaagcaagattcaaaagctgacgtctcccagaaggcggacctggaagaggagcccctacttcacaacagcaagctggacaaagttcctggggtacaagggcaggccagacaggagaaagcagaggcctctaatgcaggagctgcctgtatggggaacagccagcaccagggcaggcagatgggggcgggggcacaccccccaatgatcctgccccttcccctgcgaaagcccaccacacttaggcagtgcgaagtgctcatccgcgagctgtggaataccaacctcctgcagacccaagagctgcggcacctcaagtccctcctggaagggagccagaggcccaggcagccccggagaagctagctttcccagggaccaagaagccacgcatttccccaaggtctccaccaagagcctctccaagaaatgcctgagcccacctgtggcggagcgtggccatcctgcccgcactgaagcagaccccgaagaacaactttgccgagaggcagaagaggctgcaggcaatgcagaaacggcgcctgcatcgctcagtgctttgagccaccccaatctggtcagtgccaggcccaccaacctgcagctggagactggctctctatagcatttcctgatacttccgctacttttaggcctggctaaattccaagacagataacactcaagatagataaagtacttgatctccaaactgacaaactgtttattttctagctgttattttgctatttggcatttacataaaagcacacgatgaagcaggtatcgccttacctgttgaaactgaaaataaagcttgtttatttccaagttg

SEQ ID NO: 176359 - DNA, 446 bp, Homo Sapiens
gggcttcccaccaacaaacatggccttgtgtcttcagaaccgccatttgtgtgcttctactatgaccaatgtgagacccatttcatttcccttctcaacgccattgacgcactcttcagttgtgtcagctcagcccagcccccgcgaatcttcgtggcacacagcaagtttgtcatcctcagtgcacacaaactggtgttcattggagacacgctgacacggcaggtgactgcccaggacattcgcaacaaagtcatgaactccagcaaccacctctgcgagcagctcaagaccatagtcatggcaaccaagattggccgcccttccattaccccagcaaccacggccctgcaggaaatgggtgcaccaagtgacagacctttctaggaaatggcccagcttgtttcaaagggcttcttttgcttgggagattgggcaaccgttct

SEQ ID NO: 176360 - DNA, 596 bp, Homo Sapiens
  misc_feature (262)..(284): n is a, c, g, or t
tggaggttatcatcaaagttttactgcaactctaaaacataggaatgtcccatacaacagcagctaacactttgctttttaaagtgattcttcttagtgcagggacactcatttgtctatgcttgttatacagcgaaattactgcctatgacatctcataattgaaaaatttggagtcaagattaaagctgtttacatttttagtgaaacttctcttaagactgtccaaaagaaaatgaactaatatatgatgctattatcnnnnnnnnnnnnnnnnnnnnnnncatctttcatggtctttcattcatctcatcaattaggacacacaaggcagcatctttctctataatctgatctctcctatgacctgaattttctctttgatgttcattctgtccagtacaattgttgctatcatcagcatccattggttcagtttttactctcattcctgcttctgaatgaggcaaatcatcaggcaaagaagccaagcaattctgaatcatttcaattactcgttccaggtgcttttgaaatctctcagctgtttcaagccgttgacgtttctggacctccatcatgactctcaaggtccc

SEQ ID NO: 176361 - DNA, 355 bp, Homo Sapiens
ggtagttaaagaagcacctacagaccttgccctcactggttcctggaacagatggaactggctctccccatgaacacagtccctagagtttcccgctttaagggcatggcagcttgatgtgcaggataattttacaaaatgcaaatcatcctattttaataagatacagtgtcagaattaactgtagtctttacatgtcagtattccagaaatttttatactttggctatagaagcaatgccatagtgttacacaatacttatttcttaaaaaaatacatgtattcatgttcatgaatatcaaacgcaaatttctattaaatatattttatcgaatattacttagagcaccttgc

SEQ ID NO: 176362 - DNA, 487 bp, Homo Sapiens
  misc_feature (29)..(29): n is a, c, g, or t
  misc_feature (36)..(36): n is a, c, g, or t
tggtagaggaggtggcagcggcccggtgnagcatanatcaagaccagcgacccaccatcgagacccgctacaacctgaagagtccggctgttaaacgtttaatgaaagaagcggcagaattgaaagatccaacagatcattaccatgcgcacgctttagaggataacctttttgaatggcacttcacggttagagggcccccagactccgattttgatggaggagtttatcacgggcggatagtactgccaccagagtatcccatgaaaccaccaagcattattctcctaacggctaatgggtcgatttgaagtgggcaagaaaatctgtttgagcatctcaggccatcatcctgaaacttgggcagccttcgtgggagtataagggacagcattattagccatcattgggtttattgccaacaaaaggagagggagcactaggttctctagattacactcctgagaaaagaagagcacttgccaaa

SEQ ID NO: 176363 - DNA, 443 bp, Homo Sapiens
  misc_feature (114)..(114): n is a, c, g, or t
  misc_feature (332)..(332): n is a, c, g, or t
  misc_feature (384)..(384): n is a, c, g, or t
  misc_feature (396)..(396): n is a, c, g, or t
  misc_feature (420)..(420): n is a, c, g, or t
  misc_feature (431)..(431): n is a, c, g, or t
tttagccagcgacccaccatggagacccgctacaacctgaagagtccggctgttaaacgtttaatgaaagaagcggcagaattgaaagatccaacagatcattaccatgcgcancttttagaggataacctttttgaatggcacttcacggttagagggcccccagactccgattttgatgtaggagtttatcacgggcggatagtactgccaccagagtatcccatgaaaccaccaagcattattctcctaacgggctaatgggtcgatttgaagtggggcaagaaaatctgttttgaggcatcttcagggccattcatcctggaaacttngggcagcctttcgtgggagtattaagggacagcattatttaggccatcattnggggtttattgnccaacaaaagggagaggggagccntaggggtcccntaggattacact

SEQ ID NO: 176364 - DNA, 747 bp, Homo Sapiens
agctgggccccagcccaccctcctgtcttcccagggtagcccgcctgccagtcctagctgcacagggcagctgggcccaaccctgtctgtagagggccctggtgtttctagcactggcctgcacggtgggccttgctggggacggggggccccagtcagcctctctcccagtctacccagagaagccccttccccatgggaagacgaggccctcgggcccagcccccacagtgctgtctgatctgtgctttccagctcaccccccacactcactcctgagacccctggcctccggcgtcagcctccagcctctgttcccctagtaagtgccttccatgtcggcctctaaccccaggccccgaggaccccagacccagtggggaggcggacgttccagccggcatggctgggaactgcagacctgtcctactggtgggtccaggggcccctccagcttgtggagccccacactggggtgccgcctgcccgtctctctcccatggagccccagccccctttgggcccagggacaccagccaggctctgtgctgaccctcctgttgcacccagccctggtctcagcagcgaccacccctgcctccaccctctgagctttgcatgttccactaaccccgggcgggtggcaggtggaggtgtcaggctgtggcgcctctgcaagggcagaacactaacctgaccgtgggcggggccttgggtatccgcccccaataaaagcaattccaacct

SEQ ID NO: 176365 - DNA, 412 bp, Homo Sapiens
  misc_feature (72)..(72): n is a, c, g, or t
  misc_feature (222)..(222): n is a, c, g, or t
  misc_feature (287)..(287): n is a, c, g, or t
  misc_feature (294)..(294): n is a, c, g, or t
  misc_feature (304)..(304): n is a, c, g, or t
  misc_feature (357)..(357): n is a, c, g, or t
  misc_feature (362)..(362): n is a, c, g, or t
  misc_feature (368)..(368): n is a, c, g, or t
  misc_feature (390)..(390): n is a, c, g, or t
  misc_feature (399)..(399): n is a, c, g, or t
attcggcacaggcagcccaccctcctgtcttcccagggtagcccgcctgccagtcctagctgcacagggcantgggcccaaccctgtctgtagagggccctggtgtttctagcactggcctgcacggtgggccttgctggaaacggggggcccagtcagcctctctcccagtctacccagagaagccccttccccatgggaagaacgaggccctcggccagncccccacagtgctgtctgatctgtgctttccagctcaccccccacactcactcctgagaaccctngggcttncggcgttcantttccaggcctcttgtttcccctaagtaaagtgcttttcatgttgggcttttnaaccnaagggncccgaaggaaccagaaccattnggggaaggncggaagttttcaa

SEQ ID NO: 176366 - DNA, 157 bp, Homo Sapiens
actaagggcagggtattgtatctgccagactgggtatttgttgaacaagcgagtattttcgcctattagcttagtttttaaggaaatcattttttacttgattcatcatagctttaattctactacatactacaataaaaatttgacaagactgata

SEQ ID NO: 176367 - DNA, 351 bp, Homo Sapiens
ggtggggggagggggctctgtggggtgggacattcacatcatttcactctggtctgagtggtggcctgagaaccatggtggcatggaccaccctcatccatgcaactccaggccccatgggaacggatgtggaaggaagaactgtcaccctcttaaggcccagggtcggagcccagggcctctcccttcctgtcgttcaatggacgtggtggtggctgttccacacccattttgttgcagttcctgtgagacaggagaggctgagccaagggaactgtgaaggggatgggcaggagggcttgtgcagggttttgtaagcagtgatctagtttcattaaaaaaagaaaacaa

SEQ ID NO: 176368 - DNA, 410 bp, Homo Sapiens
tgaactgtggcccccctagggaacctaagtccagtccttgcgtttaccttgaaactctccccttctcccgcaacacccctgttttggagtttccacagataacacaaaccctccccacagctcccttgggggtgggtaggggagactgagagtatagggtctttgtaggcagagaaggagagaggcttcaaggaaatccgtaaaaccataacacacacttctaagccacctgtgaccaacttgggaatttctggccccttggggaccacatctcagcccttgcccccttcaaataaaaggaggtctagcccctaccccaaatctccttctaccagcagtcaataggaagcaaagtgagacgatgtaggggaagaaatggctctcagggactgaggcatttgagaaacctc

SEQ ID NO: 176369 - DNA, 386 bp, Homo Sapiens
ctggcccctcccattcttattgaatacaagccctgatcttccatctcctcagcaaaaaaataggagccctggccccccaactttcttcagagtaatagccttaattccttccctatctccttaccaaagtacaagtcacatctttcccaccttttctgcaaactaggagtctaccgttcattcctttatcaaagaaaagtatctacttcctttctagaataagagtactagctctcaccctctgccctttacttgaacaggagtcttgattctttttttgcctcatcagagaaggaatctggactccccatccccccaccaggataaaagtcctgacctttgttctcttgacggaataaaagcttgcttatccttatacttaaaaa

SEQ ID NO: 176370 - DNA, 547 bp, Homo Sapiens
  misc_feature (472)..(472): n is a, c, g, or t
  misc_feature (531)..(531): n is a, c, g, or t
ggggtgcaggagtatattgatgcattctcagattatgccaacttcaagtaagcggcaacaaggtccgttggaccaggaggattgcctttaatattttgtaatattctgttttgttaatataccccaaattgtgtatatatcttataactgttttagaaattggtacataggcttctattacctattaggtggaaattttatatgtaaatgtgttagcactgatagtcctttttccaatgttttattggggaattaaatagtgtgatgtttggattgatatcgtgaaatcctcagccgagaaattgggctggattgtgctttggttaatacatctttccctaaagaagataaacacaaaatccattccaggtagctcggcaccaactaagaaaaaaagcacaaagttctcagagctctcgaggaaagtggttgtccccgtaccaccatgcactgtaaatatccctcccctctntccctggtcccctcccccatccccaccactgatatcatggggagtaataggaccagagnggtatctctggcacca

SEQ ID NO: 176371 - DNA, 727 bp, Homo Sapiens
ggggagccagtcaagattggctgcctcatgttgaggttcagagttacgactcggactggacagaggcgccggcagctgtggtgattggcggggagacctacggcgtgagcctggagtccctgcagctggccgagagcactggtggcaagaggctgctgatccccgttgtgcctggtgtggacagcctcaactcggccatggcggcaagcatcctgcttttcgaagggaaaagacagctgcgggggagggcggaggacttgagcagggacaggagttaccactgaggacgccagaagtgacttctgcttgaggacgtctgcagctcctcctacaccagcacactggtgggaggctggcggagtcagtgactatggcccccacgttcaggaggaaggtgtgatgccgtcatacagttacaggaaaaataagaacttcctcagaaagaacaggtccgaattcttcctgtcgcgtcactgattttgaggttcttttttctcttggtgacaataggtgacccacgtggctctgtgtgtttttaaaaattgtccaccaagaagcactttgtgcccagaaagttcctgaagcatcatcctgggcagggaggcgcctgctccaccagctggttgggtgtttgtaatccgccaagcaccagctataggtcacagccacatcactcacagctgatcactggttggtggaaaataaactatgagcagcagattacgtt

SEQ ID NO: 176372 - DNA, 650 bp, Homo Sapiens
tcccacttctcgaaccgcacacaggtcagggaactggccttgccaatcgggaacattgagcgaccaggcaagtcccaggtggagattctcactgatgggaggagccctgcgtagatgatccaggtcctgggccccaagcctgctctgaaggagggcaaccctgaggaagacctcacagctgacaaggcaaatgcccaggccgcagctctgtataaggtctctgatgccactggacagatgaacctgaccaaggtggctgactccagcccatttgcccttgaactgctgatatctgatgactgctttgtgctggacaacgggctctgtggcaagatctatatctggaaggggcgaaaagcgaatgagaaggagcggcaggcagccctgcaggtggccgagggcttcatctcgcgcatgcagtacgccccgaacactcaggtggagattctgcctcagggccgtgagagtcccatcttcaagcaatttttcaaggactggaaatgagggtgggcgtcttcctgccccatgctcccctgccccccaccacctgcctgcttgcttctctggctgcctggtcagtgcagaggtgccccctgcagatgttcaataaaggagacaagtgctttcccagctcttttcctgcgaaaaaa

SEQ ID NO: 176373 - DNA, 813 bp, Homo Sapiens
ggggaagccgggtggggcaggctggaaggaagacgaacctacgaagcagagatctgaagacagcatgtacacagccattccccagagtggctctccattcccaggctcagtgcaggatccaggcctgcatgtgtggcgggtggagaagctgaagccggtgcctgtggcgcaagagaaccagggcgtcttcttctcgggggactcctacctagtgctgcacaatggcccagaagaggtttcccatctgcacctgtggataggccagcagtcatcccgggatgagcagggggcctgtgccgtgctggctgtgcacctcaacacgctgctgggagagcggcctgtgcagcaccgcgaggtgcagggcaatgagtctgacctcttcatgagctacttcccacggggcctcaagtaccaggaaggtggtgtggagtcagcatttcacaagacctccacaggagccccagctgccatcaagaaactctaccaggtgaaggggaagaagaacatccgtgccaccgagcgggcactgaactgggacagcttcaacactggggactgcttcatcctggacctgggccagaacatcttcgcctggtgtggtggaaagtccaacatcctggaacgcaacaaggcgagggacctggccctggccatccgggacagtgagcgacagggcaaggcccaggtggagattgtcactgatggggaggagcctgctgagatgatccaggtcctgggccccaagcctgctctgaaggagggcaaccctgaggaagacctcacagctgacaaggcaaatgcccaggccgcagc

SEQ ID NO: 176374 - DNA, 1056 bp, Homo Sapiens
  misc_feature (644)..(683): n is a, c, g, or t
ggagtcggagcgaagcggctggcggagcagaacggattgcagggtcagccatgtcatctgagcctcccccaccaccacagccccccacccatcaagcttcagtcgggctgctggacacccctcggagccgtgagcgctcaccatcccctctgcgcggcaacgtggtcccaagcccactgcccactcgccggacgaggaccttctcggcgacggtgcgggcttcacagggccccgtctacaaaggagtctgcaaatgcttctgccggtccaagggccatggcttcattaccccagctgatggcggccccgacatcttcctgcacatctctgatgtggaaggggagtatgtcccagtggaaggcgacgaggtcacctataaaatgtgctccatcccacccaagaatgagaagctgcaggccgtggaggtcgtcatcactcacctggcaccaggcaccaagcatgagacctggtctggacatgtcatcagctcctagggagagggggggaagcaccccttgtcctgtggcttgtgggaaactttgcggggaagaaggcaccagacactggagatgacattctttccacacgagacggggccttcagcccgggcataggcccccctcaagtatcctcccgaaggaaannnnnnnnnnnnnnnnnnnnnnnnnnnnnnnnnnnnnnnntttccgggccattcatgaccaggctagggacccatgggcaagaacccccttcccccttctggagagaggcgtttaaaacgcgcttttaaaaccgggccgtacccgcgcgtacttccgcgtgaaactgcggggcgcttttatggcccgcggggggggcgagcaacgcccgtttactcccaaatgggcccgcgtgggcgcaatagcggcggttccggcgggagccgagatttttcgccggggaacaaagcgggggaggagaatacgcgccgcgttttttcccccatgaggcggggaggtctggggaggaacgggttcggaccgacggcgcggcgcgccgacaggcggcccgataagggagagatccggcgcgggc

SEQ ID NO: 176375 - DNA, 741 bp, Homo Sapiens
gggggagcgaagcggctggcggagcagaacggattgcagggtcagccatgtcatctgagcctcccccaccaccacagccccccacccatcaagcttcagtcgggctgctggacacccctcggagccgtgagcgctcaccatcccctctgcgcggcaacgtggtcccaagcccactgcccactcgccggacgagaaccttctcggcgacggtgcggccttcacagggccccgtctacaaaggagtctgcaaatgcttctgccggtccaagggccatggcttcattaccccagctgatggcggccccgacatcttcctgcacatctctgatgtggaaggggagtatgtcccagtggaaggcgacgaggtcacctataaaatgtgctccatcccacccaagaatgagaagctgcaggccgtggaggtcgtcatcactcacctggcaccaggcaccaagcatgagacctggtctggacatgtcatcagctcctaggagatggtggaagcaccccttgtcctgtgcttgtgggagactttgcggggaggaggcagcagacactggagatgacattcttccacacgagacggggcttcagccgggcatggtccctctcaagtatctcctggaggaaggggtatggggggcaggtgtggggtgtggggtgttcccggccatcagcacagcctatgaccattgcaacaacctctcaccatctgaagagcattaaaagcatttaaaaagg

SEQ ID NO: 176376 - DNA, 451 bp, Homo Sapiens
  misc_feature (54)..(97): n is a, c, g, or t
cattgcaccatacataaataattacattgtaaaaatgactccataattacaagnnnnnnnnnnnnnnnnnnnnnnnnnnnnnnnnnnnnnnnnnnnnctaggtagatgatatctggggggttttgtccgtgggggctgtgtctctgggcatcggcccctctcgaggccggcaggtggcggtggccgcggcctcccacccgcccctcccgccggggccgccactatctggggttgttgaggaggatctccagccagcaggggcaggaggtgatgaactgccgggagtagcagggcccccagcccttggcgaagctgatgcggacgctgttggggtcgtaggggccgtcggcggcgtcgggctcgggcgcgtgctgcaggcccgagcgctcgaagtcgaacaccttgatggagtagccggggggcaccttgcgcacgaccagggcgcggccgc

SEQ ID NO: 176377 - DNA, 875 bp, Homo Sapiens
ggcagtgcacagaaatcttatgattggctcaagtacagtaagttacttctcagtaaaactctcaagtctgagtccatatttgtagctctgcttttggctgtacgttcctaggatcggggctgcttatgcctttcgtttatccttggggtttgagagcgctgtatttgggagagagtttaaaaatacattaggagagagaaaccattaaaagtttcactgtcagagatattgtaggtgctaatactggatttcgtctcagatttaatttcttttatgggtctgttagtcattcaacaaatcccataagtatgtgttaatattttaattgtgtaaaactcatttgttactttacagcctgtaatagtgtgtctgcattttcaacctgttgcaataactttgctgaaatattaacacattaataaaacttttcttaaacggagtaagacgtaaccctcataagaggccatccttgtctggccgccctcggaacctcaaagaagctttccaaaaccctttctatttggcagccgcggacccccgccagggcaagggggaaacttggcgccttagagtgatttccctaaggaagatcccctggcaccatggaacttaggggctttgggaatttcctccaccaattaacagaaagcgcccgggcggggcgaaaaccgtaaggggttcctgggaacacaatcccctaaatgtggatcttctttaagggctcttttactgtggaatcgcattctgaaacgggaagatccccaaacctgggcgtcctaattttcggaatttagacagccccccgagagccggaaacaattcaattggacaaaaaatggagttggcaaattctcatttaatacgcatttctgggc

SEQ ID NO: 176378 - DNA, 936 bp, Homo Sapiens
  misc_feature (144)..(144): n is a, c, g, or t
  misc_feature (326)..(334): n is a, c, g, or t
tacacggcgcatgattatcttgagaaggcgaaaacggggggcgggggaggattaaatgttattgtttaaaggcacggtggggggagaactctcgtgtgttgtgaaagccccacctaatagacccccccgcagaggcccaccttntggggtattgtggtgataaaagacaagactgttttgcgcgggcggggttgtttttttatctttggggaagaacaccaaacacccccgttgtttaataggggccggggtattccttgggggaggaactgcatgtgtggcaccacgttttgttgttgctgatgaaggggggacccccgccgccnnnnnnnnngagtgtgttgggaataaatttttttaaagggggaaggggggtgccaaacattttgcggagggggcggagggcagccaaacaagagaggaaaaaggggcagacggggggggtgttcgaggcgcatacggtgtattggggagttttccaagagtaattggattgttgacggaaaacagcggaagggaggggttaatggggtgtttggtactcttacgtacagattatttattgtaaaaatgtaagcaattacaaattgatctgttgtgaaatcagtgctgaattaacattaatgtaactccagtgaaaaaaatgaatttgatcaattattatcaggaataaacattaagccatgacggtgctcaagttatcttctgatgacactgctgtattaaatgtacttttcctatgagaaccttagaaaaataaaaatttctgagtagatcatctttatcttttctttttatatatttatagccatattttaatataataggccatgaggtgatatgtaaacatacataatttcaacaaattttgtcaaataaaatcatatttctagctagaaacttgccttctaatcattttaaatgaataatccaatc

SEQ ID NO: 176379 - DNA, 407 bp, Homo Sapiens
  misc_feature (341)..(341): n is a, c, g, or t
  misc_feature (396)..(396): n is a, c, g, or t
atttattgtaaaaatgtaagcaattacaaattgatctgttgtgaaatcagtgctgaattaacattaatgtaactccagtgaaaaaaatgaatttgatcaattattatcaggaataaacattaagccatgacggtgctcaagttatcttctgatgacactgctgtattaaatgtacttttcctatgagaaccttagaaaaataaaaatttctgagtagatcatctttatctttcctttttatatatttataggccatattttaatataatagggccatgagggtgatatggtaaacatacataatttcaacaaattttggtcaaataaaatccatatttctngccaggaaactggcccttctaatcctttttaaatggattaatcccatcatcccgnccaaaaccaat

SEQ ID NO: 176380 - DNA, 458 bp, Homo Sapiens
gaacaaccaggaattctgaattagcacagagtcgaagtttatacccgtttcacatgcttttcaagaatgtcccaattactaagaagcagataatggtgttttttagaaacctaattgaagtatattcaaccaaatactttaatgtataaaataaatattatacaatatactcgtatagcagtttctgcttcacatttgattttttcaaatttaatatttatattagagatctatatatgtataaatatgtattttgtcaaatttgttacttaaatatatagagaccagttttctctggaagtttgtttaaatgacagaagcgtatatgaattcaagaaaatttaagctgcaaaaatgtatttgctataaaatgagaagtctcactgatagaggttctttattgctcattttttaaaaaatggactcttgaaatctgttaaaataaaattgtacatttg

SEQ ID NO: 176381 - DNA, 1247 bp, Homo Sapiens
  misc_feature (690)..(835): n is a, c, g, or t
  misc_feature (883)..(892): n is a, c, g, or t
  misc_feature (900)..(1051): n is a, c, g, or t
  misc_feature (1077)..(1087): n is a, c, g, or t
  misc_feature (1186)..(1194): n is a, c, g, or t
ccatacgtctaagtagcgagcctgggtggcgccacagcctgaccacaggggctgtgggtcctgcgtccccttcctcgggtgagcctggcctgtcccgttcagccgttgggcccaggcttcctcccctccaaggtgaaacactgcagtcccggtgtggtggctccccatgcaggacgggccaggctgggagtgccgccttcctgtgccaaattcagtggggactcagtgcccaggccctggccacgagctttggccttggtctacctgccaggccaggcaaagcgcctttacacaggcctcggaaaacaatggagtgagcacaagatgccctgtgcagctgcccgagggtctccgcccaccccggccggactttgatccccccgaagtcttcacaggcactgcatcgggttgtctggcgcccttttcctccagcctaaactgacatcatcctatggactgagccggccactctctggccgaagtggccgcaggctgtgcccccgagctgcccccaccccctcacagggtccctcagattataggtgcccaggctgaggtgaagaagcctgggggccctgccttccgggcgctcctggaccctggggcaaacctgtgacccttttctactggaatagaaatgagttttatcatctttgaaaaataattcactcttgaagtaataaacgtttnnnnnnnnnnnnnnnnnnnnnnnnnnnnnnnnnnnnnnnnnnnnnnnnnnnnnnnnnnnnnnnnnnnnnnnnnnnnnnnnnnnnnnnnnnnnnnnnnnnnnnnnnnnnnnnnnnnnnnnnnnnnnnnnnnnnnnnnnnnnnnnnnnttttggggccccccccgcccccaaaaaattttttaaaaactttttttnnnnnnnnnnccccaaannnnnnnnnnnnnnnnnnnnnnnnnnnnnnnnnnnnnnnnnnnnnnnnnnnnnnnnnnnnnnnnnnnnnnnnnnnnnnnnnnnnnnnnnnnnnnnnnnnnnnnnnnnnnnnnnnnnnnnnnnnnnnnnnnnnnnnnnnnnnnnnnnnnnnnnccccagggggttttaattttaatttnnnnnnnnnnnggccctttttagggagagggggggatattcttaaaattttccgcccaaggggaacccctcccaaaggggttggggaaacctgtattcccccggggggannnnnnnnntgtgccgcctgggggaaaaaaatatttccccccggggggaaaaagcgggggcg

SEQ ID NO: 176382 - DNA, 474 bp, Homo Sapiens
  misc_feature (26)..(26): n is a, c, g, or t
  misc_feature (46)..(46): n is a, c, g, or t
  misc_feature (51)..(51): n is a, c, g, or t
  misc_feature (69)..(69): n is a, c, g, or t
  misc_feature (169)..(169): n is a, c, g, or t
aagaacccaaaaacccctgtggttcnaagcctgtgggcccacgtgnaaaanaaggtttcccaaaaacantgccttgttgaacgaaccctcctcccctaacaaatccccttccaacaagcaagctcccatcccctgaatgtcctgccacaagcctgcacgcatgtgtgtnatgtgtgcccagggcgtgtgtgcaggtgtgcaacaggcacatggcagctgggaggctcaggctgtggggctggggggctgtccgctgggagagtccgggagaagcggggtgtaggggctggggggccggtacagcccagcggccaggcctggctggctcacggtgtcctcaggaccctacagttttgcttcctgcagcacagagcccttgggagctgatgtcatcagggattcagaaatagcctgaatggcctccttatcctttgagccctttttactactactccaaaataaatagcatttctc

SEQ ID NO: 176383 - DNA, 553 bp, Homo Sapiens
tgttggagtcataggcaaatgtttaattaattctgctcatatgcacatctgaaagcatgagacacactccacagacagcacgcactggagctggtggggcagatgggcactcgccgattaggtattaatgtcaataatacgtgcataaagtgctgataaaataacttaagtgttacaaaaacagacagtccacggtggctgcaggcacatgcaggcgggactgggtcagacactccagggctgcacatgttccagctggcctgagtccgacacgtcatagctggccttgtacttggccaggattttcatgaggggccgtagcttgagccaccactgttctttgggaatcctgtgctcaaaatccgtttgcttcttcagctctgccacaggttgaaaaataacgtttcttttgcttattcccagcacacaaatggaatcatcggtggtaaatttttttcctctgccccggggctacttgaattatgcagttagtcactcacaaactactggcagagattgaggtccaagagtccatcgaattgaaaaggtgccc

SEQ ID NO: 176384 - DNA, 1052 bp, Homo Sapiens
atggaactacctcattcggcaaattagccccaaatgagcgctgaatcgtgtcccatgagatcaggcgccatctgtaaagtctcctctggaaatgccaatccatccttcccccagctgcttcctcggggaggcccctgcccccaccctgccagcccttcccagtctcattagaggaagctttccaaagttctcagttatcaagacctcatccagctcgtccaaaggcttcagggatggaaacaaaccagctcgtctcagaggccagcaagctggggcctgtccgccacggtgccctgtgcacctttgggctgccctggcccccactctcccgggccgcccaccacaggctcttaatggggccgggtcagtcctacatgtgagatgggttagggcaagtctttgccatcccccagatggctctgtcttcttgtgtatggcagggctgggactgctgtcccttgtacagttttctgtcactggtgggcactggacaggcatagcagactctcttgtggccacactaggttgtcgcctttcaggcagtgtcccgccacctttgcttcccgctccttctggacattccagagccctgcaccaaacccttacttggtgtctgcacctcctttccctctctccatcttccaatccctggaaaagtctggtctgagtgtgacttgggaagctttcagtgctgctgtttggcccagctcattactttctccctttctctaccacagcaaacacattctccaccatgtcagtctaaagagtctaaaggggccgggagaagcgtgagcgaggggcagattctagtcgggagcccatgccctggaaatccatctttcttcatctttcccattgaccactttgggtttgacctgcacatctgcagtgagggcagaattcaacaagcacaactcactggtctttcagtcaacgtgctagaatccgatgacttattaatctctaattttttggcgcctctttcattgaatgagaattgctttcgtatagttcacattagaaaaatgcctaatatactaaagtaaacc

SEQ ID NO: 176385 - DNA, 580 bp, Homo Sapiens
  misc_feature (126)..(126): n is a, c, g, or t
cggaaccccccaatggggggcaacgtggtcatcttcgacacggtcatcaccaaccaggaagaaccgtaccagaaccactccggccgattcgtctgcactgtacccggctactactacttcaccttncaggtgctgtcccagtgggaaatctgcctgtccatcgtctcctcctcaaggggccaggtccgacgctccctgggcttctgtgacacccaccaacaaggcgctcttccaggtggtgtcagggggcatggggcttccagctgcagcagggtgaccaggtctgggttgaaaaagacccccaaaaagggtcacatttaccagggctctgaggccgacagcgtcttcagcggcttcctcatcttcccatctgcctgagccagggaaggaccccctcccccacccacctctctggcttccatcctccgcctgtaaaatgggggcgctattgcttcagctgctgaagggagggggctggctctgagagccccaggactggctgccccgtgacacatgctctaagaagctcgtttcttagacctcttcctggaataaacatctgtgtctgtgtctgctgaaa

SEQ ID NO: 176386 - DNA, 448 bp, Homo Sapiens
aacaaatcttttcacattttatttctttcacatgtagtcatcttcaaaaaggaaagatttggaattttagaaaaggggcaactcttctttttagcattctcatcagaaagtcacaaaaatcgatggaatcatttccactgggaagattgaccttttgtatttatttgtggggtaaattaataagcattccagatgcttgcagcttcctgcatccaggagatgctgtgttccccgtgatgcagctggaacccaagctgcagcaggagatgcaagtttcaggatgttccccactgagctggaggaatatctacagcagtgatgctttgaaatttttgtatgaattattttgtcgtcctacccttttcctccaaaacaaaaattagaggattattttaatactttggattcttcccccttttttgagaaataaagttttttatgaaaagac

SEQ ID NO: 176387 - DNA, 809 bp, Homo Sapiens; identical to SEQ ID NO: 14895
  misc_feature (632)..(633): n is a, c, g, or t
  misc_feature (636)..(637): n is a, c, g, or t
  misc_feature (639)..(649): n is a, c, g, or t
  misc_feature (651)..(651): n is a, c, g, or t
  misc_feature (654)..(657): n is a, c, g, or t

SEQ ID NO: 176388 - DNA, 919 bp, Homo Sapiens; identical to SEQ ID NO: 83016
  misc_feature (600)..(600): n is a, c, g, or t
  misc_feature (603)..(603): n is a, c, g, or t
  misc_feature (609)..(609): n is a, c, g, or t
  misc_feature (841)..(849): n is a, c, g, or t

SEQ ID NO: 176389 - DNA, 600 bp, Homo Sapiens
gggagagtcactcctgccttcaccatgaagtccagcggcctcttccccttcctggtgctgcttgccctgggaactctggcaccttgggctgtggaaggctctggaaagtccttcaaagctggagtctgtcctcctaagaaatctgcccagtgccttagatacaagaaacctgagtgccagagtgactggcagtgtccagggaagaagagatgttgtcctgacacttgtggcatcaaatgcctggatcctgttgacaccccaaacccaacaaggaggaagcctgggaagtgcccagtgacttatggccaatgtttgatgcttaacccccccaatttctgtgagatggatggccagtgcaagcgtgacttgaagtgttgcatgggcatgtgtgggaaatcctgcgtttcccctgtgaaagcttgattcctgccatatggaggaggctctggagtcctgctctgtgtggtccaggtcctttccaccctgagacttggctccaccactgatatcctcctttggggaaaggcttggcacacagcaggctttcaagaagtgccagttgatcaatgaataaataaacaagcctatttctctttgccc

SEQ ID NO: 176390 - DNA, 972 bp, Homo Sapiens
  misc_feature (878)..(878): n is a, c, g, or t
aaagcctgtgctctggctggctgggcctctatcctgaagagggaaggtgctagaaattagaacaagtgactgtaggggggaccgtctagaaacaccaggcccagacacacggtccctcaggtcaggaggagtgagcagccggcacagcctcctgggaggatcccgaagtagggactggggctgagagcagagaggagggtcgggcgggcccgcctcagtgttgcttctcacagaagctgcgactctagaccaggcctgcagccagaacgccgattccgggagcttgggagccctgcgtcagggcccagagcctcgcacttgctgtgtgcgaagatcgccttgctttactgtgaccacagccccgacgcggggctgtttaacaagaacttcagcgcagccggcgtttctgttaccccggccgcggctcttggcggcgggagaggcgcagtggctgcaggctgccccctgccggccacaagggagcagcgtccgcgccgccgcccaccggccctcccgccagctcctcagcctgctccctgggaggcaggctccagaagcaccccgacggggggccttattaagtgcgagaagcctctccagcgagtcttccccgtgtgtcctcatctgcggcaggcaggagagggggagcaaacaggaaattccacagctgcctccagaaacattaaccacccctctctagtcttactggtattttttgtttccttaataaagctccagtctccctcatttgagcaatactctcatttcctctgatggccggatgattggcaggccaggaaatctgagcgctgggcccccgtggtggaggccctgtttttcataaatcagggcttcccgccctgaaaaaataaggaaanacccgccaacagggctttcaggtattcccgggctgtgaaaaaccgccctgggcattgaatacacacctatttttatttaacaaaaacggggaat

SEQ ID NO: 176391 - DNA, 462 bp, Homo Sapiens
ggggcagtgtagccgggtcagctggacagggtcatcctgagggtgcgactccgccgcgatggtgacccggttcctgggcccacgctaccgggagctggtcaagaactgggtcccgacggcctacacatggggcgctgtgggcgccgtggggctggtgtgggccaccgattggcggctgatcctggactgggtaccttacatcaatggcaagtttaagaaggataattaattacacaaacccttcacagactgctctggtgcctggtggtgctagctcctcccacctcagcacctgctgcatctggagcagcccaagcctcaggatggacaagaggaaacccacagctcagcttcaggcttcttatgtttctgaaaacagcttggatattttaatgcacgttgcattaaacctcactgaaacctgaaaaaaacaataaccctaaacatatacctgaacctccg

SEQ ID NO: 176392 - DNA, 849 bp, Homo Sapiens
ggggagggtgcgactccgccgcgatggtgacccggttcctgggcccacgctaccgggagctggtcaagaactgggtcccgacggcctacacatggggcgctgtgggcgccgtggggctggtgtgggccaccgattggcggctgatcctggactgggtaccttacatcaatggcaagtttaagaaggataattaattacacaaacccttcacagactgctctggtgcctggtggtgctagctcctcccacctcagcacctgctgcatctggagcagcccaagcctcaggatggacaagaggaaacccacagctcagcttcaggcttcttatgtttctgaaaacagcttggatattttaatgcacgttgcattaaacctcactgaaacctgctccgtgcccggatgttgatcatgctggtggcttggttactgtgactgtagctggagtggcacaggtgacccaggcgtcctttcagctccagaatgttgcaagtctaggagagtgttccaatggctgacagaaactgcctatttgaaatggctcataagtagtatctgcagtgtgttcatccgttgctgccttaacaagtcacccacacgtagtggcttaaagcaacgaacattcactctcctcacagcctgtgtcagccggggattttgggagtgatgtatctgggtgggtgtgggcccaaagtctctcctgagggtggcagttaagaacatcagcccaagcccccttccttctggagggaaggccttcaactgggggcctggaagcccacttttccaaggccaaggggcccttccaccgtgggttgtgccgggtggaacacgccacccagttttccta

SEQ ID NO: 176393 - DNA, 527 bp, Homo Sapiens
  misc_feature (273)..(281): n is a, c, g, or t
  misc_feature (417)..(417): n is a, c, g, or t
tttttttaattttaagagttacattggaggaatggagaattaaatcacatggtacttttccactaatactgtgatggtacataattgtgtagtcggtaatcaaagaaactacattagagaagccacattaagtaacatccgatttaaaaagtcccctgggataagagccctcaagcagcgacccctcaaggtggatattaaaactgaaagcagtgcttaactctacctggagtatctacatgaaaaaaacaacattctgaaaatttcacattnnnnnnnnngcttcatagaagtcactttgaaatgctaaaatagccaaaggccagaaattgagggtataaaaactccattcagaacagattcaaaactagtacactgaaaccttggtaatctatgggtgtaggttagggacatctnctttttccatttgtttatcatttctcccaatttcccaatggctgctttatatctcaataattttaacctaaaaatattgtaattttagttggaaggaataaaattaattg

SEQ ID NO: 176394 - DNA, 576 bp, Homo Sapiens
  misc_feature (477)..(477): n is a, c, g, or t
  misc_feature (483)..(483): n is a, c, g, or t
  misc_feature (495)..(495): n is a, c, g, or t
  misc_feature (524)..(524): n is a, c, g, or t
  misc_feature (554)..(554): n is a, c, g, or t
  misc_feature (565)..(565): n is a, c, g, or t
aggggtttatctttattttataaaaactggtagacacacacatagctacagtttacagacaagaggtttcagccagtgcatgaccttactattggtgtagagttcggtgctcgaatgataactattgatgggaaacagataaaacttcagatatgggatacggcagggcaagaatcctttcgttccatcacaaggtcgtattacagaggtgcagcaggagctttactagtttacgatattacacggagagatacattcaaccacttgacaacctggttagaagatgcccgccagcattccaattccaacatggtcattatgcttattggaaataaaagtgatttagaatctagaagagaagtaaaaaaagaagaaggtgaagcttttgcacgagaacatggactcatcttcatgggaaacgtctgcttaagactgcttccaatgtaggaagaggccattttatttaattacagccanaagganattttatggaanaagttccaaggaagggtgtcttttgaccnttaattaatggagggccaattggcctttanatttgggcccntccagcatttg

SEQ ID NO: 176395 - DNA, 859 bp, Homo Sapiens
ggggcggaggcggggcggaggcgccgcggcggctgttattgttcggctgggctcggtcgggcgctgtctccctcggctctgcgggtgtcagttcgtccggcttcctcacagcccctcactcccggcggctgacagcagcagcggcggcggcgggcggcgcctggcgtttcgaggctgagcggcaccggggttggggcgcggaggaggagcagcagcgggaggaggagccgtgtgccctggcactgagcggccgcggccatggcgtacgcctatctcttcaagtacatcataatcggcgacacaggtgttggtaaatcatgcttattgctacagtttacagacaagaggtttcagccagtgcatgaccttactattggtgtagagttcggtgctcgaatgataactattgatgggaaacagataaaacttcagatatgggatacggcagggcaagaatcctttcgttccatcacaaggtcgtattacagaggtgcagcaggagctttactagtttacgatattacacgcgagagatacattcaaccacttgacaaactggttagaagatgcccgccaggcattccaattccaaactgggtcattatgccttaatgggaaataaaaggggatttcaaaatcctacaacaagaagtaaaaaatagaaagaagggtggaagccttttgccaccaagaacctgggactgcacctctttcatgggaaaacggccctgcactaaagacaggcctttcccaagtggaaagaacgaaggccatttttactttaaattacaggtcgaaaaggaaaaattttattgcgaaagacacgcggatgaacacacacagaccacccccccaccat

SEQ ID NO: 176396 - DNA, 631 bp, Homo Sapiens
tgagccaccatgcccagcctcaaatatgtttttaaaaaatatcattgtcctcctcctcttaagatttttttaagttattttgctcaagtacttaagtagtctggctcaagtactttgtttacaattaaaatggatattatagcatttaatagaagaaatggttatggcttatccaaaaagaatgtcagcatgacctggtgtagacttaaaaaactacatgtttgtgaatattttataatgtggaatgatcattgaaatatcaaggattctagtaattgtatttcctgaataaatgtatgtttatgaattttctaacttacattttgttgtgtcctctgccaacaatctggttttataattgttgtctaaagtttgctagtagtgtttcttcaaaggttattccaggtatggttaagtagtgagaaaaatcacttattaattttcaagaactttgagactaatttgtattgactcggttttttaaaataactggcaaatgctatgcttctacttttaaaatttgtggtaatacccagaatggatgtaaaataacattttttcaatagattacttcatttatcaatttaaattctgattttaaagcttatttaaaataaatttgtatgagttt

SEQ ID NO: 176397 - DNA, 201 bp, Homo Sapiens
  misc_feature (100)..(113): n is a, c, g, or t
aaatactaatatgtttcacactatagtttgtgtaacaacacgtgttcgcattatctatgttgctgttacttttgtgcttttattctttttagactttatnnnnnnnnnnnnnngctcctgtaatttgcactttctcccaatccttaaatctcttgtatggcaaccaaaattactgtaaaaaaataaatatactattgcact

SEQ ID NO: 176398 - DNA, 162 bp, Homo Sapiens
cggctgcgagaagacgacagaagggagactcatcatcattttcaatgtcgtcattaccaaaagcctttcttatgcgattcattgtgcaaggctgtgtacagaaactgttgaaggatccttttgctttcttgtgacttaaaatccatgacatttcacgatgcc

SEQ ID NO: 176399 - DNA, 1022 bp, Homo Sapiens
  misc_feature (146)..(221): n is a, c, g, or t
  misc_feature (248)..(248): n is a, c, g, or t
  misc_feature (267)..(267): n is a, c, g, or t
  misc_feature (282)..(297): n is a, c, g, or t
  misc_feature (323)..(332): n is a, c, g, or t
  misc_feature (474)..(480): n is a, c, g, or t
  misc_feature (482)..(482): n is a, c, g, or t
  misc_feature (484)..(484): n is a, c, g, or t
  misc_feature (488)..(488): n is a, c, g, or t
  misc_feature (491)..(492): n is a, c, g, or t
  misc_feature (494)..(494): n is a, c, g, or t
  misc_feature (498)..(498): n is a, c, g, or t
  misc_feature (509)..(509): n is a, c, g, or t
  misc_feature (513)..(514): n is a, c, g, or t
  misc_feature (889)..(889): n is a, c, g, or t
gcggccgcctactactactatacggctgcgagaagacgacagaaggggatttgtggtgggttattttattttgcctgtggccaatcttctgtgaaatacaatgtgctgttggtgcaacagatgattcaataaatgtctacagcagnnnnnnnnnnnnnnnnnnnnnnnnnnnnnnnnnnnnnnnnnnnnnnnnnnnnnnnnnnnnnnnnnnnnnnnnnnnncacaccaaaccaccacaaacttttacncataactaaccacccaacncaaaaaattcgtcgnnnnnnnnnnnnnnnnaaaaatttttcaaaaatattcgattnnnnnnnnnncccccaaaaaaaagggaacgcggccaaccctgggttcccaagaaaacccgggtaaagacaaaggggcggggatcccccccaaaaaaaccccgggacccggtcgaaaacaggggtcgggttggtaccggggagtaacccaatnnnnnnnangncggngcnngngggnggaccgccgcngcgnngggccggtgcgatcggggggggcgcgcccgcggcgggcccttgccggctgctcgccttcgacgcgcccccgcgcacgcgcggctccatgacgcccgggctggtccgtggcatctccgaggagccgagctgccatgaccgcgctctagccggcccggacggccctgcgcgcgccgcccgggctggtatatcgccggggcgacggctgagtcctgcctgaagggcgccaatcgtgcttcgcacgttggtgggtttgtatttgctgcgattgacgagactgagattggatgagtggaagccacacgatcatccgtccgatggagtgctcatgagcatgagatcagctgcgacatcgacgccacggggcgcgcctctgnttgagcggcacggcgtgtaggcgcaccgccgtgcgcactggacaggcgcgggtgagaggcaccagctgcgcgcgccttacgtacgggactctcacagcgtgcgggacggttgcgggatgcgtcggaacgaggg

SEQ ID NO: 176400 - DNA, 678 bp, Homo Sapiens
  misc_feature (168)..(292): n is a, c, g, or t
  misc_feature (300)..(313): n is a, c, g, or t
  misc_feature (338)..(527): n is a, c, g, or t
  misc_feature (560)..(569): n is a, c, g, or t
  misc_feature (586)..(594): n is a, c, g, or t
gcctactactactatacggctgcgagaagacgacagaagggaataagatgtgtctcctttccctggcttatttcatcctggtcttggggtatggtgctagctatggtaagggaaagggacctttccgaaaaacatcttttggggaaataaaaatgtggactgtgaaannnnnnnnnnnnnnnnnnnnnnnnnnnnnnnnnnnnnnnnnnnnnnnnnnnnnnnnnnnnnnnnnnnnnnnnnnnnnnnnnnnnnnnnnnnnnnnnnnnnnnnnnnnnnnnnnnnnnnnnnnnnnttgggggnnnnnnnnnnnnnnaaaaattttttaaaacctttttttnnnnnnnnnnnnnnnnnnnnnnnnnnnnnnnnnnnnnnnnnnnnnnnnnnnnnnnnnnnnnnnnnnnnnnnnnnnnnnnnnnnnnnnnnnnnnnnnnnnnnnnnnnnnnnnnnnnnnnnnnnnnnnnnnnnnnnnnnnnnnnnnnnnnnnnnnnnnnnnnnnnnnnnnnnnnnnnnnnnnnnnnnnnnnnaatttagcccccgccggggcctttttgggaaannnnnnnnnnaatttaaaaaacctttnnnnnnnnnttgggaaccgcccccccaacggggggtgggaaagaccctgaaaccccccgcgggggttataccacacctttttgcccccttggg

SEQ ID NO: 176401 - DNA, 168 bp, Homo Sapiens
gagaagacgacagaaggggatatatattatgaaatggtcatttttctgaagagaatattttgcttgaaatgcaaaggactgaaagagatttgtaggttgttgattttgttacttcatactggaacttttaaaaagatttcatcaaataaagttttgttttctactttt

SEQ ID NO: 176402 - DNA, 497 bp, Homo Sapiens
  misc_feature (56)..(95): n is a, c, g, or t
gagaagacgacagaagggggctgcatctcgggggattttagatgttcaatctgtgnnnnnnnnnnnnnnnnnnnnnnnnnnnnnnnnnnnnnnnnttgctacatccgggcccccaccagaaggtggacttaggtggacagtttcataaagcataacatgagtagaagaatctactgccaataactgtttattatctgcaatcaagtgggcttcatcaatttaatttcttctctttgagtaaatgaagattcagactttgtaatattattgcccttaagtgcaatgctaaaaaaacgttgattttcaagcttagagaatggctagacttttcattaaatactgattttcctacatttgctcttctgcagttagtgggtgatttgctatttttcttagtagttaaaaaatggaactaaatagtgaatatttatacactgcatgtaaacattctgcatatacctctaagattaaaattcgcagttgtcttttcatccttt

SEQ ID NO: 176403 - DNA, 257 bp, Homo Sapiens
  misc_feature (49)..(57): n is a, c, g, or t
  misc_feature (94)..(108): n is a, c, g, or t
  misc_feature (180)..(193): n is a, c, g, or t
gagaagacgacagaaggggggagcgagatcgaggaaaggggcggagaannnnnnnnncttcttcccatttctttaaaaaaccaacacaagaaannnnnnnnnnnnnnnaccaacgtttgttcccgagtagaaacataaatagggcagaatcgaacactctgttcttctctcttccaaagnnnnnnnnnnnnnngtaaaagtaaaggaaaggcagggtttgacgtgcgccccctcggagcccctctttcggcgcggtg

SEQ ID NO: 176404 - DNA, 537 bp, Homo Sapiens
cagtagcccacatgccttacagaagctgctggcaattcacttgctgctagccagagccttgccaggctgcgtccctccgagcttgggataaagcaaggggaccttggcgctctcagctttccctgccacatcacagcttgttgtcccaatgaaatactgagatgctgggctctatctcccctccaggaatgctggccccccagcctggccagacaagaagactgtcaggaagggtcggagtctgtaaaaccagcatacagtttggcttttttcacattgatcatttttatatgaaataaaaagatcctgcatttatggtgtagttctgagtcctgagacttttctgcgtgatggctatgccttgcacacaggtgttggtgatggggctgttgagatgcctgttgaaggtacatcgtttgcaaatgtcagtttcctctcctgtccgtgtttgtttggtacttttataatgaaaagaaacaagattgtttgggattggaagtaaagattaaaaccaaaagaatttgtgtttgtctgatc

SEQ ID NO: 176405 - DNA, 138 bp, Homo Sapiens
gcggctgcctactactactatacggctgcgagaagacgacagaagggtcggagtctgtaaaaccagcatacagtttggcttttttcacattgatcatttttatatgaaataaaaagatcctgcatttatggtgtaaac

SEQ ID NO: 176406 - DNA, 496 bp, Homo Sapiens
gcacgagggttcaacaaatcctacaatggcactgtggactgatgtttccttctccgaggggctggagcggggatctgatgaaaaggtcagactgaaacgccttgcacggctgctcggcttgatcacagctccctaggtaggcaccacagagaagaccttctagtgagcctgggccaggagcccacagtgcctgtacaggaaggtgcctggccatgtcacctggctgctaggccagagccatgccaggctgcgtccctccgagcttgggataaagcaaggggaccttggcgctctcagctttccctgccacatccagcttgttgtcccaatgaaatactgaaatgctgggctgtctctcccttccaggaatgctgggcccccagcctggccagacaaaaagactgtcaggaagggtcggagtctgtaaaaccagcatacagtttggcttttttcacattgatcatttttatatgaaataaaaagatcctgcatttaa

SEQ ID NO: 176407 - DNA, 1593 bp, Homo Sapiens
  misc_feature (1108)..(1108): n is a, c, g, or t
cgggacagcctggaggtgggggtcacctacaactgcacgtgcggctgcagcgtggggctggaacccaacagcgccaggtgcaacgggagcgggacctatgtctgcggcctgtgtgagtgcagccccggctacctgggcaccaggtgcgagtgccaggatggggagaaccagagcgtgtaccagaacctgtgccgggaggcagagggcaagccactgtgcagcgggcgtggggactgcagctgcaaccagtgctcctgcttcgagagcgagtttggcaagatctatgggcctttctgtgagtgcgacaacttctcctgtgccaggaacaagggagtcctctgctcaggccatggcgagtgtcactgcggggaatgcaagtgccatgcaggttacatcggggacaactgtaactgtcgacagacatcagcacatgccgggcagagatggccagatctgcagcgagcgtgggcactgtctctgtgggcagtgccaatgcacggagccgggggcctttggggagatgtgtgagaagtgccccacctgcccggatgcatgcagcaccaagagagattgcgtcgagtgcctgctgctccactctgggaaacctgacaaccagacctgccacagcctatgcagcggatgaggtgatcacatgggtggacaccatcgtgaaagatgaccaggaggctgtgctatgtttctacaaaaagcgccaaggactgcgtcatgatgttcacctatgtggagctccccagtgggaagtccaacctgaccgtcctcagggagccagagtgtggaaacacccccaacgccataaccatcctcctggctgtggtcggtagcatcctccttgttgggcttgcactcctggctatctggaagctgcttgtcaccatccacgaccggagggagtttgcaaagtttcagaacgagcaatccagggcccgctatgaaatggcttcaaatccattatacagaaagcctatctccacgcacactgtggacttcaccttcaacaagttcaacaaatcctgtacaggaaggtgcctggccatgtcacctggctgctaggccagagccatgccaggctgcgtccctccgagcttgngataaagcaaggggaccttggcgctctcagctttccctgccacatccagcttgttgtcccaatgaaatactgagatgctgggctgtctctcccttccggaatgctgggcccccagcctggccagacaagaagactgtcaagaaaggccggagtctgtaaaaccagcatacaggttgggtttttttcccttgatcatttttatatgaaataaaaaaatcctgcattaatggggtagtttctgagccccgaaaccttttctgcgtgaagggctatggccttgcacacagggtgttggtgaaggggccttgttgaaaatgccctggttaaacgtaccatccgttggcaaatggccagttttcctcctcctggtcccggggtttggtttaaaaactctttaatacaggaaacaaaaaacaagatgtgttttcggaatttgggaagcaaagaatttcaaaaccccaaaaaaattttggtggtctgttccc

SEQ ID NO: 176408 - DNA, 193 bp, Homo Sapiens
gagaagacgacagaagggagcaagtatttgaaaaacattgcctggtacacagtacctctcaaactgcaagaacgtaagaaatttttgttcactataaaattacagacctgtacaaactttttctaaaaagtaatgtattctcttaaaacaatggcttttctcttttgcaaaagcacagctactttttcctggc

SEQ ID NO: 176409 - DNA, 627 bp, Homo Sapiens
gggggcccaggctgcctctcatctccacccactgactgcagactgggctttgggctctggggcaaacttctcttcagccccatggatccttaacctggcagcccgttttggggtgctttcttgagcccccagttctctgtcccctagcactagactcagctgtattgtttttccttctggggagcccactccaactgcacagaagttctgggcctgacaggtagattccagctggaaggcaggcccgtgcctggttttgcgtctgttcccctgagggccatcgtcatcctggagcttcaatggggccttggctcctgtctgcctctcagtcagagtcagggctgacaaaggactcagcttccttagcatctcagcagaaaccttgctctgaagaccagagacagaagggacagaaacaggagtgcctcctgctgtgccaggccccatgggcagtgcaggcagatccctgaaggtcagcactcctgggtcttcatatgccaacagggggcgctcttgacactgtgccttcattttccagcccacagcctggggtctcagggatcttgaggggtagaacatgtccggggtgggggcttgggaaataaaccttgatctaattgggaaaac

SEQ ID NO: 176410 - DNA, 187 bp, Homo Sapiens
gcggccgcctactactactatacggctgcgagaagacgacagaagggaaagctcttccagctctaccccaggaacttcctgcgctagctgggccggggaggggcggcctgccctcatctcatttctattaaacgcctttgccagcgaagaatataaacatacaaagaaatagaaaaagtcgtatcga

SEQ ID NO: 176411 - DNA, 578 bp, Homo Sapiens
cttgctgcgacgcagcggtcggaagcggagcaaggtcgaggccgggttggcgccggagccggggccgcttggagctcgtgtggggtctccggtccaggcgcggcatgggcgtcctggccgcagcggcgcgctgcctggtccggggtgcggaccgaatgagcaagtggacgagcaagcggggcccgcgcagcttcaggggccgcaagggccggggcgccaagggcatcggcttcctcacctcgggctggaggttcgtgcagatcaaggagatggtcccggagttcgtcgtcccggatctgaccggcttcaagctcaagccctacgtgagctacctcgcccctgagagcgaggagacgcccctgacggccgcgcagctcttcagcgaagccgtggcgcctgccatcgaaaaggacttcaaggacggtaccttcgaccctgacaacctggaaaagtacggcttcgagcccacacaggagggaaagctcttccagctctaccccaggaacttcctgcgctagctgggcgggggaggggcggcctgccctcatctcatttctattaaacgccttttgccagct

SEQ ID NO: 176412 - DNA, 515 bp, Homo Sapiens
  misc_feature (83)..(101): n is a, c, g, or t
gctgggtaaaatctaattggatatttcagtttcattcacctaccctgtattggtgtttggtttaggtttgggttttggtgagnnnnnnnnnnnnnnnnnnngggaaagcaaggatcacacttccccctcccgtgttccttaatcccttttctaaaaagggggggaaaatccgggatgggattctaggggatgggtctgggtgtcagctggtgttttattggcacacctaaatcctggattatagggcttttcatttctccgcaaagcctttatttgggcagttaacgccaaatgtgttttccagaaagttagttattttctcctctttctttgcctttctttcctccctttttcccggtttggaccccaaacggttattggtccaaacatgactgggacagcagctttggtgttctggacccggtaatatggacagtctggctaatattggacagaaggtgcagtttgtggggtaaatagctcggtgatttccgctaatcaatcatattagcggg

SEQ ID NO: 176413 - DNA, 236 bp, Homo Sapiens
gagaagacgacagaaggggtaacctgcatggtgacagctactgaggggatggataggaaagcaggctgagtccctggggccagtggttaccaaagccaaggagagagcaaggggagcccagtgggcctggccatggactgctctggaattccgagtgtgaactttcagccaagaaggtagtgtgaaaatattactgtgaggttttaaaagtacacaaataacaattgttttttgtc

SEQ ID NO: 176414 - DNA, 129 bp, Homo Sapiens
gcggccgactactactactatacggctgcgagaagacgacagaagggcaagaaggagaagggcaagaagaaggaggctccccactgaagggccctggacagggctcattaaaccttcctctctgcctcc

SEQ ID NO: 176415 - DNA, 164 bp, Homo Sapiens
tatacggctgctagaagacgacagaaggggcaactaatccaggattggggtcagggaagtagtcagaaaataagtgatagacgtgacaaagcctgaagaatgaatgaaagtcagccaaagacgtggagaaggggaaagtaaagggcttcaagcaattgtataaa

SEQ ID NO: 176416 - DNA, 210 bp, Homo Sapiens
acggctgcgagaagacgacagaagggcggggagcctgccggctactgagtgctccaggaggacaaggctgacaagcaatccagggacaagatactcaccaggaccaggaaggggactctggaggaccggcttcccctgtgagcagcagagcagcacaataaatgaggccactgtgccaggctccagatggcctccctggcctgtctcctc

SEQ ID NO: 176417 - DNA, 141 bp, Homo Sapiens
gagaagacgacagaagggggcctctgatttaaagaaataaaaaggacttttctaaaatggatgtgtagtttattttgccttttgtaaagctcttttggctattgtaacttaacaaataaaatcataattgtgtgcatctcc

SEQ ID NO: 176418 - DNA, 170 bp, Homo Sapiens
gaaaatgggaaaatcttaatcgtctgtgcacacctcactaacatatccagatgaagggagtgaacattagtcgcagtgttcgttccagcaagaaatgggaccactgttttaatctaaaaggtgatgatagttcccactcttctcctatgttacccttctgtcgtcttctc

SEQ ID NO: 176419 - DNA, 229 bp, Homo Sapiens
gcggcgcctactactactatacggctgcgagaagacgacagaagggtgatggaaatggagagtggaggaccaggcctccagctgtctggcctcgcccttcacgccttaacactaagcccacctcccctgctctccttcccagcattgagcccttggttgcctgggcccaggctgggggttttcagtatttgtaagcatttcagcagaacaataaagcctttggactacc

SEQ ID NO: 176420 - DNA, 173 bp, Homo Sapiens
gagaagacgacagaagggtcagaacgcatggtgaatcttccaaaactggcatccgactgttacgtagcttccccagcgctgcttggaacacagccctctgggttgttttgttttcacagccaggtgtttcatgtagtgattgaatctcagcatcatgtccattaatcaatgag

SEQ ID NO: 176421 - DNA, 532 bp, Homo Sapiens
  misc_feature (308)..(363): n is a, c, g, or t
cagctcctcctgatcatactctggtacctggcctgtgcatcggcctcctgcttcatgtcaacctcctactcctgccagggaatgtggacacctggctccctggtgtccaaagaccctggcacctgggtgggtttgagctggacagaagcttagagacaaaggcttcaagaagcagtggctgcagggagtcacagaagggcaggacctgaacgctgtctgcttccctggaatccaagatgctgagtggaagtggaccctgggtggcccggccctgtctttttcaggaaaattacatcctcccatggagnnnnnnnnnnnnnnnnnnnnnnnnnnnnnnnnnnnnnnnnnnnnnnnnnnnnnnnnctgggcacccaggacccccaggtgcttgacagagtcaccccatggtggtatggctgaacaaggagcggcagacaactcagggagaaactcaggagtgcagtaccagggacacctcaggacagattctctggccaggcccttccctgacccaataaatcctgaagaggtg

SEQ ID NO: 176422 - DNA, 898 bp, Homo Sapiens
  misc_feature (674)..(729): n is a, c, g, or t
gggagctatggcgtggccagctcctacgtgctggcggatgccattgacaaaggcaagaaggctggagaggtgcccagccctgaagcaggccgcagcgccagggtgactgtggctgtggtggacacctttgtatggcaggctctagcctctgtggccattccgggcttcaccatcaaccgcgtgtgtgctgcctctctctatgtcctgggcactgccacccgctggcccctggctgtccgcaagtggaccaccaccgcgcttgggctgttgaccatccccatcattatccaccccattgacaggtcggtggatttcctcctggactccagcctgcgcaagctctacccaacagtggggaagcccagttcctcctgatcatactctggtacctggcctgtgcatcggcctcctgcttcatgtcaacctcctactcctgccagggaatgtggacacctggctcccctggggtccaaagaccctggcacctgggtggggttggagctggacaaaaagcttaaagacaaagggcttcaagaagcagtggctgcagggagtcacagaagggcaggacctgaacgctgtctgcttccctggaatccaagatgctgagtggaagtggaccctgggtggcccggccctgtctttttcaggaaaattacatcctcccatggagnnnnnnnnnnnnnnnnnnnnnnnnnnnnnnnnnnnnnnnnnnnnnnnnnnnnnnnnctgggcacccaggacccccaggtgcttgacagagtcaccccatggtggtatggctgaacaaggagcggcagacaactcagggagaaactcaggagtgcagtaccagggacacctcaggacagattctctggccaggcccttccctgacccaataaatcctgaagaggta

SEQ ID NO: 176423 - DNA, 337 bp, Homo Sapiens
  misc_feature (17)..(17): n is a, c, g, or t
  misc_feature (33)..(33): n is a, c, g, or t
  misc_feature (53)..(53): n is a, c, g, or t
  misc_feature (58)..(58): n is a, c, g, or t
  misc_feature (96)..(96): n is a, c, g, or t
aaaaaggaatgcaaaanaagtccccaggacctncccccgaggaaagcccaccnccccngtcccccggatgatgtggcaggacactcacccgggtgnccctggagctgggaactgagggacgcccacgtccttggccagcttaatggccttcccctcggcctcgttaagcatccctgtgacgctctcaacttcattctaagggtgccaagagactggttagtcaaagcctctagaaggggatcctcgttgaaaggagccctttttactcaaaacacatgggctagtacttgaggtgttcactgattgagaaaatacccgtgaggtatgggactctgat

SEQ ID NO: 176424 - DNA, 237 bp, Homo Sapiens
ctatacggtttgcgagaagacgacagaagggctctggaaaaggtccggaagcaaatcgagtccatatagctacattccacccttgtatcctgggtcttagagaccctatctcagacagtgaaagtgaaatggactgatttgcactcttggttctttggagccttgtggtggaatccccttttccccatcttcttctttcagatcattaatgagcagaataaaaagagtaaaatggtg

SEQ ID NO: 176425 - DNA, 1085 bp, Homo Sapiens
  misc_feature (1065)..(1065): n is a, c, g, or t
  misc_feature (1069)..(1069): n is a, c, g, or t
gagcgaggcctgggtggcgaattcggacgaggccccagcgggcgacgaccgaacgcccccgggaacaccgggccccgagctcggtcccgcgcccgaggatcctccacggggctagatggctgcgtcgggggcgggagcggaggtgagcgggcgctagggccgcgagcccccgccggcccttcctccagcgccctgcggaccccgcagaaggcgctcgcctccctagcccgcaaaaacatatcgatttttctcgctgtggcaacggggacgtcctgatagatcctctgctccaataggcaactccggccttccctgccctgacctggaacctctgggagggctgcagagtaagtgccgcctctgcgctccgacggaggcacgaggcctgtggagtaggtccctctgttccgacaggtgcgacacttggcgctccatgcttgcgggtgccgggaggcctggcctcccccagggccgccacctctgctggttgctctgtgctttcaccttaaagctctgccaagcagaggctcccgtgcaggaagagaagctgtcagcaagcacctcaaatttgccatgctggctggtggaagagtttgtggtagcagaagagtgctctccatgctctaatttccgggctaaaactacccctgagtgtggtcccacaggatatgtagagaaaatcacatgcagctcatctaagagaaatgagttcaaaagctgccgctcagctttgatggaacaacgcttattttggaagttcgaaggggctgtcgtgtgtgtggccctgatcttcgcttgtcttgtcatcattcgtcagcgacaattggacagaaaggctctggaaaaggtccggaagcaaatcgagtccatatagctacattccacccttgtatcctgggtcttagagaccctatctcagacagtgaaagtgaaatgggactgatttgcacttcttggttctttgggagccttgtgggggaatcccccttttcccccatcttcttccttcggatccttaatggagcgaataaaaagaagtaatgggaaacacccaccctacctctnagtnggtaaaaacccgcccc

SEQ ID NO: 176426 - DNA, 949 bp, Homo Sapiens
ggggacgcggaagactataagccccagcgggcgacgaccgaacgcccccgggaacaccgggccccgagctcggtcccgcgcccgaggatcctccacggggctagatggctgcgtcgggggcgggagcggaggtgagcgggcgctagggccgcgagcccccgccggcccttcctccagcgccctgcggaccccgcagaaggcgctcgcctccctagcccgcaaaaacatatcgatttttctcgctgtggcaacggggacgtcctgatagatcctctgctccaataggcaactccggccttccctgccctgacctggaacctctgggagggctgcagagtaagtgccgcctctgcgctccgacggaggcacgaggcctgtggagtaggtccctctgttccgacaggtgcgacacttggcgctccatgcttgcgggtgccgggaggcctggcctcccccagggccgccacctctgctggttgctctgtgctttcaccttaaagctctgccaagcagaggctcccgtgcaggaagagaagctgtcagcaagcacctcaaatttgccatgctggctggtggaagagtttgtggtagcagaagagtgctctccatgctctaatttccgggctaaaactaccccctgagtgtggtccccacaggatatgttaaagaaaatcacatgcagcctcatctaagaagaaatgagttcaaaagctgccgctcagctttgatggaacaacgcttattttggaagttcgaaggggctgtcctgtgtgtggccctgaacttcgcttgtcttggcatcattcggccgcgacaattggacagaaaggttctggaaaaggtcccggaaaccaaatccgagtcccatatagcttaccttcccccccctggtatccctggggccttaaaagaccccccattcccaaaacagtggaaaaccggaaatggt

SEQ ID NO: 176427 - DNA, 396 bp, Homo Sapiens
gggtccgcccagaggagtccacacagcaccacctccagaagggcctgggcccggggtccctgcaggcggcacccttttggtaaaagtttgtttccccggaaaatggggaaaatgtttcaagcccaggtgaggggggaagttaacactgaaatatgtattgtttttaaaaatcaaatgcacacgcatggaagctgcttgtccatgcactggttttgtcactggcgtcctggaatccgaccgtgttggggtgcaggcgctgtcagactccggctgatcctggctcgagcacacacatctaagggccaggctggttccgcatggtgatctccgtcttgtatgtctgaatgttggcctaaaataaagattactgttgtaaaataaatgttttcactgcgg

SEQ ID NO: 176428 - DNA, 112 bp, Homo Sapiens
tatacggctgcgagaagacgacagaagggaaggcaaggaggaaaactaaactacaatccttggttcagattgagttatgcaggaatatatcttcctgatcagtccccgtgcc

SEQ ID NO: 176429 - DNA, 117 bp, Homo Sapiens
gcctactactactatacggctgcgagaagacgacagaaggggatggggacggttgaaggtggagatcaaagcaacccaaagagcaagaaggagaagaagaaatccgacaagagaaaa

SEQ ID NO: 176430 - DNA, 156 bp, Homo Sapiens
gagaagacgacagaagggcagggcggggtcaaagcttcccaccctcccgggacaggggcgaaggcagaagggcgaccttgggcaggggtggcgagagaaggggcagaaagccgttagtcagggaccgggcaaaccagcccggacagcactgagcct

SEQ ID NO: 176431 - DNA, 831 bp, Homo Sapiens
  misc_feature (102)..(102): n is a, c, g, or t
agttattcaataacatttcccaaggtttgtttccttcatccaaacagggccaagggagtagttgccatcatcaataaatcttttcatctcagccgtatcccncaaagccgaaagtcataaaccaggaaagacaagagacgggcccaccaagccctatgtctgggtccttagaatatgcaacaaactgctacaaaggcttctacagttgattgtacttcagaagaaactgatacatctctcaaataatcacaagataattctggcagcaacagcccccttgacaccaagctggatgaatatgagtcttggatttctgaagtgaagacctccatggacaagttgggagatggaacccccctatcatcagctaggttcccaaggtggctcagcgttgaagtcgaactgctctctatacagcacttctcctaggccctctgggtagttgtatacttggtcagaaagttcgccgtgagataacggcccaaagagtcgggtaaagcgtcttctctttttcggcggaatttttaaagagggatgtggttaccttgagcagaaatacccaaggcggcctgggccataggctgcgggaacgacttgggggtaaaagcgcggcaccgacaccagctgtgtgcagcagtggcggcggcggccgaaggagaaatagaacagcgcaggcaaaagaagaaaggcgcgggctgggtgggaagaggattcggactcgtcacactgcagagcagcagagcgagaaaggatgagaagaggcagagaaggcgacggcagaagaaaaaaggaaaaactgcggccgcgatcagagcctgaaagtgtgagccc

SEQ ID NO: 176432 - DNA, 191 bp, Homo Sapiens
tcggccgcctactactactatacggctgcgagaagacgacagaaggggtggaccagatgttccagttcgcctccatcgatgtggcgggcaacctggactacaaggcgctcagctacgtgatcacccacggggaggagaaggaggagtgagacccagccgggtcaataaacctggacgcttggaccccgaat

SEQ ID NO: 176433 - DNA, 142 bp, Homo Sapiens
gcctactactactatacggctgcgagaagacgacagaagggatgcctgctgtaaacaagcagtatgtatggttgtaccaatgcctattggctgaacattatgctactttcagatattaaaatggtgttcctttgaatcgtgg

SEQ ID NO: 176434 - DNA, 320 bp, Homo Sapiens
gtaatcggggtcctcggccaatcccacaacgtggtggtaacccatggtggttgctgttttcctcccttctgctactggcaaaaggatctttgtggccaaggagctgctatagcctggggtggggtcatgccctcctctcccattgtccctctgccccatccaccagcagggaaaatgcagcagggatgccctggaggtggctgagcccctgtctagagagggaggcaagccctgttgacacaggtctttcctaaggctgcaaggtttaggctggtggcccaggaccatcatcctactgtaataaagatgattgtgaaata

SEQ ID NO: 176435 - DNA, 685 bp, Homo Sapiens
gaccacgcgtccgggattgcggtcatggacaaggaaggcaatgtcctgggtcattccagaattgctgggacaaaggctgttagagaaacgctagcatccagaatagtgctgtttgggacctcagctctgattcctgaagtcttcacctacttttttaaaaggacccagtatttcaggaaaaaaccagggtcattgtggattttgaaactgtcttgtactgtcctggcaatgggactgatgctgccattttcttatagtatatttccacagattggacagatacagtactgtagtcttgaagagaaaattcagtctccaacagaagaaacagaaatcttttatcacagaggggtgtaggcgtgagttttaggtgaatttatgtggttcctgcttgaaaaccttcccctctccaggttcggtttagagaactttgccacaggtcttctggggaccccagaggtgtctgtgctgacaaggcgacttcagattccatactgagatcgttcccaggctggcgtctctggggtttttaaggctggctggagaagacagtgggagggtgccccgtctgacacccctggggttgctgagggaacggttggagtggggatcggcctgcgaaaggatactgtgaaatcactaattaactaataaacctgtctcaagttgaggatttgaagaaagc

SEQ ID NO: 176436 - DNA, 173 bp, Homo Sapiens
gcggccgcctactactactatacggctgcgagaagacgacagaaggggtacccttgggacagagtatcccccgcaggcggaagtagctgagggcaagggtcccgatgagggtcccatggcctgctccctcaggaacagctccagcaccaataaagaggcatcttaccacccgt

SEQ ID NO: 176437 - DNA, 753 bp, Homo Sapiens
  misc_feature (558)..(558): n is a, c, g, or t
  misc_feature (692)..(713): n is a, c, g, or t
gttacataggttacgtcagcctactgtggctgttgagcaaagcatttctcctttctgggcctcatttgcactagatgggcctgtggtcccaaagtaggtcagtaggttggggttgctgacaccccttgggtgcagctttgggacagatgagtggctctgtcctgtcactgccctctccctgcctgggggctatgtgcactccagacccctgcccaggctcaggcccatgaggtatggagacaccctggcccccaggagctggaggcaccgcccactcccctggcattccagctttgcaggtgaccctcctctacccaaagctctgtccccctgctcccactccagaagaactgcggcacgtgcttcgggcagcctagccacaggctttgagcgcctgcattcctgggggctggagggtggggtgccaaaggccctgagcaaaagccagagctcctctcatcaaagcctttacaaggtgctgggcccagaggctttgccttgacagagtggcccagggtttcaagggaggaggaacctccccctacctaggacccttcnctgtggggggtctacagagtcagggacagaagggaagggacccacaggaagtcacagtggtgcccagggatgtgtcagcccccagccacggggacgcgggattcaagaatgaagtaaatacagtcacagccacnnnnnnnnnnnnnnnnnnnnnngtcgtatcgatgtcgagcgatcatgatgatgatgtcgacc

SEQ ID NO: 176438 - DNA, 190 bp, Homo Sapiens
gcctactactactatacggctgcgagaagacgacagaagggatgcaagctctccagaaggggtgtgatctctgagcagtggggagtggagtcaccactcgggacatagagggtggacagttcaggcctgtgtctgcctccttgggactgtggagtgggtgccctcagtaaagcgctttgttggaatggtc

SEQ ID NO: 176439 - DNA, 102 bp, Homo Sapiens
gagaagacgacagaagggccagccgaggatacaaaaacaaaccgtggagcctaccctcttattaaaaatattttggatgctgaaataaagaagtttacctac

SEQ ID NO: 176440 - DNA, 384 bp, Homo Sapiens
  misc_feature (27)..(27): n is a, c, g, or t
  misc_feature (88)..(88): n is a, c, g, or t
  misc_feature (101)..(101): n is a, c, g, or t
  misc_feature (106)..(106): n is a, c, g, or t
ggctgcaaaacctaccgtccctctctnccgccaaaccctcaaacctcaactctcaatgtcttgctgtcagtttctgtctcggcccccncacacacccccanccccnaacccaaccccacacccttcaccctctgtgtccctggtccttctgagggccactgcagatgactctcctttgaaatgagaaaaagaaaagaaagcaagaacagaaaacgaagccacaggaagggaagtagacattgtatgcttatggtttctcattatgaaggtgcagcttgtaggaggtttgtacggatgtgctttgaagttatgtatattacatataacaggaaaaaatattaaaataaacagtgctggtaagtatgaagctgacattctaaaatt

SEQ ID NO: 176441 - DNA, 188 bp, Homo Sapiens
tatacggctgcgagaagacgacagaagggatgagccaccgcgcctggcccatttcttctttttttgacccatacttaatgttgcagaaactattcttgtcataacattatctctcatgtacagtaattatatgtaaattaattgaagcaaatatggaaactttacaatagaaataaagataggcagac

SEQ ID NO: 176442 - DNA, 125 bp, Homo Sapiens
cgagaagacgacagaagggagaagaagataagatgttggaataattaagtaaagacaaagaagggaatagagaaaagatgtaaccagaggaggagaaagagattaaatgtatgtgaatgttttgc

SEQ ID NO: 176443 - DNA, 199 bp, Homo Sapiens
gcggcccctactactactatacggctgcgagaagacgacagaagggcaaggtccctgtcacctacttggaactgctcagctagctcaagccaagtccagcggccgcagtcttcacctctccacactcactttttatctggtgtttttacttctgcctgcgtttgctctctagccaataaaccgtccttgtgtgcgagcc

SEQ ID NO: 176444 - DNA, 1303 bp, Homo Sapiens
  misc_feature (60)..(60): n is a, c, g, or t
  misc_feature (99)..(99): n is a, c, g, or t
  misc_feature (248)..(248): n is a, c, g, or t
  misc_feature (269)..(269): n is a, c, g, or t
  misc_feature (300)..(382): n is a, c, g, or t
  misc_feature (385)..(385): n is a, c, g, or t
  misc_feature (390)..(390): n is a, c, g, or t
  misc_feature (392)..(392): n is a, c, g, or t
  misc_feature (396)..(396): n is a, c, g, or t
  misc_feature (403)..(405): n is a, c, g, or t
  misc_feature (410)..(414): n is a, c, g, or t
  misc_feature (416)..(417): n is a, c, g, or t
  misc_feature (420)..(421): n is a, c, g, or t
  misc_feature (425)..(443): n is a, c, g, or t
  misc_feature (445)..(448): n is a, c, g, or t
  misc_feature (453)..(464): n is a, c, g, or t
  misc_feature (469)..(471): n is a, c, g, or t
  misc_feature (473)..(474): n is a, c, g, or t
  misc_feature (476)..(587): n is a, c, g, or t
  misc_feature (1054)..(1054): n is a, c, g, or t
  misc_feature (1178)..(1178): n is a, c, g, or t
ctcgcgcgccgggctgcctctcccgggccgttgcgggtggcggcgggcggccgcctgtcncggccccgccgcctgttccccgcgcggggttcgtccgtncgtccggcgcttttggcgcccgccgcgcgcgcgtttcgtgcggtgggtgcgtgcgtggcgcgctctgcggtgcgcgggctgcgtctctggcggccttcgtctcgcggcggcgttcgcgcgccgtgtgctgcgtcggtctttctgcgtgnggcgccggccgtcgggggggnggcggttgtgtttggttgtcttgctggtgtnnnnnnnnnnnnnnnnnnnnnnnnnnnnnnnnnnnnnnnnnnnnnnnnnnnnnnnnnnnnnnnnnnnnnnnnnnnnnnnnnnnttnttttntngggntgtggtnnnttttnnnnntnnttnngggnnnnnnnnnnnnnnnnnnntnnnnttttnnnnnnnnnnnnttttnnntnntnnnnnnnnnnnnnnnnnnnnnnnnnnnnnnnnnnnnnnnnnnnnnnnnnnnnnnnnnnnnnnnnnnnnnnnnnnnnnnnnnnnnnnnnnnnnnnnnnnnnnnnnnnnnnnnngactcgcacacaaggacggtttattggctagagagcaaacgcaggcagaagtaaaaacaccagataaaaagtgagtgtggagaggtgaagactgcggccgctggacttggcttgagctgtgaggggtgggaggggaggatagcaccggaagatgctgctccgggcccaacaccagccctggccaggctctcccctcccaggggcagcgcccagtccccaggggctgccagagccctgtgtgccttgccgcattcccctgatgcagcttttggcaactgaaaggcagggctctcgctgagtgcacctggggcttcctgagcccatctgcggcggccccaccctggcctaggtgctgagtgcagctgctgcagacagcccctccctccttagtggagcctggagggtggggtgctcggggatgcaggcaggggcaggggctccagagccacaggtcagaagcagggctngggggaggggtggagccattcagcctcaggcaccctcacagctaggtgactaggggcagggacagaatggggtgaattctccccactctgaacaactgtgtcaccaacaaacaagttaagtggncagtgcgcccatcctctcctgcctaggccagaatgcgggggggatgggggcacctgcctagctgagcagttccaagtaggtgacagggaccttgcccttcttgttgcctctctcgccaatgagcc

SEQ ID NO: 176445 - DNA, 255 bp, Homo Sapiens
gagaagacgacagaaggggacggcaaaattggggttgacgaattctccactctggtggctgaaagctaagaagcactgactgcccctggtcttccacctctctgccctgaacacccaatctcggcccctctcgccaccctcctgcatttctgttcagttcgtttatgttattttttactcccccatcccctgtggccctctaatgacaccattcttctggaaaatgctggagaagcaataaaggttgtaccagtc

SEQ ID NO: 176446 - DNA, 146 bp, Homo Sapiens
gcctactactactatacggctgcgagaagacgacagaagggccaagagaaccacgaagatgccagttgccacattgttgagctgctgacccaacaccagccattgcctgtctctaaacatcttatgaaataaaaccagttttgtct

SEQ ID NO: 176447 - DNA, 290 bp, Homo Sapiens
tcctgaccctgcagggctcaggggtcagcagggacccactgccccatctccctctccccaccaagacagccccagaaggagcagccagctgggatgggaacccaaggctgtccacatctggcttttgtgggactcagaaagggaagcagaactgagggctgggatattcctcatggtggcagcgctcatagcgaaagcctactgtaatatgcacccatctcatccacgtagtaaagtgaacttaaaaattcaatcaaatgaacaattaaataaacacctgtgtgtttaac

SEQ ID NO: 176448 - DNA, 746 bp, Homo Sapiens
  misc_feature (196)..(346): n is a, c, g, or t
  misc_feature (355)..(368): n is a, c, g, or t
  misc_feature (382)..(505): n is a, c, g, or t
  misc_feature (510)..(572): n is a, c, g, or t
  misc_feature (589)..(597): n is a, c, g, or t
gcctactactactatacggctgcgagaagacgacagaaggggagacgctctattttttcacagttaaatgacagttgtagattgatacgcagttgtgcatgggaaggggaaacgcacagctttatttactgtaaagtggaatttcaggaaggcttgtgtgaaccgttgcgcataaataaaccctttctaccgggcnnnnnnnnnnnnnnnnnnnnnnnnnnnnnnnnnnnnnnnnnnnnnnnnnnnnnnnnnnnnnnnnnnnnnnnnnnnnnnnnnnnnnnnnnnnnnnnnnnnnnnnnnnnnnnnnnnnnnnnnnnnnnnnnnnnnnnnnnnnnnnnnnnnnnnnttttggggnnnnnnnnnnnnnnaaaaaatttttaannnnnnnnnnnnnnnnnnnnnnnnnnnnnnnnnnnnnnnnnnnnnnnnnnnnnnnnnnnnnnnnnnnnnnnnnnnnnnnnnnnnnnnnnnnnnnnnnnnnnnnnnnnnnnnnnnnnnnnnnnnnggttnnnnnnnnnnnnnnnnnnnnnnnnnnnnnnnnnnnnnnnnnnnnnnnnnnnnnnnnnnnnnnnttttaaataaaatttannnnnnnnngggccttttttgaagaaagggggaaaatcaataaaaattccccccaaatggaaacccttccaaaggggggttgataaccttaatcccccagggaattcacaccttgggccccttgggaaaaaaatttccccccggggaaaaaagggggg

SEQ ID NO: 176449 - DNA, 126 bp, Homo Sapiens
gagaagacgacagaaggggcttggatttcgtgtgccgctgccacccgcccacccgccttgtgagatggaattgtaataaaccacgccatgaggacaccgccgcccgcctcggcgcttcctccaccg

SEQ ID NO: 176450 - DNA, 121 bp, Homo Sapiens
gctactactactatacggctgcgagaagacgacagaagggtaaacaagaaattaatagaaatggctacctacagaatggagatagtgtgcaagggagtaggagtaagaatgagatttctca

SEQ ID NO: 176451 - DNA, 170 bp, Homo Sapiens
cggctgcgagaagacgacagaagggactgtttcacattagagaaaattcttggcttgagatagatgaatgcaaactgtgtttgcctttacttacattctaaaaatacagatttatgaatccataacagagtgacaaatgactcgaatttcctgtatataaaaacattcac

SEQ ID NO: 176452 - DNA, 189 bp, Homo Sapiens
cggctgcgagaagacgacagaagggagagctgggcctgtcttggtcacccctgggtcctcagagcccagcacgtagatgggctctccactgatgttcgtcgaatgaatacatgaaaatatcttgtatctctgtattcccaccacccagagcaaactgtagccctgatccaaatgaattgctgagccccc

SEQ ID NO: 176453 - DNA, 268 bp, Homo Sapiens
gagaagacgacagaaggggaaaagggctgtgatactacaaataaatttaaaaaagcatcaccaaagaaaactagacaaagaacacaaaaaggctccaacatttgaacgtgctcaaacaaataactggaaaagatttttctgaatggtgaatattgtgccaggtattgtcaagaggtcaggaaatggccactcccattcactattggaggaagtgaaaaatcaacaccaactttctatggtgatttggcaataaataccataagccatt

SEQ ID NO: 176454 - DNA, 175 bp, Homo Sapiens
gcctactactactatacggctgcgagaagacgacagaaggggactatggaagacagcaggagctcatttcctctgcacattttggctgttagacctgtgtgtgtgtttaaaaaaagagaagtcagtgctcactttttgtatttaaatattaaaaatgattccaactggacacaag

SEQ ID NO: 176455 - DNA, 1346 bp, Homo Sapiens
  misc_feature (1098)..(1098): n is a, c, g, or t
  misc_feature (1146)..(1146): n is a, c, g, or t
  misc_feature (1180)..(1180): n is a, c, g, or t
aaagaatggagttgttggggcgggacatgcacacaatgtgaaacagacaaaatgcattacacctgtagtgtaaagtggccactatgaatccctatgtatgagaggagggaggcaggctgcagcttcagccacagaatggggactatggaagacagcaggagctcatttcctctgcacattttggctgttagacctgtgtgtgtgtttaaaaaaagagaagtcagtgctcactttttgtatttaaatattaaaaatgattccaactgaaaaccacggcctcgcagaacgcacaccgaaccggaaacggggcgggaaaggtatgcgcaagccgagcccgaagaacggagcggcggcggaccgggagcagcttgttgctgggccgcctccgccctccagcagcgcctttctagacgcctcgcgttggcgggcccgggccgcacgacgggaagatcgaaaagtgccctattcatgtgtttccgcgcgcaggcgccggggtcggtgcctccagcggagtggggcattgctcccacggtcgagaacgccacggggcgctgcgtccgcggcggctcgccgaccaccgtccccccgaggggaagtgttgggcgggtcgcgctgatcggggagccgtgtggagaggccggcaggcaccgcgccgcggctggccgcgactgcgcggcactacgcgccccgggtccgcggtggattgccggagcgcaacgaggacttggcagcgaattcttccttaccgccgatatatcgcggccaccaccggggaggagccctcggcggaacagggcggcgacggggacgaacacggcagccgactctcgccccgccgggcgcgtgtgtaggacgtcctccggcgtcccccgttcgcccgatgaataattccgacacccgccgccgttgcaacagccacaaagccgctcaccatgaagcaccggcccgggtgtaccaaggctgggtccgaagggctcctcgtacgaccgagagggtgtgaggcgcgtgatgacgtgcctccggcacaggtacatcttgacacccgtaatgcggcgtcgccacgaaagagtgcgtgctcggcgcactcggccccccccnctacgccaggccgtcaacagcaacatagcgcgcgtactatgtgttagngcgcggtgagatgagagagtgcgccgatccgctntggcgcactagccactactagtatgggtgcgaccgcagtccgagccgtggcgtgatgtatacatacgggacgatggcaccgccatgctgcgctctcctgtcgccgcgcacgcctacgtaggctcacagacttgcccatgcatgtctccgtgctactctctatcggc

SEQ ID NO: 176456 - DNA, 224 bp, Homo Sapiens
gagaagacgacagaagggaagcagctctacacctttggccgcattgtgatctacatcgaccggggagtggtctttgtccagggcgagaagacgtgggtgcccacctcactgcagagcctgatcgacatggccaagtgaactgtggcaggtccagaaccagtcagagacttgcccctaagagggatgtactgtaaataaacagtatttttagatcacaaagaaag

SEQ ID NO: 176457 - DNA, 167 bp, Homo Sapiens
atacggctgcgagaagacgacagaagggtggagagggcctctcatgcaggcatgtgtgagcagctgcaggtgtgtgagcaaatgtgcatcactggggaacaggtgtctgtggatgagggaggaagtgagggtgagggtgtttgtggacatagggatgtgtgtttttt

SEQ ID NO: 176458 - DNA, 200 bp, Homo Sapiens
gagaagacgacagaagggacttggtgttgcttggaaggcatccatacctgcattttgcattcttcgtatgtaatcatattgccaaagacaaactatttcatcatttattgtaaataacacttttccccagacctaccataaagtttctgtgatgtattgtcttccagttgcaataaaaattactgagttgcatcaattgt

SEQ ID NO: 176459 - DNA, 218 bp, Homo Sapiens
gagaagacgacagaaggggcttttacactgaggaccagaaaataaacaggagatggataccagggaactactccaggcaaagataaaagcatgcacaacagccccagtgcatgaaaagcactggagtggctagagcgtagtaagcaagagaaaaaggatgtcaagatgagactagagccagatccttcaaaaccccataagccatgttcagactcatt

SEQ ID NO: 176460 - DNA, 456 bp, Homo Sapiens
gggtgctgatttggacccgtttctctttttaaactgcacatcataacagggcttcatgtcgagcatgattttaatcataaatgcacttctgaggtgcaaggattgagctcagagctgctctgttgtggcaaaacccaaagtgctgtgatgtgtggctgtgacaagcctggagcgggtcctgtgagcgccgcctctgtctcctgcttccccactgaacgcctgctgaatgtgccgctgactcagctgtgctgctttcagccctcctgtgaggggcggtcccagtgcacagatgtttttcaagttcctcagtttgtactgaaattagggattcatcagggcaggaagcaggcaggcctctcagaagggagaggaggcctccaaatctattgagtccccacagtttgctcaagcccaggcaaatttctgtgattaaaatgaattcatcagttccaaaaa

SEQ ID NO: 176461 - DNA, 410 bp, Homo Sapiens
ccccggtccctggtgtgccttggtgtcatcatcttgctgtctgccttctccggacctggtgtcaggggtggtcctatgcccaagctggctgaccggaagctgtgtgcggaccaggagtgcagccaccctaatctctcatggctgtggcccttcaggactacatggcccccgactgccgattcctgaccattcaccggggccaagtggtgttcagggagattactatggagatcatgctgctcgcctgggctatttccccagtagcattgtccgagaggaccagaccctgaaacctggcaaagtcgatgtgaagacagacaaatgggatttctactgccagtgagctcagcctaccgctggccctgccgtttcccctccttgggtttatgcaaatacaatcagcccagtac

SEQ ID NO: 176462 - DNA, 130 bp, Homo Sapiens
gcggcgcctactactactatacggctgtgagaagacgacagaagggcctcctgtccctacaaggggcatgtggacagcagggacctgcgctaccgtctgtggtctcaataaagaaaccgaccacatggat

SEQ ID NO: 176463 - DNA, 439 bp, Homo Sapiens
  misc_feature (13)..(13): n is a, c, g, or t
  misc_feature (26)..(26): n is a, c, g, or t
  misc_feature (385)..(385): n is a, c, g, or t
cctgcaaactcgnagcccccaggcgnattgtggccagtggaagggaaggatgtttctggcagggggacttgtgtgggccacggctgtgcggctgcggcgttgagcacggcctcactgtccacctgtcccctaggcctccagaggaagaagtccaagttccgcttgtccaagatctggtcaccaaaaagcaaaagcagcccctcccagtagtagccagtagggccgtggctcggcccggacctggcatccggacttggactcggggccatgggcttggcccggaaccggaacccggacttgtactccgggccgtggctcggcccggacccggcattcggacttggactcgggaagggcctcctgtccctacaaggggcatgtggancagcagggacctgcgctaccgtctgtggtctcaataaagaaaccgaccacatgg

SEQ ID NO: 176464 - DNA, 994 bp, Homo Sapiens
  misc_feature (404)..(413): n is a, c, g, or t
ggagtccacaagatgggaagcaagtccacaagatgggaagcgtgctctatacagaagggagggcctgtgcacaggctcaggtgtcagtaagccagaaatccagggacagagtcaggatggctggagcatggactgcggggggaacagagaagggggtggagcaaaaggttgggaccatgtgaccagggaagatgctggatggaggattctgaacctcatttgtggacggtcaggagtcaacaaagggaggagagaggactcactggtcaagagtgtcggctgtgacacaagggccatcatccctgaatgcccaccatgtgccccgcactgtgctgatgatgataataataactacgcccaccccactttcacacctccacccgttatatccttgtccagcccgnnnnnnnnnntcccagaacgctttctaagacccattccgggttgggccgcgcggggcccccgttcaacgtcaaactgaaaccctggctccacaccccttggattccccagagggagcaccccgggggctcaatggaccatcaggcggcctctggcgattctcttccagcgcgaagtaaaacgaaacccccaccccgcggggggcggcttacccctggggagggcgggcttcttttggacaccaataagctcgctcggccattggtgcgcctccctctgcgacggcgcaacgtttaaccgggggcatcctctctcacagcgccgtggcgcgttgctcgagatgcgaacgccctccgggctattcctcgattttccgcggcgccccgcgcctttcgggcctagtccgcttggcgccgttcactcggggccccggagctccaggcccccgcgcctgctccccgcactaacctttagttaatcccccttctccccacatccgggtgatcgtaatcgcaactccggcgagagttgtgcgccgccgcggtcgtcacccaatccgtcttgtgccgctcctcgtgtgactaaccgctaa

SEQ ID NO: 176465 - DNA, 400 bp, Homo Sapiens
ccccggaacttcaagcccacggacagcaagctgggcgctcgctgagcggcctgcaggggctgcccgaggtgcaccgctgcggccacggcatcgtgggcaccatcgtcaaggcacgggacaagctctaccatcccgagtgcttcatgtgcagtgactgcggcctgaacctcaagcagcgtggttacttctttctggacgagcggctctactgtgagagcccacacaaggcgcgcgtgaaagcccccgagggctacgacgtggtggcggtgtaccccaatgccaaggtggaactcgtctgagctgggaccctgctcccacgcctgcttcttaaggtccctgctcggccggtgtaaatatgtttcaccctgtccctctaataaagctcctctgctccacctcg

SEQ ID NO: 176466 - DNA, 273 bp, Homo Sapiens
gcctactactactatacggctgcgagaagacgacagaagggagagtctgggaccgaagagcaagaattccatgtggacttggagttcctgaccattcagcagtcattcatttcagttaaaggtagacttcgctctcgtgaaaatgtgcgtgtgagtgagagtatatgaggaacctcaagaaagagagaaagataactttttaaaaattccctggaagatattggggtaggctaatttaaaaatcaataaaaagtcgtatcgatgtcgagcgat

SEQ ID NO: 176467 - DNA, 149 bp, Homo Sapiens
cggctgcgagaagacgacagaagggtgaactggtagaatggagagttcaggtccctacagtgctgctttttctcagagtcaagaattgtgaaaaagttacagggaattggtttgtcaagactgagcccattcaacaggaatggggtacc

SEQ ID NO: 176468 - DNA, 243 bp, Homo Sapiens
  misc_feature (187)..(203): n is a, c, g, or t
cggctgcgagaagacgacagaaggggtgaattagaaaaaccaaccaaggccttacttaattagcacaatcccactgtggttacacatgagcaacaagtgtgagcatcactctgaatactcaattaactgattttctgagctggaaattgagaggaaaaaaactacctaactccatttctgcccgtcnnnnnnnnnnnnnnnnngtcgtatcgatgtcgagcgatcatgatgatgatgtcgacc

SEQ ID NO: 176469 - DNA, 347 bp, Homo Sapiens
cggctgcgagaagacgacagaagggcacggaacagtacaatattcaacctaaagagacaaaaatacagaagggcacggaacagtacaatattcaacctaaagagacaaaaatacagaagggcacggaacagtacaatattcaacctaaagagacaaaaatacagaagggcacggaacagtacaatattcaacctaaagagacaaaaatacagaagggcacggaacagtacaatattcaacctaaagagaaaaaaatacagaagggcacggaacagtacaatattcaacctaaagagacaagaatacagaagggcacggaacagtacaatattcaaccctaaagagac

SEQ ID NO: 176470 - DNA, 182 bp, Homo Sapiens
cggctgcgagaagacgacagaagggccaaagaagaatccacaacacttagtgacaaagggacaaagagaaggagctgctgactcctaaagctttcctaaagcttcatgtttaagaaagtaaatttggaaaagagacagtgttgagagaaaggatattttgaatttgaggttgagtatgaggt

SEQ ID NO: 176471 - DNA, 112 bp, Homo Sapiens
gcggccgcctactactactatacggctgcgagaagacgacagaagggggactatgagaatcgaacccatccctgagaatccaaaattctccgtgccacctatcacaccccgg

SEQ ID NO: 176472 - DNA, 229 bp, Homo Sapiens
tatacggctgctagaagacgacagaaggtggcttgggggtggatatctttgggttgctggaaaaggtgtgggaaggttcaggatggtgggagggactgaggtccctgaggtgaagaggcccttggtcctgacgggtttgacccgtgcctggacccttggagcagtgttgtgtgaacttgcctagaactctgccttctccgttgtcaataaagcctccccctcatgacct

SEQ ID NO: 176473 - DNA, 336 bp, Homo Sapiens
attctctgtccagcagtcatgaaccccttcacctccatgacctgatcatatagtttgataggcatatgattgtgggtgggggtggtggtggaagcagccgcaggagcaagggcccctcccacatacacaggaggagtatttcatttctccttaatgagagctctggccctaacccctcagcactgtctccagataggaacatgcacaaagcagttaattaggcagcctggagaaaaccagagatccagtacagaaaggaaaggatatttattgattaacagaagttgtctttttaaaagtgtttatttttggcaataaagagcacaacataatctc

SEQ ID NO: 176474 - DNA, 422 bp, Homo Sapiens
cttccgtcctcagcgggcagggaacacctctggcttgtagcaagggacggctcagtggctgcaccgacggtcctggaaatctcacatggtgggcactgcagcgttggaacgtgagcctcggatttcctggcccctctactgtaaatgtgccttagcctaagcctcccatcctgtgttagcgttgcctggtgcggggcagggcctaacaaggaaacctgggccctccaagccaggttgaggtctggtaacagaatgccaggaagggggcctggaagaccacctgccccggcccctctcctgcaggggccccacacaggcatgagggatggcccggccaaagtctaggcagaagcctcctataacaaagggtggtgtggcctgggcattggagtcaataaattatggtcagaaaaccaaaatat

SEQ ID NO: 176475 - DNA, 115 bp, Homo Sapiens
gcctactactactatacggctgcgagaagacgacagaagggtaggttagatgctattaagaaggcacttaatagtacatcatgtaagatggcaactgtattaaagaaaaatccgc

SEQ ID NO: 176476 - DNA, 1020 bp, Homo Sapiens
  misc_feature (925)..(925): n is a, c, g, or t
  misc_feature (975)..(975): n is a, c, g, or t
gggaaccggaagcctcgaggtttagtcccgcccccctctcctcgctgcttaggctccgcggcctccaagctgtagctatgacggcgcgcgggactccgagccgcttcttggccagcgttctccacaacggactgggtcgctatgtgcagcagctgcagcgtctgagcttcagcgtcagccgcgacggcgcctcgtctcgcggcgccagggagttcgtggagcgggaggtgatcgacttcgcccgacggaatccaggggtcgtaatatatgtaaactcgcgtccgtgctgcgtgcccagagtagtggccgaataccttaacggggctgtgcgcgaggagagcatccactgcaagtcggtcgaggagatctcgacgctggtgcagaagctggccgaccagtcgggcttggacgtgatccgcatccgcaagcccttccacaccgacaaccctagcatccagggccagtggcaccccttcaccaacaagccgaccacgttccgcgggctacgcccccgagaggttcaggatcctgccccagcccaggtgcaagcacagtgaagagttgccccaccaactgcagccccaggctttggactgttactccggtaaaggtggttcttcccctttgggattccaagcccaggcaaatggaacccatcaatgggcaagttgacagaggttctgcttgggataatgaagagctgcctgtttctttccagtgcctgcttctgggggcagtgaccttgtgaaccactcatttttatgcaagtggcatccctaaaacctgagatgaggaagacttcaagggttttacaggaccctttgttttttaaatccaaattgataataatgatctcaaaacacagtgagaggtctgaaagctggcttctgaaaaatccctgatgtcttattggaacaaccactgnagctaccgaaaactctgctgggaatggcctaggcaacttaatatctgggngggaataccgaatttataaaacagggtaaataaacttattcccag

SEQ ID NO: 176477 - DNA, 537 bp, Homo Sapiens
ggtccgcgggctacgcccccgagaggttcaggatcctgccccagcccaggtacaagcacagtgaagagttgccccaccaactgcagccccaggctttggactgttactccggtaaaggtggttcttcccctttgggattccaagcccaggcaattggaacccatcaatgggcaagttgacagaggttctgcttgggataatgaagagctgcctgtttctttccagtgcctgcttctgggggcagtgaccttgtgaaccactcatttttatgcaagtggcatccctaaaacctgagatgaggaagacttcaagggttttacaggacccttgtttttttaaatccaaattgataataatgatctcaaaacacagtgagaggtctgaaggctggcttctgaagaatccctgatgtcttattggaacaaccactgagctacggagagctctgctgtgatgggctaggcactttatatctgtgtgaatacagatttataaaacaggttaataaacttatccaaggtcacatttcagaaaaac

SEQ ID NO: 176478 - DNA, 177 bp, Homo Sapiens
gcctactactactatacggctgcgagaagacgacagaagggacataaatgggcctggcagcctcggctctttgcggctgctggcaggactgagctgtccgggttctccccacacttccagcacagctgtgctctgtgtcctgcctcggcgctctcgcaaatgaagctgcaggccaag

SEQ ID NO: 176479 - DNA, 103 bp, Homo Sapiens
gcctactactactactatacggctgcgagaagacgacagaagggccctttagtttttatgataatttttaaaataggaacttttgataagaccttctagaagc

SEQ ID NO: 176480 - DNA, 649 bp, Homo Sapiens
tttccacctgatggggcaactgtgagcattaaacctgaaccagaagatcgagagcctaactttgcaaccattggtctgcaggacatcactttagatgatgtgaacgagataattggggagagacatgtcccagatttctgtttcccaaggagcaggggtgagcaggcaggctcccctcccgagtcctgagtccctggatttaggaagatctgatgggctctaacagtgcttactgcagccttgtgtccaccaccaacttctcagcatgtttctctccttggaccttgggtttccaactctgcagccttcaggtctggggccaggagtgggacccaccatttgtggggaaagtagcattcctccacctcaggccttgggtagatttggcaaaagaacaggagcagcataggctgtttgagctttggggaaatgaactttgctttttatatttaactaggatacttttatatgatgggtgctttgagtgtgaatgcagcaggctctcttgtttccgaggtgctgcttttgcaggtgacctggttacttagctaggattggtgatttgtactgctttatggtcatttgaagggccctttagtttttatgataatttttaaaataggaacttttgataagaccttctagaagc

SEQ ID NO: 176481 - DNA, 191 bp, Homo Sapiens
aatgttgcctgcaaaaattacactggttagtgtctctggagccctaaaagataccaccttttacacaaagctgaaagcagtagactttgggctgcagtccagtagtttcttttgtcaccgttttctgtctctttcctctttctctgctccgttttctctccgcccttctgtcgtcttctcgcagccgtata

SEQ ID NO: 176482 - DNA, 134 bp, Homo Sapiens
gcctactactactatacggctgcgagaagacgacagaaggggggaaaatatatctgagaaataatggctgaaaaatttcaaatttgatgaaaaatataaatccacagatcaaaaaagctcaataagcccctagc

SEQ ID NO: 176483 - DNA, 122 bp, Homo Sapiens
tatacggctgcgagaagacgacagaagggtgttcataaccatgaagtgctatgtagactctaaataaggaagcagtagatacctgtgtacccagatggaagggagcccagggcatagtaact

SEQ ID NO: 176484 - DNA, 1015 bp, Homo Sapiens
  misc_feature (582)..(590): n is a, c, g, or t
gggaaaaaggcgtgccatttttgatggacaggcaactgtgtttccgtttgaaaactgcactcctcgtaattcccatttgtcaaaattgctcccccatactggctctcccccttgtgagctattttttggggggagtgggtgggatgggaaaatatttatccaatcacagagcagggaggcccagttttcaaagagaattaggagcaaacatttatctcccccactggaaggaaatacagggaccctgaccagggttaactagtgcaaattagggattagggactatttaaagtccctgtaccccatccctaggctgggatctttgggtgtggggaactgagtcaaagatggggtgtaaggtgctattttgaagggaaagttggtggggataccccaaagcccaccagaagagtagaatggttcccccaaaaccatctggagtgattggtgaggggagtgacactggggagatgggaatacaggtaaggatggaaggtcatgtgcaaatcctgggcttacccacccatccgacccctatcatttttctggctatttggtctagtctgggagaaaccatcaggnnnnnnnnncagggagaaagtagattcccttctccatcccatatggagttcttccctcctggcccccaaatctggtctagcccagaataggccatatgtagaggcagaaagaggtgtgatctgcttacctcttttgccttggaagaatctggagctcactggatttgggggtcaagatagggccaatatttcctgccctggactgggaaagtgctcagccacagaacagaggggcagaggggcaaccctcccccaaacctccttgacctggcttgggagaggccatctccgaagtccaggaatatggggaggaacatggaagatccaaaggcatggaagctgaggaaggtgtcttgatacaagggaaacagggacgtagagacccacgctggggaaggatgaaacccaaagccacactcccaggtgggcggggt

SEQ ID NO: 176485 - DNA, 349 bp, Homo Sapiens
  misc_feature (16)..(16): n is a, c, g, or t
  misc_feature (241)..(263): n is a, c, g, or t
tgtttacctgttgttncccccccggcctataatgtaagcctcccatgtgggcaggggcctttgtttttttcacctgatatatcacaagtgccctaaaacagtgcctgacacgcagaagggacccagtaaatatgtattgaatggttttgatttgaactgaattgaactatgtatccatgatgcaagtaaagaaatgtaatccatatactttcctacctacattttatatgtgaggaaatannnnnnnnnnnnnnnnnnnnnnntgtgcaagtggaccaatatttgagaatcgtatacctttgagaatcatagctgatatactttaagataaaaaaatatttctgtgtta

SEQ ID NO: 176486 - DNA, 358 bp, Homo Sapiens
ctttccttaactggctacatgcttagaaactgcactggtcaaacttgattttctttttaaagcctcaaaacatttttattgtcaggaaagcttttcagtggccagggatcagtctcatggccgtagaagcagccaaattcctctgcctttgccttcccttcaggagtcacatgctaaggcatccttgggcatttggaaaaggccgcttggggtgagagtgctctaggccactctgcaatgtccctgggcccgatgagtaacaaatgcaccccgggacccagagaagtggaaagacatgaaagggatttggaaacagatcgtaaaaataacctgtatgaaaatcacacagacaagaaaa

SEQ ID NO: 176487 - DNA, 179 bp, Homo Sapiens
tatacggctgcgagaagacgacagaaggggtggaataagaaacttgatcagagcagttaaaatccatgatccttctggggtgaatggcagaggaaactgaccagaggcagacaaaggtcttgttgagtagtttaaatggcccatctgaagccaaagaccattaaaatgatcctggtacc

SEQ ID NO: 176488 - DNA, 147 bp, Homo Sapiens
gagaagacgacagaagggaagaaatacccagacaaaatctttgggacgaatgaaaatttgtaactcttctggatttaattatctgaaaatacagttctttccctcatgcttatgtagatataaaaataaaattcataatgcaaagcc

SEQ ID NO: 176489 - DNA, 361 bp, Homo Sapiens
ctgtcccgccccccagggttgcgctgtggctctggcttctgatcgctgctccatccacctgcagcttcaggggctggtggaccctgcacgggagctgggcaagctgcaagccaagcgagttgaggcccagcggcaggcccagcgtctgcgggaacgccgtgctgcctcgggctatcctgtcaaggtgccgctcgaagtccaggaggcagatgaagccaagctccaacagacagaagcagagctcaggaaggtggatgaggccatcgccctattccagaagatgctgtgatccaccacccagcttcacccctcacccccagcggctcaccatggggatggcagcaataaaatattttcccac

SEQ ID NO: 176490 - DNA, 243 bp, Homo Sapiens
tatacggctgcgagaagacgacagaagggatgggtaatattgatccagatttctatattacccatcccttttgttctttctgagctgcagcagaagatttctagttgattcacaggaacaagcagggttagtctaaaatgtaggcaaaaactttaaaacaactagtgaatatagaatttaataacaaatatatgataagttttgaaacaagatttctctctctctgcagtcctcatgtttgtt

SEQ ID NO: 176491 - DNA, 881 bp, Homo Sapiens
ggggattccgggcggtcggagccgccgggagctgtagttctcccgcggctcagagaagtaggcagagagcggacctggcggccgggcagcatggcggggctggagctcttgtcggaccagggctagcgggtggacgggcggcgcgccggggagctgcgcaagatccaggcgcggatgggcgtgttcgcgcaggctgacggctcggcctacattgagcagggcaacaccaaggcactggctggggtctacggcccgcacgagatccggggctcccgggctcgagccctgccggacagggccctagtgaactgtcaatatagttcagcgaccttcagcacaggtgagcgcaagcgacggccacatggggaccgtaagtcctgtgagatgggcctgcagctccgccagactttcgaagcagccatcctcacacagctgcacccacgctcccagattgatatctatgtgcaggtgctacaggcagatggtgggacctatgcagcttgtgtgaatgcagccacgctggcagtgctggatgccgggatacccatgagagactttgtgtgtgcgtgctcagctggcttcgtggacggcacagccctggcggacctcagccatgtggaggaagcagctggtggcccccagctggccctggccctgctgccagcctcaggacagattgcgctgcttgagatggatgcccggctgcacgaggaccacctggagcgggtgttggaggctgctgcccaggctgcccgagatgtgcacaccctcttagatcgagtggtccggcagcatgtgcgtgaggcctctatcttgctgggggactgaccacccagccacccatgtccagaataaaaccctcctctgcccacgaacaccac

SEQ ID NO: 176492 - DNA, 245 bp, Homo Sapiens
gtcgacccattggaataatgaaataacaaagtacttttagtaacaaatttcatccacatatcataaataaccacaggctattttgactccttatagtcactgttggaggcccatgatattgtggcatcaaagtgttatgattcacctccatcaagcccagaaatgaataattcttctatcaataatcagttattaccagtagatgccattcgtattcttggtattcacaaaagagctggggaacc

SEQ ID NO: 176493 - DNA, 449 bp, Homo Sapiens
gcggccgcctactactactaaattcgcggccgcgtcgaccaagcatagaaaatggacccaaggacaaacatttacttgggagggaaataacacaaagaagcatatcaatcgatgtctttgtcagtcattctgtgaccaaccaggagcggggatggctttgctctagattctggcagccagtagaaaccatctctagaaaccatctcatctttatccataatggtaatagagcacagtgttctctagacatgtagatctgccacatggcaaagctatatcatgatttcttcttgcagagtgggcagtttcagcaggacctgtaagtttgcttaggttttctgaagatatcggcattaaagacttacacattccttttgtcctcctaacgtatttcgtaaccacactctcaagtcgacgcggccgcgaatttagtagtagtaggcggccgc

SEQ ID NO: 176494 - DNA, 565 bp, Homo Sapiens
ggtcgactactactactaaattcgcggccgcgtcgacacatagtgagacactgtctctaccaaaaaaaggaaggaagggacacatatcaaactgaaacaaaattagaaatgtaattatgttctaagtgcctccaagttcaaaacttattggaatgttgagagtgtggttacgaaatacgttaggaggacaaaaggaatgtgtaagtctttaatgccgatatcttcagaaaacctaagcaaacttacaggtcctgctgaaactgcccactctgcaagaagaaatcatgatatagctttgccatgtggcagatctacatgtctagagaacactgtgctctattaccattatggataaagatgagatggtttctagagatggtttctactggctgccagaatctagagcaaagccatccccgctcctggttggtcacagaatgactgacaaagacatcgattgatatgcttctttgtgttatttccctcccaagtaaatgtttgtccttgggtccattttctatgcttggtcgacgcggccgcgaatttagtagtagtaggcggccgc

SEQ ID NO: 176495 - DNA, 401 bp, Homo Sapiens
ggtcgactactactactaaattcgcggccggatcgaccaagcatagaaaatggacccaaggacaaacatttacttgggagggaaataacacaaagaagcatatcaatcgatgtctttgtcagtcattctgtgaccaaccaggagcggggatggctttgctctagattctggcagccagtagaaaccatctctagaaaccatctcatctttatccataatggtaatagagcacagtgttctctagacatgtagatctgccacatggcaaagctatatcatgatttcttcttgcagagtgggcagtttcagcaggacctgtaagtttgcttaggttttctgaagatatcggcattaaagacttacagtcgacgcggccgcgaatttagtagtagtagtcgacc

SEQ ID NO: 176496 - DNA, 397 bp, Homo Sapiens
ggagggaaataacacaaagaagcatatcaatcgatgtctttgtcagtcattctgtgaccaaccaggagcggggatggctttgctctagattctggcagccagtagaaaccatctctagaaaccatctcatctttatccataatggtaatagagcacagtgttctctagacatgtagatctgccacatggcaaagctatatcatgatttcttcttgcagagtgggcagtttcagcaggacctgtaagtttgcttaggttttctgaagatatcggcattaaagacttacacattccttttgtcctcctaacgtatttcgtaaccacactctcaacattccaataagttttgaacttggaggcgtcgacgcggccgcgaatttagtagtagtagtcgacc

SEQ ID NO: 176497 - DNA, 320 bp, Homo Sapiens
cgtcgacgggagggctatcatatagataaatgctgatgctgtggtagtgaagaggagtacccagtatagccagagtgagaaagtgtccaggaaggcatccaagagtaagtgaaacctgaactgttacctaaaggatgtgggaccctgagcaaaaagtttggggaaagagcattctgggcagcatgaacagaagtaaggggatgagcaagcttgagaggggaatattgggcattgataaggttggagcataggatgtgagggaaggagagatgagatgagatagggagagggggcagggactgcttcagttgtcgacgcgg

SEQ ID NO: 176498 - DNA, 527 bp, Homo Sapiens
cgcgtcgacgaatgttgacgttcgtttcatggagaaaggggaggtgaaagattgaagagcaggttcctgtcaatgttctgagttcgagctggaggtgtagattgaatagtctacatggtctgtgagtgtgtgagatgaacccttccatcctttgacacctggttgtatgtgtaggctaagaaggaaggaccctcctgtcagtgtgcaaagctgtaatctcatggactagaggagagggggccaaggggatggacaggagaagtcatgcagaatctaagcaggaatgcagatagaacacatctaggctcttttccccaggagagtgatgatggagcatatagatctggctcaaattcagcctccatcacttaccagtcaggaaccctggcgatatcactttaactttctgaacctcagagtcttcacctataagacggggaaaataataccaccctttcaagattgttgagataaataagtgatataaaacatgtaaagcttagttctggccacagtgtagctactca

SEQ ID NO: 176499 - DNA, 592 bp, Homo Sapiens
  misc_feature (154)..(387): n is a, c, g, or t
  misc_feature (403)..(411): n is a, c, g, or t
  misc_feature (447)..(459): n is a, c, g, or t
acatgggagtgaggccctgtccttatcactgcctggtcacatggtgcctagggatgcagggctggaggccagaggtgtcagcaacactgtgacccaccacaacctccagcctcccttttcagagcacagcattaaagtttggggaattctgtannnnnnnnnnnnnnnnnnnnnnnnnnnnnnnnnnnnnnnnnnnnnnnnnnnnnnnnnnnnnnnnnnnnnnnnnnnnnnnnnnnnnnnnnnnnnnnnnnnnnnnnnnnnnnnnnnnnnnnnnnnnnnnnnnnnnnnnnnnnnnnnnnnnnnnnnnnnnnnnnnnnnnnnnnnnnnnnnnnnnnnnnnnnnnnnnnnnnnnnnnnnnnnnnnnnnnnnnnnnnnnnnnnnnnnnnnggaccgggggtaaccnnnnnnnnnaaaaaaacccggcggggaatctggggtggttccccnnnnnnnnnnnnnccccgggggcaccccatttttttaaaaaacccccaaagggcgtttgagggttttattgtgttattccataaagggtccggccaccttgaaataaatttaaccccccccgcggacccctaaaagggaagggggg

SEQ ID NO: 176500 - DNA, 590 bp, Homo Sapiens
gtcgacccgtcctgttctaacagcttctccacctcttccagcagcctctcctgccctggcagcttctcctgttcacacagcctctcctcctgttcacgtagcctctcctcctgttcacacagcctctcctcctgttcacgtagcctctcctcctgttcacacagcctctcctcctgttcacgtagcctctcctcctgttcacacagcctctcctcatgttcacgtagcctctcctcctgttcacacagcctctcctcctgttcacgtagcctctcctcctgttcatgtagcctctcctcctgttcacgtagcctctcctcctgttcacatagcctctcctcctgttcacacagcctctcctcatgttcacgtagcctctcctcctgttcacacagcctctcctcctgttcacacagcctctcctcctgttcacgtagcctctcctcctgttcatgtagcctatcctcctgttcacgttgcctctcctcctgttcacgtagcctctcctcctgttcacgtagcctctcctcctgtctcctgttcaggagactcagtcgacccggccgcgaatttagtagtagtagtcgacc

SEQ ID NO: 176501 - DNA, 467 bp, Homo Sapiens
ggtcgactactactactaaattcgcggccgggtcgacggagaggctatgtgaacaggaggagaggctacatgaacaggaggagaggctacatgaacaggaggagaggctacgtgaacaggaggagaggctgtgtgaacaggaggagaggctacgtgaacatgaggagaggctgtgtgaacaggaggagaggctacgtgaacaggaggagaggctgtgtgaacaggaggagaggctacgtgaacaggaggagaggctgtgtgaacaggaggagaggctacgcgaacaggaggagaggctgtgtgaacaggagaagctgccagggcaggagaggctgctggaagaggtggagaagctgttagaacaggagaggcggcaggaggagcaggggaggctgctggagagggagaggctgctggaagaggtggagaagctgttagaacaggagaggtcacaggcaagagcaaga

SEQ ID NO: 176502 - DNA, 346 bp, Homo Sapiens
cgtcgacttgctttggcagtggaaacgcacgtggcctctaaagagtgggtcccaaggtcatgaaggcctgtggggtggagggcaaggtctctccttccaggctggaatggcggaagatgcggcggcagaggggctgcatgtcctcctcacagcaggcccctgaggacctttatcctcctgagccatgaatgtccctcaggagtgtctaaagcacccggtggggcagggggacccctataggccttaggagctctggccaattagtggtcagtaaaacgcagaggtgaacaccatagaaccacaggtccagggcagaggaccaacgtcgacgcggccgcgaatttag

SEQ ID NO: 176503 - DNA, 469 bp, Homo Sapiens
  misc_feature (214)..(222): n is a, c, g, or t
ggtcgactactactactaaattcgcggccgcgtcgactgcataacgaggaggacttaaggactgatgtttgaatctcactgggaaggagaaataaaacagacactgtgagtagatgggggtggcagaatggatttattgagaaagtggagagtgaacaaatagaaaaaggagggatcatattgggggggatggaaagagagacaactggaattnnnnnnnnncattgccaggacaagctagcaaccgaatgtaggggaaattcccagggtgaccttagctaagactcctagcaatggcagatatggatcctgaactggccatctcctgtaaccaggcaagagcagacacatctgaagcaaagcagaacaatgaagatcaaaacaaagatgtggaaaaggaaatccagaagaaagagatcacctgggaagaaggtcgacgcggccgcgaatttagtagtagtagtcgacc

SEQ ID NO: 176504 - DNA, 319 bp, Homo Sapiens
gacgttgaccaaactctttgctcctctccacccaccacagagttacgaggagcaggagctgctgcgcctcatctactacgggggcatccagcatgagatccgcaaggccgtgtggcccttcctcatgggccactaccagggcgggatgacggaaacagaaaggaaagaggtcggttacctgccatgggcactgggatctttggcaacaaaaggagccagatactgtggggctggggagcgctggttccacgctggaccaaggaaggggagggaggtacggggaagatgggaacctaaaacagggcactgtctggtcgac

SEQ ID NO: 176505 - DNA, 503 bp, Homo Sapiens
gcggccgcctactactactaaattcgcggccgcgtcgacatcttaacaaagtaaaagtatgattctatcatatgttaggatctctacaccagttctctgccttgaattagtatccagtcacgaacattggcttcatcctctagcattctccagagactaaacaaaccaaaacatctcagacagtagccaagcacgattttgaacatcagaagttggcatacaaccaaagcacagcaaaacacataaagagaagaacactgtcagtcgtgttccttcataaacccaccatctataagattccctacctttccgttggtacacgggtgtagcacaagggcatttagcaaaataacaaaacggtaaacattacaggcatccagttttctaaggcctaaacagtgaggcatggttgatttcgcaaaagtttccagcagcattctcgtacttcctttcgagacgtcgacgcggccgcgaatttagtagtagtaggcggccgctctaga

SEQ ID NO: 176506 - DNA, 437 bp, Homo Sapiens
gtcgacgtccctgccccctgtggtcagggccatgctgtcatcccacaagaaggccacatttgtcacatggctgctgtgtccaccgtacttgtggctgagggctcgaggctgacagcaggggtagctaaacaggtgaactttgccaaagtcatcagctgaagccagcaacttcccatcatgagagcgggccacagcgttgatatcagtgccgtccgccccctcagaccagatcccaaacaccccaaaccctaggacacaagtagctgtggcccattccatgttcctcacagcatccgcactggtgatctgcttacaggtagccgggtcccagtacagaatctcatagtccccggagttggtgacaaagcagctgctgtcctgggcccaatccaggtggggtcgacgcggccgcgaatttagtagtagtaggcggccgc

SEQ ID NO: 176507 - DNA, 369 bp, Homo Sapiens
ccgcctactactactaaattcgcggccgcgtcgacagtaatatcagggtagcttttgttagttttcattattgaaaaattgttctctgtacttcatctcactcaagctgtgaaagcagtgaaacattgcatcaattaaaatattccaattaacactaatcaagaggagcaatagtaataacatagctgaaccaggttgttgaatctttgtagcctcacacatcactgtaggcacagtatgtcaattaaataagataatttttccctattatgcatcttggtaaaataatgaagatattctttggagaaaaataaagcattattaaaacatgggtcccgtcgacgcggccgcgaatttagtagtagtagt

SEQ ID NO: 176508 - DNA, 360 bp, Homo Sapiens
ggtcgactactactactaattcgcggccgcgtcgaccacgcccaacttcgtgcgctgcatcatccccaaccacgagaagaggtccggcaagctggatgcgttcctggtgctggagcagctgcggtgcaatggggtgctggaaggcattcgcatctgccggcagggcttccccaaccggatcgtcttccaggagttccgccaacgctacgagatcctggcggcgaatgccatccccaaaggcttcatggacgggaagcaggcctgcattctcatgatcaaagccctggaacttgaccccaacttatacaggtccagggcagaggaccaacgtcgacgcggccgcgatttagtagtagtaga

SEQ ID NO: 176509 - DNA, 390 bp, Homo Sapiens
ctactaaattcgcggccgcgtcgacctcctgggctgctggattgtctctttcataggctccttcctctccttggattccctggtcctctgctccctgaacgatatcattatccatagcatcataatgagcttgctgccggagctgctcctggtgctgcggccggccctcctcaagctcagcctgcctctgcagggccatctctcttgccacctgctgctgctgctgttcctgctgccgtagtaagtgcccctgcagcctctgctggtgcaaagcttcctggtgttcccgcagctgctgggcctcctccacctgctgcactgccagtctctgctgttccaactgttcctcatagggtgattggaatttgatcaggcgacgcggccgcgaat

SEQ ID NO: 176510 - DNA, 418 bp, Homo Sapiens
gccgcctactactactaaattcgcggccgcgtcgacaaaacttgttagtgggtcaggttacatttgtcagtttaagttctcagatagtcatccaattttagatttctatgtcctcctacctaagtgttttgcctatgatcatccatagttctggaagccctgaacctatgtttcatttaaactcttctttatagcctacaggcaaaaggcagctgggtcttgcacaggtaaatgcctgttgatgtcaactggagtttgaatgcccaagtgctgtggtgtccagcctcaagtcatttattataaatattttggacacatcagattcaaacccactctggtccagctgaaaagataaatagttcagactttacccagttactaaatgtcgacgcggccgcgaatttagtagtagtcgacc

SEQ ID NO: 176511 - DNA, 332 bp, Homo Sapiens
gtcgacgttaataccacaaacatgtcttgccaggttaaatcaaaggcaatagtcaaaagcccacaattctttaatgagcttaaagggatcctggctaaatgaacccaacttggattaaatttgtgaaagggacatgacttgaattgttcccaagtttccatttgtcacctcatggaaaggcaaaacattattgggatattctgaggactctgtactagtggcatatgtgactcccatgagagtatgtgagggggatgaagtgtctggatatggaggggcgttgactcggggatggagcaaatggagagggtataggtgaagcaggtgtcgac

SEQ ID NO: 176512 - DNA, 526 bp, Homo Sapiens
gtggacaaagcatacttccacaggctgcactcgaggagatccacaaattctcaggaacctacacctgcatgaacactttcaaagggcggacatagagacaggatgaagacatgcttgaggagccacggagtttgggggccacagcacctgggcacacacccgagcacctgtccattggcatgcttctgatgggtgagcaggacagctcctgtccccagcgaagaatccggctgcccctgggccagtcccaggacctttgcacaggactgatgggtataactgacccccacagggaggcaggaaaacagccagaagccaccttgacacttttgaacatttccagttctgtagagtttattgtcaattgcttctcaagtctaaccagcctcagcagtgtgcatagaccatttccaggagggtctgtccccagatgctctgcctcccgttccaaaacccactcatcctcagcttgcacaaactggttgaacggcaggaatgaaaaatagtcgacgcggccgcgaattta

SEQ ID NO: 176513 - DNA, 457 bp, Homo Sapiens
gcggccgcctactactactaaattcgcggccgcgtcgactatccacactcacttctgcgtcacctgtacctacatccacacccacacctgcatctacacctgtacctacatccacacccacacctgcatctacacctgtgcctactcccacacccacatctgcatctacacctgtacctacatccacacccacacctgcatctacacctgtacctacatccacacccacacctgcatctacacctgtacctacatgcacacccacacctgcatctacacctgtacctactcccacacccacacctgcatctacacctgtgcctactcctacacccacatctgcatctacacctgaccctactcccacacccacaactgcatctacacctgtacctacatccacacccacagctgcatctacacctgtacctactcccacacctacatccacacctgc

SEQ ID NO: 176514 - DNA, 450 bp, Homo Sapiens
ggtcgactactactactaaattcgcggccgcatcaacttatagcaccagtggatcatttggttgtatgcatattattgtaccttctctgctacaaaatatattcctttgtcctaaggtgtgttacaaagaacattaggcattctatgcacctttggatagtttaatggccaaggcattgatggcaggagagtcaaagccacaggtggaaaacacatttatcccagtaagaacaaattgctattcttccactgtagagagggtaaacaatgtgccattacgttgccaattgaatgcctcaatcatgtcaagggctgaacatctatgactgtttctgaaaggtcaaacattcaacagaggctgtagctagaactgccttaatgataagagatcatgctgaattacccatgcaaaaccttaatacttgacacttatcactactttattcaaga

SEQ ID NO: 176515 - DNA, 214 bp, Homo Sapiens
gtcgaccccggcgtgcagccgaggtcgacgatgacctggcccggcttgataagcttttccgcttcgtcgatctctttcagcttgtaggccgcacgcgcccggtaaccctctttctgtgccaatttgacataagggtcgttaatgtggtcgtgaatccagtttttattgaatttgttcttggccattcgcgtaaaatactacttttatgtcgacg

SEQ ID NO: 176516 - DNA, 278 bp, Homo Sapiens
gtcgactcctaaatttgactattagagcctttggaaatgttactctaaggtatttctgacagattcacttagaattaattctagtgctcagaaatgttctatttcaatagatgagcatttacattgcaagactgttattaaaatggccaaatgaccactctctagaatgcttcccagggtcagtgggtggattaagcctatttccaggtcttagatatattggctattctccccttcccatgttacatttgataaagttaaatctctatgggtcgacg

SEQ ID NO: 176517 - DNA, 426 bp, Homo Sapiens
gagcggccgcctactactactactaaattcgcggccgcgtcgactgactctaagtcaatggaatttttagaggtgagcttggcaatattatcttgcaagaagaggttaatgcctgacatcatgcttgagaagacattcccttttgtttcttcagaggcaaaatcagatgatctgaagttgagatcagccatatctctaaatttagaaaattgctcctggttaattttgccgtaagttgtccaaagtaaaccgtgattttagacttatttttgacctgttgctcacggtctggattctcaataatatccccataatcattgacaaagacttcttctgaccctaaatcggtcaagaatatggcaatattacggactgtgaccgtatcccaagcatctgcttcaccattcttgaaagtttcattagctc

SEQ ID NO: 176518 - DNA, 609 bp, Homo Sapiens
  misc_feature (463)..(463): n is a, c, g, or t
  misc_feature (519)..(519): n is a, c, g, or t
  misc_feature (525)..(525): n is a, c, g, or t
  misc_feature (580)..(580): n is a, c, g, or t
gtcgactcgctgtgtcccggcagatccgcagctcgaaaaagaacaagccacagaaacgggctcgctcgtgccaggacacagcagtgtctttcaaaaaatcaaaaccagaagttttatcagcagcaggaaggatgtgggactctgtccaagttcaccgtcaccatcaagccactggctgtggaaggaagttgtccaacagggtcagtgtcacagccacaacttcagaaagcagccatcccgcgtgtcgtccaaacagcagtgcctgcgtgccgctccacggagtcttccagaacacctccctctgaactaatcccggagcaccccacccccagcgagtcccacctggacctcttcaaagtcaaaactcttctctcgggacaaacaaatattcgggactttcgaagccctgaacttgagacaccaagtttgtctccatggaaacacgtagccgctgcagttgganagctgcgtgctggagttctgtccccaaaccaactgcagagaagaaagacgagcctnggcccnggacgcgatttctaacgaaatgcaatagttttctctttttggaaaaatgtttatnccaatagttttgtgcgctaattgttatta

SEQ ID NO: 176519 - DNA, 416 bp, Homo Sapiens
ctactactactaaattcgcggccgcgtcgacattctcatgactactttggtagcatatgaagaagtattgtctacatatgttcaaagagaggatgcgctgttggaggtccaaggattttcccacaaatcacatgaacacaaatctcagtcagacagtgatagcttattgcaccccaggactggtcaaccaggtctaccatctgtattcaggaactaaactgtaacccagaggtaagaccatcgagagaccagtccagtgtaacttccgactggatgttctattaatgagatcaggatgttactggcatctataaaacaaactccgagcagaggaggcatcctcatgtttcagggaagcatctcagaacaaaatggcgtcgacgcggccgcgaatttagtagtagtagtagtcgacc

SEQ ID NO: 176520 - DNA, 374 bp, Homo Sapiens
gtcgacaaattgtcattcagctaaagatgggggcaaagacctacccagatactgattccttcaacactgtagcagagatcactgggagcaaatatccagaacaggttgtactggtcagtggacatctggacagctgggatgttgggcagggtgccatggatgatggcggtggagcctttatatcatgggaagcactctcacttattaaagatcttgggctgcgtccaaagaggactctgcggctggtgctctggactgcagaagaacaaggtggagttggtgccttccagtattatcagttacacaaggtaaatatttccaactacagtctggtgatggagtctgacgcaggaaccttcttacccactgggctg

SEQ ID NO: 176521 - DNA, 355 bp, Homo Sapiens
gcggccgcctactactactaaattcgcggccgcgtcgactggagtttacacaaagcctcggaggctgctgcaagaggttgtgatctcaggaccggggaatgtgatgtgattaacatcccacatggaatcaactgcatgccagcagagtggaagccagccagggaggaagcagcctcagtggtccaggtggcatggatggggtggggacgggataggtcgtggcagtggcagtggcgagaagaggccagctgtggagtgtttagtaagtggatctggcagggcttgccacttgatttatcttgagcagctagatggatgaagtgctgatttttgaagttgggggggcagggtcgac

SEQ ID NO: 176522 - DNA, 301 bp, Homo Sapiens
aattcgcggccgcgtcgacggaaaaggtctacctttgctcacctatagacttgtaaatatagatcagaggtcttactcccagtggttctctgatcacagtttgggaattgcttgaatattgtgtgttagggatatgtttggagaaggccagctccctgcattaacatcttctctatgtcttgctctctcaggtaatccactaacttgctttcttgtttgctttgtattattaagtgataaactgaggcagaccacaggacgggtcgacgcggccgcgaatttagtagtagtaggcggccgc

SEQ ID NO: 176523 - DNA, 403 bp, Homo Sapiens
  misc_feature (44)..(105): n is a, c, g, or t
  misc_feature (111)..(170): n is a, c, g, or t
cgtcgaccgcaggagcaggagaagaagacatgggaccaggagannnnnnnnnnnnnnnnnnnnnnnnnnnnnnnnnnnnnnnnnnnnnnnnnnnnnnnnnnnnnnatgcgnnnnnnnnnnnnnnnnnnnnnnnnnnnnnnnnnnnnnnnnnnnnnnnnnnnnnnnnnnnngtgggagcaggaggagaagatgtgggagcaggaagagaagatgtgggagcagcagaggctaccggaacagaaggagaagctgtgggaacacgagaagatgcaggagcaggagaagatatgggagcaggaggagaagatgcgggaccaggaggagaagatgcggggccaggaggagaagatgcgggggcaggaggagaagatgtgggggcaggaggagaagatgtgggggcagg

SEQ ID NO: 176524 - DNA, 427 bp, Homo Sapiens
ctactaaattcgcggccgcgtcgacagagtaaaaggctgagttcctgctatgccacaaagtcttttatattcagtttccatcacttccagaagaacgtacataaccatgaaggcctgcccttgtaatgttcaccaaggtcgaatttccctagttcctaaagcttcaatattaccattccagtcttcccgtgacccagataactctttcaagctcatctcgccagtgtcctgagtccattatttccattgagggaccacctcatatccatcaaacatgacaggagaggtctgaatgccattggttggcagagattgtttcttccctggttctcccctgtgaagactgagaagtggtcagtctgccaacattgagagacagctcgggaggttctgtctgcctggtgtatagtcgacgcggccgcgaatt

SEQ ID NO: 176525 - DNA, 384 bp, Homo Sapiens
ctactactaaattcgcggccgcgtctacaaaagattcaagccattctattgcactgtcagctggaaggtggtcccaaaaggctggggaaattggaggcactcaggaagctagctgtcttggttacaggcattcatgtatggatgaggctggagaaggtaaaggacagaggaagagagtagggaggcaggtacagaaaagagactcattattacctttctctattgcaggcttcagaaggtgaacccagagagcaggctgtttctgtccatgggaaagcaggatggtacagcccatatctgattcagaaaccaacagtcaaaccattctcccctgagactaaagcagacaatgaagtcgacgcggccgcgaatttagtagtagta

SEQ ID NO: 176526 - DNA, 320 bp, Homo Sapiens
  misc_feature (162)..(190): n is a, c, g, or t
taaattcgcggccgcgtcgacccttggtctggcacttggggtttaaagctctgttactgccatcttaaaaatttttaatttttaacaaagggacttgcaattgtgtagccaacccagggaatcatacactaagcatcctttagaaatgtactgctgtggttnnnnnnnnnnnnnnnnnnnnnnnnnnnnntgcaatcctggtgtgcaaggtgtttttgaagaggattaggaaaaatgttaattaaatgatgagaaataatgaagtcataagggaactagaattacaggcaccagctgctctcgtagacgccgccgcgaat

SEQ ID NO: 176527 - DNA, 420 bp, Homo Sapiens
tactaatataaattagcgaccgcgtcgacaactgaagcagtccctgcccccactaccagctttcaggaaaagaggtggtcgaaaagttggactgcattttttctaacaacactaatatgctttatgactcatactgtagtcaggaattggggggttcacccttttcttgggcctttgggcagtcacgtatggggtctgggaggagtaagacaagaaggggaaactgagaggagtgccaggaagcataggggctgctagattttgtgtctatgctttcctcattcaaatacttccccagcaagctgggtgcaatgaggcatgcctgtagtctcagctacttgggaggctgagcaggaggattacttgagcccaggggttcaaaactagcctaggcagcatgtcgacgcggccgcgaattta

SEQ ID NO: 176528 - DNA, 311 bp, Homo Sapiens
tgacacactctctctatttctcccatcctcccctccatggggctttcctgtttcctttccatcctcaccttcactcgctctttcctctccgttttctccctcaccccacaagctctctcccctcgcctctagtcccccaagtccttcccagctccgcctctccatgcccgctccttcctttccagttcctctgccagtcattgtccttgacccttccctctcctcgtctctgctcccaccggctcgtctgagcctggcgctgacagccttctccgtcgacgcggccgcgaattcagtagtagtagtcgacc

SEQ ID NO: 176529 - DNA, 402 bp, Homo Sapiens
taaattcgcggccgcgtcgaccaagctgtggaatcaagacaactttggctgagtcccattttatataggactaaaggagagtgcagtcctcaaaggcaataatatttatgagaacaaagaagactgtggagaaattttaggcagtagaagagagcagaaaggccaagaggatcagggttgaagtaagctatatagcaaatcaggcattgcccagttacctgggaattacattcaggcaaagcagaaatacctgaagctagttgcttatacaaccaaatattgagaagtaaagatattttcatctagaacaatcctaaaaatcactcttgtttctaaaaggccaaaggtagtgggcaggtatacaaagaaagggatatttatgagtcgacgcggccgcgaatt

SEQ ID NO: 176530 - DNA, 267 bp, Homo Sapiens
gcggccgcctactactactaaattcgcggccgcgtcgacagcagtccctgccccccaaaccaattctacttctcaaaggtaacctctgtcaaagtctggagcataaactttctgttattacctatacaataataattgccaccacaaagcactatgtgtcagtcactgtactaagcactctacatatgttatctcagtttacccttgcaacaagtcatgaggtaggtaccatcaggatgcctattttacagatgagaaaactggtcg

SEQ ID NO: 176531 - DNA, 262 bp, Homo Sapiens
aattcgcggccgcgtcgacggcatacagcttacaccgcacatcaagggggacaagtctctcagctatgcacagcagtggaagctcagggaaaggagccggaccactcagagggaaaaccagcgggacagaacccgcagattttgccttacccagctcccgaggaggcccaggaaaactgaggtgcagacagggtctccagagagagagagccacagcgggggcagggactgcttcagtttctgtcgacgcggccgcgaattt

SEQ ID NO: 176532 - DNA, 353 bp, Homo Sapiens
  misc_feature (243)..(291): n is a, c, g, or t
taaattcgcggccgcgtcgactattaacagtgggtgagtctgagttaggagtggcccctggtttacctctttactgggcagttagaagtctgcacagatgtctgcttcttaatctgtgcagccacctggctatcggctctgaccactaaaggacaaatgcattgtctggcacgtctcacgtcacaggtgtcaacaataataatcttcgtggtgctttctagttgaaaaatgcatttgttgtannnnnnnnnnnnnnnnnnnnnnnnnnnnnnnnnnnnnnnnnnnnnnnnntgatgggggcagggactgcttcagttgttaaccggtccgagaatttagtagtagtagcgacc

SEQ ID NO: 176533 - DNA, 406 bp, Homo Sapiens
gcggccgcctactactactaaattcgcggccgcgtcgacaactgaagcagtccctgccccctatcactgagtactgctgctgctgctgatcctctcctccccaaatccacctgcccactgtccaccggcatctagctcctcctccagccacacccacactcactcatccccttcctcacaatgaccgcacccaaaagacactgtactggggaacccggcttcgtcactcggatgttaactaaaggcccaggggaatatgctggaaaaggtccccccacccccaagaccaaggaccctaggttttccttgccctggagggagccagacagaggaacaggggaaagggtggagatggggtaaccagtccacgttgatccggccgcgaatttagtagtagtagtcgacc

SEQ ID NO: 176534 - DNA, 340 bp, Homo Sapiens
gcggcccctactactactactacaaattcgcggccgcgtcgacgtttaagggttggggtgcagggagctcattctcacagcaaggaagcttagctgggagcgtggtcatttgtgtattcattcagcaagtacttccatgccttgcagtatttgtgttcttaggatatatcagtaaataatagcctatgctgtaatgctgaggttatagttaatagataagcataacaggtaaactctatggcaatgttagaatgtggtaaacactggaaaaaggaaaaagtaggacgagcaatgtaaggggattgggagtattagaggatgggagtggtttacaagttta

SEQ ID NO: 176535 - DNA, 389 bp, Homo Sapiens
attggcggccgcgtcgacccaggatctgtgatacgtgttaaaggctttttaatatcatacactgcaacaggatctggaatatgtggtaaaggctttttaatatcatacactgtaccaggatctgtgatatgtgttaaaggctttttaatatcatacactgtaccaggatctgtgatacgtgttaaaggctttttaatatcatacactgtaccaggatctgtgatatgtgttaaacgctttttaatatcatatactgtaccaggatctgtgatacgtgttaaacgctttttaatatcatacactgcacaattcttaaaatgcaaaaggaaaacaagagttctgaaaaaggagtcgacgcggccgcgaatttagtagtagtaggcggccgc

SEQ ID NO: 176536 - DNA, 322 bp, Homo Sapiens
ggtcgactactactactaaattcgcggccgcatcgaccatgtgagaattaaacagatggggaaaaatgccagtggacaaacacactacctctcattatctggattcgaactttatggcactgtaaatggagtatgtgaagatcagctagggaaagcagctaaagaagcagaagctaatcttagacggcagagacgtctagtacgttcccaggttctgaaatacatggttccaggagctcgtgttatcagaggcctggattggaaatggcgagatcaggatggcagcccacagggagaagtgctaggctggcacgtcgacgcg

SEQ ID NO: 176537 - DNA, 437 bp, Homo Sapiens
ggtcgactactactactaaattcgcggccgcgtcgacgtccctgcccccaggcagccctgatctggaggctccttcaggtctcaccctcctgttgcttatcagataaatcttcctggaccatctggtagaaaaggctttgccaacaggtaggatcctctccgccccatcctcaccctctacctcatctggccatacttcctcttagcgctcatcacccactgatgtgccttgcctgtgtgtttagtgggatcttctccacctctgctttgcttcctgctgtatccttagggtgagagtagggcctgacccacagggggtacttggtaaatatctgtattaaatgaataaaaggcatttatttgtattaagcataagttgtagccccactaggaaaaaagtcgacgcggccgcgaatttagtagtagtaggcggccgc

SEQ ID NO: 176538 - DNA, 197 bp, Homo Sapiens
cgaccctgccccctcttaattcacacaagtgtaatatcctgcccaccgtgccactccccagcacctctccaaagcaaagaaatcttaggccaggtaagctaacaaaaaacataaaatgagacatgagaagtttcttagggacctagggtcatcagatttagcaaataaaaatgcaagatgcccagctaaatgtcgac

SEQ ID NO: 176539 - DNA, 380 bp, Homo Sapiens
gcggccgcctactactactaaattcgcggccgcgtcgacctggtgagtgggcttagtaggtggttctcactctgatcttttccttgctcttgcagttcattacggggcaagaatcatctcaacacatccggcagttggtgctggctattggttgggacctcagatggggctgttagctagaacacacctacatgtagtagccttttatgactttgctccagaagtcacatagatagatagcatctgttctattctagtcacaggcctgtacagattcaagggaagagtgtcaacatcacactgtaagaagaatgtggtgtagaatgtcttgttggcagctgccgtcgacccggccgcgaatttagtagtagtagtcgacc

SEQ ID NO: 176540 - DNA, 468 bp, Homo Sapiens
gcggccgcctactactactaaattcgcggccgcgtcgacccgctgggaaggaagcagggaagcaggcattgttgagtgtcgattgtgttgtgattttcctccactttggtctcgaggtctctctggagggtggctgtgaactctggccctgccgtgacgaggctccagggagctgttgtgggcgtttacagcctgcctttcatgagacatttcatcctggcgcatagcctaatgcctgcgtgtccgccccgtgagcagctgtccctcccataggagtgtgtacctcttgcagacgccctgcggctcccgtctgacccacgtctagtttctccccaccaaagtctcccctcgctaggagagccctgaccaggaggagagtcgggcccaggcatgtcggtcagggaagcagagaggaggccccgcggcagaacgtcgacgcggccgcgaatttagtagtagtagtcgacc

SEQ ID NO: 176541 - DNA, 458 bp, Homo Sapiens
gtccctgcccccaattcattaccaatcatctttaaaatgaaaaacacagacatgtgtgtgggagtcagcataagcatgaagttcaagggaagccaggaccctgaagaaactcccaggaggcacttatggaccatgggaaagttaatttcaaaggacatccaataaatgctgccctaccacagatcttgtcattgccaagccctatttgctgcaggcctgggaaggctccagaacctgctggcaggtcagtttgttgaggccagaaatgggaaggagagcccacaaaggccaaactggaagaaagaggctcagctctagacacatctacacagactggggtgagggttcctacaacaagtgcttcctattggctaggttaaaaagaagccacacctggtctggtccagatttgtcctaaggtcgacgcggccgcgaatttagtagtagtaggcggccgc

SEQ ID NO: 176542 - DNA, 469 bp, Homo Sapiens
gatttggtcggaatgagttagggtggagcaggtggtcggaatgagggtggagcaggtgatcggaatgagttagggtggagcaggtggtcggaatgagttagggtggagcaggtggtcggaatgagggtggagcaggtgatcggaatgagttagggtggagcaggtgatcggaatgagttagggtggagcaggtggtcggaatgagggtggagcaggtggtcggaatgagttagggtggagcaggtggtcggaatgagttagggtggagcaggtgatcggaatgagttagggtggagcaggtgatcggaatgagttagggtggagcaggtggtcggaatgagttagggtggagcaggtggtcggaatgagttagggtggagcaggtggtcggaatgagggtggagcaggtgatcggaatgagttagggtggagcaggtgctttctgggctggagcttgtcgacgcggccg

SEQ ID NO: 176543 - DNA, 324 bp, Homo Sapiens
aattgggaaagtatcttatctaatcaggcatgtctgtaaaatacagaaaaattatgggtgttaaaagaaattgataagaattcatctttggtggcaatctctggttttgagatttagttcatgggacttcagattagaatttggtgcatggaacgcatgtgtttactgtcagtctctcctgcaacaccattacaggcatggtaaatatgagaagaggcaacagtaaagaagaggcatcagcaaatttttggaagatgaaaagcaaatagacctgtggcatctgccttactataacagagtcgacgcggccgcgaatttagtagt

SEQ ID NO: 176544 - DNA, 343 bp, Homo Sapiens
aaattcgcggccgcgtcgacaatggagtagaacaccccgcccaggtaggtcagcggcgtcagcacgaacgtcgggatgatcgaaatatcatcgaagctgcgggcaaacacggcgttgatgaaccccagcagcgagaagatcgttgccgtcagtaccaccaccagcagggtgaccccaaggtgatgcacttgcagatgggtgaagaacagcgacagcaaggtcacgaccaccccgaccatcaagccgcgcagcacgccacccagggtgtagccgatcaggatggtgtgcggcgacaccggcgagaccatcagttcttcgatcggtcgacgcggccgcgaattta

SEQ ID NO: 176545 - DNA, 359 bp, Homo Sapiens
taaattcgcggccgcgtcgacatcagttctagtgttccaagcaccacatcaacaccaacagttacctctgcagctgggcttcagaaaagcctgctttccagcacaagcactactacaaagattacaacgggttcttcctcagcaggcacacaaagcagtacctcaaatcgtttgtgggctgaggatagtactgagaaagaaaaggacagtgttcctacggcagtgaccattcctgttgctccaactgttgtaaatgctgcagcttctaccacaaccctgactacaactactgctggcactgtctcctccacaacacaggtcagggcagaggaccaacgtcgacgcggccgcgaatttag

SEQ ID NO: 176546 - DNA, 646 bp, Homo Sapiens
  misc_feature (18)..(18): n is a, c, g, or t
  misc_feature (27)..(27): n is a, c, g, or t
  misc_feature (35)..(35): n is a, c, g, or t
  misc_feature (71)..(71): n is a, c, g, or t
  misc_feature (80)..(80): n is a, c, g, or t
  misc_feature (440)..(464): n is a, c, g, or t
  misc_feature (472)..(472): n is a, c, g, or t
aatttccatatcatttanaacctgtcnacaacccncttaaagaagtttggttatatttcagtgaaatgaancttgttttnttttataagtagcccccctggttacctgtgtcctgtaaaatacagacacttgacccttggtgtagcttctgttcaactttatatcacgggaatggatgggtctgatttcttggccctcttcttgaattggccatatacagggtccctggccagtggactgaaggctttgtctaagatgacaagggtcagctcaggggatgtgggggagggcggttttatcttcccccttgtcgtttgaggttttgatctctgggtaaagaggccgtttatctttgtaaacacgaaacatttttgctttctccagttttctgttaatggcgaaagaatggaagcgaataaagttttactgattttcgaaannnnnnnnnnnnnnnnnnnnnnnnnaacatgtncggccgccctcgggccctccaaaaagcttttcaagaaccatttccttttgggcgccgcggggcccccaataagggaaaagggaaacaggggcccaaagctggtttccccaaaggaaaaccccgggggcccagggaacaaaagggcgcttgggggaattcctccccccccaaatt

SEQ ID NO: 176547 - DNA, 470 bp, Homo Sapiens
acgttcagcttgtggatggggcaaagaaggaggctaaggccaagggagttaaccttcaggtgcaggacgcgtcagacgacgccgccacacaggccaaccagcttgctaacgcggtatctacctcagccaaagtagttatcatcaatccgactgattctgacgccgttgcgccgtctgtgaaggccctcaataaggcgaaaatcccggtgattacggtcgaccgcagctccagcagcggtgatgttgcttccttcattgcatctgacaacattgctggtggtatcgatgccgccaagaaactcgctgagatcatgggagacaagggtgaagtcatccacctacagggaaccccgggtgcctcggcttcccgtgaccgtggtaagggattcagcgaggaaatcgccaaacatccaggcatcaaagtggtcgccaagcagactgccaattttgtcgacgcggccgcgaattta

SEQ ID NO: 176548 - DNA, 273 bp, Homo Sapiens
gtcgactataattgtgtcccaaggcccatttctcctagtggactatgagctcctcaaggacaaagcttatttgtatttggctttccatgtgtggggtcagggtggggacatgggccaagtgcactgtgagagtgctggggaggacggtgagagcagtcttctcgttagaggggacagaacttgtacagaaagcacagagtagcagatcctggtgtgttcagggaagagcacacctggagagtgaggtgtacaggtgagggggcaggactggtc

SEQ ID NO: 176549 - DNA, 392 bp, Homo Sapiens
attcgcgaccgcgtcgacgaaactgaagcagtccctgccccctgaatgcacactctttctcctctgggagtctctgaagtgggtgatatcctctgcttataatatgcttccccttaaacctctactctcttcctggctagcttcggctcctctgtcacttgtccgctttggcatcacctcctcatggaagacttccttgactccccagattctcaggagcatggcaggtgaggtgctcctcccatgaatggatggagattagggagtgtgtgttattcatgcttaattcaccagtggttagctcagtacctggcacaagttactgtggtggccaaagtaataaccccccaccctgccaactaattgctcatgtcctatgtcgacgcggccgc

SEQ ID NO: 176550 - DNA, 374 bp, Homo Sapiens
  misc_feature (67)..(102): n is a, c, g, or t
gggcgactactactactaaattcgcgggcgggtaaacgcccagaaagcacctgccacagcatacaannnnnnnnnnnnnnnnnnnnnnnnnnnnnnnnnnnngtgagcatgcccacagcacacagctgtgcaagagcacagtacacatgtatgcacacgtgtgtacatacatgtgcacatatacacagtgcaagcgcatggctcacacgtggatacacctgcacgctcacaaggcacataggtgcccgcacacatggacccggccagctgacctaaagcaccatgctttaccgcatgcctgctaaggagagcctcttgccgggagacagcctgggagtatgtcaggcgcaggaggaagcacaggccccggcctg

SEQ ID NO: 176551 - DNA, 337 bp, Homo Sapiens
tactaaattcgcggccgcgtcgaccattcaataagctgtggaccaggcactgcatctgaaaccttcacagccagcgagactgatggaattacaggcgtctgaaacctccatgcatgctaattccaagtccaaaacccagaggctcccagctggaactctaagagaacagtaagctccatgaaccaatgacaaacttactagaagggaccaagcaactcacagggaattatttggttaattggggtccaagactgagaaatgtgccttccaatgatacggcgtggctttctgacagctctgcaaaacaacaagcagaggggtccactgggtcgtggcc

SEQ ID NO: 176552 - DNA, 427 bp, Homo Sapiens
attcgcggccgcgtcgacatgctttcaccaaaacgtctcatcaggccaccataagcacgatcgcaacaaccgagagcaaagtaaccacgcctactatcagatattctctcatcacccaaacgtctcttcaggccactaaaattatcggcgatatcgcaataccgagtaccagaacacaaaaccgattatctcgacatctgcctcatcggcctcttcgtcgtcataatcacgattaatgcttctgattagaatttttccgcctggtttgcgataaagttgcttgatgcgcttcagatctccctggttgatggcgtagagttcgccgtcaataactcgcttattaccagtatcaacagctacagttgcaccatcaggaatgactggctccatactgtctcctgatgcaggaaaagtcgacgcggccgcg

SEQ ID NO: 176553 - DNA, 345 bp, Homo Sapiens
tctactactactaaattcgcggccgcgtcgaccagaaggtgaggcgtcccagggactgagggtgtggtgtggcattggatgacggggtttggagtatgactttggggtccaggggacactgttagccttaagtgctgggatgaggagcttggatagctgtgattagattgtgggggctgtggttcctgaagaggagagcatggagcacagtgttagggactttcttgggagatatgtgtaggatagggcaaggctgtgcacagacagaaagaacaggaaagagaagggaggtcagggcagaggaccaacgtcatcgggtccgcgtatttagtagcatagtagccc

SEQ ID NO: 176554 - DNA, 252 bp, Homo Sapiens
gtcgacaatgcctactgtgtgacctgtaatcggatttgcccagagcctgcttcctctgagcaatatctctgtgggaatgatggagtcacctactccagtgcctgccacctgagaaaggctacctgcctgctgggcagatctattggattagcctatgagggaaagtgtatcaaagcaaagtcctgtgaagatatccagtgcactggtgggaaaaaacgtttatggcatttcaaggtcagggcagaggaccaa

SEQ ID NO: 176555 - DNA, 114 bp, Homo Sapiens
gtcgacggcagctgttgcagcatccagtttatctcacgaatttcagtgattaatcatgccataaaggttctggtttaaaacctgaactgaaaaaaggctaggcacggtggctca

SEQ ID NO: 176556 - DNA, 357 bp, Homo Sapiens
gtcgactatatatacaaccttgtcagacgagtagctgacaaaggaatctccctagtacaacttgtagcagcactattataaagaattcctgacttgacacattttgatgaagttggttgaaataatttgttgggtttgttcaatttttggtgtcatttatataaaaagaataaagaagaatgtgaatggtaggaagtcaggggagaggcatggcagaaacattggtattcactagaacttgtatttttctagtgcatgtgaattggactcatttcacaaataacatttacagtataagtcactgaaatgcaaaaaaggaaagcagctaacacgagacaatccaggtcgacgcggccg

SEQ ID NO: 176557 - DNA, 131 bp, Homo Sapiens
cagatgtggcttggtctgggcgcaaggtcccagcagccagcttaagcttactcttctgtgaaaggggaaagtatcccctgtggaaagcggttaaacttgtggagggggcagggactacttcagtttctgtc

SEQ ID NO: 176558 - DNA, 408 bp, Homo Sapiens
attcgcggccgcgtcgacgcacactataatatagtgaactggaaaagtcccttccagaaacagcttggccagctttgtgaacctttgacatctgaaaacaaccgaggatccatctgggcttctcttccccagctttttgcctgatgccattttattgacagacaatggactttgaagtcagcctttgcctttgagaaagttcaagaactatggttggtcacgtctatctacaacctaatcctactctttggtagtctctgcagcagccacagccttagcagagctggggttcctgtcttctgcacacgattgactttcttgatgggtaattttttttaagattataccaacagtggatcagctgggttttggccaggaagttgtctttggtcgacgcggccgcgaatt

SEQ ID NO: 176559 - DNA, 369 bp, Homo Sapiens
  misc_feature (28)..(28): n is a, c, g, or t
  misc_feature (38)..(38): n is a, c, g, or t
  misc_feature (48)..(48): n is a, c, g, or t
gacgtccctgcccccccaagtgccaccntgccccagcntgaggcttcntgcagtgtgacccgcccacatcagccaccaggactttctttctccctttattgcctttctcattctgcccctcacaacaggctcctcagctagggtagctgcagggagggtggctccctcctgctcctcagaaggtgtaggcccctacaaagacggtgagcctcagtacagagctggcccggtagctcatgagggaattcatggtgaccatctccaggtccagcacgtactcccgggggcccgtcaccggccgggcgaggaccagcatggcgctgacgttgttggtcgacccggccgcgaatttagtagtagtagtcgacc

SEQ ID NO: 176560 - DNA, 522 bp, Homo Sapiens
ggtcgactactactactaaattcgcggccgggtcgacagcagtccctgcccccttcagtggacagccagctgctacggcttggtgagcgggtgaggagttcggcgccaggtccatggtaggccaagctcccgctggctgaggacagggtgctgtccgagcccagcgaggtgttggactgggtcagggacgacttgcgcagcttgttgcggaggaagaagcctttggctttgcccatcttgcccaggctgcccaggtcaggatcctctatggcgctgcttgggaggatggcagaggcagattccagatcatacttcttcttgcccttcatcttgtccctgatcttgctgaagggagaccttggcttgtccttcatggacaggtcaaacatactggcgctcaggttgttgcgcgtgaactggatggtgacttcaatctcgccgcgttccttctccttcttgcctggcttggagtgcagcttgtaccactgcgtgtgctgggcgcggcctgcgccgaagacctcg

SEQ ID NO: 176561 - DNA, 113 bp, Homo Sapiens
ggtcgactactactactaaattcgcggccggatcaacatctcctgccagatgaacagctgcaatcgacgccccaccccccactatttctgtaggatatccctgcacagttcgc

SEQ ID NO: 176562 - DNA, 248 bp, Homo Sapiens
actccgtctaaaaagaataagagggttacaagtagcctgaattttcctctcttcaaatagggacttctcaaagaaggtgaatctataatagtggtgtagattcagatataaggacacgtatttggcgtaaaggagaggcaaagttagaggaaccagaaagaatgctacacaaaagatggccggcttctcgcgtgaaggaagattcggatacgggggcagggactgcttcagtttctgtcgacgcggcc

SEQ ID NO: 176563 - DNA, 289 bp, Homo Sapiens
ggtcgactactactactaaattcgcggccgggtcgacattcagaaaactaagacgaaggcatccagtcccatcacttcatggcagatacatgggaaaacagtggaaacagtggctgactttatttttctgggctccaaaatcactgcagatggtgattgcagccatgaaattaaaagacacttacttcttggaaggaaagttatgaccaacctagatagcatattaaaaagcatagacattactttgccaacaaaggtccatctagtcaaggctatggttgtcgacgcg

SEQ ID NO: 176564 - DNA, 102 bp, Homo Sapiens
ctttttgcttccaagatggcagtttgactgttgcgtattgaggagcgggggcagggactgcttcagtcgacccggccgcgaatttagtagtagtagtcgacc

SEQ ID NO: 176565 - DNA, 439 bp, Homo Sapiens
actgctcccaaggtcatccattcccttggtaaatttctcaagttcactgatactctggacactggagcccggtgtttctgcagagtggcttctgctcttcttgctctccctgtgatcaccacactcctgttcctcagcagcacccaggtcgacctcatcatattcgtccagacacagtccatctgaatcttcatctccagacccttcctcatcagatatttcctcatcagacgatccaggcagagtctgctcccaatggtcttcatcccatgcttttctagaggtggttctacagcaataccttttgtccgtgtccaacagggaggctgatgccagttttctaatgctacccactactaggaaatcaccttccccatcttccccttcatcaaacctgtcaatcaccctggcaacagtggcttcctcgggggtcgacgcg

SEQ ID NO: 176566 - DNA, 340 bp, Homo Sapiens
ctgtgggctccaagaacagctccccagtgcactggccatcaactgtgtttagccaatgggaggcaccagcaggaggtcagagggcagaagaagggagagttcacagcaggagtgacaggtccctctccacatggcagcggctgggtaccccacactgcagccaatcctccccagccctggcaacactgtaccacccccatgatccatgttggctccttaaccttctctgacaccttccctaacacctctgtccacagtctcttccttaaacctcccttcctcagctgagccattagaccctgactgatgcacgggctcatgacccatctgggtgtttcgt

SEQ ID NO: 176567 - DNA, 292 bp, Homo Sapiens
ggttgcttactactattaaattcgtggtcgtgtcgacggtagtctaggacttatgagaagtttcatgtttattcagagacttaaactcctttcctctttctgatccaacatcctggagcacaggggtcaactcactatgaaaaatagctacccaatcatgggttctaaatttcaggaaggagaacgggtggagggcaaaatatagttctcactgaaaaatttttcacatactatcatctcattgcccacaaatcagtcgacccggccgcgaatttagtagtagtagtcgacc

SEQ ID NO: 176568 - DNA, 264 bp, Homo Sapiens
taaaattcgcggccgcgtcgacaagcacctgcatatttctgagcaaatttagaagtgtttggatttgttgtaggcctgtgaggctgaacactctctggtttgatgcccagcctctcgccacggtccatgttaagcgtgccagcgccctggccataaccgtagccttttggcccatacctctttccgtagcaggatttgcagtagatctcttcatcgtgaattgccacgtcgacccggccgcgaatttagtagtagtagtcgacc

SEQ ID NO: 176569 - DNA, 650 bp, Homo Sapiens
actactaaattcgcggccgcgtcgaccacattcatctaagattatctggcataaaagcagaggaacttctctcctgtttgtcccattctctggtaaacttcatcttgcagatgaaaaactgaagcccaggggtcaggtaagaagctcatccaactccatacagccagtagctgagatctgtctcagcttgggaggctcctaattctgtcccttggaaaaatagaaatacttaaatgtagttttctctttaagatatttgtttataattccagaaggttctgaaagtcaaacttacaattgtgatttgaagtttaagaagtagaaaatgaggtgagggtttttcagtaatttcctgcaggtcataattaactttaatatcagctttgctcagccccaaccttgatatactggagctatgtggagagaaatacctttcaagttcccccagatgcttgagataaatggctagatgcagaatagttattaattaaaagtcaggtactgtgggcatctttttgatggttctgaaactgctaatcatctgctctgtctaccgtggtccttatataggccggtgggattgagctgctcaggcatttaatgagaaaatgccaagactaggtttaatttacttgaaggccgcctcccct

SEQ ID NO: 176570 - DNA, 416 bp, Homo Sapiens
ggtcgactatactacttctaattgcgagcgcgtatccacaggctctagggtattcgtgacgggtgtgtgcgaaaggggcggtgtcgttgtcgaacgatgatcacagaccggttctcgtatctagggcggcaaggttgtcgcgcattagcgctttaattcgatctgagcagatatcttcccaagctgaattggcgcgtaggctagctgccgagggaatagtcgtgagccagggcactctttcccgagatctcaaggatgtaggggcggcgcgcggtccagatcagttggggaattttcaatacagcattcccgagggtgagcatccttctcaaatgacgacggggctgcctgctcggaaccatttggctcgtatgtgtcagtcactgtgcatcgcggccaattacaataacgtcgac

SEQ ID NO: 176571 - DNA, 333 bp, Homo Sapiens
  misc_feature (112)..(112): n is a, c, g, or t
aatgccgctgctgatctgacagaaggcggagctcaggtggtcacgctctcacacttcctgctgtgcggcccattcctaacaggccacatactggtacctggccacagcctgnggggttggggaccctgtattacttaattcctttgagtctctgatatttaaaaggtgaaatggaaccagtcactgtgttaaccttcctgagcaattcagggatagaaggcatacgtgcttgtgtggtgtgcagcaaagtgctggcactcagcagatgctcaatgaatgttcattcgctggtggcaaaatagtggggtggtcgacgcggccgcgaatttagta

SEQ ID NO: 176572 - DNA, 308 bp, Homo Sapiens
  misc_feature (88)..(88): n is a, c, g, or t
  misc_feature (97)..(97): n is a, c, g, or t
ggtcgactactactactaaattcgcggccgcgtcgaccccgtcctgtggtctgcctcagtttttaatgggctccaaatgacacagagnctgggtcancctgggtctcactgcagtttcctggatcagggatactggaaagatgtcatgttccacatggacaccagcctaagctttaggatgacacaaaaagactccctccagcatgcaagtggcatggctcttttttgttaccacgctgttcccttccacttattggcgccagtgcccctcaatcctcctctggtcctgttggtgtcccgtcaacgcg

SEQ ID NO: 176573 - DNA, 357 bp, Homo Sapiens
ggtcgactactactactaaattcgcggccgcgtcgaccccgtcctgtggtctgcctcagttttggatctctctaaacctcctaaacaccggggagtctttcctacttcagtcctagtctctattctattcgccaactcctcccactcatccactctcaacacccccgcgtgcgcacacacagccacatcaggtctcccctcctagaccccgaagtcggcacctcactagcccaaaactcaagaatgaggaacccgtgtgatccacgggttaagtgacccatgatagtaaatctgcgtgagagatataagtgacccacctctgaggccgaggttcctgccagacgtcgtgtctggcgt

SEQ ID NO: 176574 - DNA, 440 bp, Homo Sapiens
gcctactactactaaattcgcggccgcgtcgacgagaagtccaaggtcaagggggcgcatctggtgagagcttccttgttggtgggtactctctgcagagtctcaaggtggtgcagagtatcacatggcaaggaggctagcttaagtctcatttcctctttagtcaccagtcccactcctgcgataacctgttaatggattaatccattcatgagagcagagccatcatgacccagtcacctcctagaggccccacctctcaatacgcccatattggagattaaatttcaccatgacacttggaggggacaactgttcaaaccacagcagtagctctgtgcctgttttgcatccatcagatagccaagtcatagagggaaactgaggcagaccacaggacggggtcgacgcggccgcgaatttagtagtagtagtcgacc

SEQ ID NO: 176575 - DNA, 208 bp, Homo Sapiens
ggtgctgtggtcattgcacagaagggaaaggtctcaaggaagagtcaactgggacaagcacaagcccaccggacatggccttggtaaaggttagcagactggtgtgtgtggatctgcagtgcttcactggaaataatttattcattgcagatactttttaggtggcattttattcattctcctgtgctttaaataaacaaatgtacca

SEQ ID NO: 176576 - DNA, 315 bp, Homo Sapiens
ggtcgactactactactaaattcgcggccgcgtcgacgtgtgttccaggtcagggaggccacggggtggctagaagcagagagcgagtgaagaggttggtgctggtagggccacttggggcctttgtcatgaggggtggggagaatcctttacagcagtgtaagcagggcagtgacataattcacatctgcttgtgtcggaaatgctttaggcactgtggagatacaggggtggcggtagagaggctacctggaaagccactgcaattgtctaggcaagaggtggtgggggcagggactgcttcagtttctgtcg

SEQ ID NO: 176577 - DNA, 547 bp, Homo Sapiens
gctctgatctgcatctttcacgagcgagagggggggtgccaggcacttcctggtggaccttcagttaccgcccatcagaacacaagcaggcagcgcgaaacatgctgggcccgggggctccatcgccctttacactgccacactcagcttccacatgttctactgtgggcgtgtgcccctccttcatgtttctggggttcatggggacattagtgttgtccttccctttctgtctcaaagaattgactgtgcctgtcattggacgcagcggctgccatgaatgtcgaccgggaaagcgatgggaaaagctgttcagacacagctgagctgcctctacctggtcacctgcacgccaggcccatgcagtctgctccatccctgtccctggcagagcccatctgggagtggtggtgactgtgccagctggagacccactgagcaccagggtgcagcacagacaacgacgccctcaggctgcgtgcagtgaagagccgggagaggcagcgctagaattgtcgacgcggccgcgaatttagtagtagtaggc

SEQ ID NO: 176578 - DNA, 480 bp, Homo Sapiens
ggtctactactattaaattcgtggccgcgtcgacgaagaattggagagggagccagagaggttagccgggaccagatgatagaaagccttgggagccacaggaaggagtttgtatttcaagtgggagggaaagccgttctgaggttaacaggcaagactgtggataataggtgctagggtgttaatagtggcaatacagatggtgttgatctggcttgggctggtagcagtagaaattgtcagaagtggactgactgggggttgttctgaagtcaaagctggcagacttgctgatgcattaagtggatgtgcaatgtgaaagaatgggaacggaggcatcatggtgaagcccagtcttttggcccaagcaacgaggtgaacagtgggctatttaccgacattggggaaaactggtagaggatcagattttcatgggggcaggggtcgacccggccgcgaatttagtagtagtagtagacc

SEQ ID NO: 176579 - DNA, 377 bp, Homo Sapiens
ggtcgactactactactaaattcgcggccgcgtcgaccagaaagcacctgcctcttggttttgttgtacagatgacatatgagaacacaggcctggtatggtacctcgcacacagtaaaggatgagtacagacagatgtgtctcctgctgtcattcatgaggggctccctggccctatgccccccggggggattctcattaggtcacttcttaaagcctcctgagacaaggcattcagtgcccatcctccctgctcactatgcttggcacccacttcccccagtgtgctcaccaccatgtggggaaacagtcaattccatggtgctgtgtctgtcttcccaggtgtggccccgtcgacgcggccgcgaatttagtag

SEQ ID NO: 176580 - DNA, 301 bp, Homo Sapiens
cacctgtgccctcaaagagttcatggtctagcaggaggtgaaggagaggcagttacgataggcggagaattggctgctgtgggagcacacagaagaggctcctaacacaaaggcgggatggggggaaggcacctagaggaagcactagcaagcctgggtcctgagaggtgaaggcaatgagccaggtgagaagtgaggacttgaaaactcaaggtgcaaatgagcctgaatttggctgtacaacagggggcagggactgcttcaggtcgacgcggccgcgaatttagtagtagtaggcggc

SEQ ID NO: 176581 - DNA, 352 bp, Homo Sapiens
gctcccacagaagagcaatccgcatccagaacaatccatcagaggttgaacataaatggctgtaacagacgctcgtgcaagcaccaccccgttgatcgaaaggcgttcgatcgactacatcccggaagcggaaagacacggccgtctattgagtcagttcaccctgtggttgggtgccaacctgcaaatcaccgcgattgtcaccggggccctggccgtggtgttgggcggtgatgtgttctggtcgttgatcggtctgttgatcggtcaactgctggggggcggcgtcatggcgctgcacgcagcccagggcccgtcgacccggccgcgaatttagtagtagtagtcgacc

SEQ ID NO: 176582 - DNA, 431 bp, Homo Sapiens
ggtctactactactaaattcgcggccgcgtcgacctgggtctgaccttagctgctccactaagggcttaacaggacactggccacaggcctgctcccatccaactccactggggccacaggagtgaccctacccaggatggagtgagggcaggcacagaccaaacagtgcagggtcggggggtactgttcactgggacaagagatgaggaagatgctggatttaagtgggcaatgagggtgcctagcagaagaggggactcttaacctgggtcttgatggatgagtagaagttctctgcatgggaaggggtggaggtcatttcaggcagaggaggaagcattaaacagcatggtgtatctcaaggagagcagctggagcatgagtaaggggggctggagtagggggcagggacgtcgacgcggccgcgaat

SEQ ID NO: 176583 - DNA, 390 bp, Homo Sapiens
cgggcgcgtcgacaaaaaaagcgacaccagttgacctgagtggaagggactgtgaataatgagatttagaaaaagacagactagcccgtggaagatttgtaaaggtcaggtgtgaaagtgtagcctttatccaggaggttcctcttaggaatcttggatagattttaaggaacagaatgtcagggcagatttatatttttagatccctctagcagttggtggaaggatggcttgggattgggagtaaaaatggaggcagagagacccataaggagactgtgaagaccaggtaaccgatgctgaggcttgaacctgggcacaagggaacgtgcgatggaggccacacaggtagaactcaccaaagattggatctcctggcctgtgaagtct

SEQ ID NO: 176584 - DNA, 713 bp, Homo Sapiens
cggaacgctatgggcggacgtggagtgtggaagagtatctactgactactggatcttaagacccatgtctaggagcaggagtcagcataaggacgctgacctctcctggctgtgcctgtgactccaaagtcctatcttactgtgacttaaagtttgatggagagaaagctgtaggatccataaattctaccaggaaaccagggtcttcctgttcctagcactgagaatgggcacccagtggtccaagaacactttctgggctaacatagtcctcacacagggctgagaaagaaagtgtctcctttcctggaaagcacatgtaaaagttaagggcctgaatctcttctaaaccaataattgacctctaggcacccaccataatactgctaccttcagggcagaagacactgctctttgtaacccagccaccaccaaaaagcaaacagaaagaaggaaggatggttaaagccattggataatactgaatctgtttccctaagtgacttaaccttagagcaagcacaacatccaggttaatttataagtaagatttctccttttattattgccctcatcatagttcctgattgtctcttaacgtaagtggttaatagacattactatttctgataagtaatttacgaactactataaacaaatgtataaaacattactaattgctgactgagacatacagtcgtatctccctccac

SEQ ID NO: 176585 - DNA, 237 bp, Homo Sapiens
ggtcgactactactactaaattcgcggccgcatcaacagcgcatccggcgtgtggggaagctcagtcaccttgagagcgtccataagcaccacattaacgttttgtgccttatcggggcggaatttggcgatagtatgcggtagctgctgcgccaatggcggatcgatttcaaccgctacaacctggcgcgcggcatctgccaacccgccgcgtagacgtcgacgcggccgcgaatt

SEQ ID NO: 176586 - DNA, 353 bp, Homo Sapiens
ttcgcggccgcgtcgacagaccgtgcatccccggtgacctcggggaccgttccgtgatcatcaggattttcttggactctggggtccttgtcatgctcaggcatccatgccctgctctccttgagggccctcaacactatcttccctggacacaagtctggggacagcagggtgttgaggagcccaaaggggtgactacctgctcctgggccccacagagtccttgtgctgagtgtagtggctgagctgggggatgccctggaattcggagcacacagcactggcttactgtggtacctgtgcagtgaaattgaagagacaatccagcagcccaggtcgacgcggccgcgaat

SEQ ID NO: 176587 - DNA, 362 bp, Homo Sapiens
gggcgctactactactaaatacgcggacccgataacagcttactccttcaaactgctcccacccctaattatctccacaaagagctatataaattgggcaggggtatgtgtacagtcatctcagctctaacaaccccagttcttctttcaattctcctttctcccttcatacaattgagatgtttgtcctttgcactttccccaagatagcaaaggtgatacaaatgtggaaggaggggaagtgtagaaaataaacctgtcatcatcctctactcccatctccagggaacagacagattatatgaactctgaccaaatgatttgcttgtctggtcgacgcggccgcgaatttagtagtagta

SEQ ID NO: 176588 - DNA, 769 bp, Homo Sapiens
ggacgcgtgggtcgacccacgcgtcggtcagcttcaggcatcgcgaggcgtggcggccccatggccccgctgggaggcgccccgcggctggtactgctgttcagcggcaagaggaaatccgggaaggacttcgtgaccgaggcgctgcagagcagacttggagctgatgtctgtgctgtccctccggctctctggtccactcaagggaacagtatgctcaggagcatggcttgaacttccagagactcctggacaccagcacctacaaggaggcctttcggaaggacatgatccgctggggagaggagaaacgccaggctgacccaggcttcttttgcaggaagattgtggagggcatctcccagcccatctggctggtgagtgacacacggagagtgtctgacatccagtggtttcgggaggcctatggggccgtgacgcagacggtccgcgttgtagcgttggagcagagccgacagcagcggggctgggtgttcacgccaggggtggacgatgctgagtcagaatgtggcctggacaacttcggggactttgactgggtcatcgagaaccatggagttgaacagcgcctggaggagcagttggagaacctgatagaatttatccgctccagactttagtcactaggttctaggagtgagctggggcctgctgaggtgggggtggggctgactcttgcaaacatggggggtgtcccccgatcctggccgaggtgaggaaccagacagggggggtctagatctgcagg

SEQ ID NO: 176589 - DNA, 368 bp, Homo Sapiens
actactactactaaattcgcggccggataaacgtcctggtggcttgcttggatgctggtattgagagtggtgggctgggtacgttctcaggcccctggccagcaggtgtggtgtgggtgatggcagtagcagtggtaggataaccctctgggtcttgagcagtgcactctggtgctgacagtagatacaatgtgctgagtgggccagtcttcaggcccgcaggtagcatgtgcagtaggtgccagctgtggtggtagcagcagggtgtgtgggcctaatctcaggcccctagaagaggtgctcaggtgctgatggtggtagactaggctaggtcgacccggccgcgaatttagtagtagtagtcgacc

SEQ ID NO: 176590 - DNA, 811 bp, Homo Sapiens
  misc_feature (732)..(732): n is a, c, g, or t
  misc_feature (781)..(781): n is a, c, g, or t
ggggccctgtgagttcctccggccgggctgcggggctccgctcagtccgggagcgcagctgggccgcggcgctccgacctccgctttcccaccgcccgcagctgaagcacatcccgcagcccggcgcggactccgatcgccgcagttgccctctggcgccatgtcgcagaacggagcgcccgggatgcaggaggagagcctgcagggctcctgggtagaactgcacttcagcaataatgggaacgggggcagcgttccagcctcggtttctatttataatggagacatggaaaaaatactgctggacgcacagcatgagtctggacggagtagctccaagagctctcactgtgacagcccacctcgctcgcagacaccacaagataccaacagagcttctgaaacagatacccatagcattggagagaaaaacagctcacagtctgaggaagatgatattgaaagaaggaaagaagttgaaagcatcttgaagaaaaactcagattggatatgggattggtcaagtcggccggaaaatattccccccaaggagttcctctttaaacacccgaagcgcacggccaccctcagcatgaggaacacgagcgtcatgaagaaagggggcatattctctgcagaaattctgaaagttttccttccatctctgctgctctctcatttgctggccatcgggattggggatctatattggaaagcgtctgacaacctccnaccagcacctttttgatgaagaaactggaagtctggacttggggtcggntagtgggaattacttctggagctttgcaat

SEQ ID NO: 176591 - DNA, 322 bp, Homo Sapiens
ggtcgactactactactaaattcgcggccgcgtcgacgctcatattcgacagtcacatgtgaccagtgatgacacgggaatgtgtgagatggttctcattgatcatgatgttgacctagagaagattcatcctccttcaatgcctggagacagtgggtcagaaattcagggaagcaatggtgagactcagggctatgtatatgcccagtcagtcgatattacctcaagttgggactttggtattagaagacgctcaaacacagctcaaagattagaacgactccgaaaagagagacaatccagcagcccaggagtcgacgcg

SEQ ID NO: 176592 - DNA, 414 bp, Homo Sapiens
ggcatcataaccccccagagagttggcgtgaagaaagcagtccaggttctctccgagtctggtgtgtctgtgaagatgataacgggggatgccctggagacggccttggccataggaagaaacatcggcctgtgcaacgggaagctgcaagccatgtccggggaggaggtggacagcgtggagaagggcgagctggccgaccgcgtggggaaggtgtccgtgttcttcaggaccagcccaaagcacaagctcaaaatcatcaaggctctgcaggagtcaggggcgatcgtggccatgactggggatggggtgaacgacgcagtggccctgaagtctgcagacattgggatcgccatgaggcagaccacaggacggggtctactcggccggcgaatttagtagtagtagtcgacc

SEQ ID NO: 176593 - DNA, 832 bp, Homo Sapiens
  misc_feature (684)..(711): n is a, c, g, or t
  misc_feature (802)..(802): n is a, c, g, or t
  misc_feature (808)..(808): n is a, c, g, or t
ggtcgactactactactaaattcgcggccgcgtcgacattgatggtcatttagaattaaccctcccctttacttattggttcctggatcagacatatggagtgcaatttaatgattatagttcattacaatactcatttgttttttgctgggagatttttctggtctcccctctctgcccccgcctttgtttcttcagtaaggtacaaaatggcatgtaataaataaaataaatatagcctcaaagaggcaggattcagctgtcaagtgcttataatactgtgtgctggatacaaatatccaaaaggaatgttagggctctcccggtagcatagcgaggattgcacttgactttcattcagcctggccctggcctggtgctgtagggaatacagagcagagggaaacagcctttctctccagccttggggattgtgcagtgcagaaggaaccaacacacacatggatgcaggaagggaagcttaggccgactcctgtaggggttcccagggaggggaattttaccttccagcttccaaaatgaagttcatctatctctgtgaatatctttaagggaaacaagttatcacattcattcacagtttaattagcttgtagtttattatgtaaggcagagatggggagagctgttgctcaatttatgctgaggtggcactgggaggcnnnnnnnnnnnnnnnnnnnnnnnnnnnnatgtgatgatgattgaaaagaaatgtcattgatattttaatttcataatctgcatctgtcagtacatggaaattatctaggtggttttttntccctncaataaattgttactttcatggaa

SEQ ID NO: 176594 - DNA, 371 bp, Homo Sapiens
gcctcagtttaccacgtccaaaacaagccagctcagtttgtggctggcgaaggttatgagcaagccagctcgtccatccctctgcccctgtgcaagcccccacaaacaggaactgactgtttgcagcagagtcggagggcaggtgaggcagagacaccaggccaaggctactcccaacaccacactctgagccccatgacaggttcatctccacagtgctacggaaaagctgggctcagctctggaaacaggcgatggggaggggatgtgacaggccgctggcaatgggatccccaacatctatcagccagatctgtgccagactgcatgctgtcgacacgcccgcgaatttagtagtagtagtagcgacc

SEQ ID NO: 176595 - DNA, 306 bp, Homo Sapiens
ggtcgactactactactaaattcgcggccgcgtcgacggcacagcagccaggggaaatgaatttatgatgtcacggcacagcaaccaggggaaacgaatttatgacatcacggtgcagcagccaggggaaatgaatttatgacgtcacggtgcagcagccaggggaaatgaatttatgatgtcacggcacagcagccaggggaaatgaatgtatgacatcacagtgcagcagccaggggaaatgaatttatgacgagacaatccagcagccaggaggtcgacgcggccgcgaatttagtagtagta

SEQ ID NO: 176596 - DNA, 144 bp, Homo Sapiens
  misc_feature (1)..(1): n is a, c, g, or t
ntgagccactgcgcctggcctcagttgagttttaatgctttgctaaaagcttatttgcttttgttgtaaagggccaggccagaccaggctagactgaactgattgtgatcactttaaatatcacttatttggagtgtcgacgcg

SEQ ID NO: 176597 - DNA, 263 bp, Homo Sapiens
ggtcgactactactactaaattcgcggccgcgtcgaccgactcctgcgcaggactggaggggagagctgaagggcaaggaggagtggatgtcgtgctaaggacccaggaagctgttgctgaggaagatcccataatggcagaaaagttcagggaggaagcggtggatgaggacccataggaggaagaggacaaagagtgcactctggagacagaagcgatgcaggacaggaactcggaagggggcagggactgcgtcgacgcg

SEQ ID NO: 176598 - DNA, 302 bp, Homo Sapiens
cgcgtcgacggaaaaaattggaagcctgagagttggtgaccctgtgtatcggatggtgtagtgatgagtgatggatccactagggtgatatggcttcagcaaccaggagggattgactgagatcttaacaacagcagcaacgatacatcagcaaatccttattatccagccttcaactatctttaccctggaaaacaatctcgatttttgacttttcaaagttgtgtatgctccaggttaatgcaaggaaagtattagagggggggttgacccggccgcgaatttagtagtagtagtcgacc

SEQ ID NO: 176599 - DNA, 387 bp, Homo Sapiens
gccgcctactactactaaattcgcggccgcgtcgacaaagcacctgctttgtgtgagttgctgtgctaagtgctggggacacagcatggatagactggcctgccctcaagaagcatgtggtctatgcagtcctgagctggctgctcacaagaagagccccgtagccatatttctcagagggtggtcctgacctgcatcacagtgacctgagttgtttgtcaatacagaaaagggtttctcaaccttggcactattgacatttggggcctgataataaccctttattgcagggggctggctgtgctttgtttagtagcatccctggcctctacctatttgttaccagcagcgtcgacgcggccgcgaatttagtagtagtagtcgacc

SEQ ID NO: 176600 - DNA, 157 bp, Homo Sapiens
gtgtgagccaccatgcctggccgggagcagcattcttaaggaattcaagacacaggaagaacacttgcctttagtgggagcaagacaacgcagtgtggcagaagacaaagaatgggggcagtcgacgcggccgcgaatttagtagtagtagtcgacc

SEQ ID NO: 176601 - DNA, 390 bp, Homo Sapiens
gcggccgcgtcgacgctgaagcagtccctgccccctcatgttgaaatccactgaaatcaaaggttcaactgttgatgtttattcacctctccaacaccagaaaataaacccaggtgttctcttcacttaaatcattgccatcaagtttaaaactcaattatccccattggtggcttttttttaaagttctaccgcaagactaaacttgaggggagagatgtgccttctttcatcctagtgtctcagcctgtaacatattacaaggtgcccatgttcttcaaagataacctttcgtacttgtttcataatccaaaaggtaattattatggcaaaatatgggcacgttcagcaatgtcgacgcggccgcgaatttagtagtagtagtcgacc

SEQ ID NO: 176602 - DNA, 366 bp, Homo Sapiens
cggccgcgtcgacggttctcaaattgatagtcacagtagtaatagcaactatcatgacagctgggaaactcgaagtagctatcctggaagagatagatatcctgaaagagacaacagagatcaagcaagggattcttcctttgagagaagacatggagagcgagaccgtcgtgacaacagagagagagatcaaagaccaagctcaccaattcgacatcagggaaggaatgacgagcttgagcgtgatgaaagaagagaggaacgaagagtagacagagtggatgataggagagatgaaagggctagagagagagatcgggaacgagaacgagacaatccagcagcccaggaggtcgacgcggccgc

SEQ ID NO: 176603 - DNA, 429 bp, Homo Sapiens
  misc_feature (257)..(320): n is a, c, g, or t
cgcgtcgacggaaggagcagaggattcaaaaggaaatggaatagaggagcaagaggtagaagcaaatgaggaaaatgtgaaggtgcatggaggaagaaaggagaaaacagagatcctatcagatgaccttacagacaaagcagaggtgagtgaaggcaaggcaaaatcagtgggagaagcagaggatgggcctgaaggtagaggggatggaacctgtgaggaaggtagttcaggagcagaacactggcaagatgagnnnnnnnnnnnnnnnnnnnnnnnnnnnnnnnnnnnnnnnnnnnnnnnnnnnnnnnnnnnnnnnnaggaactagcagagaaggaagaatggaagaagagggatgggggaagagcaggagcaaaaggagagggagcagggccatcagaaggaaagaaaccaagagatggaggagg

SEQ ID NO: 176604 - DNA, 309 bp, Homo Sapiens
  misc_feature (115)..(125): n is a, c, g, or t
aacggatactaacagtaaataagatacggtccctgccctcagagcttacatttcaacagtttaaagtgcatctcaggtatttcagataacagaagtaattctaccactctcaaannnnnnnnnnnaatgcaagacacaacacaatcataggccagagttataaaatacaatgttagaaagaaacgtttggtatcattcgtccagatcccattttacagaaaagaaactacaggagtggccatttgcacctatgttctgatttcaagtttggtgttttacccattgccaggcctctcataaaacgtcgac

SEQ ID NO: 176605 - DNA, 544 bp, Homo Sapiens; identical to SEQ ID NO: 348

SEQ ID NO: 176606 - DNA, 78 bp, Homo Sapiens
  misc_feature (1)..(1): n is a, c, g, or t
nataagctactgtgcccagccttttactaagtaattatatgtggaacaacaggtccagggcagaggaccaacgtcgac

SEQ ID NO: 176607 - DNA, 249 bp, Homo Sapiens
ctactactaaattcgcggccgcgtcgacctcaggggttttctccgggtggagatgtagccggcaacaccactgcccctccccactccacaaacagtgattctgatgcatgtcctccccttgaagagcagctccgcctctgcccccactgagaaggactattatagaagttcagcagccagtgagagctggagtggtcaaggcttgctttgtaggtaaaaaccagatggcccttgatggatacttaacat

SEQ ID NO: 176608 - DNA, 278 bp, Homo Sapiens
gtcgacgaagcagtccctgcccccgcttggatagattgtcctcttcatctttctttggggtgatcagcggcttgtagaagttgaccttcctcttcaactccaagtactggtacaggaaatccactacttcctcaggcagccgcagagccctggcaacatccagcaggttgacgaaggtgtagaactcatcctccaactgctgcatcttctgcttacggacactcacccggtgggcctcctcccggtcctgctcaaggctggcaaagggctccagcggg

SEQ ID NO: 176609 - DNA, 283 bp, Homo Sapiens
gtcgaccacagtttcaaagacccgggtccttctgacgtagtgtgttggaggcagctaggccagcttgaggcactgtgtgttaaagctgtccccctccttgccggcgacagcctccagcagggcatgtttcttctgcatgctccgtgaggactccagctcgtacatggtggtcaggttgaagagcacgctctcgtgcaggtagtgcctggggtcctgctggaccatggcctccagctgccgcagggagtccttgagcttgcccaggtagagcgtcgacgcggcc

SEQ ID NO: 176610 - DNA, 210 bp, Homo Sapiens
ttcagtagcttcctgactggtctttcttgctgctggtctctctccctagctatcctacatttggccgtttgagttagctctccaaagcataggtctcccaacacctacaggataaagtccaaacatcttaccagaatatgcttcaaactctgacaccaactatttgtttaatgtctgactctttaatagactgtccattctatcagggca

SEQ ID NO: 176611 - DNA, 356 bp, Homo Sapiens
cgacgttggtcctctgccctggacctgtacttccagagccccctcctccaccgccactaccaaacatgcctccgcctccagctccggcaccactaccaccgccgaaactatccgaaaaattgggcatgagcttctgacgtttcctctgcacttcttctttatctgtgatttcaggatagtagaggaaaggttctggttcactagtttccaagtcagatttcctccgaagctggacaaacacagaggctggttttgtaatattaatatctatatactttggagtcttgaagacaatggcaaattgtctatgaacatctgtgggggaaaaatctccaaatgtcgacgcggccgcgaat

SEQ ID NO: 176612 - DNA, 256 bp, Homo Sapiens
  misc_feature (1)..(1): n is a, c, g, or t
nacaggctcccaccacctaggctggagtgcagtggcacaatcacagctcactgcagccttgacctcctggggctcaagtgattcttccacaactacgttattttatttgaagacattctcatctagcatgaggcacagtccagaatgctgagcgacataagtacttaataaatgtcaggaccaggctgatggaataaaggcctggtggggcaagaggctgggagaagactgacatttttgggcaacattatacctg

SEQ ID NO: 176613 - DNA, 197 bp, Homo Sapiens
cggccgcgtcgacggctccagttgcagaatctttgcacgtacccactctgactttggctaccaggaacctggggcttggtttaatcctctgattcaggtattagtcaatcttagatacctgggacagtcgtaacaatctacatgtatagaccccttactatgtggcaggtacggtcctcagatctttacatgaacta

SEQ ID NO: 176614 - DNA, 865 bp, Homo Sapiens
  misc_feature (686)..(687): n is a, c, g, or t
cgggggccggagagcgcgggcggctggggaatggctgctgccatggtgccggggcgcagcgagagctgggagcgcggggagcctggccgcccggccctgtacttctgcgggagcattcgcggcggacgcgaggacaggacgctgtacgagcggatcgtgtctcggctgcggcgattcgggacagtgctcaccgagcacgtggcggccgccgagctgggcgcgcgcggggaagaggctgctgggggtgacaggctcatccatgagcaggacctggagtggctgcagcaggcggacgtggtcgtggcagaagtgacacagccatccttgggtgtaggctatgagctgggccgggccgtggcctttaacaagcggatcctgtgcctgttccgcccgcagtctggccgcgtgctttcggccatgatccggggagcagcagatggctctcggttccaggtgtgggactatgaggagggagaggtggaggccctgctggatcgatacttcgaggctgatcctccagggcaggtggctgcctcccctgacccaaccacttgacttaatctcactttcttaaattcttctattctcagacactgctctagtaccattccttcctcttagccccaggagcaaattaaaagggacaggttaaaatccccccaacgcacactcaccaaacaaaattnnaccttgttcggccgccttccgcccctcaaaaactttcctagaacatttcctttgggcgcgcggcccccaaaaggaagggaacatgggccatagctggttccctacgaggaacccgggccgtgacctagggcctggaaatccctcccccaataaacaacgcccgcgcgggcacccgagt

SEQ ID NO: 176615 - DNA, 857 bp, Homo Sapiens
gggctctctgcccagtaacaggcatcgaacggtgcagactgaagacgccctccgtcagcgacgccgtcgcaatggccatttgtcaattcttccttcaaggccggtgccgctttggagatcggtgctggaacgaacatcccggtgctaggggtgcaggaggaggacggcagcaaccgcagcagcagccttcaggtaataatagacgtggatggaatacaactagccagagatattccaatgtcatccagccatccagtttctccaaatccacaccatgggggggcagcagagatcaagaaaagccatatttcaggtcttttgattctggagcttcaactaacaggaaggaaggctttggattgtctgagaacccatttgcttcacttagtcctgatgagcagaaagatgaaaagaaacttctggaaaggaattgtaaaagatatggaggtttgggaatcatcagggcagtggatgttttctgtttattcacccaggaaaaaaagaaacctaatatttcaggttttacagacatttcaccagaggaattgaggcttgaaataccataactttccttaaccagcaataacttacagagttattctaaattcttgtccaacggtttaataaatcaatggaggaacagggtaaatgaactggaaagtctaaatatatcaactaaagtagctttgctctctgatgtaaaggatggagtaaatcaagcagcacctgcatttggatttggcagcagtcaagcagcaacatttatgtcgccaggctttcccagtcataacagcagcagtgataatgctcagaactttagttttaaaacaaactctggatttgctgctgccctctcg

SEQ ID NO: 176616 - DNA, 320 bp, Homo Sapiens
gcctactactactaaattcgcggccgcgtcgactattggtgctaagacgagaggcctgcctagctaggggggaaaatcacctgaaaagcttatttcaaacacagagttctggagccagtgagatgactccatagggtccctactgccaaacatgatgagctgcgtttgattcccagagcctacatggtagagagaggggggccttctgctgacagttatcttctgacctccatatgtgtgggacctatgtgtggcacctatgtgtgagtgcatgagtgcacacactgacacgcaaagaaatagaggtaagaaatgtcgac

SEQ ID NO: 176617 - DNA, 370 bp, Homo Sapiens
actactaaattcgcggccgcgtcgacccaaggagcaggggctgttgacaaaggccttaccaggaagggttaggacactgaccattctagaaatgggtttcgaatggcacaacactttctatttcacaaaagaccaaaagccagaggccccaggctctgtgctgatgaacagcctggctgagccctggccctggcaggtttagggcccatttggggccccctccttctctgtcagggctggggtgctctgtctgggaatgagggagttaaccaagtttggtgcacgagcaggggcagggggccactgtagtgagcgtggagaaatttggaaacacctatttcttaactcaaataaagtccagtttgtacct

SEQ ID NO: 176618 - DNA, 341 bp, Homo Sapiens
actactaaattcgcggccgcgtcgacagaggcgggaagagatgcaggaaggcgggagagataagcgaggcaagaaagttggacagagaagaagacggcaaggcaggaagagggagacagagaccccaaggccaccaagagacacgcgcacataaaggatggggaaacaattgagattgagggaggcaggcagagcggagcgaaaacaggaggacagaaatagcgaagcaaggccaagatcgggacccccaccagggaggtgcccagtacaggcatgaaagtaaggcggggaaagcaagagtggaaaggaacgtcgacgcggccgcgaatttagtagtagta

SEQ ID NO: 176619 - DNA, 308 bp, Homo Sapiens
tactaaattcgcggccgcgtcgacctgcagtccctgcccccaacccccgactccatcctggttggtgcctggaggggctccatgcctcagcccgcctccttcagccggggggatctgagctccacatgttcctgcagggagccctctggaataggactcagccaggaaaagaaatgaggctgacacgggcctcagcatggatgagccttgaggacgtcacgttcagtgagagacgccagacaccaaaggccacacagggaaggtttgaccccatttctatgcaatgtccaggacgtcgacgcggccgc

SEQ ID NO: 176620 - DNA, 369 bp, Homo Sapiens
  misc_feature (310)..(310): n is a, c, g, or t
attcgcggccgcgtcgacgaaagaggctcagaaggagacgattaaggatcttcccaagatgaaccaggagcagttcattgagctgtgcaagacgctttacaacatgttcagtgaagaccccatggagcaggacctgtaccacgccatcgccaccgtggccagcctcctgctccgcatcggagaggtggggaagaagttctcagcccgcacaggcaggaagcccagggactgtgccactgaggaggacgagccaccagcacccgaactgcatcaggacgcagccagggagcttcagcccccagctgcaggngacccccaagccaaagcaggcggagacacacacctcggaacagccccacaggagagccc

SEQ ID NO: 176621 - DNA, 326 bp, Homo Sapiens
attcgcggccgcgtcgacggtggggtgagctggagcctcagaacaataacccccggggggtcatttagggtcatgcacactcagctatttctgcttcaagaagactaattagcattcttttactggaacttgaggaacaaaggaggcggttgagaagaaccaaaacaaccttctgaatgagtgaaaatgagttgagtgtctgttatggactaggtgcttcctcctatgttatttcatttaatcctcacaaccaggtggtcaggtgggcggaacagacaggacccccatggcagcagggactttgtatgtcgacgcggccgcgaatt

SEQ ID NO: 176622 - DNA, 194 bp, Homo Sapiens
actcctaccccatacatacacctacccacctgtaaggcaggcttcctctctcaccttcattcttgcaaaagcctcaagtctctctgaacagagctggcccaaggcctgggcccatccttctgcttcctgtgttactgggcagcccaggggcccatcacccacctcagacaccgtcgacgcggccgcgaatttag

SEQ ID NO: 176623 - DNA, 374 bp, Homo Sapiens
tcctctatagcggccgcctactactactaaattcgcggccgcgtcgacctttccactcttgctttccactcattaaatacattctctccacccattactgacctctggcacagattgccacctatatgtgtcctctctccttagattccaggctttgcaatgccaactaaatcttctttcagttgccgtacctggtacagtataccaggcaccacttcctctctacagggtatttctaaactatagccctattcaggcagctccaacctgctcctactaatcagattatgccaatacacctcctcagatcggacaaccaaccccagggccttggcacttgctgccccctctacatgggctgtcgacgcggccgc

SEQ ID NO: 176624 - DNA, 1092 bp, Homo Sapiens
ccaagtttggagactacaaccagaacactgccaagtataactatgaggagctctgtgccaaggagctctcctctgccaccttgaacagcattgttgcaaaacataaggagttggaggggaccagccaggcttcagctgaataccaagttttgcagattgtgtcggcaatggaaaactatggcatagaatggcattctgtgcgggatagcgaagggcagaaactgctcattggggttggacctgaaggaatctcaatttgtaaagatgactttagcccaattaataggatagcttatcctgtggtgcagatggccacccagtcaggaaagaatgtatatttgacggtcaccaaggaatctgggaacagcatcgtgctcttgtttaaaatgatcagcaccagggcggccagcgggctctaccgagcgataacagagacgcacgcattctacaggtgtgacacagtgaccagcgccgtgatgatgcagtatagccgtgacttgaagggccacttggcatctctgtttctgaatgaaaacattaaccttggcaagaaatatgtctttgatattaaaagaacatcaaaggaggtgtatgaccatgccaggagggctctgtacaatgctggcgttgtggacctcgtttcaagaaacaaccagagcccttcacactcgcctctgaagtcctcagaaagcagcatgaactgcagcagctgcgagggcctcagctgccagcagacccgggtgctgcaggagaagctacgcaagctgaaggaagccatgctgtgcatggtgtgctgcgaggaggagatcaactccaccttctgtccctgtggccacactgtgtgctgtgagagctgcgccgcccagctacagtcatgtccccgtctgcaggtcgcgtgtggagcatgtccagcacgtctatctggcaagcaaaccaggtcttctcaatccgactgtaatctaatctgtggtgccttctgtgggactcggccttgttccctgaaccggcccattttcactctatcacctgctcgcctcgccgaccaagctatattccaaaccatctgccaggccagcttacaaaaaaaggggc

SEQ ID NO: 176625 - DNA, 55 bp, Homo Sapiens
  misc_feature (1)..(1): n is a, c, g, or t
ntgactcgaggatatctaacatcaatacctgatcactacttcacactactttctc

SEQ ID NO: 176626 - DNA, 560 bp, Homo Sapiens
aagggaaggcgctggcctgaatcagtggaagatctggaggagcaacagaaaacagttcttgaagagaaggtgggatagagagaggaaggaaaagtttgagcggtgaggagagcaggtcaaagtagtgagcacatccctatggagaagagatgactgagcccgatgaagcaataggccctgggtggttgagagaaatatgggccacagacaggcaggtaccttcccttggccaaggaagcaaggagaagaaatgtggacgcaaggggaaaggcttcaagaaagaatgtggaagtgggacgataaggcagcgcaacgggggagtcacctacagaagacagggtggaggggcccccagggaaggatggagggcagaaagcgtggtggaagggagctgggcaggacagccacaggcaggacagccataggtggagtgaggtgaaggggcaggtcccagagtaggaacaaaggaatttggagtgctcagagcagcctgcaaggttcagcatggggcaaggaaagtattagaggggggaagtcgacgcggccgcgaatttatagta

SEQ ID NO: 176627 - DNA, 467 bp, Homo Sapiens
aattcgcggccgcgtcgaccttgcttagcctgtgctggaccagctggcctggggtccctctgaagagaccttggctgctcactgtccacatgtgaactttttctaggtggcaggacaaatcgcgcccatttagaggatgtggctgtaacctgctggatgggactccatagctccttcccaggacccctcagctccccggcactgcagtctgcagagttctcctggaggcagggctgctgccttgtttcaccttccatgtcaggccagcctgtccctgaaagagaagactgccatgccctccatttgtaagaacaatgccagggcccaggaggaccgcctgccctgcctgggccttggctgggcctctggttctgacactttctgctggaagctgtcaggctgggacaggctttgattttgagggttagcaagacaaagcaaataaatgccttccacctcaccgcaaa

SEQ ID NO: 176628 - DNA, 358 bp, Homo Sapiens
gaggacaacagcctttctgtgaggaagggcttctgcgaggcccccggcaacaggacccagagtggcaaccaccctgaggactggcctgtgtaccaggagctcctggggatggtcctgtccatctgcttgtgccggcacgtccattccgaagactacagcaaggtccccaagtactgaggcagctgctatccccatctccctgcctggcccccaacctcagggctcccaggggtctccctggctccctcctccaggcctgcctcccacttcactgcgaagaccctcttgcccaccctgactgaaagtagggggctttctggggcctagcgatctctcctgggcctattccgctgccagc

SEQ ID NO: 176629 - DNA, 116 bp, Homo Sapiens
gagaagacgacagaagggagagggaggagtaatggaggaggagttggaaactggggagagatggaaggaatgtgactggagggtagagaacttggagaaaaagtaatctcatggtc

SEQ ID NO: 176630 - DNA, 1065 bp, Homo Sapiens
  misc_feature (29)..(29): n is a, c, g, or t
  misc_feature (59)..(60): n is a, c, g, or t
  misc_feature (133)..(133): n is a, c, g, or t
  misc_feature (145)..(145): n is a, c, g, or t
  misc_feature (176)..(176): n is a, c, g, or t
  misc_feature (215)..(215): n is a, c, g, or t
  misc_feature (221)..(221): n is a, c, g, or t
  misc_feature (226)..(226): n is a, c, g, or t
  misc_feature (781)..(781): n is a, c, g, or t
  misc_feature (830)..(830): n is a, c, g, or t
gtacctgataaatgggcaggcagttgtgntattggcactataaagctgtgcttttctanntacccataaaaacggttgagctctagggtttccccatctatgcctccaaagaaaagagaggcatagttatagnaaactgaaagantaatgagtggccccctaaaaggatcatcagntattatgggcctgccacatgggcacaagacggctcatgnggatancaccncccattctacatgctcaatcggatcatacggttgcaggccatcttaaaaataattactaatgaaactggcagagctttgactgttttagcttggcaagaaacccaaatgaggaatgctatctatcagaatagactggccttagactacttgctagcagctgaaggaggagtttgtagaaaatttaacttaaccaattgctgcctacaaataaatgatcaaggacaggtggttaaaaacatagtcagggacatgacaaaggtggcacatgtgcctgtacagattaaactggacacgagtttaatcctgagtctttatttgaaaaatggtttccagctataagaggatttaaaaccctcattgtaggtgtattgctagtaataggaacttgcttgctgctcccctgtgtattacccttgctttttcaaataataaaaggttttgtagctactttggttcatcagaaaacttcagcacacgtgtgttatataaatcagtatcgctctatctcacaaatagactcaaaaagtaaagatgagagtgagaactcccactanaaagtgaaaatgctcaaaggggggaaataaggtatgagaccaccacttnctcctgtttgtcttcccagtttctccccaacctcccccttttccctagtttgtaaagacagcaaaaaaggggagaaagcaaaaagtttggaaaaacagaaggtaaaatacaatatgctaggaggacctttggcgcccaccaacctgggccccgggtgggttaaaaccaaccaattatatatttaacccccttggacccaaaaactaccctgggggttaacctgggaaaaatcccc

SEQ ID NO: 176631 - DNA, 524 bp, Homo Sapiens
atggcttgttcagcccattcacctcctgaggatgtgggcagtctcctccaagaacacatggagctgcttcctgatccaagcaggtcattgccactggaaggacatggccccggtgatccatgcttcatgcccacccagaaacacacccctcagtgtgtgcctcagtttactttggagatcagttgtcgtttttagtgctcctttaggcttactaaaacagttttggaaacaaagctattttgaagtattcaagcagaggaattccctaacactgacccccttgtctttttttaatattcaggctgttttatatgcctaaatttttttcttaagatctaaacgaaaaatagtttcttgtttaaattcacataaggcaatgagatatggaaagatgaacaagatacgtataaacattggtttgcattttattaaattattctaatgcaaatcttgtataaagaacccatgatgttttgtaactttctaattaaaatgttcaaaatgaggccgagcatggtggttca

SEQ ID NO: 176632 - DNA, 1103 bp, Homo Sapiens
  misc_feature (204)..(216): n is a, c, g, or t
ccccctcccggaatcgacgtgactacttactacagcacccttcctgctggcgtgaccgtgtctaactcccctggagtgacgaccaccgccccaccacctcctgggaccacaccaccaccgcccccaaccacagcagagactagcagcggggccacctccacaaccaccaccacaagtgcacttgcccccgtggccgccatcatnnnnnnnnnnnnngacgtccagcccgtgattgacaagctggccgagtatgtcgccaggaacggcctgaagttcgagaccagtgttcgtgccaagaatgatcaaagatttgagttcctgcagccgtggcaccagtataatgcttattatgagtttaagaagcagttcttcctccagaaagaagggggcgatagcatgcaggctgtgtctgcaccagaagaggctcccacagactctgctcccgagaagccaagtgatgctggggaggatggcgcgcctgaagacgcagccgaggtgggagcacgggcaggctcaggcgggaagaaggaggcatcgtccagtaagaccgtcccggacgggaagctggtgaaagcttcctttgctccaataagctttgcaatcaaggccaaagaaaatgatctgcttcccctggaaaaaaatcgtgttaagctagatgatgacagtgatgatgatgaagaaagcaaagaaggccaagaaagttctagtagtgctgcaaacactaacccagcagttgccccaccctgtgtagttgttgaggagaagaagcctcaacttacccaggaggagctagaagcaaagcaagcaaagcaaaagctggaagatcgcctcgcagctgctgcccgggaaaagctcgcccaggcgtctaaggagtcaaaagagaaacagcttcaagcagaacgtaaaaggaaagcggcgttatttttacagaccctcaaaaatcctctgccggaagcagaagctgggaaaattgaggagagtcctttcagtgtcgaggaatccagcactacgccctgccctctactgactggaggcaggcctctgcctactttagaagttaaaccacccgataggccttcgagcaaaagcaaagatccaccgag

SEQ ID NO: 176633 - DNA, 899 bp, Homo Sapiens
  misc_feature (370)..(370): n is a, c, g, or t
ctggagaccaccagggcatctctgggctggatgagctcccacaagcctgagggaaaggccagcactcgctagcagtggcaggcagaggcccaggctgccgtcccctagagtcccaggttggctctgccagtcctgtcctttaccaaagatgaatgaagcaaatgtcatgctgccttattcagggaaggaggagcctgtcctgcctgtggccatgaccctgcctctcccaggcaggggcccgcgatgtggaactgctgccactgaggggggatccagttttgtcaatgcagttgtctctgttttacaagttggagtcactcttatgctgtacccagtttctaaaactggagactgtgtgtgccctctgggnctctgagtacccctgctttgggcttgggcctaggctgcattgaaaagagctgaaggttgtggcctttgcgctcctggcccagcctttgttccccactggagcagaaggggagatggacgacacggtgggggcatctggcctggccagtgccctgatcccagagagcccgaggaggtgtctcaggctgcctgagtcgtgacctgctaggccagagcccactccatctggtagaagggaaagcccatatgctaccaccagctgtgtccaaaaccgccagctctgttcttcctcagccagcctcgcccatccccttgaggtctcagcccctttcccttgtagctcctcccctggagggggaatggcagcaggggttggggaaacagcatctccaagcagcttagagttggccatatttacctcagcctgggcgctggtcctttcttccggcccctcccctccaaaatgtgcctattgctagagctcctccctctcaacacccagtttccttgggagttgtcattaaaggaaa

SEQ ID NO: 176634 - DNA, 844 bp, Homo Sapiens
  misc_feature (20)..(20): n is a, c, g, or t
  misc_feature (74)..(74): n is a, c, g, or t
  misc_feature (665)..(665): n is a, c, g, or t
  misc_feature (723)..(723): n is a, c, g, or t
ggttaattcttcggtgacantggcattgatgggtggtcatgcccgtcctctggcttgggttaattcttcggtgnacactggcgttgctgggttgcaatgcccgtcctctggcttgggttaattcttcggtgacactggcgttgctgggtgcgatgcccgtcctctggcttgggttaattcttggatgacgtcggcgttgctgggagaatgtgccgttcctgccctgcctccacccacctcgggagcagaagcccggcctggacacccctcggcctggacacccctcgaaggagagggcgcttccttgagtaggtgggctccccttgcccttccctccctatcactccatactggggtgggctggaggaggccacaggccagctattgtaaaagctttttattttagtaaaatatacagaagttctttttctgaactcatttatgatgataccaacctgaattctagaacagcttcctgattcttggacactgctgtcaaaatgacattcagtctgcaacagccccaggaggcaggggcaaggccaggtgctggcggacctgggttctccccgagccctgaagtggagtaaagatgtttggcccaagaagggctggggtgcaaagccaggtcaggggaaggcagagtccgctgggccttgtacggnggtactggtgccaggcttctctgggacacccccaccgaacaggcacaggggccacggngcacagacccactgaaagtaccgtctccaccacgcagaggctttatttacaagtaaacacactggtctctgtaaactggagttcctgaggcatcgcagcctcagaagctgagaaaaggtgg

SEQ ID NO: 176635 - DNA, 884 bp, Homo Sapiens
  misc_feature (788)..(788): n is a, c, g, or t
cagtgcccccagcccatgacaagggagtcttgttttctggcttggtttggggacctgcaaatgggaggcctgaggccctcttcaggctttggcagccacagatacttctgaacccttcacagagagcaggcaggggcttcggtgccgcgtgggcagtacgcaggtcccaccgacactcacctgggagcacggcgcctggctcttaccagcgtctggcctagaggaagcctttgagcgacctttgggcaggtttctgcttcttctgttttgccccatggtcaagtccctgttccccaggcaggtttcagctgattggcagcaggctccctgagtgatgagcttgaacctgtggtgtttctgggcagaagcttatcttttttgagagtgtccgaagatgaaggcatggcgatgcccgtcctctggcttgggttaattcttcggtgacactggcattgctgggtggtgatgcccgtcctctggcttgggttaattcttcggtgacactggcgttgctgggtggcaatgcccgtcctctggcttgggctaattcttcggtgacactggcgttgctgggtggcgatgcccgtcctctggcttgggttaattcttggatgacgtccgcgttgctgggagaatgtgccgttcctgccctgcctccacccaccttcgggagcaaaagcccggcctggacaccccctcggcctggacacccctcgaaggagaggggcccttccttgagtaggggggctccccttgcccttcccctccctatcactccataatggggntgggcctgggaggaagcccacaggcccagcctattggaaaaaagcctttttattttttagtaaaaatattaccggaaaagttcctttttttcctga

SEQ ID NO: 176636 - DNA, 573 bp, Homo Sapiens
  misc_feature (46)..(46): n is a, c, g, or t
gtttgcccaatcggaagagctctgtgccaaggctccgctccgtgtnttctacaacaagcctccagagatcgacatcacatgctgggatgcagacccagttccagaagaggaggagggcttcgagggtggtgattagcggtggcgccagccctaggctacccttgccaaggccgcccacctgcatcagcctctggccagacggcccgccgtgcctgcattcgcagcagctccgcctggcacccactccggattccggccctggctggggacttggccgcttccctacccacagggcctgacttttacagcttttctctttttttaaaaagttgataggagacttgtacagttgactggctttcctctcgttggtagttgagacgctgttgcaaattccacccctccttccctggtccagattgtagctcttagtcctccctgctcagctggccgggttggaggcctcaccctgcttggggcctggcgtggggggagctctggtgggaaaatgtcccccacctcttttcctagttttatgtttcttgggaaaatatcactttgtattctctgtca

SEQ ID NO: 176637 - DNA, 488 bp, Homo Sapiens
gccgatggcttcaagtgtggttctgactggaccaaagctgtgttcagcccggacagaagctatgcactggcaggctcctgtgatggggccctttacatctgggatgtggacaccgggaaactggagagcagactacagggaccccattgcgctgccgtcaacgccgtggcctggtgctactccgggagccacatggtgagcgtggaccagggcaggaaggttgtgctctggcagtagggccacgacctgcctgcctgggctggagctcttgcccgaagcctgaagcttccttcggcgccatgcaggggttggggttgggactggagctggccttgggatttaatggggaagaaggcctggcaggacctggcctgtttgtttaaaaatgaagtatgggttgggggattacgctagtttttctttgtatttttatctctatctatctcctcactttttctcccaaagtagaaaaaaatgatatctgaact

SEQ ID NO: 176638 - DNA, 455 bp, Homo Sapiens
  misc_feature (30)..(30): n is a, c, g, or t
tcacagatgggtgcttggaggaaggaaacncagctctggtccatagagagcaagacgctgtgctgccctgcccaacctggcctctgcaactcccctgctgggtgtggcgcagcatattcaggaagctcaggccctggctcaggtggggtcactctggcagctcagaaagggtgggaatgggtccaatgcactttgttctggctcttccaggctgggagagcctttcaggggtgggacaccctgtgatggggccctgcctcctttgtgaggaagccgctggggcccagttggtcccccttccatggactttgttagtttctccaagcaggacatggacaaggatgatctaggaagactttggaaagagtaggaagactttggaaagacttttccaaccctcatcaccaacgtctgtgccattttgtattttactaataaaatttaaaagtcttgtg

SEQ ID NO: 176639 - DNA, 738 bp, Homo Sapiens
  misc_feature (231)..(242): n is a, c, g, or t
  misc_feature (621)..(630): n is a, c, g, or t
aacagttgataaaaagaactttaatggaaggcactgttgtccaaaatcacataaagggtaagagcccacacggtaccaccctgctctcctacttctcaaacccacatccaccacccagacaggagggtgcagaccccacaggaaattacctcccggagcactgactgatatttttccttaaaacaaaaaaatggctgtctcagactaataacagaacatcttaagagaagnnnnnnnnnnnnctataccagctattacagcctggtaatagaagcagctttctaagaattcccaagtttataagaggcccaagaaatgcatttattctgttgtctattaagcctccatgacaaggagaaagttatgagtaaatccttggttcatcaggagttaagagctgtgtgcctcatgaggagttaagagctgtgtgcataagcaggttcaagaaacaaactcctgtttgtttgcctcttgatggttcagaaacattcagctgctttcacctctaggacaaatgcttaagaatttactctcatcaacattggaactttacgaaaacaggattcctggttcatcagaagcctgtattaatgaaaaatgcattttgttctttagtgcttnnnnnnnnnngaaactcatctacttttttgcggaactttttttgggatagccattcctcctatggatagtcatcagcaagacacctaaaagacatgttttccctagttcttatcaacc

SEQ ID NO: 176640 - DNA, 586 bp, Homo Sapiens
ccgtgagcggcgcgaaggcctccttgcccgggagcgcgcgcgcctcttccaccttggccggcgctgtgccctcgcgaaccgggctcctgcgctcctccgcgcccaggccgcgagtgctggacgagatggtggcggggctatggcgtgagtcgggcgacgctttgtccagccgcccgctgtcccggggccgctcagcagcgaaaaggtgagccttggaccgcgggctgcccttgtcacggcagggctcctccgacgtggtggtggagatcttggccgcgtcgcaggcctcggggccatgctcctctttgctctcggcctcggcgtcgctctcaccctcgctgggacataaatctttgaggttcgatgtccctacagtggaggcggctggagaagaagcctgggcgaaccagttgaaagctgcttgttcacaggaagactcatcagaagtcccattctccattttgtgtctttcatcaaacacccatcatgacatcaaggtgagctggtttcctttttcctctcggccatttccagtgttccggaaaccttttgcaaaaaggttgttgtcaaatttaagaaggttaac

SEQ ID NO: 176641 - DNA, 1317 bp, Homo Sapiens
  misc_feature (123)..(123): n is a, c, g, or t
  misc_feature (649)..(661): n is a, c, g, or t
  misc_feature (989)..(999): n is a, c, g, or t
  misc_feature (1052)..(1079): n is a, c, g, or t
acattcgcgatagaccatggatccctggacaccatgttaacacgtattctcatggtgaggagggtacatgaagagcgtgccagagccaagtctgaagactctgatgttgaattatcagattanaacggaagtgaggttcttattttcatacatattggtatgcaccatactgtgaatgcatccagctgttggaaaatgatgtataagtctaagtcctcttgacttgaccataagatcatggaaaacagatgacttgtgaaccccacagtgtggatgtgcaaatgaaaattgaaggaaagaatatgaactgagaaatgttctttggcagtgatatagttcttagacatcttcagaatgactaatttctccgagtggtgcataatcttattttgtttgggaataccaaatcgtggaatattttaaaggaaaactgttgtataaaactttaccatagtaaccttagaccttagagaggtagctttggagtgaaactttggctgcaataggctactttggcaagccctccgtaaaagtcagaggagagatcagtacagagctaagagtgacatcaaatgaggactgtgggacccagatttgaagacccaataaaaatactcaactttttacaaccacaaaacaaatcatcatnnnnnnnnnnnnntccacataaaacaccacctacccgcccactcctttaataaaaacattcccttgtccgcccccctcggccctacaaaaatttttcaaaaccccttcgttgggcgcgcgggccccagtaaggaaacgggacccgtgcgccttatgttgttccccaaggaaaacctctggccaatgaccagggctttggacttcccacccaataaaaaaacgccctggcggccaaccggaccgttctcgaaaaaaaacccacaaggggaatccttgagggtcctttatcgggatccttcccaaccggggatccccaccgcgagcttcgtatttacaaaatnnnnnnnnnnntcttgccccctctcttccgccgccccgggctggaaatttttttaacagccttnnnnnnnnnnnnnnnnnnnnnnnnnnnnaaaccgggggatgattgaacccgcgaatcgcccacgggactatcagaaccttttgcccaccctcgccgaaaaaattatttgcccaagggtgaaaaaccgggggccgccaaaaatttgccccttttttgggcccccgcgtttaaacccccgaagtgggggtaaaattccacccccgcggtttggcccgcgaacagcaaaaaacttatttcctcaaacaaaccctctattaggagaaaca

SEQ ID NO: 176642 - DNA, 483 bp, Homo Sapiens
cctctggagagtagggtctatggcgagggaaaagggtgttcaccatgataacctagtgcctccatagaggggtttggaaaaattccagtccgatttctttgtgtgtcagctgacttccttagctgattgttcccacttgcacctctccacctttggcactagaactcctgagacaccacttctcatgcttctccctccctaccagcggtcaaggctttggagccactcttttgtaactccagattatttaaagagaaaagtacaagacagaaatcttctagcactttgtaaacacagtgaataacctcttggagtatttttggctttatataaaacaaggtttttaattgtaaagtataagtgccattagaaaatgcacagggcatatctttgttaaagtagatttttcaatgttttacagaattacattttcaaaaaaaggtttttataatgaagttgtttattaaaaacttctgaatgatg

SEQ ID NO: 176643 - DNA, 262 bp, Homo Sapiens
atatttaaaatgttacttttctgtatgatgtgcaagcaagtttacccgtaacttttccttaaactttttagtgccgtttctagtatattcctgtaaatgtcagttactgaaaatgagtccaatgtaagtagtttagcttgtttattgcaatgctggcctcaacacaacagaataaaaatggtagaaagtactctttgatgtttctggtaatcatggacccttctcctggggcatttgttttgttttcataataaaaagcaaa

SEQ ID NO: 176644 - DNA, 1563 bp, Homo Sapiens
  misc_feature (106)..(106): n is a, c, g, or t
  misc_feature (926)..(952): n is a, c, g, or t
  misc_feature (965)..(965): n is a, c, g, or t
  misc_feature (1021)..(1021): n is a, c, g, or t
  misc_feature (1298)..(1298): n is a, c, g, or t
agctgtcctggctggtgcccctcccaggctccttttcaccctgccccctgggcctgaggccccctgtgtccaagcctccccctggctcttcagttctctagccctntggctttgctgggtttcctgactgtagccacatctctcccgctccctaagggtaacctagccaatggaagctgccctttgggtaggtgctgggctcctgggagggcccagatgatggggtgaggcatgtctttccagaactttccctggcagggaggggatggcagaaactcagggaggggcttggggcccattgtatctggagagcctggattcctcttggcagtcttaggcccagccacttctgctacctttgcgctgctgtgagcctcaccctgggcccctgggccctgcttctctgctcccctgggtgatgggtgggcccagaaggtggcagtcccacaccttgtcctcccacctccctgaactgtccattgcttttatagggtgaggtaagtgacagcctcccaagcccaggctttggcactcagaatgggcccagtgggggctgggcaggcccattgagggccaccgccgaggtttctcctagggctgttcctgggcctggctcttacaggctcgtcccccaggcctgcccttctccactgccccctcctgtgtctgggtccacacacccttcaggaagggggagcactgagaagcacagcacaggggctcagcctgggatccggtgatggtctgggcagaggctgggtcaggagtcccaaaggtcagtgacagtttctcagaagaggcccagcgtccacctctctcccagggccagacaccccttcctggctcccccatccccctatgggctcccagccccttgcaccctcattgctgttcagattaaagcctctgttttgcacctgtcaaannnnnnnnnnnnnnnnnnnnnnnnnnncatgtcgggccgncctcggcccctcgaggaagctttctaaaccatttcgtttgggcgcgcggggcccangtagggtaaggtgaacatgggtccataggctggtttccctagggagatccgtggtccatgacctagtggctttggaattcctccaccaaataaaaaaaccgccccggggggccacaccgaggcggttcctggaaccaaattcccagaatgggagtttcctggaggttccatttacctgggaatccttatccaaaccagggaaggtccaaaggcggaagcctccgtataatccaaaattttacgccccccccggccccttggcccatctccatttcgngcagagaaacctgggtgtgggtaaattctccattttgaaaggccaatttctcttgggcccggcaacaattgggggaaaagccccccatttcacaccaaaaaacccggcgccatatgtgaaatgaatcaccccccttgagataatcccgggccccaagagcggggggaatatctcacagtccaaccccctcttgtgtgtctcgcgccccctttgtcggggggaaaattaaaaaatatttatgttgccccgcaccattgagggttag

SEQ ID NO: 176645 - DNA, 466 bp, Homo Sapiens
  misc_feature (138)..(138): n is a, c, g, or t
  misc_feature (247)..(247): n is a, c, g, or t
  misc_feature (374)..(374): n is a, c, g, or t
  misc_feature (430)..(430): n is a, c, g, or t
  misc_feature (441)..(441): n is a, c, g, or t
  misc_feature (454)..(454): n is a, c, g, or t
caggtgcaaaacagtttgctttaatctgaacagcaatgagggtgcaaggggctgggagccattagggggatgggggagccaggaaggggtttctggccctgggagagaggtggacgctgggcctcttctgagaaactntcactgacctttgggactcctgacccagcctctgcccagaccatcaccggatcccagggctgagcccctgtgctgtgcttctcagtgctcccccttcctgaagggtgtntggacccagacacaggagggggcagtggagaagggcaggcctggggggacgagcctttaagagccaggcccagggaacagccctaggagaaaccttcggcggtggcccttcaatgggcttgcccagncccccatttgggccccattttttgagttgccaaagttggggttttggggaggtttntcatttacctnaccttttaaaagnaattggacattt

SEQ ID NO: 176646 - DNA, 469 bp, Homo Sapiens
  misc_feature (31)..(31): n is a, c, g, or t
ctgggcatcatggcagtggccctgggtgccncagggctcatgctgctagggggcggcttggttctgctgctgcaccacaagaagtactcagagtaccagtccataaattaaggcccgctctctggagggaaggacattactgaacctgtcttgctgtgcctcgaaactctggaggttggagcatcaagttccagccggccccttcactcccccatcttgcttttctgtggaacctcagaggccagcctcgacttcctggagacccccaggtggggcttccttcatactttgtggggggactttggaggcgggcaggggacagggctattgataaggtccccttggtgttgccttcttgcatctccacacatttcccttggatgggacttgcaggcctaaatgagaggcattctgactggttggctgccctggaaggcaagaaaatagatttattttttttcacagtgaa

SEQ ID NO: 176647 - DNA, 914 bp, Homo Sapiens
  misc_feature (564)..(600): n is a, c, g, or t
  misc_feature (771)..(787): n is a, c, g, or t
  misc_feature (789)..(794): n is a, c, g, or t
  misc_feature (796)..(796): n is a, c, g, or t
aatcctcttagttttaaatatattgcctagagactcagttactacccagttttgtggttttttgggagaaatgtaactggacagttagcttttcaattaaaaagacacttaacccatgtgggatgtcatctttttataattagtgttcccatgtggagaaaattattcacactacttgcatgtaaagaataatttaacttttaacattaaaatatgtggtaaaacccagaaagcatccatcatgaatgcaagatactttcaataaaaagtaagttatataggtagggtagttaagtttgcttttgtggggacttaaatgtgtctcttcacttaaagggggttgaatgtggtatatatttgttcagcttgaaaagacttagtttatatcctagctcactggaggctgctgacataaccataacttctgtcccttctaattgtcatttatatgcctaactggagctagtactttaattcttaacacaaaattactctgccattgtttccagcttccctcctacaatagaatgaagtttttttgatggcttgagatggctcacaaannnnnnnnnnnnnnnnnnnnnnnnnnnnnnnnnnnnnctccttgcttttccagttaacatctatattcacatgtaatcttgttttctcttcacattcactgagttgttcaggctcagatcatcccttgacagtagtttgccttcatctcacctttcatttgtcccaaattcaccttatttaataaagtcccatatgttgtctcacccnnnnnnnnnnnnnnnnnannnnnnanaaaaacatgtccggccgccctcggccccttcgagaaagcttttcctagaccatttccgttttgggcgccgccggggccccaatttaggggtaaaatggaaaacattggggcccattat

SEQ ID NO: 176648 - DNA, 481 bp, Homo Sapiens
agctccaggatcgggagcccgcccagcgtggtgatgctagtgggctccagccctcgcacctgtcatacctgtggacgcacacagcccacccgtgtggtgcagggcatgggccagggcactgagggccccggggcagtgtcttgggcctccgcctaccagctggctgccctgagtcccaggcagccgcatcgccaggacaaagcggccacagccatccagtccgcctggaggggctttaagatccgccagcagatgaggcagcagcaaatggcagcgaagatagttcaagccacctggcgaggccaccatacccggagctgtctgaagaacacagaggcgctcttgggaccagcagacccctcggccagctcacggcacatgcattggcctggcatctaggaccctggctccctgcagtggggacttcgtgggaggcactcatggctctctgggtctaatgaataaagtcctccacagccta

SEQ ID NO: 176649 - DNA, 286 bp, Homo Sapiens
  misc_feature (212)..(212): n is a, c, g, or t
  misc_feature (218)..(218): n is a, c, g, or t
  misc_feature (232)..(232): n is a, c, g, or t
  misc_feature (244)..(244): n is a, c, g, or t
  misc_feature (250)..(250): n is a, c, g, or t
  misc_feature (263)..(263): n is a, c, g, or t
ccaaggttgagcttgctttatggatgacaagggggctaggctgggctgtcgggggcaggacgaaaattctggctgaactttccaagggacgggacgcttgggatcctggctggtacgaggcctcccacactgtcaaatgtcaactccaccagcactgagacaatgagtagatgaaaatgtaaaaagagggaaggtgggtaggtaaaggagcngaaggnagaggtggggaaanagggaaggaganaagggnaggagggaagagnaagaaggaagaaaaggaaagctt

SEQ ID NO: 176650 - DNA, 678 bp, Homo Sapiens
cagcagcaggcgcccaaagcgctgggctgggacgggtactgcgcccgcacatctcggtgaggggcacctgcgccttctcctgcaggctctcaacgtggcccgagtctgagagccacacggcgtcgggcgtgaagagcgcgatggccttgaggcagccatactcggccgagtcgacctgcaggcggcccagcttgtccacctgctcctggaaggcgcgcacctggtccatgaaagccacggcgcgctcggcggccattggcgcggcgtggaggccggcggcggccagtagcggcgccgtgtgcaggggcagcccgcctgcgccgcgttcagcacgaagagctcgctccagctcacacgcagcagcgccacctggtcgcccaccggcagctcggggaagatggacgcgtggcgcgcccactccacggtgctgaagagcagccgcgccgccagctcgcacacgttgtcgatgcccagcaccgcgcccgccgcgccgccccctgcgccgaagcgtccggccgccgcagggtagggctcaggcgcagcagtgcgcgatcagttcggacaccggctgccccgggaagaggtctccgccgctcgccactgccgccagcgccgagcccggggggctgcccgaggaggcggccacggcaccaggcagcgagtgcgcgatgcggccgc

SEQ ID NO: 176651 - DNA, 944 bp, Homo Sapiens
ttactgccccttgtagaatatgtattaatcattctacattaaagaaaataatggttcttactggaatgtctaggcactgtacagttattatatatcttggttgttgtattgtaccagtgaaatgccaaatttgaaaggcctgtactgcaattttatatgtcagagatcgcctgtggctctaatatgcacctcaagattttaaggagataatgtttttagaaagaatttctgcttccactatagaatatatacataaatgtaaaatacttacaaaagtggaagtagtgtattttaaagtaattacacttctgaatttatttttcatattctatagttggtatgacttaaatgaattactggagtgggtagtgagtgtacttaaatgtttcaattctgttatattttttattaagtttttaaaaaattaaattggatattaaattgtatggacatcatttattaattttaaactgaatgccctcaataagtaatactgaagcacattcttaaatgaagataaattatctccaatgaaaagcatgacatgtgtttcaatagaagaatcttaagttggctaaattcaaagtgcttgacatcaaaatgttctagagtgattagctactagattctgaatcatacatcacatctgactagagaccagtttctttcgaatgattcttttatgtatgtagatctgttcttctgaggcagcggttggccaactatagcccaaaggccaaatttggacttctttttataaatgcagattgtctatggctgctttcccactactccagcctaaggtaaacagctgcaatagaagccaaatgagaatcgcaaagcccaagaatgtttattaacctgccctttacacaaaattacacaaaaagtttcctgatctctgttctaagaaacaggagtgtgccttgcatttaaaaaggaaa

SEQ ID NO: 176652 - DNA, 971 bp, Homo Sapiens
cggaaatcagggccaaagatgggtgtgcacctcgaaccagggcccaatcgcagcccctggctgaccggctcagccacacttgccactgagcgccaggatgaccacgcccccatcaagaggctgaggctgcaacaggacatgcggtagccagcacacaggacaagtaagggagggctgtcatctgtgcactgccccatggacaggctggctcccagatgcagggcagtcattggctgtctccctaggaaaccccatatccttaccctccttgggactgaaggggaaccccggggtgccccacagggccgcctgcgggtgaacaaagcagccacgaggtgcaacaaggtcctctgtcagtcacagccacccctgagatccggcaacatcaacccgagtcattcgttctgtggagggacaagtggactcagggcagcgccaggctgaccacagcacagccaacacgcacctgcctcaggactgcgacgaaaccggtggggctggttctgtaattgtgtgtgatgtgaagccaattcagacaggcaaataaaagtgaccttttacactgactcttggtttgcaagcagccttcactgtcacaggaaggacacaattctccaaaaggagttctcaggagtcttttatccctggactgccccactggcagatcccgagtgtgcacaggcacgcacggttacatggggtatgcatgcatggccatacacaggcgtgcagttgtacacaggtgtgcaggagcactccatagtgtgcacaggtacacaggcatgcacgggtgtgtggacacacaccaacactcttaggtctctcctcacagcaggacctgacttgctcccagcaacactacatcctgacagccatccctgtcctggtggacgggtgagtgcaggactcagaggcaggcaggcagtgggtgcagtgagcagactgcggagggagcaggccctcaggttgga

SEQ ID NO: 176653 - DNA, 483 bp, Homo Sapiens
acgacagcacgcaagatgatctcatggagctgaatgacgctggtcggagtttgagaaccagggctcccggcccctcttctgaggccgcagtggtggtggctgcgcacacagctccacaggttgggagccgtcgtgggacctgggtccccaccgtgaggaccccgtgggcgacagcaggtgtggccagggtggggctccgagccccgggtcaccgcccgcccagcgttccaggcacatgaagagaaagcattccaaagcctctgattgttgtttcctttttctcctcccgaaggaacagctgattcatgctcctcccgcaattgtcacgtctgtgatttatttggtgtttcgggcgtggcctctggagccccggcacgtggtgggccacgctgctggcgctcatgggccctggtgtttgcaccgcactttgtaatcagtcccgtggttgtctgtacagaattaaactattttccgatgaaaaaa

SEQ ID NO: 176654 - DNA, 412 bp, Homo Sapiens
ttgaagatcaaaaacaggcttgttttatttatacacagaacaacttatgtacagcactcaggtatggactatgtacataacaatacaagaggcgtttgtttccacggtggtcactatataaattaagattataaatacgagggggtaagccccacctgagggcacagaaccttttctccaacactcttcaaggatccttcctgactctctctgcacagcagaccatgaggcccgtcaggcaacaccacaaggggacctgggccggggcagcagagcagcccccagacagcgaggacaccccactgcgggacgccagcccagcaccaaagggcaggttcctaaacactcatgttcattccttcctcacattctaacttgttagaattagaaaaatggtttttatgtaaacagt

SEQ ID NO: 176655 - DNA, 1234 bp, Homo Sapiens
cactcagcagagatggccatattaaacacgttttgctatgttaaaagtggcagaacaggaaagacgaattaaaaataacattttttaagcgacgtaaggatgaaatactgatgaatctctgtgacattacagggaaaaaaatatagttttctatctctttcaagggcagaagagttttcatttttatttttgtaattttatctgtaagtcataaatattacttaatcaggcctgattctacttttgaaaattacagttcttgaaatgcagataatgtttactttgaaaacaaatgtcatgaatgatttccagtttttaaagctatatgtttcactgcttcatatctctgtccactttctgaatgagaacttattttgtgcctagagctctcactcactgataatgcttattaccttctgggcatttattccaaagtgggatcaactgtacgcctttggtatctgaccataaagtcttttgctccgctgacatttgggtgatgtcttcacatggaaatataataaaaataaaaatctagtttaatactgcattatttattttcctaaggctaaagaggagcagtcctatgcttttattcagcatcctttatctgtgacttcatgctctgataactgcctttccttccttctgtgcctttgaatacaaatttcagttctgcaaaagtgaaacattaaacattgccaacgcaaatggcgggggaatgacgccaaaccggcgccggggggccctcgtactcgccctgtatcccgaatttacgccttgctcgggccgcctttgtccccccccaaaaaaaccctcctcctataaccattccccgttatggtactcccgcgctttcccccccgttttggcctaaggcgcgataacactcggcgccataaagctgtgatcccccttttgtataccccccccttgcttttttgacccctcaagggcttttgccacctcttcccccgcagtataaaaatcaccggctccggcctgattgacttgcacaggcattatattaaaaaacaataccccgacagaggaatttaatgtaacagtcccatcttaacgggccactcccttttctttttggggtatacccccactcctctcccttctttattctcgcaatatttatgctgtcccaacatcgcccacccccttttttaacagtgattgcccccactattcgccctcgcgtgcactcccccggcgctacaccgcg

SEQ ID NO: 176656 - DNA, 737 bp, Homo Sapiens
ggggaattaagaaaaggttcccttgagagtcctgcaacggatgtttttggttctacagaggaaggtgaaaaaaggtggaaagacttgaagaacagagttgttgaacataatattagaataatggccaagtattatactcggataacaatgaaaaggatggcacagcttctggatctatctgttgatgagtccgaagcctttctctcaaatctagtagttaacaagaccatctttgctaaagtagacagattagcaggaattatcaacttccagagacccaaggatccaaataatttattaaatgactggtctcagaaactgaactcattaatgtctctggttaacaaaactacgcatctcatagccaaagaggagatgatacataatctacaataagggtcttagtgctttagaaaaaagttaaaattggaagtcattaaaaaaagactgttataatggtgtatatgttggggttttttttctaagcttctttgtcttaaattttaaaatagtgaatatgtttgagactccctttgacctttcagttccccaagttcattgttaactttgcatttgcaattggtgcaaaaatacagatttctgtcgtctgaatacacaaaaagttgtgtcataacttacccagatatgtttttctatcatttgaaacctttttagctactgtttgttttcattcaactaacaaacatattccaataataaaagcagtatatacatat

SEQ ID NO: 176657 - DNA, 407 bp, Homo Sapiens
gtgacctggctcttgcgcctcttacccaatccatctggtgtgagccttgccatcagcagcgcaaacatgacgcaaaaggtcaggaacgctcaccctggccctgaacggaaaacctcctctgcatgaagttgtccggagttccagtgcatcctcaaacattctgcccatcactcgtcttgtgcccagcctggaaacctacctcccagggagcagttccaccataagctcacccgttcctatgatgcatagatcaccagccatgtgccctagtgtccaccgtaacagactcaaaccacatggaccacgaatattctttctgtccagaagggctactttccacatatagagctccagggactgtcttatcagtaacagctgttcaataaacattgagtgagcacctcccc

SEQ ID NO: 176658 - DNA, 639 bp, Homo Sapiens
ggggctaaagcacgagcctcatctgtaaatgcagctcccacttcatttctttaatgaaatattagttggaagacttcacaaagactgctgataactatctgtgattgataggaaattttttttcttgatttctctgtgagaaatgtaatgctgacttttataaagcctggacttctactttatttaataaaccaatgtttgcaatggtaaatgaaacatttccctggacaggtatttgaaagtcattaaatacaaaagttttggaaattcaggaaagttaccaattatgtacggatattatacaaaggaaagtagttatatttttaaatgctattattgcagaggatcatcaaaaaaaaggtaatctacgtaatttcctattctaatgtctttttcctaataaaaaacttcaactttctatagggcgccacgacggagcacgcccaaaaaacatgtcggcccggcctcggcccctcgaaaaagtttcctagaaccatttccgtttgcgcgccccggggccccccgtaaggggtagaggggaaacatggggccccataaccttgtttttccctaagcgagaaaccccctgggttccaacggacctcacacggcccttgcgaaattttctccaccctaatt

SEQ ID NO: 176659 - DNA, 509 bp, Homo Sapiens
gagacccatcacaccaggaggaactctaggtgggacaagaggacactggagcaggaggacagcagttccaagaaaagaaagcttttataggaaagcccagtgacatgggccagcagccacagcatattgtaaactgaagatgaccagctcgtgggaccatctagataagcttgttttttgtaaggagtttgtgtgctgttggaaaacatggaaaatgcatccttaacacctgagcctctggtcatcttcagtattttctgtcatttgcaaaagctttcagagggcattgtgtatccgtaataatgtccttgaagtcagagactggaaatgttgatctcttagtcttctatagacaaggaggtcagactggagtgaatgttgtaaaagttgaaatgtatatttgtatagcaaataacaaaatccttttaaaatttaatctagtagaccgcttttctttccccctgtttaaaatgttaatcagttttcaacagaacaaactttatattacc

SEQ ID NO: 176660 - DNA, 490 bp, Homo Sapiens
  misc_feature (460)..(460): n is a, c, g, or t
  misc_feature (472)..(472): n is a, c, g, or t
caaagggagctggagttgatttattggctggaaaggaccagctcaggattaagcctcaatcctctgcggcagagggtcaggaagggagctctgcggggaggttggttgagtgctgggagccacctccttaaggggaatgggaggagcaaatgggacatccggcttttgcctctttttggacaacccctttcccagggagtgagctggtaccactggaagggcttcgagttctcggtgcccttcacggaaatgaagctgaaaccaaaaaactttcgctccccagcggggggaggctgagctgctgcccacctctctcgcaccccagtatgactgccgagcactgaggggtcgccccgaaagaagagccagggtccttcaccacccagccgctggaggaagccttctctgccagcgatctcgcagcactgtgtttacaggggggagagggggaggtcgacgnggagccataaanggaaaaactgaggtaccc

SEQ ID NO: 176661 - DNA, 277 bp, Homo Sapiens
ctggaagggcttcgagttctcggtgcccttcacggaaatgaagctgagaccaagaaaccttcgctccccagcgggggagggctgagctgctgcccacctctctcgcaccccagtatgactgccgagcactgaggggtcgcccgagagaagagccagggtccttcaccacccagccgctggaggaagccttctctgccagcgatctcgcagcactgtgtttacaggcgttaggggaggggttcgtacgggagcaataaaggagaaactgaggtacccg

SEQ ID NO: 176662 - DNA, 1292 bp, Homo Sapiens
gggagcggaggggaggtcgtgatggcggcgccggaggcggaggttctgtcctcagccgcagtccctgatttggagtggtatgagaagtccgaagaaactcacgcctcccagatagaactacttgagacaagctctacgcaggaacctctcaacgcttcggaggccttttgcccaagagactgcatggtaccagtggtgtttcctgggcctgtgagccaggaaggctgctgtcagtttacttgtgaacttctaaagcatatcatgtatcaacgccagcagctccctctgccctatgaacagcttaagcacttttaccgaaaaccttctccccaggcagaggagatgctgaagaagaaacctcgggccaccactgaggtgagcagcaggaaatgccaacaagccctggcagaactggagagtgtcctcagccacctggaggacttctttgcacggacactagtaccgcgagtgctgattctccttgggggcaatgccctaagccccaaggagttctatgaactcgacttgtctctgctggccccctacagcgtggaccagagcctgagcacagcagcttgtttgcgccgtctcttccgagccatattcatggctgatgcctttagcgagcttcaggctcctccactcatgggcaccgtcgtcatggcacagggacaccgcaactgtggagaagattggtttcgacccaagctcaactatcgagtgcccagccggggccataaactgactgtgaccctgtcatgtggcagaccttccatccgaaccacggcttgggaagactacatttggttccaggcaccagtgacatttaaaggcttccgcgagtgaatgagtgcttcttaatcctaaaaacacaatggctgaattatctttctccatgtggcgctgaatcacccatctggtttggagctagagttgcttcctggtgagagaggaagcaactctccttctggttgtctgcctcccctcagatttcctgataggctgatggcatgtggctgtgactgtgactgtaatcattgctgaacaacatctctttgaatcaaaggttgattttcccagagggtgctgggtcaggcatttctattaggagttggaaagcaaaaatgggtccatagacactctatggaggtgtccctttctgctctttgctgtgtcctttcagaatttttaccaggaacataatgtggatgtgacttatgaacttaaatataaaataaatagattcttattatgaacggcacacaatccaaccccaataaaaaaaccctgtc

SEQ ID NO: 176663 - DNA, 493 bp, Homo Sapiens
ggctcaggcatcccttcccttccctggagctgccctgcctttctcaagtatttatttatttattgcatggttcctgggaacatgtggcacaagtaatgggatgaggaggaattgggggtgggggtcttctacctaggactcttccctggagtcatgggctgcctgggacccaggacccatgagggggctgagaggtttctacactcgaggagcaggggtccagagaggcaggctggggaggcaagggacccatcctaggcccgctttcttgccaagccaagcagcttagctggggctgtgcagccaggggcttacccaggccagtggaggtgccacagccctggggagccagacaggctttggtatcgtatcgcctctgtgtccttttaagagaggagagttcagtaccccgtgctttctttacactggagaggaactaaaaggatctctgtgtctatggagaattgtcaataaaaaggcctcaagcttaaaa

SEQ ID NO: 176664 - DNA, 482 bp, Homo Sapiens
ggcctcccaaagcgctgggattacaggcgtgagccaccacacccggccgtggaatggttttcttagcatatcctcctggggccgtggcgccccggctgtgggccgtggtggatgtcccttgtttcagtggtcctacaaaggtagatggtgggcggacaccgaagtcaacttgactgtaaaagtaccccataccgttgacgcgctgtggcagacctgtgggtgcggtctcccctctccaaatgccacctcttcctgctccctcctcttttggctcctactcagtagttccattgtgggctgcagtaatataaggacctgttctggacacagcactgggcccgctggggttttagtagggcagccccttccctgcaggagtgaggcatggtgacagcagtcccctatgtgcccccaagtcatctgagcattggtgtgcattaaggtactcaatcttccaacaataaataccataagtgcttagg

SEQ ID NO: 176665 - DNA, 421 bp, Homo Sapiens
aagggcaggccgggtgagcagacggatcggccgactagacagccaaccagcaacaacgaactgagctcgcatactaccgcttacgcatctaaccaaccgcccatctagctaacccgagcccctccaccgtcaactcaggttcagccggtccccccagccctgccggagccgtggtggcagcccccgggaggagcactggcgtctgtttccttcgattctcgggattcgaagatggctgcacagtcagcgccgaaagttgtgctaaaaagcaccaccaagatgtcttctaaatgaggcgcttttactaatatggttgaaggaacaaacaggccgacggcagtggaatatttcggggcttttggatggcagggcaacaacaggcagcttgggccagttgtccaggaaacaggaaggatttggg

SEQ ID NO: 176666 - DNA, 842 bp, Homo Sapiens
ggggtggcggccattttgttttggacaccgagcaggagctggcggccgctgcagacgaaaggcaggaaagggcaggccgggtgagcagacggatcggccgactagacagccaaccagcaacaacgaactgagctcgcatactaccgcttacgcatctaaccaaccgcccatctagctaacccgagcccctccaccgtcaactcaggttcggccggtccccggcccgccgtgccggagccgtaggtggcagccccgggaggagcactggcgtctgtttccttcgattctcgggattcgaagatggctgcacagtcagcgccgaaagttgtgctaaaaagcaccaccaagatgtctctaaatgagcgctttactaatatgctgaagaacaaacagccgacgccagtgaatattcgggcttcgatgcagcaacaacagcagctagccagtgccagaaacagaagactggcccagcagatggagaatagaccctctgtcccaggcagcattaaaacttaagcagaagagccttaaagcagcgcctgggtaagagtaacatccaggcacggttaggcccgacccatagggggccctggccaggggaagcaatcggaggacaaggcctacccataatccaaagaggcttgcccagaggaagactacctgggggaacgtgccaaccagacccctacttaaggggcggggatggtacctcccaaggtccgggttatgataaggtccgggggaaaaaagggggcttttggaagggccaaggccccaaggcccccgggaaccaaaggggaaaaggtgcccccttggcctccggcccttggtaattggaccca

SEQ ID NO: 176667 - DNA, 762 bp, Homo Sapiens
  misc_feature (513)..(513): n is a, c, g, or t
  misc_feature (663)..(663): n is a, c, g, or t
  misc_feature (683)..(683): n is a, c, g, or t
  misc_feature (689)..(689): n is a, c, g, or t
  misc_feature (716)..(716): n is a, c, g, or t
  misc_feature (735)..(735): n is a, c, g, or t
  misc_feature (751)..(751): n is a, c, g, or t
ataaaaaatactgtaataaaagtacttataaacatactaatcctctttcaggaccctaaagttgcaggttagtaggtcttcaaggacaaatctgtaagtttcttatttctgtagtgcaagtaaaatttcactttttgaaactatagagagatccctttctgattagcctacagaacttaaagtgagggaaccatttcctctcacagacaaagaggcctgggatattaggactttggggtttgagagcatcatggggcagacagatggtggatggtctggacaagaagcgagtaagccactgcgggttggtcatactgaagggaattgatggcaagaggatcccctggagcaagtcagaaattactctcattcagtcggtcaggggcacaacctgaggtactctgctgagtgggcaaggctgaagaagaggcctgtggaatgcagcattacctgctggacagagcagggcaggcagttctatgccttggagctcctgactgcagggactctgtncccacactcaaaaagactcagctcactcaatgagagaatgtgatttactttatagaacgtataattcaactttgttgaataatttgttctattaaggctgtctaaagtatgtgatgtcttcatcatagtattgaagtgttgaaaatttantaacgagcccagtttagggnaaaagntgctttaaaactttggccctaaggggnttatccttaaattaccctnggtaaaatttgccccntggggaaaaaa

SEQ ID NO: 176668 - DNA, 648 bp, Homo Sapiens
  misc_feature (394)..(404): n is a, c, g, or t
  misc_feature (452)..(452): n is a, c, g, or t
ggtcagacaatgggctggggagagaaggccatagagatccgatctgtggaaactggtcacttggatggtgtgttcatgcacaaaagggctcaaagactaaaattcttgtgtgaacgcaatgacaaggtgttctttgcctctgttcggtctggtggcagcagtcaggtttatttcatgaccttaggcaggacttctcttctgagctggtagaagcagtgtgatccagggattactggcctccagagtcttcaagatcctgagaacttggaattccttgtaactggagctcggagctgcaccgagggcaaccaggacagctgtgtgtgcagacctcatgtgttgggttctctcccctccttcctgttcctcttatataccagcttatccccattcnnnnnnnnnnncttactccaaaataaatcaaggctgcaatgcagctggtgctgttaaanccctccaactcccaccacccatattaatatgtcggcccgcctccggccctcaaaaaaggctttcttagaccatttccttttggacccgcccggccccagcaacgttaaactggaaccctggctccactagcctggtcttccccagggaaaatccctggggtcactgaattaggcgcctttggaatttcctcccccc

SEQ ID NO: 176669 - DNA, 348 bp, Homo Sapiens
caagcaggctttattcactacttctggtttgctgttatcagagtctgctcgtttgcaggatttttcgaagttcagtgattgaagattttatcatgtaatgaagcttctgcctaatggggtattagatattatctgaagaccctgctgggtcaaaaacctttctgcctactggttggtagtggtaaacgcggctataaatttcatctttgttttgaaggcttgttagcagtgatccctagaaattgagataggacttgctgaaaatttgttttattccggtttcatgtactctttaaagtgattggactatttgattttaatgtgcaaccttcattgtccattttttgc

SEQ ID NO: 176670 - DNA, 549 bp, Homo Sapiens
agagtatgacaatggagctgaacagtttttaatgcgcaagcagttctgttcttgtgtatgacttgtaaccttaatttactgtgtaaagatggttacattatttccttagctttgtttgttggagacaaatagagaatgcttgttaagtatgtcaaaacaatcttatcttgtgaatttttgttaatgtattatacgagctatatttttcatttgcccagaaagacagcttgtataacgcttttggaagtttctgctctgtaatgtctttagagctgacagtctgttaggtttgtttttttcttcatgctaaagtgtcagttggtggttttgtgaactggtcaaaaattcacaggtcttaaatgttttgggggaaatttatattggacactgctctttgtctagcaaataaaagatgttaatatattcctgttactggcatgtgcacgactatgttattagaagccactttatcattttcctgctttaaatagaaatgtctatttatgaattctgcttgtagttttttcacaaataaaatagtaaaattta

SEQ ID NO: 176671 - DNA, 484 bp, Homo Sapiens
tcgttcatgatagacacgatgaaatccaccctcaaagagcagttccagttgtggaagtcccaggcaatcactgtgtccacatgagcgaaccccagcacgtggccagtatcatcagctccttcttacagcgcacacacatgctcccagcccagctgtagctctgggcctggaactatgaagacctagtgctcccagactcaacactgggactctgagttcctgagccccacaacaaggccagggatggtggggacaggcctcactagtcttgaggcccagcctaggatggtagtcaggggaaggagcgagattccaacttcaacatctgtgacctcaagagggagacagagtctgggttccagggctgctttctcctggctaataataaatatccagccagctggaggaaggaagggcaggctgggcccacctagcctttccctgctgcccaactggatggaaaataaaaggttcttgtattctc

SEQ ID NO: 176672 - DNA, 417 bp, Homo Sapiens
  misc_feature (50)..(50): n is a, c, g, or t
  misc_feature (63)..(63): n is a, c, g, or t
tgtgtcccacttgaacgaaacccccagcaacgtggcccagtatcatcagntcccttccttaanagtgcaccacacatgctcccccagccccagctgtagctcctggccccctggaactatgaaagaccctagtgctccccagactcaacactgggactctgagttcctgagcccccacaacaaggcccagggatggtggggacaggcctcactagtcttgaggcccagcctaggatggtagtcaggggaaggagcgagattccaacttcaacatctgtgacctcaagagggagacagagtctgggttccagggctgctttctcctggctaataataaatatccagccagctggaggaaggaagggcaggctgggcccacctagcctttccctgctgcccaactggatggaaaataaa

SEQ ID NO: 176673 - DNA, 495 bp, Homo Sapiens
ttttttagacaaatgctcactttaatcacaattctaaattaattattttcacattaatatagatatttccataaaccaagaaaaactgagttattatacattttttaacagctaacatgatttgaaaattttttattaaaaattgatcagaagctagttgaaattctcaatgtaaatataaaatattcattacaattgtttttcaaaggtaaatccagatctaagcttcctgaaaagctgtactatctcatatcataatagggatgactaagtacttgacaactactttctaaagaacttaacaaaaagtgactacttgaagattacatttacaacagaaaggctaacattctctgcagagctctcattttatcatgaaatgtggacaatcaggaacacgtggatgagtggtatcaagaaaaagggcatttcaaaatatttccacttttattaaaggttttgacaatgaagatttcataaaatgtctttaaatcc

SEQ ID NO: 176674 - DNA, 544 bp, Homo Sapiens
ggtaatgccctgcaactctaaaccatccctttgtttacacatttttgtatggtattttaagattatcaatcacttcaacatttctataaccttgtttgtatagcactttctcaagagctgtcagtcccacatacagaatcatttcttttacaaaatgatttaatatgtaatcatgtgtcaggacataaattttgtcacttgggacagtagctttccagctaagataattgcgtgaactctgttaaaactgattatcactcatcaatggctttatttttaacctataaataacccctttcaatatacctggtttttacagcattgcaaaatctgtaaaaataacttttatttggaaaatgtcatgaagtcatttttcattatttgtactaaaaaatggttttatgtactccttttggggttttatcttttggtttttccatctggactcccctcatccttcctaaggttggagaaaatccaaatttcctgggtgtgtccttgttaagtgatcaaaagtaaatgttctctttgccattttagatgg

SEQ ID NO: 176675 - DNA, 729 bp, Homo Sapiens
tcaagataagggaatatgattgatgattggtacgaaaaatgtcaaaatgtgttcccctaatacacgacaaaatagagtgacttctggacataaatctgccatttattaaaccattcactacaacaaataaataggtataaaagtggaattggaatttttatacttatttgttgtagtgaatggtttaataaaaatagaaatcactggtaatttccaccccaaactaaactatttcccttcttttaaaaaaaatacacaaccaagattttaatgtaaaatattttgctttaattgtattttatgccttgattaatgaaacatggaaatattgattttcagttttggtcacctgaggaacctatctttgtttgcttttggaaaagcccattttctaaacagatacaatattgccacaacaatgtgcagaaacctttttgataataaaaaattgttctttgcctctaagtggatatttgcaattattttctctctcctaactagactgtaaaaagggctgctttagatcctgtagcttactccagttattagttattaacaaacacccaagtctcgaagatatttctaattaaaaaagaaggcatattcagagttctttgtaaataaatgttgtttacttttataggcatctttaaacttctggattttggtatgccatttaaaaatacttccagatagatacacatggaaattagtaatactgcagccgta

SEQ ID NO: 176676 - DNA, 1248 bp, Homo Sapiens
  misc_feature (1176)..(1176): n is a, c, g, or t
  misc_feature (1191)..(1191): n is a, c, g, or t
tggtgagagccaaaccgttggagcccgcgcgctgagtgctgcgtcttcttgtggtgcttgccgatccggcccgggttcgtactccacggcccatagggttcggctgctcgctatttggctcgtcgtggtgtttcggtgtcgctgtgcacccgcagggcgcggccaggggtcgcgtcgtggcgggtgtactgtggccgtttgtggtgttgcgttctactgggtgtggcgtgcagcggtagtttcagggaaaatatgttggctgtacttgtatgtgagggccttgattgaatggaagcaggggcaatatggaggttcagtgtgggtcaccgtgaggaactgatgcttggtctgcttcttggggcaagccgcagtgttgctaacggatacataatgtgccacgactatggtgcagtaacctttgtggataagtaaaaaattggttctgttgcctctaagtgggatattggcaatagattgtcgtcgtctcctgaactagacttgtttaaagtggctgctttagatccttgtagcttactccagttattagttattgaacggacacccaagtctcgaagatatttctaattaaaaaagaaggcatattcagagttcttttgttgaataaagtgttgttgactttgtataggcatctttaaacttctggattttggtatgcccattgtgagaggatacgttcccagatacacatgggaaattagtaaatactgcagccgtatccttgcgacacacatctgtcagtgtcaaaggtttcaaggtttttctgtgaaaaaaggattacctgataagccgaccacctatactgcccaaatgggaggattagatacatggttagaaatccctcaggaaaagtgttttttcttttcttgttgctgccttaaaaatagaataatgactatttctgatggatagagacatagcattttaagctggtggtgtgtaaaatcccataggtatgtgcatgactttcagagagtatttgggggggaggttaacaagatgtggtgccatttataagcagtgttattgtttatgcttgccccgctgccacaagtcagctaagtcataacaaaagcttcaaactgatgctaaggaaggccatgccctttggaaacaataaattcccaatctgttttatgttatgtacctgacatcttntcctgcattctctanccaggaaataaagatgaaaattaaatatcaaaattactaatcgatgatatacagtga

SEQ ID NO: 176677 - DNA, 986 bp, Homo Sapiens
  misc_feature (48)..(69): n is a, c, g, or t
  misc_feature (618)..(618): n is a, c, g, or t
  misc_feature (940)..(940): n is a, c, g, or t
gagcgaggcctgggtggcgaattcggcacgagggggctgacaggtgannnnnnnnnnnnnnnnnnnnnncaaagctccatctccccttcctttaaccaggtcctagggctgaggttttaagccagggctggagggcaaaggtcataacctcaccagccacctctgaggtcatggaacctgggaacagaagcctcaacccccacaagaccaagcatcacatggagtgtagggtcactgggagagcagaggtcacagcctctagagaagggagaggggcgtgtgcatgggagtgtggctcatctcgggggccatggggcctcctgaggtacacctttgcccctgtaagggcctctaggccctgggcctgcctccccaagggctcactaagccagaggccaaagtgccccctcccgttcacctaccacccaagtcctcatgccctccgagggctgggggaggaggggctcaaggaaggggggttccatgtacatatttatcacccctttcacatagccccaagaccttttgtacatttttacaggggtgcccctcccaacagttcccttcctggttaattaaaccctcagactggtgctgtgttcctagcctctggcctcntctgtggggaaaggggactgcagggggaagagccgggaaaggacagtcaggcttctccctgggaaggtggggccagcaagagatgaccaacaggggggcaggacctgggggacctggggctggagggaaaggcaaaaagcttcctacttgggctgacagccccggtttcccccaacatgttccccgttcactctgccccccacccccaaaaggctccatactctaaaatctcagaattccaaccacctccttatgggttcaagtcccctttacccccatttcccaagtggccccccagaacttcctggggccctgggcttcncctgaaaccctggttcctccaaaaaacccttggcccccagggctaa

SEQ ID NO: 176678 - DNA, 1192 bp, Homo Sapiens
  misc_feature (12)..(12): n is a, c, g, or t
  misc_feature (960)..(962): n is a, c, g, or t
  misc_feature (966)..(966): n is a, c, g, or t
acagcctctagnagaagggagaggggcgtgtgcatgggagtgtggctcatctcgggggccatggggcctcctgaggtacacctttgcccctgtaagggcctctaggccctgggcctgcctccccaagggctcactaagccagaggccaaagtgccccctcccgttcacctaccacccaagtcctcatgccctccgagggctgggggaggaggggctcaaggaaggggggttccatgtacatatttatcacccctttcacatagccccaagaccttttgtacatttttacaggggtgcccctcccaacagttcccttcctggttaattaaaccctcagactggtgctgtgttcctagcctctggcctctctgtggggaaaggggactgcagggggaagagccgggaagggacagtcaggcttctccctgggaaggtggggccagcaggagatgaccaacagggggcaggacctggggacctgggctggagggaagggcagaagcttcctacttggctgacagccccggttcccccaacatgttcccgttcactctgcccccacccccaaaggctcagcctctaaatctcagactccaccacctcttaatggctcagtccccttcaccccatttccaagtgcccccaggactcctgggccctgcttccctgaaccctgttctccaaaaccctgccccaggctaagggtggccagagaaggtcaccatgtaccacacaccaaagaagggggtcggcccaggggtgggcgacacaggcagcttcttcggcacgtcacggcagcaaccccagccttcccaaagcagcaggcgcctccaggctggggcccaacctagaaggcaggggtcaatctaacaaaaccctaacgttgacttttttccctggtggggcttcttctgtaacatgacttgcgaatatttatataaaaacgagtgttacaatgcnnncccnttcccccgcccacccgaaaacaccatggtcggcccgccttcggccccctcaaaaagcttttctaaaaccattccgtttggcggcccgggcccccagtaagtaaaatgaacctgggcccaaaactggtttcccaaggaaaaacccggggccattgaacaaagggctttgggattccccccccaattaaaaaaccgccccggggcgggaaaccccgggcgggttcttg

SEQ ID NO: 176679 - DNA, 1208 bp, Homo Sapiens
  misc_feature (709)..(709): n is a, c, g, or t
  misc_feature (844)..(863): n is a, c, g, or t
gggccagcgagccagagtggtggctggtcccgcgcgaaaattctgagctgtacacctctaggaaatgaaacactagttcagaagaagcctgtaaactctcttacaaatacatttggttattcaccatgaggttagcaaagcctaaagcgggtatttctcggagctcaagccaaggaaaggcctatgagaacaagcgcaaaacaggccggcagcggcagaagtggggcatgactattcgatttgactcaagcttcagtagactcagaagaagcttggatgacaaaccctataaatgtactgaatgtgaaaagagtttcagtcagagttcaactctttttcaacaccagaagatccatactggaaagaaatcccataaatgtgctgattgtgggaaaagtttctttcagagttctaatctcattcagcatcgacggatccatacgggggaaaagccctacaaatgtgatgagtgtggagaaagcttcaaacagagctcaaatctcattcagcaccagagaattcatactggagaaaaaccctatacagtgtgatgagtgtggccggtgtttcagccagaagctcccaccgtattcaacatcagagaacccacactgggaagaaaacctaccagtgcagtgaatgtggcaaatgtttcagtcagagctctcatctgaggcagcacatgaaggtgcataaagaagagaagccntcgtaaaacccggggcaaaaatatcaggggtgaagactcactttaccctcttggaaagctggtacaggaaggaagtctgtggctggtctccgttaagtatagggctttttgacagctttttgagacctcttaagnnnnnnnnnnnnnnnnnnnntgaaaggaatcttttttagaaatagagatgctttatagtagatcacttaaatactggatcttttgctagtgtgaaaacattgggaatttaatgacattattgagctgaaagaaattacatgagtccagctaccctcatttcttttttatgtgacatggagcacaaagaactgaaaatatgttttgagggagcatgacatccttgacctcatttgaaattacttccattttcaaaaaccatcatgttttgcagatacattttgagaaaaaccatcatgttttgaggatacatttgtgaaagtgcaggcatgccaatgactactcagttttaggacttttgtggaag

SEQ ID NO: 176680 - DNA, 469 bp, Homo Sapiens
gcagtctaggccctgcttggactaggactccttgcttgaccccatctctggttcctgccctggctcctgcaccagccccagctcctgcctacatccaggcagaaatataggcaggggctcttggaagacgttccgtgctgtgacctccgagccctcctggtggaaagacagctggaaaggctgggaggagaagggaggggctgggggttcccaggagccatgcgtggcctgcagagtccattccatcatgatgctgtgcccgctatgggctgtgtccatgaccagaggctggagtgggggtgtgttagagcccctcaccgggacttgctgtgcggatggggcctgggcctccttcctacaggggctcctctgtgggtgaggggccctctggaatggcatcccatgagcttgtggcctctatctgctaccatctgtgttttatctgagtaaagttaccttacttctggaa

SEQ ID NO: 176681 - DNA, 764 bp, Homo Sapiens
ctgaccaggccctgggcctcagcgaccacccctccccctcctgcctggacccagggagcaggtgcagggggctccgagcccctggtgactgtcaccgtgcagtgcgccttcacagtggccctgagggcacgaagaggagccgacctgtccagcctgcgggcactgctgggccaagccctccctcaccaggcccagcttgggcaactcaggtgggccagaaagcccccggtggctgcggtggagctgggcaccgccccgactgaggcagctgctggaagagggggtggcagaggtcactgccctccctgcaggccccacccaggaggccccctctgaggaatctctttgcagttacctagccccaggtgaggacgggcactgggtccccatccccgaggaggagtcgctgcagagggcctggcaggacgcagctgcctgccccagggggctgcagctgcagtgcaggggagccgggggtcggccggtcctctaccaggtggtggcccagcacagctactccccccaggggccagaggacctgggcttccgacagggggacacggtggacgtcctgtgtgaagtggaccaggcatggctggagggccactgtgacggccgcatcggcatcttccccaagtgcttcgtggtccccgccggccctcggatgtcaggagcccccggccgcctgccccgatcccagcagggagatcagccctaatgatgctgtgtccatgatgcttttaataaaaaaaacccccactgca

SEQ ID NO: 176682 - DNA, 418 bp, Homo Sapiens
ggatacattacagcagacatggaaatataattttaaaaaatttctctccaacctccttcaaattcagtcaccactgttatattaccttctccaggaaccctccagtggggaaggctgcgatattagatttccttgtatgcaaagtttttgttgaaagctgtgctcagaggaggtgagaggagaggaaggagaaaactgcatcataactttacagaattgaatctagagtcttccccgaaaagcccagaaacttctctgcagtatctggcttgtccatctggtctaaggtggctgcttcttccccagccatgagtcagtttgtgcccatgaataatacacgacctgttatttccatgactgctttactgtatttttaaggtcaatatactgtacatttgataataaaataatattctcc

SEQ ID NO: 176683 - DNA, 597 bp, Homo Sapiens
  misc_feature (45)..(45): n is a, c, g, or t
actcgatttccagcctcactctttctgtgtgtgtgacacgtctcntgctgtgaataggatttcatgcagtggtctgttatggggctttgcagcgtggggggctgcagaagattctcagacattcttatccttctggagtctcaaccatcaggttcagacaagtaggaaccaggctgggtcaggctcttaatttcactacggtgggggacaaaatgaacactggcttttgttcactttgcccctgagagatctagtcctgtcctgtgatggcttccacaaaccctgttggaagtttgggttattcctataactgtatgtgttgagtggccgtgaggctatggacctagcctggaatttagatgtctagctattttttaaacctgttggtaaatgcccagaggtctgtgctacctctgtgaggtatatactaaaatgaatgtaaaataaggatcgtattccctgctttaaggaactggtagtcttgtttgggtgatgagacaaagttcttgagacatttaaactgtatttaccagtgtgaaaaatgtcatttatggagattaattcattatggaaataaaacattgcctaagcccttgc

SEQ ID NO: 176684 - DNA, 941 bp, Homo Sapiens
  misc_feature (65)..(154): n is a, c, g, or t
  misc_feature (304)..(330): n is a, c, g, or t
  misc_feature (914)..(914): n is a, c, g, or t
gccgccgtctctaaggtcgcccgggtcccaccgccgccaccatgcctcggggaagccgcagcgcnnnnnnnnnnnnnnnnnnnnnnnnnnnnnnnnnnnnnnnnnnnnnnnnnnnnnnnnnnnnnnnnnnnnnnnnnnnnnnnnnnnnnnnnnnttcgggccagccggggctcatggctcagatggcgaccacggccgcaggggtagccgtgggctcggctgtgggacacgtcatgggcagcgccctgaccggagccttcagcggggggagctcggagccctcccagcctgctgtccagcaggnnnnnnnnnnnnnnnnnnnnnnnnnnntgcagatggggccctgcgcctatgagatcaggcagttcctggactgttccaccactcagagtgacctgtccctgtgtgagggcttcagcgaggccctgaagcagtgcaagtactaccatggtctgagctccctgccctgaagaggtcggtgcagactcgggggccagtcctgcacccacctctacccctcgccgacagccagaccacaacaccagattgtacccagatagctgggattggaagtgaggaggtttctcaccccacagataacccaagacacaaatgtgcaattaaaagtttattttagaccacaaaaagaaaagggcacgcaccagcgctgagtgccccatccctcgagggaatctatgtcggggtgcggcaaaaagaaggaaagggaaatgggcccatgggcgcaaaggccggtttccctggacccaagggttttctttggaaaaaaaggggggaaaatctcggccgcggcctcccctaataaggggactcgcgaattaaatttttcaatataacacaagggttaaaccctgggcattataaatagaaatcgggttgtgaagggaaccgccggnggaacttttttaaccccccgctcggca

SEQ ID NO: 176685 - DNA, 794 bp, Homo Sapiens
  misc_feature (137)..(137): n is a, c, g, or t
  misc_feature (200)..(200): n is a, c, g, or t
  misc_feature (205)..(205): n is a, c, g, or t
  misc_feature (222)..(222): n is a, c, g, or t
  misc_feature (248)..(248): n is a, c, g, or t
atgcagcatgtgggccgggagactccgtggaaccaagcaatgcaaaaagggctgcagagctgaaagccaaagggaaagctggtggatgcaaaggtgtcagccaagaactctgaggcttactggaaaaggacgagtcnaagtctggagcccacgtgacttctatgacaaataagcccatgtttttggcttcctgacctttntgccnccacttttagacatacnccagagcctgtggcctccccacaccntgccataggggcagtcctgccttacacatagaagcattcatgcctgctgccctgccctcaggcacagccagctgtgagctcccaggtcattggccttaccagttgtcaggagtctgtgctgtgcaccctgggttataaggaggcttaggagagaggttatgggtattggtgtctctatccccaggaatagaacttaaggggtgggaagaacaggaaaagaagctggaacacagaagagaggaggttgtgtctcttgctcatagcaagcctgtgggtagaggaaagagtgatctggtgtcgaataggaggacccatgtagattcgcagatggcctggatgggaggaagggcagacggtacatgtcccagcccacatagatgccccttgctgagggtagcaggaccttctgttgaactttgtgtcctcactctgatgtctccttccttcagaatctaccacccctcccccaggctgggagaaggggctcctgggtgtctgtatacacgccaaaggcagatacaaataaaatacagattgtcctttacc

SEQ ID NO: 176686 - DNA, 464 bp, Homo Sapiens
cagttttttaaaaagagactgtatacacttgatttgctttcaaaataaataaggtcagctagtctaggaggttaacgtcgggtaggaatgctgatcatgataggtttggttttctacagattctgttccggtgcctttcctatccaggcaccacctgagaaagttgtcatttgaggtcgcacttggaagttacatctgtgaagtttctgtcattcgtccagatctgtgtgtgtagcatgtgctgaggaagcacgtgctgggctgtgcctcagacagtgcatcaccaggcacccagaggcttgcctggctattcctgttctggtgtgtgtggagtgttggggaggaacagatgcagatcaacctgtggctgttttcccgtctaggttctcacaggtatctcctgacagaggtacttaacaatggctctgctggaaatttctataaataaaatgtccaaaatggtg

SEQ ID NO: 176687 - DNA, 519 bp, Homo Sapiens
atgctctatagcttcatgaagaagggccagatggagaaggacattcgtagtgatgtagaagaatcagactccagtgaggaggcggcggcggcccaggaacctctgcagctaaagaacgggacagctggagggcccaggccagcccccactgatggccctcagagccgggtggccgggcgtctgaccaacaggcacacaacagccacatagccgggcggggctggctgtaaggggttgcccccccgccagtgccttggatatttctggggtgactggactggcgcccctgggccacctttctggagacagggagggccccacccggggtgggtgggaaggctgatgatctgtctccagccccttccttctgcccacccacccttcttccctctgggcaactggacagatctggcagccagcagctggatgctgtggctggccagagacacctccaggctgtaccctgggggctggggggagccccaggctgaaaagggtccaattaaaacaaatggagcc

SEQ ID NO: 176688 - DNA, 999 bp, Homo Sapiens
  misc_feature (93)..(93): n is a, c, g, or t
  misc_feature (101)..(332): n is a, c, g, or t
ggctggggaggccttcaaggaaaacctgacaatccatgggtggaaaggtgaaggagaagggagggcatatcttacaatggcccggagaaaganggaaagannnnnnnnnnnnnnnnnnnnnnnnnnnnnnnnnnnnnnnnnnnnnnnnnnnnnnnnnnnnnnnnnnnnnnnnnnnnnnnnnnnnnnnnnnnnnnnnnnnnnnnnnnnnnnnnnnnnnnnnnnnnnnnnnnnnnnnnnnnnnnnnnnnnnnnnnnnnnnnnnnnnnnnnnnnnnnnnnnnnnnnnnnnnnnnnnnnnnnnnnnnnnnnnnnnnnnnnnnnnnnnnnnnnnnnnggggccacttccacggggacgggaagaagcagatgggagtagtcctgggcaggtgggctcatggctgtgtgtgcaccctcagttggctttagtttgctctaagaacgaggtaggaggtggggatgcctggggaagggggtcattcacagagaatggagaagactcaaaattatccatcagcacatgagccttttctacttctaggggaaatatttttcacactgatatacaaaaagtggacagtaccctttctgctgtgtatacccagcacattcattttttcaaaaccaaatatacagcatttcatcaccaaggaatggcatacagtgcaggcagggccaagtcctcagctccaggtctcctgccgatgctgtttgcttgacaacaccacgtggctgggtcaacatgcaccacatggagagcttggcacctgcatccaggccctgacccagggaggaggtgctccaagaggcctgccctgccccaccaggcactgaaagactctcagaggccactgctggggacaaaatccctccactaccccctcaaggagaagcccgtttcttcttccaaacatcccaggagcctcccatggtgcagtgcagagtctgttggggagccaagaacaggtggctgagaccaggtggcccagctcagctctcctcgc

SEQ ID NO: 176689 - DNA, 518 bp, Homo Sapiens; identical to SEQ ID NO: 884

SEQ ID NO: 176690 - DNA, 314 bp, Homo Sapiens
  misc_feature (22)..(22): n is a, c, g, or t
tcccctctcccctcccctttcntggagggaacgcgccctctgggccctccctgtccccctcctctgtctcgtctccccatctggtctggaacctgtttgcaagtgaagcaatatctccgtgttttgtatatacaaccgctcttgtagcctttggtttttgttaatgtagagaaacacagattctttatacactttgtaagatttacgccaaaccccagctctcgatctcttcttctccctgtggcccctgcgctgttgccccgtccccgtcaccccgcccgttactgaaatgtataatctgacttcctgtacag

SEQ ID NO: 176691 - DNA, 390 bp, Homo Sapiens
cacttctcccccaaaaccagagccacctgccagcctcgctgggcagggctggccgtagccagaccccaagctggcccactggtcccctctctggctctgtgggtccctgggctctggacaagcactgggggacgtgcccccagagccacccacttctcatcccaaacccagtttccctgccccctgacgctgctgattcgggctgtggcctccacgtatttatgcagtacagtctgcctgacgccagccctgcctctgggccctgggggctgggctgtagaagagttgttggggaaggagggagctgaggagggggcatctcccaacttctcccttttggaccctgccgaagctccctgcctttaataaactggccaagtgtggacttgt

SEQ ID NO: 176692 - DNA, 431 bp, Homo Sapiens
  misc_feature (419)..(419): n is a, c, g, or t
ccatggccccgaagaatgccccacgggaacacagcgcctgaccctacgccccggcagccctcccagccaggagtgcatcaacgtgcttcctgcagtacggctgccccgacaagtgtgtgtagtatctgttttatttgactgcagtctccttggtgcaaaaacaaaatgggaaaaataaggataactcagaatttcaaaaggaaatcacaaattcagctaataatagcattttcagtacttttcgtaaactaagtaaatacacaaaatgttgatttttctgaccataagacgtattttatgtccttttgccaaggtggatttgttagtctgcagccctcctggccacattgcccaagtcacacaggcttctgtattatgtatttagataaaatgtgtgaaaatatatttgaaataagggntcataaatatgc

SEQ ID NO: 176693 - DNA, 884 bp, Homo Sapiens
caagcgctggtgcctgtttcctaccagcactcccagggaactcatcaaagtgacccgagacgaaggagggaaccagcaagacgaagctattacctggtttaatgttatttatccccggacacagcttccaacctggccacctgaattcaaacccctggaaatcttacaaaaaccaggagagactgtctttgtaccaggaggctggtggcatgttgtcctcaatgctcgacactactatcgccatcacccaaaattttgccagcagcaccaacattccctgtggtatggcacaagacggtaagagggagaccaaagttatcaaggaaatggtataggattttgaagcaagagcaccccgagttggcagtcctcgcagactcggttgaccttcaggagtccacagggatagcttccgagcagctccagcgactcttccagctcctccagctccagttcgtcagactccgactcagagtgcgagtctggatccgagggcgatgggacagtgcaccgcaggaagaagaggaggacgtgcagcatggtgggaaacggggacaccacctcccaggacgactgtgtcagcaaagagcgcagctcctccaggtgacccagcaaggctgttgtctgtatggaaggacacgctcgcggcaagggcagggcctggggagggtggcctgtccagtcctgcagacaaggggaggcctgacagagcccaagaatgaggacaccctcggcacgggaacccattcacttagcgtttgctccagtagctttccctctgctaccaatgcagataaacgcggcttgttttactcaggcaagagaatgtgaatagtgccaagaaaatcctttacattatttaataaaaattgaatccattttct

SEQ ID NO: 176694 - DNA, 903 bp, Homo Sapiens
  misc_feature (263)..(276): n is a, c, g, or t
  misc_feature (839)..(844): n is a, c, g, or t
  misc_feature (847)..(847): n is a, c, g, or t
  misc_feature (860)..(863): n is a, c, g, or t
taggctctgtaagtcgtgacagccttcatcagtgcaatgtttgcagggtaattcttaaactttttagagggtggcaggtacatcagttctttttgatatgaaaacattcatgtttcagacattgaattgagagcttttaggggaagcataatggttattgtcactatcaacagtctaaaaagaaaaactgaggtctttttaatcttgattacagcactcacggcatgcaccctactcagtgtgggtgtcttcgtttgggggcnnnnnnnnnnnnnngcacttctgaggctagatatgtctggctgaagatttgatgtggttcctccttaagctatgcgtcctgttaataataggtactgtactgggctctgtgtaagtgtcgttggggtaggacctatattttaatactgttcctaacatttcattttactagcgagaaatctttgatttcattttattctttgtaattctagacactagattgtagtttagccataactgatgttttttaaaaagggatatattttcttgcacagttgttcaaaaaagagacaagtttcagtcctcaatgctgtcctttgttttacaggtacaagttttctagctcagacaaactatgaaaaactgtagactattctcaaggtattaactcgcagaccctctgggggtaggggctgttttctaagttacaggcagagtgggactgagatggtacagtgtgcacagacaggaactgacctgacagactgggattttctgtactaaaatgttaactctggaatcaaaaggtaaaacaggcttttaattaccaccaaataaagggcccattttctggtaannnnnnacncaccaaaaaacannnncaaactccaagggcatccttatgtcccgcgggggccgaac

SEQ ID NO: 176695 - DNA, 442 bp, Homo Sapiens
gggacctatattttaatactgttcctaacatttcattttactagcgagaaatctttgatttcattttattctttgtaattctagacactagattgtagtttagccataactgatgttttttaaaaagggatatattttcttgcacagttgttcaaaaaagagacaagtttcagtcctcaatgctgtcctttgttttacaggtacaagttttctagctcagacaaactatgaaaaactgtagactattctcaaggtattaactcgcagaccctctgggggtaggggctgttttctaagttacaggcagagtgggactgagatggtacagtgtgcacagacaggtactgagctgacagactgggattttctgtactaaaatgttactttgtatcaaaagttaaacaggctttagtacaacaaataaaggtcaatttctgtcaaa

SEQ ID NO: 176696 - DNA, 517 bp, Homo Sapiens
  misc_feature (334)..(342): n is a, c, g, or t
gggggcaaattggcatttgaataaagccctgggaccacctcaacatgcgtagcctcttgtcttaaatgtactccccatggcagcatggaggaggcaagacctgtgggtcaattttgaactggccttactttgatttttaaaacaagagactcagggaaagtactaaaccaaaatctctgattttactttgcgttttctgtagtttttgttttactgagatgcttttgtaaaggaaaataatactgtgacagtttagtaattctacagattcttaatatttctccatcatggccttttacttcacaattttctgaagtctgaattcaattacaannnnnnnnnaccaatttaatctcaaatgttgtttaactgctttaaattcatatacgtagagtattataaactgcagagatgaaaaatgtgttttcacgggatttatattgtgaactaaactaagcctactttttgtgacttatttgtgatgccttgttgataaatatgtgtaataagtatgtcc

SEQ ID NO: 176697 - DNA, 473 bp, Homo Sapiens
  misc_feature (17)..(17): n is a, c, g, or t
  misc_feature (266)..(266): n is a, c, g, or t
atctactgtgaatatanaatgttattagccttatcaaataaataaatgagcacagctctttgttcgctctattgaactgggtgataattatttagatgtgaatgttaggtcagttctactgtaataactaatcgtaaaagttgtaaatttgtttaatggatgaaatgtacactttttgtattctgtacagctttgtcttttttaaagtatgaagtacttaaatgtacttactatgataggaaatataatgtgtgccttctaggatntgtgaagtggtttcatgaactctaaggaatttgttttccctatcctaactcagtaacagagggtttactccgattatgtatagaaccttagtttgagaaaatgaattttactatgtactgaatttagaggttgagaataataggatctgtgttattcttagtacccactgataaattgtgcaataaataatctttcgcaagtgaaaa

SEQ ID NO: 176698 - DNA, 363 bp, Homo Sapiens
atctgactatgacataaaaacaactttatacccagaaagttattgataagttcatacattgtacgaagagtatttttgacagaatatgtttcaaactttggaacaagatggttctagcatggcatatttttcacatatctagtatgaaattatataagtattctaaattttatatcttgtagctttatcaaagggtgaaaattattttgttcatacatatttttgtagcactgacagatttccatcctagtcactaccttcatgcataggtttagcagtatagtggcgccactgttttgaatctcataatttatacaggtcatattaatatatttccattaaaaaatcagttgtacagtgaaa

SEQ ID NO: 176699 - DNA, 418 bp, Homo Sapiens
agggtcctgcctttttctctgccccaggtctgggacgcaggtgatgccagccaggcccaggagtgcccagcatcccccaactgatgacacagtagcactgattctgtcttttcctcagaatctggcctttttccatggcaatgaggtggggcccagcctcctctaaagtgactttgtttctgcacagttgtaactgctcttggggatgtcagtgaggctgggagcagggagccacgggatgctgagagaggaggcccgagaggacaccccaccctccagcgtggcctttgatccagacttagggacgaggctgtcactggtgggcaccctctgttcctgtttgtgtgtttgaatagtctgaaatgctgtgactttttttgtgtgaataaagatatgagaacttctgaatctcaaaaaa

SEQ ID NO: 176700 - DNA, 450 bp, Homo Sapiens
  misc_feature (19)..(19): n is a, c, g, or t
  misc_feature (31)..(31): n is a, c, g, or t
aaagtttctaattctaatnaggccccttccnaatctccaatttctctgcaaagcccatttacccccacctcatgcatcccaaggctctactgggtccctggacctaaccctgctttcatcctggtggccttaactacagtggaggtggaacttcccaggaggggaagggacagaccagccccagccgctgggccaacttccaatcattccagctagaagagcttccccctgacaccctgtgactgagcctgtgtcctgtctgcctgcccagccatgctccatcggctgtgagggcagtgcccggagaggccagagggttggagctgcagggacccgtttggacccacagcctctgttctagagatgcttgtataggctgttaattgtgatgaataaacgttcaaccctcggcctgcagccagagtagccaggccgcgcaccccaaaaaaa

SEQ ID NO: 176701 - DNA, 187 bp, Homo Sapiens
cagaactccaaagtcctgaaaattttggtggacaatgatttttaaaaaaactaactttgtataacctaatatttgtattctctcatctatatttttttattcactataatcatgatactcttctaatagacttaaaagttaatcattgacaacgaaaaataaaatgttattttaaaagaaaaattaa

SEQ ID NO: 176702 - DNA, 468 bp, Homo Sapiens
catcatagcttcattgttccagatgtaacaggtttgaaagagctcatcgccaagttcttgatccacttgcattccaggggagttttcttttgagtagtatgtttcttgtttgcatgttcctgttctttgtggaaactatgcatggtagcatttttgcttgctgtgttttccatacttaagaaaaagaggtttcagttggctgatagaatatcttttatataggacaaaacttttctgtgaagagtgttgagggggtgaagataggtaagaggtaagcacaatttttaatttaggctctgaaaaagtgtattgttctaaacgtatttggtatgcctatataggtctttaaaaatgggtatgtatgctgtttaatgtgcactgaacattttacattaatattgtactgttttacattaatactgcatgcttttctatgtgaattgaataaagaatgtcataagcactgtc

SEQ ID NO: 176703 - DNA, 865 bp, Homo Sapiens
  misc_feature (226)..(226): n is a, c, g, or t
  misc_feature (847)..(847): n is a, c, g, or t
agggccctggttcagccatagaaggggaaccccagcccttcctttagggagccaggggcaagaagagagagagccgctccttttccctgcaacccaggttttttggggggaggccagcccagggggcagggaactggcttggggaccccttgttcactttggcatcccctgctgcctccagagtcttctgctggtgccccagaggctgtatccaggccccgagaancttgggaccatgggacccatatatatgaatttgtaaatcatgcaattaaagcccaagcaaaatataaggaggtggttgccacatctttctggttgctggatttgacccactgattctactgtgcaattcttggattgactcagtcagcattgacacccttatcttcactttggagtttactaattggaagacacttgcaccagctgttgaaaggatgctctctgctcgtgcctcaaacgcttggattctacagcaacatattgccactgttccatccctgacccatctttgtcgtttggaaattcggtccagtctaaaatcagaacgtctacggtctgacagttatattagtcagctgccacttcccagaagcctacataattatttgctctatgaagacgttctgaggatgtatgaagttccagaactggcagctattcaagatggataaatcagtgaaactacttaacacagctaatttttttctctgaaaaatcatcgagacaaaagagccacagagtacaagtttttatgattttatagtcaaaagatgattattgattgtgagataggttaggttttggggggccagtagttcagtgagaatgtttatgtttacanactaatccttccccagta

SEQ ID NO: 176704 - DNA, 730 bp, Homo Sapiens
  misc_feature (76)..(76): n is a, c, g, or t
  misc_feature (95)..(95): n is a, c, g, or t
  misc_feature (121)..(121): n is a, c, g, or t
  misc_feature (151)..(151): n is a, c, g, or t
  misc_feature (183)..(183): n is a, c, g, or t
  misc_feature (215)..(215): n is a, c, g, or t
tctttactgtaatgaggacagttggcagttacctattcatgcagctgcacaaatgggaccatacaaaaatcttggnacttgttaataaccacttnactaaccgggacctgtgacactgggnctaaacaaagtaagtccctgtttactcagncagtgtttgggggacatgaaggattgcctagnaaatattactccggaatggtctacagcccagnacgcccaggcgtgccttgtttttggattcagttctcctgtgtgcatggctttccaaaaggaggtggagctgtgagttctttggaattgtgaacattcttttgaaatatggagcccagataaatgaacttcatttggcatactgcctgaagtacgagaagttttcgatatttcgctactttttgaggaaaggttgctcattgggaccatggaaccatatatatgaatttgtaaatcatgcaattaaagcacaagcaaaatataaggagtggttgccacatcttctggttgctggatttgacccactgattctactgtgcaattcttggattgactcagtcagcattgacacccttatcttcactttggagtttactaattggaagacacttgcaccagctgttgaaaggatgctctctgctcgtgcctcaaacgcttggattctacagcaacatattgccactgttccatccctgacccatctttgtcgtttggaaattcggtccagtctaaaatc

SEQ ID NO: 176705 - DNA, 462 bp, Homo Sapiens
acccaagcacggagatgtggccgcggcactgggtcccccagtgggtcccatgggggaagaacttccctttgctggggtgggcagcctgccctgagctatcaacactggatttgttgtcttctgcacagctactgtgaagataacgtaaggagaagtggtcagttttcattttataactgacacagttgggacaaaatatatacgtgtacatatatttaagacactaattgtgtgggagagtttagtagaggcctgtgcagacacaaggcaaacagcgtcagcagcgtgggggtctcctgggccagctcggcacctgtgggtgctttgaccctgggggtggggacagctccgtgctaaccccagcagacagttgttggtgcacagtgtctaggaggcgtgggaatgggtgctgtcttcctcttttcacatcatggcgacagtaataaagcccacctccagtgg

SEQ ID NO: 176706 - DNA, 462 bp, Homo Sapiens
tggttagactctgttcaaccacattcttatgttggcagatctgcttccagattgatttttagagcaccatcactttcacattcctgattctgattttgttttgttttgtttgggttttctgaaacttaaaatgctgccccgaaaatactatatttttgagtttgtgttctgaaagcctccgtgctgctggatctttggggggaaatacaggatccttcagcactgaggtgtttaagatttgcaactagcaatgcaattttttctaaatatggggatatttacctttattaagaaattatactaaacattgatgtccttgatcattttatgttctcatattacttttgattctactatgattgtgtggtggtgaacaaagatcattacaaacaaaaactgtaattttgttatatttgattcaatggaatttacctaaaaaataaagactaaaaatgtggtgtg

SEQ ID NO: 176707 - DNA, 1219 bp, Homo Sapiens
  misc_feature (533)..(533): n is a, c, g, or t
gtcatggtggcactcaagcaacccatggggaacatgtgtggtcctcgacgtgcacaaggtgcgagtcagtgtgatgcccatgctgttgctggtgctgctgctcttgctgcggctcgccacgctgctcacgagccaggcgctggcttcatatggcttcaggctgctctccagttgggtatatattcgcttctaccagcgccatagccggggcagagaggacatggctgaccactttgctttcgccactttcttccatgagatcctgcagcctgtggtgggtttgctggcgaacttggtgcacagcctcctggtgaaggtaaagatatgccagaagacggtgaagcgctacgatgtgggtgccccatcctccatcaccatcagcctgccaggcacagaccctcaagacgccgagcggagaaggcaactggccctgaaggcactcaatgagcggctgaagagagtggaagaccagtccatctggcccagcatggatgatgatgaagaggagtctggggccaaggtggacagccccntgccctcagacaaagctcccacacccccagggaagggggctgccccagaatccagtttaatcaccttcgaggcagctcccccgacgctgtaactccagaccaccttgagtgtggcacctcccctcccaagccccccttgacatcctctcagctactccagggcacctgactgctctgaggagagggaagaaggcctgctggggctttccatggccttctgctgtttctcgccaacactacccaggactcttgctacctggttccaactccagacaaccactatgccaggcccggagcctctgaggcatcggccagtccaggccctcatctgaggtaagaatgtacatcagctggcagccccaagcaagtggctgcagggacactgatgccacagctcctgggccggccctcacatctgaaactggttgccgagagccctgagccaaggcaaggatttgccaaaaatgttctgggggcccagcaaatgcaggagccgacctggggctgcacatccctgcccatccccagaaagactgttcctgtcaggatttgtttccctctgctgtggcggtgactgcttctggaccagaacagctccagctcccaggtattttctacaggaccacttgagtgggcagccaagcccaggctcgcagtatcaataaagcagttctctgaggaatgaa

SEQ ID NO: 176708 - DNA, 459 bp, Homo Sapiens
tcccctgttcccggcctaccacctctgctcccccttctcttctctaccatttaactgtctcctctgctttgtttcttatcactgctgctggtgtctagagccagccagcagtacctggcagacatcgcgaccctgcgggcagcgcttaggactgcacatttacatttcccaaatgatctgggtagatggggacaggtgaagacttggggaaacggaaatatacgaatgacatgagacatgcatatctagtgtcaatccattcgactgggcacaggacagcagactgctgacagtgctatgtaagattatgagtgatcctccctctattttgcaaacagtctgtaagtaactgataaaactttaaaatatgcaaattttaaaattatatagtttgatttactcatcaaattatcatgtatgctgttatttaagtatgaataaaggcttttttaaattggg

SEQ ID NO: 176709 - DNA, 177 bp, Homo Sapiens
tttcttttccctcctttatgacctttgggacattgggaatacccagccaactctccaccatcaatgtaactccatggacattgctgctcttgggggggttatctaatttttgtgatagggaaacaaattcttttgaataaaaataaataacaaaacaataaaagtttattgagcccc

SEQ ID NO: 176710 - DNA, 499 bp, Homo Sapiens
  misc_feature (22)..(22): n is a, c, g, or t
gtattctccatagattgaaganatttataccacatatcgcatatgaccatctttccatcaaatcaatgtagagataatgtaaactgaaaaaaaatctgcaagataatgtaactgaatgttttaaaaacagaacttgtcactttatataaaagaatagtatgctctatttcctgaatggatgtggaaatgaaagctagcgcacctgcactttgaattcttgcttcttttttattactgttatgattttgctttttacagatgttggacgattttttcttctgattgttgaattcataatcatggtctcatttcctttgcttctttggaatatttctttcaacacattcctttattttattatacattgtgtcctttttttagctattgctgctgttgttttttattctatttacaggatgatttttaaactgtcaaatgaagtagtgttaacctcaaataggctaaatgtgaacaaataaaatacagcaaatactcagat

SEQ ID NO: 176711 - DNA, 1023 bp, Homo Sapiens
  misc_feature (26)..(26): n is a, c, g, or t
ggggacgtcatggactaccacctggnagacacggaagcctgtgctgggccaggcagggaccctggcagtgggcaccgagggcggcctgcggggcagcgccgggttcttgctacagatcagccccaacagtcggcttagccaggaggttgtgctggatgttggctgcccctatgtccgcttccacaccgaggtacactggcatgaggcccacaagttcctgaaggtggagttccctgctcgcgtgcggagttcccaggccacctatgagatccagtttgggcacctgcagcgacctacccactacaatacctcttgggactgggcttcgatttgaggtgtgggcccatcgctggatggatctgtcagaacacggctttgggctggccctgctcaacgactgcaagtatggcgcgtcagtgcgaggcagcatcctcagcctctcgctcttgcgggcgcctaaagccccggacgctactgctgacacggggcgccacgagttcacctatgcactgatgccgcacaagggctctttccaggatgctggcgttatccaagctgcctacagcctaaacttccccctgttggctctgccagcccccagcccagcgcccgccacctcctggagtgcgttttccgtgtcttcacccgcggtcgtattggagaccgtcaagcaggcggagagcagcccccagcgccgctcgctggtcctgaggctgtatgaggcccacggcagccacgtggactgctggctgcacttgtcgctgccggttcaggaggccatcctctgcgaactcttggagcgaccagaccctgctggccacttgacttcgggaaaaccgcctgaagctcaccttttctcccttccaagtgctgtccctgttgctcgtgcttcagcctccgccacactgagtccctggggctggggttttgtttgtagaaggctctggggactcctaatttctgcttccccagcctaaagcagggatcagtcttttcttgtggaataaatccttggatcggaaa

SEQ ID NO: 176712 - DNA, 369 bp, Homo Sapiens
  misc_feature (77)..(77): n is a, c, g, or t
tcatcctggcccctccccagcccccgccaatactgtgaacccccttcccactcagcctggtttcctggtgagggtcntgcagtcatgggcctgggggaacccccaaggcaaggcccatgggagggaagggaccaagggcatccttgggccaactgtccacctctcttgtccactattctctcctttccacttctgtcttcaaaaggctccttcctaggatggatcgggtgctaggacaactgcagtccaatccaccagctctccctgcccctgtgtcttatttcagacatgagaataactgtacagtgtaaacttataaagcgtttttaatggttgtagattggaaataaagtatgtcatatgaacaaa

SEQ ID NO: 176713 - DNA, 638 bp, Homo Sapiens
  misc_feature (207)..(219): n is a, c, g, or t
  misc_feature (516)..(516): n is a, c, g, or t
  misc_feature (522)..(522): n is a, c, g, or t
  misc_feature (535)..(536): n is a, c, g, or t
  misc_feature (551)..(551): n is a, c, g, or t
  misc_feature (553)..(553): n is a, c, g, or t
  misc_feature (569)..(569): n is a, c, g, or t
  misc_feature (573)..(573): n is a, c, g, or t
gctcctctgtccgggcctgggtttcctgccctggccctggccctgcgatctctcactgtgattcctctccttcctccgtggcgttttgtctctgcagttctgaagctcacacatagtctccctgcgtcttccttgcccatacacatgctctgtgtctgtctcctgcccacatctcccttccttctctctgggtccctgtgactggcnnnnnnnnnnnnnctgttgtccatcccaaaatcaagagaaacttccagccactgctgcccaccctcctgcaggggatgttgtgccccagacctgcctgcatggttccatccattactcatggcctcagcctcatcctggctccactggcctccagctgagagagggaaccagcctgcctcccagggcaagagctccagcctcccgtgtggccgcctccctggagctctgcccagctgtcagcttcccctgggcatcccagccctgggcattgtcttgtgtgcttcctgagggagtagggaaaggaaaggnggaggncggctgggaaggnngaaagaggggaggangngagcgcctccatctcntatntcataatacaccaccacttttattttgtaagctggacaaaaataaaaacacacaaggcggggcgt

SEQ ID NO: 176714 - DNA, 426 bp, Homo Sapiens
tgcctttaaggcctgttctcagcacaatgtctcaaaaataggtcatatcctgccactcccgtcgcagagccctttaatggttccaaaccctaagtccacacatagcccctggctctggcatctctccagccccactggccccgagctgcttgactcaccggcttcctatttgatgcacccaggccccctggtggccaactccctccccttctcactgaggcagaagcactgaggtgggctggacatgggtgccctccacgtccctcatatccccaggcacactctggcctcaggttttgccctggccatgtcatctacctggagtgggccctccccttcttcaggccttgaatcaaaagccactttgttaggcgaggatttcccagaccactcatcacattaaaaaatattttgaaaacatgcagt

SEQ ID NO: 176715 - DNA, 530 bp, Homo Sapiens
gctgaggcttccgaagctctggaagcgcaagccctggcgcggggggtggcagagctgagtctggccgactatgccttcaccagctactccccttccctcctggagatctgctgcctggcactggcggaccacatgctacgggtctcgcggcccgtggacttgcgaactgggagaccacccggaggcggcgctggaggactgtatgggcaagttgcagcatgctggtggcacataaaaagtacttccttgaatcacatgatgcccgttcaaatctgagagaagtgcagcctgcccccgagctcgaaataaaaaagatccttcgtttccttttagtccctggcccggatgctggaactctcccgtagcctcagaagagtgcagtactggtccacagagaaggcttacaggacctacttggtcagatacaggttgtaaatagtgtacgatactagcatctggtattttatttattttgcagcgagcacatgaggaagctgagcctttcaccaataaaaagttgtggtttgtct

SEQ ID NO: 176716 - DNA, 1187 bp, Homo Sapiens
  misc_feature (1020)..(1028): n is a, c, g, or t
  misc_feature (1125)..(1133): n is a, c, g, or t
ggtcccagcttcacttcagaatcaaccaaacagccaaaactgttacatcaggttgtggagcagttacaaaaggttcattttatcacagataccctgtcaaagggtgagacaaagttcatgggtgtttgccagcttcccagtaaaaatgatgaaaaagaatatccacacagaagaattgatatcaggttgatacccaaagatcagtattactgtggtgttctctatttcactgggagtgatattttcaataagaatatgagggctcatgccctagaaaagggtttcacaatcaatgagtacaccatccgtcccttgggagtcactggagttgcaggagaacccctgccagtggatagtgaaaaagacatctttgattacatccagtggaaataccgggaacccaaggaccggagcgaatgaggcctgtatcctccctggcagacacaacccaataggagtcttaatttatttcttaacctttgctatgtaagggtctttggtgtttttaaatgattgtttcttcttcatgcttttgcttgcaatgtagtcaataaaacctcatgtactattaaaccaaccgcactacagcaatgggcgaataaacattgcggccgccctcgggccctcgagaaactttctaaaaccatttcgttttggcccccccggggcccctgttagggtaaaggggaaacatggggcccataagcctgtgtttccctaacgaaaaactccctggggcccttggaactaagcggctcttgggaatctctcccgcccgacattaagaataaagcccccccgcggcccgcgccaaacccgagagtgggatcttccttgagaacaaaaaatcccccaaaaatgggaaggtttctcttgagagggtcctatttacttgggggggtgccaattacaaaccggggcaaattccccccgggggggaagcgcttcccataatttctaaagatttaaggggcacccacgggcgcgctggggggagcttacatatgggacggatacccnnnnnnnnnaaaagttccaatttaaaagcaatttctgtcgcccccaccattgaaaacacccgcaccacaacaaaacgggcccttgcatgggaaccccctgaaaatnnnnnnnnnggggggttcattcacccacaccccatgggggggccgcttgtggcagtgaaaaaa

SEQ ID NO: 176717 - DNA, 464 bp, Homo Sapiens
  misc_feature (30)..(30): n is a, c, g, or t
  misc_feature (39)..(39): n is a, c, g, or t
ccccgggtggacccccttagcaacccaggnccttttacncctagcagaagggatgccctcatcctagagactctgggaggagctgattttctgtctgccccaccccacctaagggcccttcaagcctaataaagatagaaaacaaggcaggaatttttgtctgttttattcacagtgtatctcaaacacatgaagcagtccctcttcgtattaggcactcagaaatacttgctgaaggtacagttatcaaactgaaatctgagcatttttccttttgatgttccaagttatcttttgggtgattaatttattataaataggtaaaatattgctataagttccctattcacgggtattttataaatttttaaaacttgttcttaatcttcagaagtgtacagaactgttcttcagatctttgtcaaccaaaacatgtattttcaataaattgagattcccagttc

SEQ ID NO: 176718 - DNA, 353 bp, Homo Sapiens
  misc_feature (71)..(71): n is a, c, g, or t
ccttgagaagtcacagtttaactcactgcgggctcctgaacctgcttctgcctgctttccacctccccagntccctttctctggccctgtccatgtgactttggcccttggttttctttccagattggaggtttccaagaggccccccaccgtggaaagtaaccaagggcgcttccttgtgggcagctgcaggccccatgcctctcctccctctctggcagggccccatcctgggcagaggggcctggggctgggcccagagtccagccgtccagctgctcctttcccagtttgatttcaataaatctgtccactccccttttgtgggggtgtacgttttaacagccaaaaaa

SEQ ID NO: 176719 - DNA, 885 bp, Homo Sapiens
gcgttggcgtcttcgtcctgttgctggtctccgtccggtcgccggccgtctaggtctccggccctccccagccgctcctgcgcccttgccggccccgccgcccgcagccctggcgctccctgcgggccccgccgaggccgcctgcgccctgtgccagcgcgcgccccgggaaccggtgcgcgccgactgcggccaccgcttctgtcgggcgtgcgtggtgcgcttctgggccgaggaggacgggcccttcccgtgccccgagtgcgccgacgactgctggcagcgcgccgtggagcccggcaggcccccgctcagccgccgccttctggcgctcgaggaggcggccgcggcgcccgcgcgcgacggcccggccagcgaggccgcgctgcagctgctgtgccgcgccgacgccggcccgctctgcgccgcctgccgtatggctgcgggccccgagccgcccgagtgggaaccgcgctggaggaaggcgctgcgcggcaaggagaacaaggggtctgtggaaatcatgagaaaggacttgaatgacgcccgggacctgcatggccaggcagagtcagcagctgcagtgtggaagggacacgtgatggaccgtaggaagaaagcactgaccgactacaagaagctgcgggccttctttgtggaggaggaggaacatttcctgcaggaggctgagaaaggaggaggggcctcccctgagacgagctggctgaccccacctgagcggttcaggtcacctgctgccagcgggtcttccgacctggaaaaagaagcatcccaaccctgtggcctcaacatgctgcctgaggggatggggcccaaccccggggcagtcccagaactggaagcaaggaagaatggaatcctccc

SEQ ID NO: 176720 - DNA, 328 bp, Homo Sapiens
  misc_feature (52)..(63): n is a, c, g, or t
agattgtgccattgcactccagtcggggcaacaagagcaaaactctgtctcnnnnnnnnnnnngtttgttagattatttgtgaacttaattttattttatttttaccatggtaagactaccgtgcgtttaatgaaccattattgtgccactaactgtatcccactttactcaagggtgtaggtacaatattgtaggaatatactatttcatacattgtaaaataacatctttagtaatcactgtcagtggctttaaactgcaaatgagttaaatattgttcccatagattaaattttgactctttattatttaaattttttatttgta

SEQ ID NO: 176721 - DNA, 386 bp, Homo Sapiens
  misc_feature (193)..(230): n is a, c, g, or t
tcttgagttcactttggatccttattttgtatgacttctgctgaaggacagaacattgccttcctcgtgcagagctggggctgccagcctgagcggaggctcggccgtgggccgggaggcagtgctgatccggctgctcctccagcccttcagacgagatcctgtttcagctaaatgcagggaaactcaatgnnnnnnnnnnnnnnnnnnnnnnnnnnnnnnnnnnnnnnaggccacattgacagtggtgggcggggagaagatagggaacactcatccctggtcgtctatcccagtgtgtgtttaacattcacagcccagaaccacagatgtgtctgggagagcctggcaaggcattcctcatcaccatcgtgtttgcaaaggtt

SEQ ID NO: 176722 - DNA, 1207 bp, Homo Sapiens
  misc_feature (599)..(619): n is a, c, g, or t
  misc_feature (814)..(826): n is a, c, g, or t
  misc_feature (853)..(876): n is a, c, g, or t
  misc_feature (969)..(977): n is a, c, g, or t
  misc_feature (1041)..(1053): n is a, c, g, or t
  misc_feature (1116)..(1126): n is a, c, g, or t
tggcagccatgcgcctacgagggacgttttccaacatgtttcaacaccgtgaagacccctgcgtacacagcttcctgcccatggtgcagacagagacccagtatcagctgtgctaccgtgcggccctggagtacctcggcagctttgaccactatgcaacgtaactaccgttcccctctcctccgccacccccgccgtggggctccggaggggacccagctcctctgagccataccgaccatcgtccagccctcctacgcagatgctgtcactggcagagcacagcccacggggatcacagcgtttcaggaacgttgccacaccaatcagagagcctagaacatccctgggcaagtggatggcccagcaggcaggcactgtggcccttctgtccaccagacccacctggagcccgcttcaagctctctgtttgcgctcccgcatttctcatgcttcttctcatggggtggggttggggcaaagcctcctttttaatacattaagtggggtagactgagggattttagcctcttccctctgatttttcctttcgcgaatccgtatctgcagaatgggccactgtaggggttggggtttannnnnnnnnnnnnnnnnnnnncttgagttcactttggatccttattttgtatgacttctgctgaaggacagaacattggccttcctcgtgcagagctggggcctgccagcctggagcggaggctcggtcgtgggtcggccggccgcgctgcaccggttgtttctcccccccttcccaagatatcctccccgcgttacccggaaggcacacccgggnnnnnnnnnnnnnggtttccgtttaaccctttatttctgnnnnnnnnnnnnnnnnnnnnnnnngataaacccggctccgcctaaaaccggatcgaccgcccccttcctcgccttaacccccgcgtagcacctacacccgttgcgtttttctcacannnnnnnnngagaggctcccacatcacggccatgggccgcgttgaggcatagcagcggggcctaaacccatannnnnnnnnnnnnggatataattttttcgccgagtcggacgaaccgccaatttgcccctaatttgacccccgcgannnnnnnnnnntcgattgcggaaatccataaacagccccttgataggaatacttttaataaatttagcctgagcaatcgccgaactgcgtaa

SEQ ID NO: 176723 - DNA, 458 bp, Homo Sapiens
gggagtctcgcgcctgcagcccgtgccgccccagccgctgccgcctgcaccggacccggagccgccatgcccaagtgtcccaagtgcaacaaggaggtgtacttcgccgagagggtgacctctctgggcaaggactggcatcggccctgcctgaagtgcgagaaatgtgggaagacgctgacctctgggggccacgctgagcacgaaggcaaaccctactgcaaccaccccctgctacgcagccatgtttgggcctaaaggctttgggcggggcggagccgagagccacactttcaagtaaaccaggtggtggagaccccatccttggctgcttgcagggccactgtccaggcaaatgccaggccttgtccccagatgcccagggctcccttgttgcccctaatgctctcagtaaacctgaacacttggaaaaaaacccctcctcatccgccctacgg

SEQ ID NO: 176724 - DNA, 413 bp, Homo Sapiens
cccctccacagccatcgcatggtctgtgtatgagttcttcaaatacctaatcactaaaaggcaagaagagtggagggctggcaagtgaagtagcactgaacgaagccaggggttcagatgacactgatgcatcctggtcacattctctgtctcctggaatgctcccacctcaagtggagttagaaggaaggtagaggggctctcccccaggattttggtgttttgactaacaccagttcctgccaacctctgttgccaccacctttccttccaggccctaagcacgtgcagcaaagcacaccacagcacctttgataacctctctccatcctgggcctgatgacctgctctagactgttatagagggataagcagctcattcccctggttcctaataaaaagcctttaaatta

SEQ ID NO: 176725 - DNA, 665 bp, Homo Sapiens
cctagcaataaaatctaatttttaaaaagtatataattataaaatgtataaatgatggatagatttttgtattgatttgcaaaatgcagattatatttgataggctatagtatgtagatattccttttaggaatattacagctgtaaattatatgagacttgccagtcaaatgctatttggtttaaaaaaattattgcaatctcaagttaatggaatatttttaaatcccacattcagagtttaaaacactggttttcaatgtgttttttagtgttgtcacttgtttatagataaatatataaataacctgtttggatcctggtcctttttaactgttccttggtaattctgagcatttatttgatgacttaatatttttcactacctttggagaacagatgaacattattcaccatgaatggatctatactgtgtggtcatgagttgtgtatacttccataacactgtatttttcttctgtcagtacccttaggatacactttaaaacaccttaaggtctgatgttatggcaacaaactactttttcaaacctaaataggaaccatgtaatttctcaaaagtgattgaacagtttgcccacacttagtttgttggtcttatgtaaaacattggctcaaaataaagtacacactgatttatttta

SEQ ID NO: 176726 - DNA, 647 bp, Homo Sapiens
  misc_feature (507)..(507): n is a, c, g, or t
  misc_feature (614)..(614): n is a, c, g, or t
cacctcaggctgtggctctttgggcttcttcctaatgcagaagaagttgcccagcagcaaaatcagggaggaggtgagcacctcggcccccgccaggatgaacacgtacatgtagacgtgggtcgcatccaggagtttgcctcccgaagggggcccgacgagcacggccaccgcctccatcagcagcaccaggccaatggcactggagaacttgtgggtgcccacgatggccatgagcacctcgaactgcagggcccccaccatgccgtaggagatgccaaagaagatgcagaagaccacgaggccgccgtagtcgcccgccgtagagcccgccaggtccgcgaggccgttgaagaacatggagaagctgaagaggtagacggagtagggccgcaccttcccaagccccgccacgaagcccgcggccggccgcgggaagatgtcaatgaagcccaggatggtgagcaggaaggcggccttggtgtcgggcacgcccaggtccttggntagctcaccacgaacacgggcgggacgaagagccccagcaccatgaccgaggcggccacggcgtaaagcacaaaaccgcgggcccggaagacgctcaggtctagcangcccccggaagggtgcgccggccccaccccggc

SEQ ID NO: 176727 - DNA, 645 bp, Homo Sapiens
gcagatagaaacagctttattttttccattcaggctttatcaaatagcttgttcaaaaagcatatacaagagcaaaaaataccacatgcagtcaaacttcttttgccttatagtcattggctttcttttagaaaagagtgtgcacttgaataacttctaattcaaacattttccaactgtttctacttcatttttcaagttagcaacgacagatacatttttagttaaccggttcatattccttatctttattcatactgaaataatataaagcctataaaatcaaagcatatactgttcagaaatctggaaaggttcttttacataatagattctgacacgttaagaaactacacacaacaaatatttgcaaaatgaatgaaaaataggataaagctatttaaaagtcaacatagtaatatttatctaaataattttaatcaaatgtacaacatatttatctgatatcatctatcttttagaatacaaaaaagtgctcagattacatttaaaaaaataacaaaaatctcttagaatggaaataatttaaataaggacggtagcaaggggaattgaaattacatctttgctcccaaacaggaaggcaggtgtgatgtatttgaaaatcagaaagggacacaacac

SEQ ID NO: 176728 - DNA, 868 bp, Homo Sapiens
  misc_feature (758)..(793): n is a, c, g, or t
gggtgtcaattttttcttctaattttttaaaaaaaagccccctaaatttttatggcttcaagggaagcatcagagaaaacgtaaatgccattttctgtacacttggtaaagcaaaaactagactcacagccaccgccctgggcacggccgcaagctgctccactctgcccggcagcctccagggcaccccactgggaaaccgcccgccagtccagggccgcccccaggcccctgcaatatacctgcagggctgggccgggggctttaaggcgttttgtctccggctgcttgccgggtgtcggagcagagaggcaggaagctccgtgcccacgcgccccacgcggcagggctgagggccgagcagggtgacaccaaccggtcctcccacctcgggttccaggcgccggggcgcagcctccgggagcaagtgcgtcgagaagcacccgcctggcagcgcccacccgccccttgccagggccaggctgggaagagactgcagcagccgtgcccgcggcgcccgagctttggtgcagcattttggttggggagccggcttcagccacggccccacccctgccttcccctttggtttcggggaggcctggggcacggcctcacccctggcaacaatgcctgtccccctcccaggagggcctgggcaagacagctccacagcacccctccaggccgggcctgccctcccctcgagaaaacggcctttggatcgagggagacaagctggactttatgacgctaannnnnnnnnnnnnnnnnnnnnnnnnnnnnnnnnnnnctccaggatcacactactcacttcagcaaagaaacggaggggcaggagtggggtagggcgggcctctgttttttt

SEQ ID NO: 176729 - DNA, 524 bp, Homo Sapiens
ccccaaggggtagccagggtggatgccaaaagccgagttctgtttcctcttgccttgcgacatcctgctcagtacgtcaggcctcggctggcgctcattggggatgcagcccacagagtccatccgcttgcaggacagggtcgtcaacatgcgctttggggatatctccagcttggcccatcacctcagtacggcagccttcaatgggaaggacttaggttccatgagccacctcacaggttatgaaacagaaagacagcgtcacaacactgctcttctggctgctacagacttactaaaaaggctctattctaccagtgcctccccgcttgtgttgctcaggacgtggggcttgcaggccacaaatgcagtgtctccactcaaagaacagattatggcctttgcaagcaaatgagtactcctctcctaaagaaagattacgttgatgaaaaagaacatcctgcccaggacccatcatacatattttcaagatcttatttaatttaataaacttactttacatt

SEQ ID NO: 176730 - DNA, 882 bp, Homo Sapiens
atgaatctgccagagttgagttctatgtatttatttatctatctgtctactccatttctctcaaaagccctcaagtcacaaagtaaatggttcaagcaatggagtactgggtcacagggattcctcctttcccccccaaatattaactccagaaactaggcctgactggggacacctgagagtagtatagtagtgcaaaatggaagactgattttgactctattataatcagcttcagagattccttaaaccttcctaatttcctgctccaggcagtaaacacaaatatttcttcaaggggtgatgaaaacctcggaagttttaatttgaggttatctgctacaaaacagtatttctaaaaggctaaagtgataagtctcttgctttttttgatcctgctcttatattcttttttttcctcagagaaatcaggagggtagttagaggtataaaacaggaggaaatattatggaaaatgaaaatagggaaagataattgaatcattttagaagtagctaatttcttttctcaaaagagtgtcccttcttcacacctactcactttacaactttgctcctaactgtgggttgaaaactctagctaaagaaagttatcaaatcttaacatgcattcctactattatgatagtttttaaggtttcaattcaatcttctgaacggcaataagtcctattttacccttaacctccctgcatttgcaatacgtaatactgatcagtgggcacagttcttcagctacattgagaccctgaaatgaacaattatattctgactcgacatcttgtccccaatccttccaaaaatattgatggtgatttgtgctaccatttactcgtttatttaataaagacattcaatcccg

SEQ ID NO: 176731 - DNA, 427 bp, Homo Sapiens
tgtagctgagcactttaacaagttgagcattccatgtttcattcttagaaccttctttaatagagggtcttccctcaacagcctgtgcctctggtctacctttgaccaccactgataactaatatattggtcacaatgactggaatgtgactagtgatctcaggagatggcactgtcctaaagtgctgtcagggtggcaccactgctctctgaacaacttaccttggtcagagggactcaggtttgggacagcacaagctgaaggctggagagtaacttgcatagtaggaccatacctcttcctttcccatcccacccacatatgatagacagcccctctgttgagatatggaggggacagatactggaatcgggggtgggacttgcagttacttaaaattttttaataaactgtgccctgaaacct

SEQ ID NO: 176732 - DNA, 598 bp, Homo Sapiens
agtaagtctgtggtgctaccagtatagcttggaagatggttctgaattaatacctcagaatgatatcaaaagtaaaagagtggttctattgctaaatatattgactagctttcttataacaattttactttgaaattcaaagttccaaagctaaatgtctaaaagaagtaactgcagcttgttctgctgattttggaaaatagtattaaccatgtaagatctttggggttggagtgaaggtcttatctgcattaattttgttaatgcacattgtaggatgtgggagaacatcttgaccctgcataagggattgcgtctccattttattgtgtaggtgctttttcggaaatatttacatttctttgggtcccatgttcatgtattctggagaagtaaaatttcttgattactgggcagaccctaaaactactaagagaaacataacatgtagttagctgtctgctcatggtttgttcaaatctaagctaaccttaatggtgctgtgtccgctgtccacagaaaacgcccttaagtagccctaccttactccttagagcttattttgcttttgtatttaataaaagctgtcttaaatgtt

SEQ ID NO: 176733 - DNA, 583 bp, Homo Sapiens
  misc_feature (382)..(382): n is a, c, g, or t
tccctgctgccaccctgtggtacatgccccccgccacccccagcttcgctgtccctggacaggtgaagttggcacagtttacaggacagacagatcctatcacgatggccagccagctcctggggactccttaggtatttgatagacacggagacccactgcagtcgctcttcctctgcctaactgaaatgaaagctcctgaggtctgtcctccagcccagtttctttgggcttcagggttgtgcgaaaatgactgctacaaggggtagaaattgacagggagacactgagggggccaggcctgctataggagaaggtgttatttcggggtgcctgcccccagctgtttcatcttctcttctgaggctttgtctggaagcangacctccacagtgaaattgaccttcttggcatgaatgaagctgtaggtgttgtcaaaccgcaggacatagatgccaggatcacttcaggtgagggttccatcttcagggaccaaggtggagttgacctctggttagcagcacctctgtctctgccctggccgctgcctctctccctctttggcttcggaaaatccgaaccc

SEQ ID NO: 176734 - DNA, 801 bp, Homo Sapiens
  misc_feature (769)..(769): n is a, c, g, or t
ggagcacacacacatctgcacctcaaccacagactacacttgctgaactggctcctggggccatgaggctgtcactgccactgctgctgctgctgctgggagcctgggccatcccagggggcctcggggacagggcgccactcacagccacagccccacaactggatgatgaggagatgtactcagcccacatgcccgctcacctgcgctgtgatgcctgcagagctgtggcttaccagatgtggcaaaatctggcaaaggcagagaccaaacttcatacctcaaactctggggggcggcgggagctgagcgagttggtctacacggatgtcctggaccggagctgctcccggaactggcaggactacggagttcgagaagtggaccaagtgaaacgtctcacaggcccaggacttagcgaggggccagagccaagcatcagcgtgatggtcacagggggcccctggcctaccaggctctccaggacatgtttgcactacttgggggagtttggagaagaccagatctatgaagcccaccaacaaggccgaggggctctggaggcattgctatgtgggggaccccagggggcctgctcagagaaggtgtcagccacaagagaagagctctagtcctggactctacccccctcctgaaagaagctggggcttgctctgaacgtctccactcccgtctgcaggcagccaggaaggcaggaagcccttgcctctgtgctgccatcctgcctccctccctccaggctcaaggncactcggggcctgggtggggaggtcaacggcc

SEQ ID NO: 176735 - DNA, 918 bp, Homo Sapiens
  misc_feature (651)..(717): n is a, c, g, or t
  misc_feature (747)..(748): n is a, c, g, or t
  misc_feature (824)..(824): n is a, c, g, or t
agtcagattgaggatgcacatatactgggaaaataatcgacttccagcgtccctcatgtagtctctacctgattcaggaatctctaacccagtatcggaacgttaagcggcttctccgctttcctgccgtgagaaactcgaggtgacaacctccgtttccggttggctccggttgcagagttgagtgtcctgagaggtcagattgctgtcagacatggcccatgaacatggacatgagcatggacatcataaaatggaacttccagattatagacaatggaagatagaagggacaccattagaaactatccagaagaagctggctgcaaaagggctaagggatccatggggccgcaatgaagcttggagatacatgggtggctttgcaaagagtgtttccttttctgatgtattctttaaaggattcaaatggggatttgctgcatttgtggtagctgtaggagctgaatattacctggagtccctgaataaagataagaagcatcactgaagataatacctggaagcatcatagtggtttcttaactctccaaaataagatttcttctctgtagcctacttgtctggtttatcccttacagaatattagtaagatttaatcaattaaaatatatatatatgccaaaccannnnnnnnnnnnnnnnnnnnnnnnnnnnnnnnnnnnnnnnnnnnnnnnnnnnnnnnnnnnnnnnnnnaccgcgcgaatccacccatcacaattaaanncccaaaaattggcgcgcccccccggcccctcaaaaaactttttcaaaaccttttttttggggcgggcgggcccccngagggaaaggggaaacggggcgcattaaccgtgttttccataagaaaatccccggccccaagtaaccaaggggtctgtggtcctccccccacac

SEQ ID NO: 176736 - DNA, 465 bp, Homo Sapiens
atgggaggctcccggaggaggcccagggtgccagagcctgccagactctgttgtgcctgagctggggaagggaccctgtctcgggaagagcaaagttctatgagtgacttacagaccctgtgaagtgagggttggttttgtgattaacctttttctgtttttctttttaaaatgtaattgcccttgaatgcgagaccctgggaagagccctgggctggctggtagagatgcagccctcggaccctgcaggagccggcccacactggaggcgggagagctggtggccgtgcccaggaagtgcttctttggctggttctgattgtgtttggagtttggccttgggtgaggcccgagcaaggggtctgtggctacagcgtggcacgtggcatgcgggcagcgtgcatgcgagggtgcaggcatgcgagacgacattggcagcagacaaaaataaagaaccctggacga

SEQ ID NO: 176737 - DNA, 847 bp, Homo Sapiens
tttcgtatgctggggacacccagcgaagacacatggcccggggtcacccagctgcctgactataagggcagcttccctaagtggaccaggaagggactggaagagattgtgcccaatctggagccagagggcagggacctgctcatgcaactcctgcagtatgaccccagccagcggatcacagccaagactgccctggcccacccgtacttctcatcccctgagccctccccagctgcccgccagtatgtgctgcagcgattccgccattgagaatgtcaaggccacactcagatcctttctcgagcagctgctgccccagctgcctcctacccattgccaagagaggatgcatctggggagagcaaagcactaaggaattcagcatcagcctgcagagggctgagtctgggttagtcctgcccgcaggttagcgagatcctgtgttgttttttgggttggacggtgccgtttcaaaatagaggcacagatgctccatgcacgaggggtccccgggcactggaacaagtgccaagttgaaggcagggggcctgccagagctgggtgtgggtattcaggccctcacctgccctgcctgcagggccagaccctgaggaaagggcgccccctgctggtcttcttggatttaaaatgtttgggggaagagttgagttccagttcagtcccaagttaaacaggagggagtgagggagaggagagagggcgttccccggatcccaggagagctgggctatgactgcaataaggagttgttccttcacctgagatgtgcttcctttggttcatttctggcttgacaacaagaaataaacgtggtatgttcctg

SEQ ID NO: 176738 - DNA, 480 bp, Homo Sapiens
ggctcaataaatcagtagaaaaacagttcaaggcttttcggagaggttttcatatggtgaccaatgaatctcccttaaagtacttattcagaccagaagaaattgaattgcttatatgtggaagccggaatctagatttccaagcactagaagaaactacagaatatgacggtggctataccagggactctgttctgattagggagttctgggaaatcgttcattcatttacagatgaacagaaaagactcttcttgcagtttacaacgggcacagacagagcacctgtggaaggactaggaaaattaaagatgattatagccaaaaatggcccagacacagaaaggttacctacatctcatacttgctttaatgtgcttttacttccggaatactcaagcaaagaaaaacttaaagagagattgttgaaggccatcacgtatgccaaaggatttggcatgctgtaaaacaaaacaaaac

SEQ ID NO: 176739 - DNA, 653 bp, Homo Sapiens
gggggactccagaggttgcccccttttctggggtgtgcccttgcgaaggagctcatcttcacggcccgacgactgagtggaacttaggcccacgtactggggctggtgaatcacgctgtggcccagaacgaggagggggacgccgcctaccagcgggcacgagcactggcccaggagatcctgccccaggcccccattgccgtgcggctgggcaaagtagccattgaccgaggaacggaggtggacattgcatctgggatggccattgaagggatgtgctatgcccagaatattccaacccgggaccggctagagggcatggcagccttcagggagaagcggactcccaaatttgttggcaaatgacccccattttaaccttcagcatgggagatgcatgccctgaagagcaggatccagaaggaagatttgtggccagattgccttcatcatttcacctctccagacttccatttcttcacaaggatgatgatggaaataaaatgactggcgtgatgcctggaaccaaggtgctgatcctaccacctactgctaccttccttagcttcaccctggctagaaataatcacgagggttgggtttgctttggaaaatgcctgtctctctacttgaatgataaagaattaaattag

SEQ ID NO: 176740 - DNA, 846 bp, Homo Sapiens
  misc_feature (631)..(631): n is a, c, g, or t
gaactgcgagctctcagcgggagccgagacggtgcagggcgggagaagcaccttcactcccagcctgcgccccgatgctgcgcgttctgtgcctcctgcgcccctggaggccccttcgggcccgcggctgcgcttccgacggggcggccgggggctcagagatccaagtgcgcgccctggcgggtccggaccaagggatcactgagattctgatgaacagaccttctgcccgcaatgccttggggaatgtcttcgtcagtgagctgctggaaactctggcccagctgcgggaggaccggcaagtgcgtgtcctgctcttcagaagtggagtgaagggcgtgttctgtgcaggtgcagacctgaaggagcgggaacagatgagtgaagcagaggtgggggtgtttgtccagcgactccggggcctgatgaatgacatcgcagccttccctgcacccaccattgcggctatggatgggtttgccttgggcggaggcctagagcttgccctggcctgtgacctccgagtggcagcttcctcggcagtcatgggactgattgagaccacgcgagggctcctcccgggggcaggagggactcacaggctgccccgctgtctgggggcggccccggncgaagaagctcatcttcacgggccccaccaccggactggcaacccaagcccacgcactctgcggctcgcgggacaccacgacgtggcccccacgatcaccagcgagccggacgcccgcctacgccaccggcacactgagcactggccccaggaaatcctgccccaggccccccattgcccgtgcggctgggccaaagtagcccattggaccgaaa

SEQ ID NO: 176741 - DNA, 434 bp, Homo Sapiens
  misc_feature (19)..(19): n is a, c, g, or t
  misc_feature (29)..(29): n is a, c, g, or t
  misc_feature (52)..(52): n is a, c, g, or t
aaatgacccggggaaaggnaggtggacantgccacctgggatggcccattgnaagggaatgtgctatgccccagaatattcccaacccgggacccggcctagagggcatggcagcccttcagggaaaagcggactccccaaatttgttggcaaatgaccccccattttaacccttcagcatgggagatgcatgcccctgaagagcaggatcccagaaggaagatttgtggccagattgccttcatcatttcacctctcccagacttcccatttcttcacaaggatgatgatggaaataaaatgactggcgtgatgcctggaaccaaggtgctgatcctaccacctactgctaccttccttagcttcaccctggctagaaataatcacgagggttgggtttgctttggaaaatgcctgtctctctacttgaatga

SEQ ID NO: 176742 - DNA, 591 bp, Homo Sapiens
cggacagcttctttgggagtgctgctaaccttgaaattatcagacacttaggagttattagtgctaaaaaggggaccgtgcaaggcagcagagttacatggttcttcaaatcatgtctgaacctattcttggaatcttctctataataagggaagttctcttaccccactgccacatacctctgttttaaaagataagtccactaactgtgagtaaaaatgatatatataggcattaaccacacactttaatgggtataatttcctggctgcctcccttcctcagcccattaggttaaacaccaaagaaagactggtgtgtactgaataggaaagggaagttttatttggaaccttctaagaggaaatcaaccaggaccaaagagccttaaaggacacacagcaatgcacagccacttcccttccccagcttggctgccctaggtgatttctcaagctccttgggggactgttgtttctcatctggaatcaatgtgtgtatgagttttgtctggtaggattgctgactctgtccaacagatatcactgtgaattgaataaatttgttgaaagagcacacaggcacacatac

SEQ ID NO: 176743 - DNA, 508 bp, Homo Sapiens
agcggccgcggccagctctaggtgggctgctccagctttctggagttctcattagactgggttctaggcgggctgctccagctccataaggaagcactcgatgtcgtcatagaggctgttggcgctggacaggcagaggctgaggctgctgctatccagggaagacacaccctcacgctgcgtgccctctaggtgcactcggcacagccagggttccagcttcaccaggaccaggctcttctccttgggcctcccagctgacaggtcctgcccgaagcccaggtagatggtatagcgtggggagccacggcgctgccgtgcccggaattccaccagctcttggaagaagactctgaagtcgaagatgggggtgtcacagttccgaggcagcaggcaggctggggtggaggagctggcggactggagggttccgccagccttcccagtacaccttgcacttgcccatgcgccgggcccacagctgtggcccccgaagctccgagtgcaa

SEQ ID NO: 176744 - DNA, 602 bp, Homo Sapiens
aattaattatcaaagcctttttttaatgaagggtttgatcacttcaaacaatatatccatgtagatgtacatatacatgtacacatacacataaatattattgcaattaagtgatcaagtacagacacaataggggccagttttgtttaaggatcaaagagacaaccactttggggaattagtatcaacttacaatccaagtccaagtatcatcttataatcacttttttctactatattaagatctaatgaatttgatttcttttttgaagttttttcttgtaacatctgagattagaagtttaagatgacttgaccccaaacctttgtttatgtaagaatttttaaacataaaagtgtttgtttctgttatgttaccataatttgatgtatatagtgtccagatccatttagaaatttaatatttattaataactgaaactgtttgttcttcctttggtaaaaagtctcgcatattatattaaagcaggccaagataaaattttgacagctctttaagcccacatgcagcagtgggtcaaataaccctgtggcagtgacacgggcaaattggcatttgaataaagccctgggcccccctc

SEQ ID NO: 176745 - DNA, 458 bp, Homo Sapiens
ggccatgacgtatggggcattattctgtgaaacaagtgccaaagatggttctaacatagtggaggctgttctgcaccttgctcgagaagtgaaaaagagaactgacaaggatgacagcagatccattaccaatctaaccgggaccaattccaaaaagtcaccacagatgaagaattgttgcaatggctaaatcccaaacatccttggcctgtgaagtcttcatttccagaatactgaatttgtgtgacttatttggctcttaacagagtggcacatcctactgacactgtcctatggagagttacagtgcaggaaacctgaacccagctctcaggtccctctggaactttggctcttctttgttttgtctcagtgagtgatttgggccctctggctaaatagactagtcatgtccttacaggtcttaaaagataacatgtaaatgtttttaaaatgag

SEQ ID NO: 176746 - DNA, 500 bp, Homo Sapiens
  misc_feature (41)..(50): n is a, c, g, or t
  misc_feature (357)..(366): n is a, c, g, or t
  misc_feature (388)..(449): n is a, c, g, or t
aattacccaagcgtgagaagtggtgttgtgattaagagagnnnnnnnnnntggaggtctgaggaataacatttaaggaataaatgaagaggccaaaaggtggggggtggttcaggagtgagcaaaatgtaagaagtcaagggaataaatctttaaagtaggggttgtcaaaaatgtcaaatacagaaaaaaagtcaagtactagcttgtgaattaaactgtggatttagaattaagattttagactttacaggaagggactgttaaccagagagccaaatggcagattttagttaaggagccagtagaaggtgacaaagtagaggtaagaatattccttcaaaaagattggcagctnnnnnnnnnngaggccgggcgtggtggctcannnnnnnnnnnnnnnnnnnnnnnnnnnnnnnnnnnnnnnnnnnnnnnnnnnnnnnnnnnnnnaccatcctggctaacacggtgaaacactgcctctactaaaaatacaaaaaa

SEQ ID NO: 176747 - DNA, 435 bp, Homo Sapiens
  misc_feature (36)..(36): n is a, c, g, or t
cgaactgggctggcggctccaaagcacagccttccntgttccgtcccagcgggagctggtgttaggggtcccaaggttgccacccacgtgcccagctgtcccacgctgcagcgcagacggccacgcccacacccggccttttagctcaggtccaccatgggggacggcccagcgtgggtgggggtgccagagggtcccgagtgggggccgtgcctttgcccagaccctgcactttcaaccaggccagtccggctctggggagcaggggcctccccggcaacacccccaggggccttgagggtctgaggtcccagccctgttgccaagtgaccttgtccccagctccctcctcccaggctggtgtgagtgtgcgtgcgtttgtgccgagcttctatttcatattgcaaatataaataaaggaaggcagtttaaaaa

SEQ ID NO: 176748 - DNA, 2752 bp, Homo Sapiens
  misc_feature (1435)..(1482): n is a, c, g, or t
  misc_feature (1985)..(1985): n is a, c, g, or t
  misc_feature (2006)..(2014): n is a, c, g, or t
  misc_feature (2291)..(2302): n is a, c, g, or t
  misc_feature (2356)..(2356): n is a, c, g, or t
  misc_feature (2418)..(2418): n is a, c, g, or t
  misc_feature (2420)..(2428): n is a, c, g, or t
  misc_feature (2545)..(2545): n is a, c, g, or t
  misc_feature (2550)..(2550): n is a, c, g, or t
  misc_feature (2580)..(2580): n is a, c, g, or t
  misc_feature (2583)..(2584): n is a, c, g, or t
cccttcgccatcaacacgctggcactgagcacagtcaggcacctgcaggagctggtcggccaggagacactgcccaggacagccccgacctcctgctgctgctccggctgctggcgctgggccagggagcctgggacatgatcgacagccaggtcttcaaggagcccaagatggaggtagagctcatcaccaggttcctcccgatgctcatgtccttcctggtggatgactacactttcaatgtggatcagaaacttccggctgaggagaaagccccagtctcatatccaaacacacttcccgaaagcttcactaagtttctgcaggagcagcgcatggcctgcgaggtggggctgtactacgtcctgcacatcaccaagcagaggaacaagaacgcgctcctccgcctgctgcccgggctggtggagacctttggcgacttggcctttggcgacatcttcctccacctgctcacgggcaaccttgcgctgctggccgacgaatttgcccttgaggacttctgcagcagcctcttcgatggcttcttcctcaccgcctctccaaggaaggagaacgtgcaccggcacgcgctgcggctcctcattcacctgcaccccagggtggccccatctaagctggaggcgttgcagaaggccctggagcctacaggccagagcggagaggcagtgaaggagctttactcccagctcggcgagaagctggaacagctggatcaccggaagcccagcccggcacaggctgcggagacgccggccctggagctgcccctccccagcgtgcccgcccctgccccgctctgagggccctccagacctgctcgggtgctggggccatgccgagtcgcggccctgctcagccggaagaggctcccggacctggatgtacagggcagtctctcttcccggggctatggctgggcctgtcctgccgtcatggccccctgcttcctgctccttggagctggctcccggaccttgcccaccatccatgcagtggctcccagggcagagcctctccttgtactttggcagccatagaaagcgtgctcattttctgttttcctgtgttaggaaaaaaccacctgttttccaaaggggagagggcggggcctgagggtggggggcggggcctcttcattggcccagcttggcgaaagcgaggcacactgcttactgccttggggttgtggagatggacccgtgacctcgtggaggccgtgtgggggcagcagcctggcctgtgccatggtgggtgtcctggggcctgtgcggagggagccacctcaccctgcagcccaggttgcaggtgtggccttgtttctccttgcccagcagtgctgccttcagcggccgtgacggggccagctggacacacggtgagattttctcgtatgtaaataaaaggcattttggtnnnnnnnnnnnnnnnnnnnnnnnnnnnnnnnnnnnnnnnnnnnnnnnnccttgtccggccgcctcggtccctcaaagaacctttcctaaacccattccgtttggccgccccggcgcccctgcaccgtaaaggtgacacagtggctcattacgctgcttcctcctaacgaaaaatcccccggcgtccactgaaccaaggcgcgcttggggattttcttccacctaactaaacaacaaccggccccgcggccgtctaaaccccgaacgcccccctctgcataccgacaatcaccctacacgcggcccccctcccttagaagggagtcaatctttcctggggcccatcctcctcactcccacaccaggtgctaattcttcttaccccgccggagagtccctccgcggttatactgtcagggtatttcacacggccccggcgcgggatactcttcatggcacataacctcgcacacagtctgagagaccaagggagaatacgtcggccgcgcgtgagataacacattttgtctcacctcctcctgacgccgagcnccctgtctttctctttctggnnnnnnnnngggaaatacaacattataatgtttagaataaaaacgccccccacttttttcacccacctgttgaaaaaatacacgggccgcttggcgttttttgttagccccacgggggataaatccccaccccctcactaaaaacttatttgggccccgtaccccccgggggacgcggggaacaaatcaacacgattcggccccaatgtcgtttatagtatgttccctccccccctcctcctctcgcaccacgaggggaccccacccgtggttcgatatgttccgnnnnnnnnnnnntatcatgatgagatgtgaccaacacccaacccaccccccgcctctcgtgtatantcctcaccacatcacactcacgtgtccatggtcttcttcccccccttataattatgcggtgngnnnnnnnnnaccgcatgctggcgcgtatacgataacgtgccctcaacacccggtgctgtgcgctgctggaaacaacacaatcgccccccacgccccctccgggcggcgatacacctgcgccgtcgnctggntgagcatcatcccccccacccacacacgcnganntctggtttccgccgcccaacaatataacagactacctcctgcttgcttctcagggcgggaccaatcacaatggagccgcacgacgcgctttcgtttacctacgcgccgccgcctaagcacatcatcctcaatacctatgtatttgcccgcaagcaaatcatccctggg

SEQ ID NO: 176749 - DNA, 814 bp, Homo Sapiens
  misc_feature (509)..(544): n is a, c, g, or t
  misc_feature (600)..(618): n is a, c, g, or t
  misc_feature (761)..(770): n is a, c, g, or t
tcaaaggtgctatttaccaaacactctccctacccattcctgccagctctgcctccttttcaactctccacattttgtattgccttcccagacctgcttccagtctttattgctttaaagttcactttgggcccacagacccaagagctaattttctggtttgtgggttgaaacaaagctgtgaatcactgcaggctgtgttcttgcatcttgtctgcaaacaggtccctgcctttttagaagcagcctcatggtctcatgcttaatcttgtctctcttctcttctttatgatgttcactttaaaaacaacaaaacccctgagctggactgttgagcaggcctgtctctcctattaagtaaaaataaatagtagtagtatgtttgtaagctattctgacagaaaagacaaaggttactaattgtatgatagtgtttttatatggaagaatgtacagcttatggacaaatgtacacctttttgttactttaataaaaatgtagtaggatnnnnnnnnnnnnnnnnnnnnnnnnnnnnnnnnnnnngaggggggaagaacaaaaaacaacaaaagaaccaccacgcgaacacacaccacacnnnnnnnnnnnnnnnnnnncaaacttggccgcccgcccgcccccccaaaaatttttaaaaactttgttttggccggggggcccaaaagggaaaggaaaagggccaataattgtttccccgagaaaacccggggcaaggaataggggtttggatctccccccnnnnnnnnnnccccccgggcggaaccccccagcgttttttaaacaaaaccccaa

SEQ ID NO: 176750 - DNA, 461 bp, Homo Sapiens
ggtattggagtgattagtataaattcaatggaatttgagaagcaatggcagcgggataatttagagtcactgatattacgagaggggtctttttgtaaacctccttttcaatgtcaaagcaccaatttataaaacgctgcagatgtagaggttatgtgcaactgatctgtccagtttgtgtatgaaatggatttgataaagtttttgctagttatttaccacattttgggattaataagtgatttatatgcatatttttctctaaatctacagttttttgtacaagatattctacaagttatgaagctaacggaagaaaatgccaaagatacctctagttatgttgaacacagccagcacagtttcgacaggtcaaggaagagctgtttcagtaaagaatgaagtgaaaacacttatttaggaaaatgtttctcaccaataaaatgtatagttgtttctct

SEQ ID NO: 176751 - DNA, 518 bp, Homo Sapiens
  misc_feature (31)..(31): n is a, c, g, or t
cctccggccgtactgcaattgtacatttgantgaaggtttttctccattgttaaatttgctttccttaaattggtctctttggaaaataaatccaggtaataaatgtgggtatatctagagattataaagctctctgagccatcttctgatttttcattgctctataattctttttactgaaaatactatgttatgaatggtattaaattttagtctctggaacatccaaaaccaagcaaagggatgtgactattttgaatgaatcagaatgtcaacttgtatgtacactatatctacacttactcattatttaaaaagaataatgaaaaatctagatcaattcttcaatttgattgaactgttcagccttttcaagatttctttatttacaaatgattacatttaaatgaatgtacattcttctcactgactttggtgattttgaaacctagaatgatgtgtttctatctgtaatatctttccatttgaaaaaaatctcaaaacacagattaaaacc

SEQ ID NO: 176752 - DNA, 450 bp, Homo Sapiens
ctgaagtcaaaaagtttatgtaaccaatcaattaaattctggaaatttcagcagcactttcttcccaaactgctttccaatcaaatcctctttctcccgtaagaattatcacagacataaattgcctaattaataaacttaattcttataggtttacgtatttatgtcatttgataaacagatgctggccaatgttaagactcctaaggacttggtattaaaaactgaaacctctcatcagaatttctatttttatatctgtgactcaccaaacatacttggaaatgtccattttccaagctgactttccagttagattttaatcttaaataaagtgtgtatgtggttttattaaacaaactgtcacaatggacaaactgcatgcctttccatgaatgtctggttatcaccctgacatcacccaatgaaaaagaatacaacactaaaatt

SEQ ID NO: 176753 - DNA, 852 bp, Homo Sapiens
  misc_feature (718)..(718): n is a, c, g, or t
  misc_feature (771)..(771): n is a, c, g, or t
gggaacgcagagttgggagcaactccagagcctccttcaagatgctgctggtcctgctctcagtggtccttctggctctgagctcagctcagagcacagataatgatgtgaactatgaagactttactttcaccataccagatgtagaggactcaagtcagagaccagatcagggaccccagagacctcctcctgaaggactcctacctagaccccctggtgatagtggtaaccaagatgatggtcctcagcagagaccaccaaaaccaggaggccatcaccgccatcctcccccacctccttttcaaaatcagcaacgaccaccccaacgaggacaccgtcaactctctctaccccgatttccttctgtcagcctgcaggaagcatcatcattcttccggagggacagaccagcaagacctccccaggagcaaccactctggtaatctagaattcagtggcagaaaataaataagaagataacttccttcacaaagccatgacattgaaataatggggtcataactcctttcttcagtataccaataaaatattaatagcagtgcgaaaaaagacaaaccccaatagcccaccaaagccccaaagaatcgcccgtccgtcctgaacacccggcccgggtctcgagcacgacgaaggcgcgccgcaaaacacctccgcctgcggtattcagtcgaacacgcgaaataaagaccggcgnccggaccatccaaagaagtcgggtgggggcgcgcccgcttcgcgcgcgcccanttggaagagaaaagagggtcttgttacgtaaaacacgactttttttcgcccctttcttgtgacccgcccccgcggcctccc

SEQ ID NO: 176754 - DNA, 450 bp, Homo Sapiens
  misc_feature (28)..(28): n is a, c, g, or t
  misc_feature (76)..(76): n is a, c, g, or t
cctttttctccttaaaggaggcctgcanaaaaagggcttttgctctgcccccctctgccttgggaaaactgggtantctcatgagctcatccaagccaaggttggacccctccccaagaggccaacccagtgccccctcccattttccgctactgaccagttcatccagctttccacacagttgttgctgcctattgtggtgccgcctcaggttaggggctctcagccatctctaacctctgccctcgctgctcttggaattgcgcccccaagatgctctctcccttctccaatgagggagccacagaatcctgagaaggtgaatgtgccctaacctgctcctctgtgcctaggccttacgcatttgctgactgactcagcccccatgcttctggggacctttcctacccccatcagcatcaataaaacctcctgtctccagtgaaagaa

SEQ ID NO: 176755 - DNA, 489 bp, Homo Sapiens
  misc_feature (247)..(257): n is a, c, g, or t
gaccacgcgtccgcggacgcgtgggtcccaagctgtctctccaccgtggcttcccttctccctccaggccaaagtgctgctgattcccactcccttggttttcgcctgcccagcgttgctgtttgcgtggagggtggggggagctcagtggcagggaatcagcggtccgtggggtcgtggggacgggaacatgtgcccgaccgctccatcccctcctcctccttaggatgcataacctaccttgtcnnnnnnnnnnnaaattttctttccaggtagagtagctctttgtacataaagaatacttgaaaaattaattgtatgatgtatgagaagacagagtctcctagttttgtatcttgttgtatgactgccatgagttccaccagaaagccactctattttggtctctgtgacattttaaatgcgtgacagaagtgagcaaataaagtgaggaagaaatctatatatgagataatatagattgtattg

SEQ ID NO: 176756 - DNA, 492 bp, Homo Sapiens
ttttaaaaaaaggagggggagtagggggaagaaaataattttcctttattaaaatgtactgtcacaatataaaagaaattttgttctttttaaaaaaataggtagaatcacctgcatcatgtaatggccgtaattgtgtccagcagatatttttaaaaaagaaaagacagtgaacagaaactgctacctaaggattctagaggcaatgagacacagagtcctgtttttcaggacagaccgtattgcccaagcctctagcatttacggagcataaattaagaatcttgttttgccttgagtctcaccatgaaataatgacacggtagccacatttgctgagggcctaatatgtaccaggcattgtgctaagtagtttcatatccatgtctcatttattccgaacttttttcctcagggagagaaaaatcaattacagtcttgttcataggaaaaaccaaacttacaattttgggaaagcaagaacatgtacag

SEQ ID NO: 176757 - DNA, 832 bp, Homo Sapiens
  misc_feature (653)..(653): n is a, c, g, or t
gggtgttatgtggaggaaatgtgtattaccaatggggttgttagcttttaaatcaaaatactgattacagatgtacaatttagcttaatcagaaagcctctccagagaagttcggttcctttgccccaagaggaatgagcctctgtaacctcatctaagaacttggaagccgtcagccaagtcgccacatttctctgcaaaatgtcatagctaatataaatgtacagtattcaattgtaatgcatgccttcggttgtaagtagccagatccctctccagtgacattggaacatgctactttttaattggccctgtacagttcgcttatttataaattcattaaaaacactacaggtgttgaatggttaaaatgtaggcctccagttcattttcagttattttctgagtgtgcagacagctatttcgcactgtattaaatgtaacttatttaatgaaatcagaagcagtagacagatgttggtgcaatacaaatattgtgatgcatttatcttaataaaatgctaaatgtcaatttatcactgcgcatgtttgactttacactgtaaatagagatcagtttgtctctttctgtgctggcaacaatgagcgctcgcacagacatggcctcaggtaaataaatctattctatgtancgcagccccttttccctttttaaaaaaccttgtcggccgcccttcgcccctttaaaaagactttcataaaaccaattccttttgcgccgcgccggggcccccagtttgtgtttaactgtgaacacatgggcccacaaaaatctggttttctcctcaagcgaagaattaccctggcgact

SEQ ID NO: 176758 - DNA, 426 bp, Homo Sapiens
agagccaagaggtggaagccaagtaaatgtccattgacagatgaattggtaaacaaaatgcattatatacatacaatgcaatatcatttagccttaaaaacaaaattctgccatatgctacaacatggacgttatgctaagtgaaataaaccagttccgaaaggacaaatacacccatttccacttatatggggtatctaacgtcaaactcagaagaacaaagtactgcggtatttgccacaagctggtggaggagaaaatgagttgttcaatgggtattgagtgtcagccacgcaagatggaaaagctttttgagatttgttgtataaaaatatgcctatagttaacaatactcttcggtacacacaaagtatgtgaaagggtaaattttatgtgtttttatcacaataaaaattgtaataaaag

SEQ ID NO: 176759 - DNA, 714 bp, Homo Sapiens
  misc_feature (379)..(570): n is a, c, g, or t
  misc_feature (579)..(593): n is a, c, g, or t
  misc_feature (624)..(632): n is a, c, g, or t
tgcccagttcctgatggttcaaagggaggggggatgttggccaggccccagggcacagccctgacacaggtgtggctactggaggggccttcatacctgcggccccaaagcccctgggcttggctgtttgaggcagaggtgatggactccgggggcctgacacttgggatttgggaggcttcctagagcgctcagcaggtgaaggcagcaggggccatggccgggagccaggcctagctttgaactgagtttcaagggctgccaaagaggggcagtgggttggggttgtttttactacaaaataagttacttagttttataaagacaaaccgattgtagccaaatgacaccatatttaataaaatttagtctgaagtgnnnnnnnnnnnnnnnnnnnnnnnnnnnnnnnnnnnnnnnnnnnnnnnnnnnnnnnnnnnnnnnnnnnnnnnnnnnnnnnnnnnnnnnnnnnnnnnnnnnnnnnnnnnnnnnnnnnnnnnnnnnnnnnnnnnnnnnnnnnnnnnnnnnnnnnnnnnnnnnnnnnnnnnnnnnnnnnnnnnnnnnnnnnnnnnnggggggcgnnnnnnnnnnnnnnnaaaaattttttctcacactttttgttggggnnnnnnnnnacccagaaaagagaaagacggatataatttttttcccccaaagaaaccccgggaaaaaagaatagggggtgtttttctcccc

SEQ ID NO: 176760 - DNA, 967 bp, Homo Sapiens
  misc_feature (500)..(503): n is a, c, g, or t
  misc_feature (506)..(576): n is a, c, g, or t
  misc_feature (578)..(580): n is a, c, g, or t
gccccccccgggttttccaccccaaggggccaacaaattataaaacgcaaaggggcgcccaagggggccggaattccccgttgggcgaattcgggggtttctaccaaggcccgtcttggggaggggccgttcccaaatttgggccaggggaaggcccctaaaggaaattcccccacacgttccttccaatgaaattggcagaggccggggggggtaaatttgatatatcgaggcttcgcgtggggctttctcgttggaaaggattcacagtaaagcgccctcaggaactctcactttggggattgtttcaagaaccgcttgcggttcctcccggggcggttttttaatggtgggagatccacagccctcagttcctttccacgggtttctctagggaacacgggtaaggccacagtttcccctatcctactggggcccgccgggcccaaagaaatggtttagagaagctttttgagggtgccgagggcggccggcaaggnnnnaannnnnnnnnnnnnnnnnnnnnnnnnnnnnnnnnnnnnnnnnnnnnnnnnnnnnnnnnnnnnnnnnnnnnnntnnnttgttctgggaactttaatactgtgacaaagttctctaaaataggcaccttccccaccgtacctcatcgcccagggcaggcaggcagggcaggctagatctcgtaccgatacttgagcacgcctcctcctggtgcagaaagaaacctcttctgtaccgaaatacaagcagcagctgtggcctgggccaccaggtggagcatggggaacactctgggccctgggaggacgaagccagtgccactaggagcagactggctggggacggttgtccacacagactctggccccatctgggtgggcttgcagcaggcgtcctgggccagaggaggggccctggcatctatccaacaccaggacctctctttaggcctaggccaaactcttca

SEQ ID NO: 176761 - DNA, 401 bp, Homo Sapiens
aattttaatgttgatttttactgtgaaaaggtttttataagatatacacaccctagttttaatgttgtgtcttggtgtggatttacagatttactacaggtattctgaaccaggaacacaatcaggtttcaggccagtttgatactggctgtccttaattctaatatgagagtaggacatcatactaaatgttatgtcagtgggactgtactgtctgtggaacttagcaaattaatcattttcttcagacttgaaggagagtgataaataaaatttggagtcataggatattgatgcacaatttaaggattaaacatttttaatcaattgtggatgatggcttattaaatgttgacttcctagtataaaactgcaagaataaaagtaacttctccagctgt

SEQ ID NO: 176762 - DNA, 484 bp, Homo Sapiens
  misc_feature (24)..(24): n is a, c, g, or t
  misc_feature (71)..(71): n is a, c, g, or t
atccaacatttaatacatggaacnggaaaacattgtgcccaataatcatttaatatatgcccaaatcttanacgtcctactcctaaactgcctcctaatgaagtttcagtgacccttgagggcctaaagattgttcttctgggtaagagctcttgggctggtttttcagagcagagttcttgttgtgggtagactgtgacctaggttcacagcctttgtggaacattccgtataacggcattgtggaagcaataactagttcctatgaaagaaccagagctgggaagatggctgggaagccaggccaaagtgggggcaacagcttgcttctctttctcttctcaccctcagtttgtatgggaaaatggagatgtcctctccactttatcccacgatatctaaatgaaaaagaaagaaaacccacacacaaagcaaaaactcaagtattaagagcacatatttttgacccagtggaggcttaaaa

SEQ ID NO: 176763 - DNA, 413 bp, Homo Sapiens
aataaatgaaattatttaagggttatgctgcactagtattccttagaggaaacagttctttaaagttaggaaagggagtaggcaggcatgtgttggcaaaggctgttaatagtagttaagtgttaagactgcttttctttaacgttttcatggtaatgcatatttagagcactgtatttttgtcttgttaagaaaatttagcatttctaaaagaaaaaagcaaccctctttcaaactgttaattctgtcacagcctgtatattttagtcatttgtaaatctcttcatacaatagtgacttcttttttgactgatacagtatcttaattacaaggttattttgtacttgtcttaatacactaagtgtaataaaaacggcacaatgaaaaacaacaaacatcattaaaaccttgt

SEQ ID NO: 176764 - DNA, 372 bp, Homo Sapiens
cattaaatacaactcacatctgtgttttattatactctaaaatatacaggaatcttgatgtactgaaagagtgcaagtaaatacagtattcaagcagtcactatttctatgtacatgctcattaattcttcaaaaaacccacaaaattatcaaatagatcaaaatactgttctgtgttttcacactttatattcagaaaaaccagctgataatttacaatgtcataaagtttccagtttcacaatacaaaaaggataaaatgaaattgggtatcattttgttgcaatttatagaactttacccatacctgtaagaccctcaatgtatatgaaatcattttcactgggaaagtgacagttacggtaaaagcag

SEQ ID NO: 176765 - DNA, 451 bp, Homo Sapiens
acagcttgcaaggcttgtgagcagtgggcagggtcccagaaggggccccatggactacggcatcactcatgttctgtggtcgggccctttgctgtgctgtttggtggagaaactctgaccagagctagagacaccatctgcaatgatctctacatctatgatactcgcacatctcctcctttgtggttccacttcccctgtgcagatcgtgggatgaaacgcatgggccatcgcacctgcctttggaatgatcagctttacctggttgggggttttggtgaggatggcaggacagccagtccacaggtttgcatcctggactttatctaaatagggccaagacacatcactaagcctcgttttgttttgctttgttgcaaacctataaagcgttatcaccagagctatctgcttcacttcaaatgcttattaaatttcaatctgagactcc

SEQ ID NO: 176766 - DNA, 375 bp, Homo Sapiens
actcctccagaccaggaaccccagaaggagacagagcctgccacatccccccacgccaggccctgggccagggtgattggactgagaatttggccacaaccaaattgatgctggctggaaccagaggccagaaagcctggccttgtccccatgtgggagccctgtcctcagccctcttgtccccttgagctcagtgaattcccaccaggtgcccacagctcctggacttcaaattctatatattgagagagttggagagtatatcagagatatttttggaaaggagttggtctatgcaatgtcagtttggaatcttcttgaaagtttaatgtttttattaggagatttaaagaaaataaaggtctacaatatcaa

SEQ ID NO: 176767 - DNA, 420 bp, Homo Sapiens
  misc_feature (19)..(19): n is a, c, g, or t
  misc_feature (43)..(43): n is a, c, g, or t
  misc_feature (65)..(65): n is a, c, g, or t
ccccaacgggcaaggtggnccccaggaaaaaaggtggggaaanttgtccctgaggaaagcagaantaggccctttgtcccgccccaacccaagggcctccagtggacccagcattcaaaatgtgaagtgcccgtggtgtgcaaggcactcccatggcaccgtatttattgactgatctgtgaaggcttccctgacccctgcccaggaaaagttcactggtcgctctgttgtgccccacagcactttgttatacctctgccacacacttcacgcagcgcgttgtaactcatgtgtttacatgtctgtccccccagactgtgagctccttgagggcagggactgtacattctccagctctgtgtccccagggcctggcacattgtagacgcttaataaatgtctgttaaatgaatgagtgca

SEQ ID NO: 176768 - DNA, 638 bp, Homo Sapiens
gggataccagcaggcccttaagccttccaggacactaaggtcgtgggagcgggactgcaacaagcaatgccagataactgagaaatcatgttctttgtggactatttcagacaaccaggttccgacagtccagcccagaacttttccttctcattttgggttttctcttctcctgctttcctggggagagattaagcgctcattaagcagaggagcccactttgaggagagcaaagcacaagcttgcctgaagaatggatcccaacttctccccggcagctctgcctccctaagtctgtgaagccgcagccctgccctgtcctgtcctgtcctgacttcatctctccttctgcccaagtctgtgtcccatcagacttgcagcctttcagcttaacagttgcccggtcctgctggccccttttcctctggcccccctcttctgaaacaggatgtgcacacatgggccatagccctaaggactcctgccagaccacacagcccacacctggccctggttcacggctgttccacccacccctctttattctggagcatatcagggaaagaaaagttggatgatagattgccttcaccctcacagcgcacaaataaagctacgatgccaactttgcagatgc

SEQ ID NO: 176769 - DNA, 440 bp, Homo Sapiens
gtctagtgtttcttttgctgggaatagactttcaaaagttgtacttctatcaagaaacaaaactgcccttgcagaaatttcaggtcttttgttaagcctgtattggtcttaaggtgcagtattttttaaattattatttatagaaagaatctataaattcttggggaagtgtgttataagctttaataattacattgagctgcacctcagtggtgtgtcattaacatgcagtggggttaatatctgaggcctcagatgactttgtgccttttggaataaagggtaaaataaactctcccagagtaagagctgtatcgtgaattgtcatactaattattgagggggacttatgtgcttttattgaatggagtgctttacaatttttatttttaaatggggttgggatccttggaatatttcaataaaattgataaaatata

SEQ ID NO: 176770 - DNA, 414 bp, Homo Sapiens
tcttggactgaatcgtttgtctagactacatgtattacaaagtctctttggcaagattgcagcaagatcatgtgcatatcatcccattgtaaagcgactttaaaaatatgggaacacagttagttatttttacacagttctttttgtttttgtgtgtgtgtgctgtcgcttgtcgacaacagctttttgttttcctcaatgaggagtgttgctcatttgtgagccttcattaactcaaagtgaaatggttaagaatatttatcctgttagaataggaggcatctttttagcaactcatttaaaaccgaaacaactcaggcttttgagatgaattaaactaatttacattgtttaccaagctgtagtgctttaagaacactacttaaaaagcaaaataaacttggtttacattta

SEQ ID NO: 176771 - DNA, 1051 bp, Homo Sapiens
  misc_feature (518)..(530): n is a, c, g, or t
  misc_feature (986)..(986): n is a, c, g, or t
gacaaaggggacctacaggaactcgtccaagagggttcccgccatggcctagagcagtacctcgccagattcgaaaaaggcaatgaagctaaggaaacagctgattagtgaaaaacccagtcaagaggatggaaatacaacagaagaatttgactcttttcgaatatttagattggtgggatgtgctcttcttgctcttggagtcagagcttttgtttgcaaatacttgtccatatttgctccatttcttactttacaacttgcgtacatgggattatacaaatattttcccaagagtgaaaagaagataaagacaacagtactaacagctgcacttctattgtcgggaattcctgccgaagtgataaatcgatcaatggatacctatagcaaaatgggcgaagtcttcacagatctctgtgtctactttttcacttttatcttttgtcatgaactgcttgattattggggctctgaagtaccatgaagcctgtagaactgagaaggagaagcttacnnnnnnnnnnnnntcctcttctatattgcagtgtctctaaaggaggcaaattggtttacaccttcatgtaattcttttactttaggggttgtaaagctactttattagatatagaatggcagattctctgatttaaaagggctgagtttgtattattactgatatgaagaatagagtaccaatgtcattaattgatttttcttgttaatcagaattcctattctgtacctttcctctaacttctcagatttgtaattcttcttttgggagctgagctagtgcttttaggagaacagataaatgtggtctcagccagccctagagactgcttcttgtgtttgtgtcattctggcctgaggaatgaagtcatcttgaaaataaaatgaaagaaactgaattgtctaatgttaccgccgtaagggctgaggatttttggtccggcacgctcctgctcctgactcaccgctgnttccctctcgcccaaggaacaagtccggtcagggaagcccggcgcggcaacaagccattggcttt

SEQ ID NO: 176772 - DNA, 622 bp, Homo Sapiens
ggacgcgtgggtcgagcaatatcagtcgccccatcgtctcctcccatgggtaggaggaagtttctgccacctcccctcctgagcctgctgtcatcttcactgcccctgcccatctgtcacccacctgctcctttgacccctggacttggtatacctccatgtggagttgttgggcgagaggtgttctctgtgctgtgaattcagtggggagctgtagcggggtgggggctaggttcctccccccttgggccgagggccccttccccttggtgctctgtccccatccacctcctttcagctgctcctgggcctcagctctgcccagggccagccaggttctgctgggaagggaagggaatggggagaagggagaagcaagcagtgtctgagcctcaggagcttccccctccccctttgcctatcccctcccctctgcttgagccttgagccttgactgggagctgaaaggagttgcagctgttggcatgagacctccttctccccgtcttggggaggtggggaccagcagataaatcccacccttccttgagctgtcgctgtactctgaagttcagccagctcagattttataaaaattaattaaaatctctaagaagggagc

SEQ ID NO: 176773 - DNA, 494 bp, Homo Sapiens
gaaaaactggcttgataacatggcaagctgaatgcttgtagctagtaggctgtcactttctagtaagactatgtatttatcccaccagttgaagagtatgctgaacagaaggttagttgtaagttttcaatttttatgctttttattattataattacatagtttaagcgtagatacagtgctttacaaaaactttaagacattgctgtctaattagggatggacaagtaattgtgtaagttagaaaagttataaaaatccaagatgtggtattagattgctttgaaagtgtttttaatttctagatttatttaaagaaatcaaaactaaaaatccttgatgatgtgttatgggtgtggtttgtacaagagagctaatacagaattccattcagtgaatcctctgtttaaagagaaagccttggcctttgtcagaagatgggaaaacaaatgtacatttataaactttcagttaaaataaaatgtttaaattat

SEQ ID NO: 176774 - DNA, 950 bp, Homo Sapiens; identical to SEQ ID NO: 7000

SEQ ID NO: 176775 - DNA, 480 bp, Homo Sapiens
tgcacagtcttacatattccagtcaaggtctatgaatacagaccctcaacaaacaggaagcagctttaaaaatgtatcaaattgctatagtcaattcctacactccagcttgtagttttctttgtttcaggattagacacagaacccattcttcaaggactggcaaaagttctagaaacaaacaccatggtggtggaagcggttgcgttgcttcagtgatcacctagatttggtgtctttggtttcagtgttctggttactgaaggaatcccggatctttacaacttcagctgcacacaaatgtccaaaagattttgtgtaccattctggcatgtggccccttaagtcaactctgcacatgtaggtgagtttggattttcctggcccacagggttcaatcaaatacctggacaagagcacattaaccctcacacccaccacaggtgcgcgatcgtgatacaccgaggttagtaaaaggga

SEQ ID NO: 176776 - DNA, 1356 bp, Homo Sapiens
  misc_feature (28)..(28): n is a, c, g, or t
  misc_feature (30)..(30): n is a, c, g, or t
  misc_feature (35)..(35): n is a, c, g, or t
  misc_feature (60)..(60): n is a, c, g, or t
  misc_feature (1051)..(1051): n is a, c, g, or t
  misc_feature (1224)..(1224): n is a, c, g, or t
aagctgggttgtgactttctggtgacantntgggntccccccatcccccgtgtctctcantgagggaaagaaaatccccaagggcactgcccactgtgctcggaggtgccctggactgtgtacatctgaactttggtccatcctttgatgtgtggttcgttagccacaaagagaaatatctgaaagtcaacatgatgcttcttgcatattatccagattattgtatgaagttgtgtctataattattaccaatttttattctttatttctcaaatggaaacacctgaaaaagcattctggagtgctgaatttttaagatgtatattttgttaagcatattctctaaatgagatattgtgtggctttttagtaacaacgtcatttctaatacaaaaaaaaccacgaattcgccccatacaaccccattaactgcccttcgctgtccctatatcgccttcatcctcctcctcatatactacacttcccgacacactaaccctttaaccgctcgtctcttcctcctcccataacccgttgcccaccttatccattttacaccgctcacacaccttgtcctttttcccctcacgctacgctctcctagccaacacaacctcctactccttactggtctgtcaccatatcccccactacttcgccctttgaacgtctactcccccttgttttgttttgttttccccccttatacccttcttcccaatacctggttcccccccatttgtcgctttccttcgcctacctcccgttcgctacgtcacctgacctctcccttccgccatttctctgttaccctcatttctttccatactatctttatttttttccctcctttattcgccattatgaccgtcactcatcttgtactttgtgtctcatgcacgaaccttgcgcactccgcacttctacaccctttctctacacaatgtatatccgctccgcccaccccccaccattttcctcatgtcttgtgctgtctcgcccacaaacatcaaccgcccctcgtgtgtgcctcccgcagtcctcccgcctntcatgattcgccgcgtcttcgctttctaccactcactttacctccgtcgccttgttctcgccattcccaatatgcccgcacacggtcttctcattctgcctgttcactcgtctctcgtgaccatccccacctccgctacacaccccatgttgttctcctatgttctatcagtntctacaccacgcacttctccactgattctctcacgcccagttacacctcgcatgtctgaccttgctagtcctcacgatccgccatagtcgattatcagaactatatttgcctatgatctcgtatatttgccc

SEQ ID NO: 176777 - DNA, 494 bp, Homo Sapiens
tgggaaagacgcctttccccactcctgaaccatgaggcctcgctctggggtcttggatggcttttccaccgtccctgagactggggttgaggggactgacgggggccaccaccgccccgccctccagcgcctcctcccagggtggctgggcctcctgttctcagggatcacacctgggtgaggggcccaagcccctcccggaaccaaaggtgcaggctcaggcctgcggctttctggctgctgtgctgcctcctgggctccagccctcccctgcccccagcccgtcccctgcccagggcacagcggagccatgggggctgggagtccccatcagaggcagtgaggtgggccccggccctgggacaggcagctgccttctggtctgcatgacactaagacgcttgtccacagcggcgacccaggcctccaagcttgcacagaggcaaggccagacttttccgtcgtttattttcaataaataagcagctcagcgc

SEQ ID NO: 176778 - DNA, 652 bp, Homo Sapiens
cagactttgagggaagctcactcaggatctgctctccggcaaagtagtaagtgaggtgctgagagcagaatgagctactttgtggattctgctgggagcagccccgtcccttactcagcgcctcgtcctgcagtggtgaggcaaggacctagcaacacttatgaagatcctcgaatgaactgtggtttccagtccaattatcaccagcaaagaccttgctaccccttttgggatgagggcaactcaggaagttcctactggtcttgaacactgtgtctcagaattacaaggccagcttagcctgaagtcattgcttaaataacctgctaactggaatgtattgacatgaactgtcaacacggctgctcccttcaaccaattccaagctctttctcctcctaatgagaggcttcttgtgtgtcttgatttgtctgttatgcctcttaacattgctcacagtctcaattggatcagaaaacagctttttctagaccacagaatgtatgctattctctgaaatcctaagctcttaagatctctacagtctgtttacccaatgtattgaattcttgtacccaatatctcatgataatgttcatttatgatacatatttcttctcttcttactatttgaataaattatattgactat

SEQ ID NO: 176779 - DNA, 769 bp, Homo Sapiens
gaaacgagaagcggctccatggtgatcgtgttttccatagcagccttcagtccatctcctggcttcagtccttacaatgtcagtaaaacaccttgcgggcctgaccaagaccttgccatagagctgcccccaggaacatttagggtgaactgcctagcacctggacttatcaagactagcttcagcaggatgctctggatggacaaggaaaaagaggaaagcatgaaagaaaccctgtcggataagaaggttaggcgagccagaggattgtgctggcatcgtgtctttcctgtgctctgaagatgccagctacatcactggggaaacagtggtggtgggtggaggaaccccgtcccgcctctgaggaccgggagacagcccacaggccagagttgggctctagctcctggtgctgttcctgcattcacccactggcctttcccacctctgctcaccttactgttcacctcatcaaatcagttctgccctgtgaaaagatccagccttccctgccgtcaaggtggcgtcttactcgggattcctgctgttgttgtggccttgggtaaaggcctcccctgagaacacaggacaggcctgctgacaaggctgagtctaccttggcaaagaccaagatattttttcctgggccactggggaatctgaggggtgatgggagagaaggaacctggagtggaaggagcagagttgcaaattaacaacttgcaaatgaggtgcaaataaaatgcagatgattgcgcggctttgaatc

SEQ ID NO: 176780 - DNA, 493 bp, Homo Sapiens
  misc_feature (344)..(344): n is a, c, g, or t
  misc_feature (370)..(370): n is a, c, g, or t
  misc_feature (392)..(392): n is a, c, g, or t
  misc_feature (436)..(436): n is a, c, g, or t
  misc_feature (449)..(449): n is a, c, g, or t
  misc_feature (474)..(474): n is a, c, g, or t
gctgggctgaccaagaccctggccatagagctggccccaaggaacattagggtgaactgcctagcacctggacttatcaagactagcttcagcaggatgctctggatggacaaggaaaaagaggaaagcatgaaagaaaccctgcggataagaaggttaggcgagccagaggattgtgctggcatcgtgtctttcctgtgctctgaagatgccagctacatcactggggaaacagtggtggtggggtggaggaaccccgtcccgcctctgaggaccggggagacagcccacaggccagagttgggctcttagctcctgggtgctgtttcctgcatttcacccantggccttttcccacctctggttcacnttactgtttcacctcattcaantcagttttttgccctgttgaaaaagattcccaggctttcccttngccttcaaaggtnggcgtttttatttggggatttcctngttgttgtttgttgggctt

SEQ ID NO: 176781 - DNA, 633 bp, Homo Sapiens
ggggcaggcagagaagccgggagcgggcgaggcggcggcggcagcagcgatggcaggaatagagttggagcggtgccagcagcaggcgaacgaggtgacggaaattatgcgtaacaacttcggcaaggtcctggagcgtggtgtgaagctggccgaactgcagcagcgttcagaccaactcctggatatgagctcaaccttcaacaagactacacagaacctggcccagaagaagtgctgggagaacatccgttaccggatctgcgtggggctggtggtggttggtgtcctgctcatcatcctgattgtgctgctggtcgtctttctccctcagagcagtgacagcagtagtgccccacggacccaggatgcaggcattgcctcagggcctgggaactgacccagctggtcctgaaggagaagccaaatggctgcactggccgattctggtctccagaggaccttggtgtttgctctcccttgacccaccccagtgagtgccaaagggcagccccaacatgtgcacccctgcatttcctgtcatgccacagactgccccttgagggcagcctgctgtactggccatgctgggccagccccaactggagctcagtaaaaactgctgtttgatta

SEQ ID NO: 176782 - DNA, 333 bp, Homo Sapiens
cagctgcctgttgccgtctgtcttcagtaactgctgctctgttaactgttctattctgatactacgcgtgttgttttttacaacaggtatgtttttgtttcagaaatatgtattgcttttctcatattttttgcaaattgtattgtcaacatgggtcatttaaagtcctgtatgaaccataacctgctgtggtacctttgtacatgtttgattctgtattctttattccagtgtggcatatgtgcccctctgtatcttttgagaagtgcggaataggttgcttctaccacctgttcttaatgtaacagtaaaagttttcacatttttctcaga

SEQ ID NO: 176783 - DNA, 403 bp, Homo Sapiens
  misc_feature (19)..(19): n is a, c, g, or t
aaaggcccctttcctacangcctagaggggaaatacatcccaaaaagttagcatgggagtgttagaaaactaggaatagaccctctccggcccaccgagctgctgtgtcacgcccctcagcctgcctagggagtgacaagccccaagtcattcttgatccaccccttctcccaccccagatcccagggactcatcctgtgactttgtaaccacactcattcctttcaaacacagaggaggaattattgcttcatctgactttattcaaatctagttatgtattggcctaaattatttgtgcaaaatttgaaatgttttttatttaaatattagaaatagcacaaagtcatggagtttttaaaaattgttataattaagtaaaaataaagctgaattgtgtcat

SEQ ID NO: 176784 - DNA, 391 bp, Homo Sapiens
ttctcccatggcctcctgagtgatgggccctgcctccctgtgcctcatcctcaggctggttggagcagagggtgggcaggagccccagcacagactggggggtgctcacagcagggccaccttgatgcaggctggaatgttatccctggggtgtgcttggaccccacctgctttctttctctcctgcccctcccctactctcactgtaatttatggaccctgcccgcctgcgtgttgtgtgtatgtcctgtgccttttctcactattgtttgggtgtgggagggggtggtttttcactgaaaaggggggtacacctatagctttcttgatgttcaatcaatcagtcactgtgtcccagacatattcaataaacacagattggtaccaccca

SEQ ID NO: 176785 - DNA, 658 bp, Homo Sapiens
tgtggttgccgtagggtttcggggctggttgggctggcagatgtcggtgggtgcttgcaagagagtccaggcaagccatgggggaggggggaatttgagttccgaggatcaagaagtctagagaagcaggcggtgagctcagatgtacacatataaccaggggcgtacacagggggcagcatcacagtagcatcgaatttcacctttggtgagcagcacggccagggcgcagagctccagctgcagccagatgaagatgtagcgggagtggcgatccattggcgccccgcacgggccgcggcgcccccgccggcttccggagccccggctcggcggcagcctacgacccccggagcgcgcagggcatgggccctgcccggagcggcgggcgccgtcagcggcggggctgggtttcgggccgctgccggagcatggagcgcggctacagggcgcgcccaggagcccagaaaagtttcccggtcccccgtcggcggccactggctcccttgccccgctcgactctagggacgcacgctagccccgggtcgggagtgggctcccggccttcagtccccgctagcggccgttctcagcgaagagagtagggtctccacagcacgcaagggtatccgccgcagctcccgcccgcgccagcccc

SEQ ID NO: 176786 - DNA, 466 bp, Homo Sapiens
ttctcgggaaactggtttaataaggacaattccagaggggcctggctgtggccaaagctgtgccaaacggttgggatccagagctaaaggcacttcttgccacgtgagaccatgggcgaggctccccacgctatctccaccaccacagtcatgagagccaagcgagactggcctgtgctaggaggctccacagctgcccagctccacctccggcatttactggtctcatcctgagaggcattgggtgcccactcactggctggatgctgggctggttcatgggtggcagagccagggtatacccttatgggatgtccctaacccctcaggaccagaggcagcaccaagcagcatgtcacagccagtgctagggtcagctgcaccctttgctgggactctagctctcctcagagggcctcctaggggccattccgggcactgtgggtggcaatggggagccccggct

SEQ ID NO: 176787 - DNA, 408 bp, Homo Sapiens
  misc_feature (18)..(18): n is a, c, g, or t
  misc_feature (56)..(56): n is a, c, g, or t
  misc_feature (85)..(85): n is a, c, g, or t
  misc_feature (211)..(211): n is a, c, g, or t
  misc_feature (227)..(227): n is a, c, g, or t
  misc_feature (281)..(281): n is a, c, g, or t
aaacctaaaaatccccancaaaagggtgcaaactgacccctaacactggctgtganatgctgcttggtgctgccctctggtcctnaggggttagggacattccccaaagggtatacccctgctctgccacccatgaaccagcccagcatccagccagtgagtgggcacccaatgcctctcaggatgagaccagtaaatgccggaggtgganctgggcagctgtggancccccaccacaggccagtctcgcttggctctcatgactgtggtggtggagatancgtggggagcctcgcccatggtctcacgtggcaagaagtgcctttagctctggatcccaaccgtttggcacagctttgccacagccaggcccctctggaattgtccttattaaaccaatttcccgag

SEQ ID NO: 176788 - DNA, 571 bp, Homo Sapiens
gtgaagggcaactgggagaagattgatagattctttagagacgtagcctaactctaagatggctagttttctggagagaaatggagaaagagagagctgggaagagactttctgggttagtaagaaatctcaagcactggcctttcctttcaaaggagtcagaatttgattggattagtctgtgaagcaatttattccctagggtgatgtcaaaaacaatcgagcaaccagcttgcaatgacgaatttagcagctgggtttggtcagggaaagagacaaagagagccttcccacacccccatcatatcaaggtggacctgcccactacttctcaggggaaacagactttactgcagtattccagtcattgcagctttcacctaaaagctttcacacaattgctttgggctattcataatagccccacactgaaaatccaggcgtccttcaatgggcgaacagttaaataagttggggctcgttcagcttatggaatatgtttagcaagaaaaaggaatgaactattgatacataccacagcctgctaatctccagagaatcatgctgaatg

SEQ ID NO: 176789 - DNA, 590 bp, Homo Sapiens
tgagctacttgcccggcctattcccttgggcttttaaaaagcgtcttggatggaggtggtgcaggtgctcaccaagcccgcaggtaacccaagttgcatgtatccccagggcacttttgtgattcccctgcttgtgactgcacaccgggaccccactcaattcaaagacccagactgcttcaaccctaccaacttcctggacaagggcaagttccaggacaatgatgctttcatgccctttgcctcaggtgcaggcagaggaggaaggggaccagcctggactggctctggggtacctggtgctcactgtgcacctgtgtacccggcaaagcagatgtgcctgggcacaggcctggcccactcgggtatcttcctattccttacggccaccttacagaggttctgcctgctccctgtggtacgccctggcaccatcaacctcacctgcagtgcactggcctgggcagtgtccccccagacttccagctccagccagtggcctgctgaggtcaggctccactatggtgggctcactggccctcaaacctccataccctcctcggtcaataaaggccctaaattgcagatgg

SEQ ID NO: 176790 - DNA, 580 bp, Homo Sapiens
  misc_feature (495)..(495): n is a, c, g, or t
  misc_feature (505)..(505): n is a, c, g, or t
  misc_feature (541)..(541): n is a, c, g, or t
aaagttgacacaggccaaatcatggaaggccatgctaattttattaacttatatagtgcataaagtctagaatttaaaattacaaaggttttctacaaatcaataagaaaatacaaataacctatattaatcagaacagaaactcaattcaattatcttaaacaagaaagggactttattggctcacaaaactttaaagtccggagatagggcaggctttaggcacagctggatctagggcctccagaaaaatgacatcagaacttagttctctttccatttctgctagcatccgagtttctcctcagacagactctctccacatggcacaaattcaggcttacatggtccttggttcctgggatctccataaagccttctttccagtagttccagcagaagttctgttaagggctttccttaggcctgggcttaaggttatatacccattcttttatcactgtgggctagggaaggctgtgggggactcagggnggccagggcntggggtcacatggctcaccctaagggccacaggggnatagggggtcccccacaaataaattaaaagggttttgtt

SEQ ID NO: 176791 - DNA, 879 bp, Homo Sapiens
ttttttgtgtttaagagtttattaggataggcacataacagaaggctcaagggacaacaaagctgcaccttcccaaagggtgaccccccaaggcccattttggtaggaccccgaggggaagcccgattttcggagctttccctcttcaagtttggggaaacaggcccgggttgagggtaaatccggcatagaaatctggaaattccagaattagtcaaacaaattggaaatacacacattttaaaaatacttacattcccatttagcgttcatgaagtgattactgacatttacaattacatctgacatcacagagcaagcctttgcagggatctaattcaagcttaagccaaatctatgcaaagaacttcagctcagaggaatagtgggcaaaatctgctgaaaagaactgcttgccaccttgcagataagagcaacagcacaataaagggattccagagcttctacctaaaatagaagggcattatctacaagaacagacccaaaacacaatttatttttaaacaagccccttcagtgaagtcatttgtcctcaggaatcctagtatgaaaatagtgtctttgattagtgaatatatggagaattcggattatcatctctatttttagttgagaaaatgcacaaaccatatagatttaaaccatgggttttgcagccgaagtagagacagatgttttctgggatcatatctcagattcccaagctaaagctattgttcaaggtgatggaaatatgtagggggcattaaaccattttgcagctgctagaaagctgtgttttcctgttttcctgatttagacaatggagaagctaagaagagaaataataggaaacctcgtgccgaattcggcacgagg

SEQ ID NO: 176792 - DNA, 632 bp, Homo Sapiens
  misc_feature (27)..(27): n is a, c, g, or t
  misc_feature (44)..(44): n is a, c, g, or t
  misc_feature (103)..(103): n is a, c, g, or t
agaaacaacaacttcctaaactggccntgaccctgcaatggccngccccaggaaggtcctgggccccagcggggctccccttctgtgcagacttttggacccnagctcagcacccagcacccgggcgtccctgagcactttgcaagagagatgggccccaaggaattcagaaagaagcttgccaggcaagcccaggagaccctgggagctgtggctgtcttctgtggaggaggctccagcattcccaaagctcttaattctccataaaatgggctttcctctgtctgccatcctcagagtctggggtgggagtgtggacttaggaaaacaatataaaggacatcctcatcatcacggggtgaaggtcagactaaggcagccttcttcacaggctgagggggttcagaaccagcctggccaaaaattacaccagagagacagagtcctccccattgggaacagggtgattgaggaaagtgaaccttgggtgtgagggaccaatcctgtgacctcccagaaccatggaagccaggacgtcaggctgaccaacacctcagaccttctgaagcagcccattgctggcccgccatgttgtaattttgctcatttttattaaacttctggtttacctg

SEQ ID NO: 176793 - DNA, 745 bp, Homo Sapiens; identical to SEQ ID NO: 8137
  misc_feature (487)..(583): n is a, c, g, or t
  misc_feature (587)..(587): n is a, c, g, or t
  misc_feature (593)..(593): n is a, c, g, or t

SEQ ID NO: 176794 - DNA, 1333 bp, Homo Sapiens
  misc_feature (135)..(394): n is a, c, g, or t
  misc_feature (1323)..(1323): n is a, c, g, or t
ttctctgtatgtacaaaatgctaatgctgccacctgcattctgggcccccagtgagtgtaatgccagcttccctgagctacaaaggccattctcaacagcccaggacatagaagaagactattttttatttttgnnnnnnnnnnnnnnnnnnnnnnnnnnnnnnnnnnnnnnnnnnnnnnnnnnnnnnnnnnnnnnnnnnnnnnnnnnnnnnnnnnnnnnnnnnnnnnnnnnnnnnnnnnnnnnnnnnnnnnnnnnnnnnnnnnnnnnnnnnnnnnnnnnnnnnnnnnnnnnnnnnnnnnnnnnnnnnnnnnnnnnnnnnnnnnnnnnnnnnnnnnnnnnnnnnnnnnnnnnnnnnnnnnnnnnnnnnnnnnnnnnnnnnnnnnnnnnnnnnnntgagctaccatgcctggcctggagaagaccgtttttattctggacccaaaccctcaattttctgggctctgtgcagccctcttccctcccctgtcaagtcacttaccatgcaaaccacaggctctaagagtttgtccccagggacatccatccaagtcatctccatggctcctgggtcccctggtgagcatggagtcaggaggtcatcaatcatcatgctggggttggtgcgagaggggccacagacctgaaaccaaatggatctgactggggcagctgcccctcagtgtcagaggggctcgacccctccggtctctaaggaagtcccaaagagaatgctctgtgggtccctagcatctgaggaggacgggctccttcagaactccgggctgggtggtccgagcgactcatgatttgcatgggactctggcaatctgtagccccaatgccttgatgtcttcctcattaacactgtcacgtctcaccaggaatacagtgacattaaaagctgggatatgggcttagctgcggcccccacccccattttcaactcgaaatggatctatcctcccaccaatttcccccatgttgtgcggacgcacccagggctgacgttaacttgactcatggggggcttggccctttccccgggcctacctcccctgaaggggggaaacctcccccaaaacctgattgggccgcattcagggaatttcccacctaatgtctccctcaattttccccatgcccaccaaacccgccaaacaactcccttttgagattccaaccaatcgacccgggaggccccccctaccccactggaggcaaggctgtacgccgcaaatcaccgccccccgctcgttatattccccagacccacaaaacaatcccccgcgtgccgcgcgtgtgttttatatccggtaatgccnccgcgcgaac

SEQ ID NO: 176795 - DNA, 1552 bp, Homo Sapiens
  misc_feature (1404)..(1404): n is a, c, g, or t
  misc_feature (1505)..(1505): n is a, c, g, or t
  misc_feature (1512)..(1512): n is a, c, g, or t
ctacctggcaaagccgtggcaacagaggccaacaactccaccttcttctctgtgtcctcctcagatctgatgtccaagtggctgggggagagtgaaaagctggtcaagaacctgtttgagctggccaggcagcacaagccctccatcatcttcatcgatgaggtggattccctctgcgggtcccgaaatgaaaatgagagtgaggccgcccggaggatcaaaacggagttcttggtccagatgcagggggtggggaataacaatgatgggactctggttcttggagccacaaacatcccatgggtgttggattcggccatcaggaggaggtttgaaaaacgaatttatatccccttgccggaggaagctgcccgcgcccagatgttccggttgcatctcgggagcactccccacaacctcacggatgcaaacatccacgagctggcccggaagacggaaggctactcgggcgcggacatcagcatcatcgtgcgggactctctcatgcagcccgtgaggaaggtgcagtcggccacacacttcaaaaaggtctgtggcccctctcgcaccaaccccagcatgatgattgatgacctcctgactccatgctcaccaggggacccaggagccatggagatgacttggatgggattgtccctggggacaaactcttagagcctgtggtttgcatgtcggacatgctgcggtctctggccaccacccggcccacggtgaatgcagacgacctcctgaaaagtgaagaaattctcagaggactttgggcaagagagttaaaaggctgcttcacttgggcaaaggtgaaggtgggaggttgattggggcaaatccaggcactccccatgtcaacagccagacagggctccagggcttgtcccagtcaatacagagttccctctgctgtctggccgtctgccagggagccagaaggaagggccttgcagccacagagacactccactgccctggggcacacagtggacactgctcttcctacttcctcctctcctggatgctcatcagctccttctgcctcccccccttttttttccatcttttgttcccctaaattaatgctgcttggattttcatcttatttataaagataaaatcacctggaagtgtcaaggagtggggcggggtggcgggggagaagcagccgtgctgccaggtcacccagacctccagacagccggctagccccactgcccgttccttttacgcccaagttttgctccttgagagcagattggctgatgcccctgcaaccccagcccaagctctgcctcaaagaccgagtgacataagccattcccaccctcctaggttcacatccagggctgtgtcttcccttgggggaggagatggtgtcgtttaaatcagggntaagcagtcaggcggggtgttcaccactgcctttttcttcctctgaacggtgagaacacttgaacccaggccactgccccctggggtcccctgtccctggnaaagggncccaattaaattcctttttttccccctcctttggaggctt

SEQ ID NO: 176796 - DNA, 344 bp, Homo Sapiens
gggtcacccagacctccagacagccggctagccccactgcccgttccttttacgcccaagttttgctccttgagagcagattggctgatgcccctgcaaccccagcccaagctctgcctcaaagaccgagtgacataagccattcccaccctcctaggttcacatccagggctgtgtcttccttgggggagaagatggtgtcgtttagatcagggtaaggcagtcaggcgggtgttcaccactgccttttcttcctctgagcgtgagaacactgaacccagccactgcccctgggtccctgtcctggaaatgatctaataaatccttttcccttcttgagctac

SEQ ID NO: 176797 - DNA, 598 bp, Homo Sapiens
acaaaatacaatcgccgggagcttacggacaagcttctcatcttcttgcgctagccctgtttcttgctacggtcctctatattgtgaaaaagcggctctttccatttttggatgatcccaaaggtgctagttctggccctttgagctcctgtttcaggatctgtcctggtccctgagctctaggctgctaagctgagccacacacccctccggtttgcaccagttccctgcaggttggatggaacacagtcccccacttttctgcaagtagctggcttgtaaagggtgaacagagccatgggaggaaggtctggcattgggatgccgccctggggacatacgaaccgcctccttccaccattgtgcactatgggaggccgctgctgcgtggagcacttaaagtccagcctccaggaccggatgcccctcctgtctcccgctcccatcgtgcccttaaatgccagatctggtagagggaagagagaagaggtaggaagaaaggtgatgaaaactcctggtcattccttgaataaacttgattttatttaatagaataaaatgtatttgattttgtaagataaaataataaataaaaaaa

SEQ ID NO: 176798 - DNA, 482 bp, Homo Sapiens
  misc_feature (62)..(77): n is a, c, g, or t
  misc_feature (85)..(244): n is a, c, g, or t
gggaatcacttgagcctaggagtgtagaccagcctcggtaacaccgtgagaccatctctacnnnnnnnnnnnnnnnntaagaagnnnnnnnnnnnnnnnnnnnnnnnnnnnnnnnnnnnnnnnnnnnnnnnnnnnnnnnnnnnnnnnnnnnnnnnnnnnnnnnnnnnnnnnnnnnnnnnnnnnnnnnnnnnnnnnnnnnnnnnnnnnnnnnnnnnnnnnnnnnnnnnnnnnnnnnnnnnnnnnncaaacaacttgatttttaataactctgatagtccatcttatatatcataatatacagttaacgactgagtaagtatgtaggttttcaatctgtgttcgttataagcacacctacataactttgtgttttctaatatctttagggcagatcaaaggaaggaaagtgggggaggagagagggaaaatagtgtaaatgaagaaactgagcagtgtattgtgcagaattggtgtctgacgtt

SEQ ID NO: 176799 - DNA, 379 bp, Homo Sapiens
  misc_feature (61)..(61): n is a, c, g, or t
gcccctttggccaccctccccaagcatcctggttaaatttcctgaagtttaaaaattagancccagatttccttcctgttgtgtcctgaagagaacccatgacatttagaagtatattggtaatcctattaggtcccattggcaaagtatattggtcccatattcaaacctattcccaaaaggttagaagtgtttaagattcctttattgtgtgtaccatgtctgtttacctatgcttatgagcaacaataaattactagtttaccttctggaattttaattgttataaccgaatcaattattggaaagtgaaaaaacactcccgtgtcacacaacagggtacctaaataaatgtgttgttacctgtgaaaaaataaaa

SEQ ID NO: 176800 - DNA, 425 bp, Homo Sapiens
  misc_feature (122)..(139): n is a, c, g, or t
ctctccccgccgcccccaacaggctgtcaaacaaaaccggagagggggtgggggagccagcctgcccagcgtgcttgcccgcaggcacccgtgtgacatccgcacgtccagctccgtgaccnnnnnnnnnnnnnnnnnncacaagtgagtgagagatttcgaacgcccacccctcgactttgaaatctgagcaaaacaagaaactggggtcttcctctcccccgaacctctccccagctagtcttccctctgttcttcctgcctccagccgcccgcgccagattttgaaatctcggagacaaaactagtactgtaagataaatttttttgtactgtatttattgtgtataacgatttttttaaaggagaattctgtacatttagaactcttgtaaattaaaaaccgatcctttttttaaaactgt

SEQ ID NO: 176801 - DNA, 461 bp, Homo Sapiens
  misc_feature (71)..(71): n is a, c, g, or t
ttaaggaggagtatataatctctgatggggaaatgaggtaggagaccagaaggacttatttcccattcccnaaccccattgaacagagcaggatctggtcaaaacagggtgcagtggagaagccctgctgaaaccagcagatgatgatgaaagtgacctctagttgccctcactgcttatgagcataaagacactaccactgggaccatggccagtttacaaatgtcatggcaacacaccttggcaatggcctggaagttactttatatggttctggaaactccctgcccctttcccagaaagttctgaataacctacctcttaattggcatgcaattaaaagtggctctaaatacaactagctagtagcccacaggcaccaactctgggcacactgcctataggttagccctgctctgcaagaagtagcaccagttcaataaaagttgctttctctcaaa

SEQ ID NO: 176802 - DNA, 633 bp, Homo Sapiens
  misc_feature (90)..(90): n is a, c, g, or t
ccctcactgcactgatgcccgggaaaactgccatctcgctgtttgaagggaaaccctggccctggataaagccatcctccatagccatanactgctgttcatctgacgacaccaaaaagaagatgtacagctccatcctagtggtgggaggtggtttgatgtttcataaagctcaagaatttctgcagcacagaattctcaacaaaatgccaccatccttcaggcgaattattgaaaatgtggatgtgatcacaaggcctaaggacatggacccccggctgattgcatggaaaggaggggcagtgttggcttgtttggatacaacacaggaactgtggatttatcagcgagagtggcagcgctttggtgtccgcatgttacgagagcggcctgcgtttgtgtggtgaatggggaggaaatgtcactgccgaagaccaaaaacaatgcttcttggtataaaagactcttacagaatatgtgtattgtaatttattgatctggatgcttaagtgtcatggacagtaaatgaatttgaactttatgttgaggacatgacattggtttgaaaatataaactgcttttgagcagtttagtcatggcatttgagaataaataggaactttctcttcaaa

SEQ ID NO: 176803 - DNA, 157 bp, Homo Sapiens
aaaaaaaagtggggggaaggattccacagcaagaaaacgctctaaaataaacaaaagtgcccgagggagtgagaaggtgctggctaccctgtggaaaccagaggatgacaggggtgacatttggcctgagacttcatcggaacatgctggttcaccc

SEQ ID NO: 176804 - DNA, 414 bp, Homo Sapiens
gctgggtgccctgtgcacgccaccccacttccgccctacccctgggacgttggccttggctggctagttgcgcaccgtgtgcctgccctccaagggcctcctctacgccaatgaggcctcatctgtgctctcgctgggcacgtggcttcatgtcagtaagcaagatgcttcttaataacccaccttctgccccactctattccttatcctgctgtccctgtaggggtcaagggccctccgtctacaccctcttcttctcctccatcctttattcagagtcatctcgcccttccccatgggtgggggaacctgtgtttgtttgtgtgcacatgtaaattttaaatattttaagcagaaagtccttacctcctgtaacacatcaataaagtacaatcattgtgagccctttcaaaa

SEQ ID NO: 176805 - DNA, 846 bp, Homo Sapiens
  misc_feature (45)..(90): n is a, c, g, or t
  misc_feature (555)..(555): n is a, c, g, or t
  misc_feature (623)..(623): n is a, c, g, or t
ggtaaatagagacaaggtctcgctatgttgcccagccgtgggctnnnnnnnnnnnnnnnnnnnnnnnnnnnnnnnnnnnnnnnnnnnnnnaggtgtgaaccaaccacacctggctccccaaggtttcagtttttatcctcctctgtggagaggtgagtgacttgaggtcatttcttcacaagctccggtaggcacccacagtattgtcaaagagtttggtgtaagggaagtgtccagtttggtccaagaggaaatagaagcgtcggccttggacttctcagaggtagcatggcagggacttcaccccgggtgggccatgcaagatacctgcttcaaaggaacggtgaaaggggcccccaagccaaagggggcatgagtggtgagggtcacctgcggccctccagctcgaagccaccactgagcgcacagaccggagagagaagagaagaccagcaccgagtacgagggctccgatggcggccgaagccgacgggccaaaccgtagcgccaaagcgcggacgcgcaggtcgaaggggccacgattggggacctccngcatccagaggctgcaccggaaccggggggccgggacacgggtgccacagccagtggaacgcccaganagacgccctgggccccgggcaaaaaaagcccgaggattggtgaaaaaaggggccccgaacaatgcgtcaagagagcaggcaaatcccgttgccacacgacagaagcccttgacaagggggcctgcccagggtgcaacacagggggcccggaaccaacggcataacacgctcccgggggcccatacgcgcctccaagggggcgcgcataagaacaaaaatcgcg

SEQ ID NO: 176806 - DNA, 440 bp, Homo Sapiens
  misc_feature (34)..(34): n is a, c, g, or t
  misc_feature (47)..(47): n is a, c, g, or t
aaatcacgtttctctctgaaaccctgtaaactgntcccgaagggaantgagcaaaaactcgggtatgaaccctgaggttgactgccggtaaattttctgtccctgggaaaagcctgacccacctccctgtctccatgtagccagtgaggggagggggagacacagaaccaaccacatgccaggggcgtccccatggcgactgtggcccggcccctcctctcttgcctgactctcctctcttgcctgactctagacactaacttagttccaggttcggtgccctgttggtgctcctgtttccaatagcttaggtcccatggtgggggaggaaccttcagggctatgcagcccccgccagctgccctcgaatcccgtccaggccaattccagattctaaactgatttttttcatgatattgtcaaaacagtgaggaaacatt

SEQ ID NO: 176807 - DNA, 822 bp, Homo Sapiens
  misc_feature (685)..(685): n is a, c, g, or t
  misc_feature (707)..(707): n is a, c, g, or t
ggttatggttctggatcaagacgtgaacgatcaagagagagggaccatagtagatcacgagaaaagagtcgacgtcataaatcccgtagtagagaccgtcatgacgattattacagagagagaagcagagaacgagagaggcaccgggatcgtgaccgagaccgtgaccgagagcgtgaccgagagcgcgaatatcgtcatcgttagaagctgaaggaagaggatcaccttccaagacaaaacagtcttcatgggggaaaaatgacgcttgtccagcagtttgcttcttgtgattgaactgaacctgtaaggattcatggataaaatgaacaggaatagatctgaataaagcaaatctgcataaatggtaaccagtagctctacttttattttttatgttgcttaactgttttatttgaaggaaacctgtgtgatttaaaaagttatagcttttgcaactttattactggttatatacatttggccattatgatgtgcaagcaattggaaaaaaagtcaagtaaatgcttgtttttgtagtagtttgttcttgttaaaaatgtttatatgataatgtctgtaaacagcatcactttgattacaatagatgtagtgttgtaataaactgtttaatggggctgatgtgtaaagctgttcaagttatttgatgtttacacctcagggnaaagtcttgtgttcagcaatantctaaagataatgttactatgacaacattttttactgtcccttaaagcattttgcaatagcgttttggatatgcctcaatctaatcttgcgttcagtgaattaaacatagtaatt

SEQ ID NO: 176808 - DNA, 521 bp, Homo Sapiens
ggtcaaaattttatgtaaacaattttaatcatttaagaagtcagggaatcacaggaatgcagactgtgacaagagaacataactattagtacaaatgtaggaaacaaactcaaaagagtaggggtgaaaggtgctgatctaagtaactttggaaattactggagtttgtaagactaaaggcaaaaggaactgcaagtaagcagttcctagttgatacaagttgtttcccatgggggttatagggaagcttaaacattccctctggaggtttgataattaagtctgctgaaatgaactgacaataaacagattaagaagagaaagaccattttaattacatacatgcaaatggaagcctcagaaaaatatgagactcaaaggaggaggcagatggttgaaggtttcatagcataaaatgaataggggcttgaaggggaggtgatgacaagttatgagaggaaaaggagaggaactgcatggtgaacaaagattgtcttatgtaaataaagtctctcaggtca

SEQ ID NO: 176809 - DNA, 433 bp, Homo Sapiens
  misc_feature (50)..(50): n is a, c, g, or t
  misc_feature (115)..(115): n is a, c, g, or t
  misc_feature (158)..(166): n is a, c, g, or t
  misc_feature (251)..(251): n is a, c, g, or t
  misc_feature (304)..(304): n is a, c, g, or t
actggcctgccaatgaacgtgcaacctgtaactcaggaaggctgaagggnaggaatcaactggaaccccccaggagtttgaaggctgcaagcgaagctatgatcgcgcccactanactcccagcctgagcaacagagtgagaccctgtctcttaaagnnnnnnnnngtcagactgctgggactggcccaggtttctgcccacattggacccacatgaggacatgatggagcgcacctgccccctggtgganagtccctgggagaacctcaggcttccttggcatcacagggcagagccgggaancgatgaatttggagactctgtggggccttggttcccttgtgtgtgtgtgttgatcccaagacaatgaaagtttgcactgtatgctggacggcattcctgcttatcaataaacctgtttgttttacacgt

SEQ ID NO: 176810 - DNA, 1054 bp, Homo Sapiens
  misc_feature (63)..(113): n is a, c, g, or t
taaaggggggtcagagggccagtcctttcctgggtcaaggcccagggaaggaagcccagttcnnnnnnnnnnnnnnnnnnnnnnnnnnnnnnnnnnnnnnnnnnnnnnnnnnngccatcagcatggggtaacagaccagtccctaggatcccggttcatcacttcggtattggcctcggcctccctggcctgtgcctgcccagccatatgggtgcaagggcctgcctgagaggagaggacattggggagggggagaaggcctggcccagtactggggaagatggaagcagcaaacaaggctgtgaacacagccaggatgcaagccagtggagccagtgcagagcacacatgctcagatgatgttgttctcctggatcttctctcccaagtaaaagcgggtaaagaggaaggggctcaggtcgatggtctggaacctgcccttcagtaccatctctgctacagctcgcccaatgccaggggcctgctggagcccgtgaccactgaagccagtagcaaagtacatgttgacaactagcgggtgggggcccaccacgccattctggtcaaaggtgttgtagtcgtaatagccggcccaggcgctctgaaccttcagagtctcaaaagctgggaccctcagggccaaatggggccacaccttgtcctggaagaaatcatggtccacttccaggttcgccgggtccggttcttcctgctcagtggggctacgaccacctaggtagttgctacctaatccttcccggcgaaaataggctccactggtgtctgcaacaagcggagtctctaggcctggtccctgggggcagtgccacacatacacataccttttcctcggctccacaggtagcttggtgccctgcagggtgccaggcggcccctctccaacaccagccagtgctgcgatttgcgcagaccaggctccggctgcgttgatcacaatggcgcattccacaggctggtactccaggctgcggtccatcttcacatggacttcatggatccttttcaagaccaccgctttgtcatctgtggtcct

SEQ ID NO: 176811 - DNA, 354 bp, Homo Sapiens
tgtgaaacacaaccccaggatgcaaagccagtggaagcccaatgccagagcacacatgcctcaagatgatgttgttctccctggatcttctctccccaagtaaaagcgggtaaagaggaaggggctcaggtcgatggtctggaacctgcccttcagtaccatctctgctacagctcgcccaatgccaggggcctgctggagcccgtgaccactgaagccagtagcaaagtacatgttgacaactagcgggtgggggcccaccacgccattctggtcaaaggtgttgtagtcgtaatagccggcccaggcgctctgaaccttcagagtctcaaaagcctgggaccctcagggccc

SEQ ID NO: 176812 - DNA, 455 bp, Homo Sapiens
  misc_feature (438)..(438): n is a, c, g, or t
tggaaggagttaattacatgtattgattaatggatagggtaaacagacgaaaatcaataaacctgagccaggctgccccagagtgctcccatgcctgggctctgtctgctaagagggtcagaggcagtctttcctggtcagtgccaggatgaagccagtcctgggccagggtgctcaggcctccagatggattgccctgggtgggtgacatcagcatgggctacagatcagtcctaggatcccgctcatcactcgctattggcctcggcttcactgcctgtgcctgcccagccatatggggtgcaatggcctgcctgagagggagaggacactgggggagggggagaaggcctgggcacagtacttgggggaagatgggaagcagcaaacaaggcttttgaacacagccaggggttgcaagccagtgggagccagttncagagcaacattttttt

SEQ ID NO: 176813 - DNA, 830 bp, Homo Sapiens
ggggggttgcggcgtctaagtgtttccggtggattcccagggactgtcggaggtgtggactctgcctgcctacctggtctgggaagatgttctaccatatctccctagagcacgaaatcctgctgcacccgcgctacttcggccccaacttgctcaacacggtgaagcagaagctcttcaccgaggtggaggggacctgcacagggaagtatggctttgtaattgctgtcaccaccattgacaatattggtgctggtgtgatccagccaggccgaggctttgtcctttatccagttaagtacaaggccattgttttccggccatttaaaggggaggtcgtggatgctgttgtcactcaggtcaacaaggttggactcttcacagaaattgggcccatgtcttgcttcatctctcgacattccatcccttcagagatggagtttgatcctaactccaacccaccatgttacaagacaatggatgaggatattgtgattcagcaggacgatgagatccgcttaaagattgtggggacccgtgtggacaagaatgacatttttgctattggctccctgatggacgattacttggggcttgtaagctgagcctggtggcctcctacccttggtcctactctaggaagtgtgattgtcacacttatcatgttgtccagaggtccagtctggctgctgttgtggaggcaaggaaggcaactcatcccagaaggcatctggtgcttcttgtagcttaactactgcctcctcatttttcagtatgtgttctaagtataaaaagtccttggtttctccaaaaacaaacaacaccattac

SEQ ID NO: 176814 - DNA, 428 bp, Homo Sapiens
  misc_feature (19)..(19): n is a, c, g, or t
  misc_feature (28)..(28): n is a, c, g, or t
  misc_feature (96)..(96): n is a, c, g, or t
ttaattaaagcccccaaangtgcccttnaaccccaaaaaccagctgtacaagaatctttgatacagacctatttgcctaggggtgctgccgggganttggggtcagcatctggccccctatctcctgaccagctgagtcatgaggccggtttctctctctctcccacttttgtcccccagccaagctctaaagcacatgtagccgctgagacctgctgtttctgctgggggcaggctcctcttcccccagccccgggagcctcccccagcttcctgcagccccgacctctcaggttagaccctgggccctggagcttagggattctccccaccccagccccacacctgctccttccctaatgctttgaggttttcttggttggaagctgcagctggcccaagaaagaaaataaaaaacaacacttttg

SEQ ID NO: 176815 - DNA, 795 bp, Homo Sapiens; identical to SEQ ID NO: 52026

SEQ ID NO: 176816 - DNA, 835 bp, Homo Sapiens
  misc_feature (101)..(153): n is a, c, g, or t
  misc_feature (480)..(505): n is a, c, g, or t
caccctggtatctcactgcagcacagagctcgggatgtatcagccccactgtgggctcgacagggtcctcatgtcctggggccatgatggtgaggccagannnnnnnnnnnnnnnnnnnnnnnnnnnnnnnnnnnnnnnnnnnnnnnnnnnnnagaggcagtgcctgctggtgacaccctctccccacagagtacatgtaccaggtgatgaagtttaacaagttctcactgccccctgaggtaggtggggggaggggcaacgcagcccgtccaccaggcccggtcctgcagccccaagtgagccgctgggtggccttgcccgcaggctttctacatgatccggttccactccttctacccctggcacacgggccgcgactaccagcagctgtgcagccagcaggacctggccatgctgccctgggtgcgggagttcaagtacgccccgctacccgccgaggggtgttgtgggagtgaaannnnnnnnnnnnnnnnnnnnnnnnnntttctcacggggctcaccgcccctccctgctgcagcaagttcgacctctacaccaagtgcccggacctgccggacgtggacaagctgcggccctactaccaggggctcattgacaagtactgccctggcatcctgagctggtgaccctcctgccacccaagctgctgctggacctaggcctggccctccgcctgcctggagaggcctggccctgggcaaacagccgccatcagggttcacctcggtgggggaccccactcacccccttagggtcgccacccctcacggcaacttgtgcctggcgtcaataaagacctggaaggatgttgt

SEQ ID NO: 176817 - DNA, 301 bp, Homo Sapiens
tttttttgcaagtttatgaatagtttattacatttcagtaagtgtattgtgaatcaataaagcaaaagttaaggacaatgagctcattaccaagccagttattgattctctggttccaaaatagaacagtacaggaagggtatagagaaaataggatttttcatgataaaaattttaagcatcttaggaacacagacctaaagaaactataagacacaacggaaatttcagcagctacttaggatgtttatttatttacctttttttgccaattagaattagttatttggtttttactctt

SEQ ID NO: 176818 - DNA, 773 bp, Homo Sapiens
  misc_feature (645)..(662): n is a, c, g, or t
caattataccttctgtaacagtggcattcccttaattttctagtgaaagttagagataactgaacagactgaagcacttttctgaaatcttttgcttgatttatgaaggctgccatagttatcttttcttgtgttaaccatcttaaatgatgttttgtatattttaatagactgataggatgagaaagatttatattattagatttcaggatgatttataattcaaaaatgaaattcaataatggggaaataattatgaattatagaaattatgccttcattctcttacatttgtgtgggttgcaagagggggagattattctggaaatgaagtaaatatgggaagttattgccaaatgagagagaaactatgggaaagctgatctataaagaggcattctgatcaattcatttgtaggaaactgggaaataaaaacctggggaactttaggttatttatacaaagggaataaataggctgattttaatttggtaagttgatcttttttttatgaatttggtaatagtataggtttattatttattcatctaattttatagtacaggttttgtaatgttacatgtgatgatatgagctcccaccttatatgggggaacatcttgggaatttgagatttaataagnnnnnnnnnnnnnnnnnnagtgtttttactgcatactcacaaatgttgtctataatttgaaaaatattgtcatatctggccctttgatgagaaaaggaaattacaataataaagttttatgattttaaa

SEQ ID NO: 176819 - DNA, 285 bp, Homo Sapiens
ttttcattctgcttttctttattgtctggctaacttacaaagatgcagatgtctagggtagtctctaccctaccacttacactatcctgatgacacagatagcaaaatgtgtctgtttacatagtgcatgatatgaaaaaaaagtttttcttcctctacggtccttgactataaggagggaaaaattaatttcatgccaacatttttggggaactttaacaatcatcccatttctgctactaaaataacaaaactggtattacactttaaaatataaagacctcc

SEQ ID NO: 176820 - DNA, 371 bp, Homo Sapiens
ttcacacagagttatctgggattctgattttttaaatagtacatatcattaaaccattttctctaaatgtaagaagagcagaaaaaatcttataagattatcagatttttctaatgacacagaaatgtaagaaaaaaatccctttatattgaaaaaagatgcagtcaaagtcttttcagacatgcccaaactttgagaattccttcaaccatctaatgctataaagatttttgttcttcctgttcacaaccagttgtataacagaaatactagctactgttttccttcctgtgtgtgaagtaatgaatcattgattatgtgacttgttatgtattcaattaaacactaaagaataaaacattcactccttt

SEQ ID NO: 176821 - DNA, 1074 bp, Homo Sapiens
gacagaaataatatcaccaggatcaccaagatggacttcgctgggctcaagaacctccgagtcttgcatctggaagacaaccaggtcagcgtcatcgagagaggcgccttccaggacctgaagcagctagagcgactgcgcctgaacaagaataagctgcaagtccttccagaattgcttttccagagcacgccgaagctcaccagactgcccagtgtggaactctgttggatggcactagacagaaatcacatccctcctacaggatttctacaaagcacgtgttcctggagcaactattatgaggaagatagagaaggcctagaaaatttggtccctgttgcctttgagacttgcaccatcaccctgcaactgagcactctgaccaaatatcaagatcaactgtgctttctgaaagatcaaattaagtctaattttaaatgggacaaaaggtagcactctttttatattcctacttaagaagatatccttcttggttctgttccattttgcacatggagtagttttaaagagccacatccaaggctggatttgaaagctgatgaacgtagctatgaagagctttatgatgaaaagggttattactggcctcccatctactggcttatctttttttattctttaagtcatgtgacaaatgagggttctgataggattgtctttggtgtggtttcatgagttgacataattaagagccatttccatttggcaatgctgcaagaaaaacatttccagtcagaagaacaaggaaataacttaattagcaactcaggtgagcgctggctctttagaaagatgttaagattggagggaagacaggagacccacagaggcagcgtgccacagttgggtgtttagccaaagacacgttcttctgtctctttcctcctgcatgagtcttttctgactgttcacctgaaattggatatggaagggctctgctgctgctgctgccagcctggtagacagaaaacgtcagtgtcaaagaaaaatgattgtgtgtttggttccctccagttttcacgaaataaacatcacttggcaattccttgg

SEQ ID NO: 176822 - DNA, 368 bp, Homo Sapiens
gccaaagtgctgggattccaggtgtgagccaccacgcctggccaacaaaaaagattttttttaacatgagaagattgtcagctttccctggtggtcagagaggaagggctttagagaggtcttggggctgcagggacaaagggtgcaggagaagaagccttagagctgagcaggaggaaactgacactacatggctgcaggcccagcatggaaatgaacttctagaatgctgtagtcgaagagccagcttaattttttaactcttgtgttgtgtgatttttccatccttcctcatttctaggggtattagttaggctatgggcttggaaattaatttgaagaacccaaataaatgtggtttaaatttg

SEQ ID NO: 176823 - DNA, 679 bp, Homo Sapiens
cacttatccctataacttcaatctgatgaatatagagaatgtaggccaagttaaattctgtgcctcagtttcaattatgaggataagtgtcttctgcagttagaataaaggagttaatccatgcaaaacacaatacttggtaaatgaaaaagtatttcgttgttatatactcacccgctgaataatgggactacaggtgacatttctttgctgctttatacttaggtattccacatttcctctggtgaacctggcttactgttataatcacaaaattgaaattatagttattatagcttatatgccactttgtaatatacttttgtctacttcaaacagcatgatacatttcacaactttagtcacatatttcatgttacaggatatttttgagttttatcattatataaataacactatgaggatttctgaatccaaatctggccaagtcttattttgctaaaatcatttcctaggagctaagcatagaaaactcttctatgctatttagtatattaaccaaaacctttagaggtaaagagactgccaggtgatccacatcagtgattcttggtttctagacctctgagaatatgtgagatacagatcccctgaagcctatccatagaaagtcctttttggatcaaagagaattatagaattttattgtgttgataaa

SEQ ID NO: 176824 - DNA, 447 bp, Homo Sapiens
cccttcccctgtgactggccttccctctgacacatgcggctttacccacctttgtctgtccctgatgtctactgcactccacacagagccatatagggtcagctgccattgccggaggatgccgacctggaatgactcatcccctagggcagcaaggggcagctcgtgagccacgcccctctgtcagccatgccagacagcagagccctgcccgccctgccacccaaaggggctcaggccacatggtctgctccaggagctgcctcactgtgtcccactgaccccaggttctgcagaagggcctcactgggtgcccttagggatggaaagggttgaaaggctgtactccaaagcagagtcttgcttttctctcccgtattttgggggttcagctgggattagaaaaaaatgtctttccaccaaattaaagaaagctttgaaaaccaa

SEQ ID NO: 176825 - DNA, 459 bp, Homo Sapiens
gggcacgatacccacaaggcgcttcctggcgcggcactaaccgtcggtcgggtggattgaattcgccccctgcttgacctttccagacgcccgacagaaggctctctacgctccctctctcccttccttcactttctctccttcccgtgcactgggctgtccctcatcccggacccatcctcctccagccaagcccccgaggagcttcaccacctcgggaactgtgcgtccggccctcaactcactagaggaagcccccctgaagagaatgggggtgggggagcacctgcgacacaaccgtcgccggcatccctggcctctttcgcgccatccctctggcagaaaccactccttgaaggtgtaagggaggcgagtttcctttgtttagtcagttcgctccagtctcttccccccacaggcccagcgccggcagctcagcgatgcactcaccatgctgca

SEQ ID NO: 176826 - DNA, 534 bp, Homo Sapiens
ttcagagagagaaaggggatggcaaatggctctctcagttagctggctgagcatgtgagcagtccgtacgaccaagatcattgttgtctccagcagtggagagcaccagttgcaggaatttcatcaggggcatacaagtcgtggatttgactgggacaatttcttgtacatttccattgtttttaacaagaggaggaagctgtgctgtgaaggatcctttttcatcatgattattgcatccacagaagcagtgataaattctaacagataatgcaactcagtctacttggatgttcacacctgagactggagaagacctgctgccttctgcagagccaaacattcctcacatgctcctccacaatgctagttaatgcagcaagaatagtcttatatagactataaactcctggtacactgtgtctacattgctcactgcagtatcccaacatctaagaccatggtcttagatgtctggtacaggactggtgctcagtacgcattgaatgaataaatgaatgaatatagcaaagc

SEQ ID NO: 176827 - DNA, 524 bp, Homo Sapiens
tggttctattgtaagtacagtattttcaatatcattttgttgtgaagtaacttctatatcaggagaagatggctggatatctgaacacatgctgacagttctgtgtctccgacgctgctgtccaatgtgagtcctactccgagaaaaactttttctctgtttagttctatttactttggcaggggttggcttgctagcattttcttcttttgcttgttcctaattcaaaatacaagcgaatggaagtttttatactacatatatataaagtttaaatataatagcattattctacttcagaagccaactttctggaatttttgaattctgatatataataaagaacagagataatatatagtcttttatctcaagctgaaactcccataggatctgaaaaatgctattaaaaagctaatagacattattttaaattccttataagtaattaatgcaagtatagacattttattttaaagtgtttaagaaaataaaacgacctgaataaataatacctgaataaa

SEQ ID NO: 176828 - DNA, 572 bp, Homo Sapiens
ttagagtaaagtagtttatcatcaaagccatgttgcgtaccacacggagttgggggttggggagtgagcttggaggggtgaggaggtgaacgtgggcgcacagcatggccaggggacggaggcaaactcattccgcagaaaaggggtatcttccccaagaaaagcctggagggcacttgtggggggaggtggcaggccgggagagaggggtgggtcattagcgctccagcaccgacagacacttgcggatgtcctgggcgagcagctccggctcctcaaaggccgcaaagtggcccccacgaaccatgtaggaataggagatgagctttgggtacttgaacctcaccaacttttcaggcgtgtgcaatagctcaaaagggaaggcagagaagccagtgggcacatagaccttcatccgctcatgcttctgggtcatccagcctgtcccaggttctccttgtagaagcgctgggaggagatgatggttgcctgttgtccagtagagcatgacgttggtcagcaggtcgtccagggagaacttcctttcaggcctcattcgcaggtatgggaat

SEQ ID NO: 176829 - DNA, 554 bp, Homo Sapiens
gggggtggggttcccattaaggccccaccctcaggccagtgtagggcctgaattctgggggctgggctgccagtccctctgaccagagtggaaactcgtggagccttttctgggcctgccaatggcccaatcagcacacacttcttccccgctgaggtccataaaaaccctgggctcagccagagcagcgcagagaatagccagaggatgaagatggtagagacgaggggacaggatgaccagctgcagagagcagtaccctctctgctgatagctggagacggtggggtgaccagctacagagaggagtaccttctccgctgaaagctacagagaccacctgccagcagagaggagctacactctgctgcgagcttcagagacctgcagagacattggaatgacttgcctgcggagaggagccactctctccagggcctcctctctgttgagagctgaatgcttgagctcatgggacaatctgtctccagagaggagctacccactcctctgagctcttctaacactaaataaaactcctcttcacccttcaa

SEQ ID NO: 176830 - DNA, 782 bp, Homo Sapiens
  misc_feature (306)..(428): n is a, c, g, or t
gggttttgcacaattttaatagtcatgcactacataatgatgttttggtcaatgacagaccacgtatatgttggcagtctcataagattataatactgtatttttactataccttttctatgtttagatacaaataccattatgttacagttgcctacagtattcagtgcagtaacatgatgtacaggtttgtagcctgttttgcatttttcttaggttgtatgctcttctgttttaaaggtttgaatcaccagcatttttgtgatcaaaatcctatttagaaaaaataaaactactttctgtttnnnnnnnnnnnnnnnnnnnnnnnnnnnnnnnnnnnnnnnnnnnnnnnnnnnnnnnnnnnnnnnnnnnnnnnnnnnnnnnnnnnnnnnnnnnnnnnnnnnnnnnnnnnnnnnnnnnnnnnnnnncctttcattttggcccgcgggcccaaaaaggaaggggaacttggcctaaaattgtttcctaggaaaatcttggttttgccgtccgcgcttgctttctaaaaattattaaaacccccggtgtggagcgcgaggggtctccaaaaaaatccaaaagggaagttcttaagtgtttttcctggaaaaaaaccccccgggaagccacaagggggtgttttttccccaaataaaaaccacccccgggggattaaccggaggtatttgtaaaaaatcttttaaggggttttctggccggacttgttaaagcctctcccaacgcgggggtttgtaaacccgggaacttcaccaacaagactt

SEQ ID NO: 176831 - DNA, 468 bp, Homo Sapiens
gggcaagcagtttcaataaagtttgatctccctctgctaaattgatgttgatgcaatccttacaaatgtattgcttttaaaattttaagctaggaaaagaaatctatagaaagtgttctgttacaaaatgtaactgttaccattggaaatttcacgtcataggaagttagcctttatctaccaactttcaagaacttgtttaataaagcgaaaaactcaaccaaatggtacaaaaccacagtgtaccattaaaatatgcactaagtctcttttttacaaaggctgtattcagcaaggcgctaacttgcttaaatgtgaattactaacttctaaaactgtactttgattcacatgttttcaaatggagttggagttcattcatattacaatatttgtgtgctaaacgtgtatgtttttcagttcaaagtcatgatgtttctaaaatcctattaaagtttcaaaaatctg

SEQ ID NO: 176832 - DNA, 374 bp, Homo Sapiens
  misc_feature (119)..(119): n is a, c, g, or t
agaccttgcttggtgacatgtgccactttggccaccacccacagtctgtcaccacgtggcttgggaacttctggagccacagcaggcatcacggtgcgacgtgagatgcctgcgccagncccgagcccactggcagccactgccattccacccatggtccctcaccctgccctgccgacgagcttgtctctgcagccccaggtacccccttcctggatgctgctggccccaggagatagctttccggtgacagctgtggaacgcgtcagcaggacaaactggacacatggagttacagagtgtacacggcagtcccgccacccagccccctcgtaaactctagtcactataaacacacccgtacgcctaaataa

SEQ ID NO: 176833 - DNA, 1106 bp, Homo Sapiens
  misc_feature (602)..(603): n is a, c, g, or t
  misc_feature (684)..(859): n is a, c, g, or t
  misc_feature (875)..(889): n is a, c, g, or t
agccgggagcacggtggagcggtggagggcgtcactgggtttcggcgtctggcaagcggttcagctgtctgctccctagcagccggccttcgggtcgggcgtctccgccggctactgccgcttcagttctcccggtgtggccacgagtcggcacaacattctgaaattttttggttattgtaatgatgttgatcgggagttgagaaaatgcctgaagaatgagtacatagaaaacaggaccaagagcagggagcatggcattgcaatgcgaaagaaactttttaatcctccagaggaatccgaaaaataaattgtattttcactcgatgccttggctgagagaagacctaaagactctgggttgatacctgaaagaatcctgtcttatttggtctccataatcctttgaatggaaagtgacctgtgagagattgaaccatggagaaatatgaaaaccctggattctgagtatttgttgggcagggcgtttagtactgtctcccctttaccagcaaacctgacttcaccatgtttattccctttgcctacaaccagttaatatctgagtaacttatctccttcaataaaataatttaaatacnnaaaacaaacaaccccccctatcctacaccacacaacccccccgtaaccataccaccatattcaccacccttaactcacccnnnnnnnnnnnnnnnnnnnnnnnnnnnnnnnnnnnnnnnnnnnnnnnnnnnnnnnnnnnnnnnnnnnnnnnnnnnnnnnnnnnnnnnnnnnnnnnnnnnnnnnnnnnnnnnnnnnnnnnnnnnnnnnnnnnnnnnnnnnnnnnnnnnnnnnnnnnnnnnnnnnnnnnnnnnnnnnnagaacgccggtaatannnnnnnnnnnnnnntttgattctccttcccgcctatttccaattcctcctatgccgcatctacccacgctctcccgatttcgccccgaaatatgtgagtaacttgtagcactcgatgatcgtctatccatcacatcacccacccccccgcatgaccattttaccaattacgcgttcgtggcccgcaccgctcccttcccccccaataccgagggatactcccactttgccg

SEQ ID NO: 176834 - DNA, 752 bp, Homo Sapiens
gcggggagccgggagcacggtggagcggtggagggcgtcactgggtttcggcgtctggcaagcggttcagctgtctgctccctagcagccggccttcgggtcgggcgtctccgccggctactgccgcttcagttctcccggtgtggccacgagtcgggttgcactgctgtgatccatcctcatctcctaaagatgcatcctgacttatctccacacttgcacactgaagaatgcaacgtcttgattaacttgcttaaggaatgtcacaaaaatcacaacattctgaaattttttggttattgtaatgatgttgatcgggagttgagaaaatgcctgaagaatgagtacgtagaaaacaggaccaagagcagggagcatggcattgcaatgcgaaagaaactttttaatcctccagaggaatccgaaaaataaattgtattttcactcgatgccttggctgagagaagacctaaagactctgggttgatacctgaaagaatcctgtcttatttggtctccataatcctttgaatggaaagtgacctgtgagagattgaaccatggagaaatatgaaaaccctggattctgagtatttgttgggcaggccgtttagtactgtctcccctttaccagcaaacctgactttcaccatgtttaattcccttttgcctacaacccaggttaatatctgagtaaacttatctccttcaactataatactttaaatcaacacccaccataaaccacacaa

SEQ ID NO: 176835 - DNA, 789 bp, Homo Sapiens
ctttctgatttctctgtctcccttttctccgtccagttggggatcttgtactatctttgtactccagatggctctgctctgagccactgcgcccggcctgtaccctccttctttttgaaaaagagagtaccttcttcctctgctttcattctgaagcctccatttaaaacactcctcctccttagcaatagtgagggtcccttcagactagataggatgtcaaaaggccaaagcattgcccccaacacactcctttaatgtagtcccttctttccaggtgtcttcctgaagagagaaaaatttgtagatcagagagatgcaattgggagctccgtagtgaatctagttagaaatgagtagcagaaaaaataggaaagacccgtctctcaatattatggttgcttcccaaaacaaaaccagttgatacagcatgaaggcaatttaaaatgatagatatggacatgctgccttacatttcatatcacctctttactaaatgagaattttttggatgcatagggaaagtttgcataatattgaaaagtttgactttctggaatctatgtgagctcaggaatatatttggggatcttagcagaggccagtggtagcctattaaatctaaaacaattggctttgtttttaaaaccagctgctattttgtagtttcatttaaagaaaaagtaccttctattcatttgcagaagttgctttattggattctatggtcattgtatatcataactatatcttttttgttacctgaaataaacatgtggcaattttcct

SEQ ID NO: 176836 - DNA, 254 bp, Homo Sapiens
gggctccggagatagaagacatggtcccggaggctccccctcctctcctctcccctctgcagatgctccctgggcgctaccctgcagggtgccaggcaggagtggtctcagaacgtgcgcttctgattattttactggggtccattgtccagatttttctttgattgtaaaatatatttttactttttagtcctctaatttaataaatgatccatataaaaatagagaaataaagtcctttaagggaaggttta

SEQ ID NO: 176837 - DNA, 660 bp, Homo Sapiens
  misc_feature (409)..(588): n is a, c, g, or t
  misc_feature (595)..(597): n is a, c, g, or t
atatctagccagaatctgatggaggctggatttcagattttgttacagaattagacagaggaacacagaggggacaggctcagttagggtggaggtgtggggtagggaagcaggacttgatataaattattggaatcattgtcttttaaaccagtggtttatgtcagggtatagcgtttcaagggatttgagggtcagatggggaaatgtagccccttattttgccagtgtgaagcagataccctgcttttctttacagtagcggagtcagcttaagagctttaaaggtcctaaacttcaaaaacattacagtgccccatcctccgccttaatgtaattcaaaatacaaacaatactaaactgtaaaataaatgtaacaaagtccaataaagtttttatttttttctcnnnnnnnnnnnnnnnnnnnnnnnnnnnnnnnnnnnnnnnnnnnnnnnnnnnnnnnnnnnnnnnnnnnnnnnnnnnnnnnnnnnnnnnnnnnnnnnnnnnnnnnnnnnnnnnnnnnnnnnnnnnnnnnnnnnnnnnnnnnnnnnnnnnnnnnnnnnnnnnnnnnnnnnnnnnnnnnnnnnnttttttnnncccctcggcccccaaaaaaaatttttaaacaactttttttagggggcggcggcccccccaaga

SEQ ID NO: 176838 - DNA, 224 bp, Homo Sapiens
gcttcatttacccattcatgcctagggttccattattggaaccctaagcttgtgggagttatttctatcctactgctcaaggtcatcaccaagatctgatttttcataaaaaacatttgtgaccttcggcataaatgggttaaggtgccatccctgaaactgcaatgcagatatgttcagataacttttattttttaattaaaaataaatctttcaaaaggaaa

SEQ ID NO: 176839 - DNA, 425 bp, Homo Sapiens
tcatcatctcatttttgaaacaaggatgatattctcaagggattgttgtgatgattaaatgaaatatgagatgaaagtgctagcacagagagggcactctgtaactttactccaaggtttgaagtcttcccgtggtgagctatctaagcctgctgcttgggctagctgagagttcttttataaatacccaaggtggagacaggagagcagtacgtttctgcacttggtggtgtcagggttgaagtctggttgcctgttgcttcgtgagggtggttattagtttcacctggacttccgcagtgcagcctgctgtgcgtttttccctacccccaaattacagctttgagtctttcatgtgtctctgttcaacagctactctgtgtctgtgggctctgaaataaaggctacattttcagttaaaaaaa

SEQ ID NO: 176840 - DNA, 399 bp, Homo Sapiens
tcgaccccaccattgttgctcctgctcttgcaaagtgcagaaagagcaggtaaaaagttagcccataagcacgtgggctgatcttgttggactttaattaatggtatcctttttcacacaccttaaactccaaagctgaaggggaggtgctccggaaaagcattctgagcttttacattcagacactagggctggcttgggccatttcctcagtggctgagtcaggttccagaccttaacagacaaatgggggaagggggctgaggcgtggaggaaacgctttcaggacctcaagtcagtgataaccgacagcacagtgaggcctggaaacttccctcggagggactgttggctctcgcaggtgcggggccgctaggatcaataaacggcctgagaaac

SEQ ID NO: 176841 - DNA, 153 bp, Homo Sapiens
attaagcatgcccagttatgccaagcatagtaaataaaggtcaagtagcatttataatagaggaagtattgttatccctagcatgagtgtaatggtgatatgaaaaactttgtcttgtcattataataataataaaatgaacatttattatgg

SEQ ID NO: 176842 - DNA, 427 bp, Homo Sapiens
  misc_feature (39)..(39): n is a, c, g, or t
  misc_feature (45)..(45): n is a, c, g, or t
tccctggcccatgtcaccttgaaaactgtgacctgaaanccctanaatgttccctcagttgtagacccaaaggcaatggtgtctgccctcctaccttagaagacaaatgcaagggcatttcacccacagagaggacctttgtgcctcactttggcccaggaggcagtgatgctcatggttgcatgactttatgagtcgctgggccagggtgaggacctgggcctcctgactcctggcccagagttcttgtccatcagttcatactgcaattttatgtgaaagcattatgactgtcctacccatgggagagtaaatgtagattgaatgctaggagtcttaaagctggagagtatagattttgaggtccccatttgggaaacatgtgtccagaaatgtctaggtgtttaataaaacagatattggatta

SEQ ID NO: 176843 - DNA, 1132 bp, Homo Sapiens
  misc_feature (82)..(120): n is a, c, g, or t
  misc_feature (163)..(163): n is a, c, g, or t
  misc_feature (673)..(673): n is a, c, g, or t
  misc_feature (679)..(679): n is a, c, g, or t
ggtgtgggtcggggggacagtaaacttcctgggccacgtgggtccttcaggagtttttcaggcaagtttttcctctgttttnnnnnnnnnnnnnnnnnnnnnnnnnnnnnnnnnnnnnnnctaatgtgcgtgagaatgggcctggcacacctggggtcatcgnggggtagggctgccatgctgcagagctgatggagtgatgttgtgggcacaaggcatctgtcagctgcctcctttaacagccatgccttctggaatctggaagaggacaccactcctgcagtcactgggcagccacatagcagctgcaggtcccaggagggcctgaggtcaaagctgtggaaggccctcttggtatcagggctctctccccatggcctcttccccacctctgattgctggttgtggccccatagctcatcacccctgtctcctgctgaatgtgcagggctgatgtggcactgaggagctgactttggtcaaaggccaggctctgcccagcaggggacttgactgccctgggcgccctgcccctcccgctgcgtgtccaggtccaaagtggagagcctgcctttgggtttagttcccgaatcagaatcccatctcaccagggcgaaattttaatttaaaaacttaaaaagagacttttatacccgagcaaccccgacgaagnaaaccntcccttggtcggccgccctcggccctcgaaaaacttttctaaaaccattccttttggccgggcgggccccaggtagggtaagtggaacatggcccatagcctgttttccctaggaagatccctgggtacatggactaatggctttgggaattcctcacccaaataaaaaaacgccccggggggggaaaaccgaagcggttcttgaaccaaattcccggattggaagttccctgaagggccatttactgggaatcctattccacaggggaagtcccaaagccagagccttggattattcaaaatttaacggcccccgggcccctggccacttccatttcggaaaatacctggggtgggaaatttccctttaaaggccttttcctgggcgcgactctggggaaagccccttccaccaaaaggggggatagtggatgaaaacccctgaaaatcccg

SEQ ID NO: 176844 - DNA, 1075 bp, Homo Sapiens
tccacaaggcaggcccctgcaggtggcctgacggagcaagagctgatggaacagctggaacactgtgagctggccccgccggctccttcagctccctcatggggctgtctccccagcccctcaccccgcatctccctcaccagcctccactcagcctccagcaacacctccttgtctggccaccgtgggagcccaagccccccgcaggctgaggcccggcgccgtggtgggggcagctttgtggaacgctgccaggaactggtgcggagtgggccagacctccgacggccacccacatccagccccgtggccctccagcggtctcggcactcccctcacacctcccaagatgaagctcaatgaaacttccttttgaacaacgcagctgccatgatgccttgggatgccctggtcctgggggactcaggtgcctccctgattcctgtgggaaccccgggttcagggccagggcctccttggaataaatggttattgttactaggtccccaccttccctcttttctggaagccaaagtcagcctccccaataaagtcctcactgccaaccaaaatccccgttctgtgattattccgtttacccccctcccgcacgaaacgcccccggagccatcttatgcccgggtgggcggaaaaaaaggtaaaggcaaatggccccctggtccccacgctgtttccctgaaccccagctttttcctggaaacaaagtgggaaaattttggccgggccttccccaaaaagggacttcggacttaaatttccacacacacccagccctaccctccctttaaatgacacccggttgccacccccgcggaaaatttcaaccccccctataaggaacggggccccttttttgtgtggcatccaaaacggactctttctttgcaaacaccttttttttctccccggccggaaataccccccccttgctttgtgccaaccaaactaaaaacaccccttcttccccactgaggcggtttttgtgtttgccccggatctcaaagaaactatcccacactctctcctcccgataaagggaaacatcggtcttcaa

SEQ ID NO: 176845 - DNA, 479 bp, Homo Sapiens
  misc_feature (14)..(14): n is a, c, g, or t
  misc_feature (47)..(47): n is a, c, g, or t
aaaaagtgctgttncaaaaccttggctaaagccctgaactgtggggnaaggtggcaagcccccaaagaacagcaagggaaaaggaaaccgttctggcaataaaaaaaagttccctgggtaaaggctccctgtttccgaagcattcgggcaagcaaaggggagtggcgcacacttctcagccgaagacactcttggtgggtccggctttgggcttctcaaagacagtctcggtacctgtgcgggtgcggctgaacaccgacggggcggccgagccagcttgctcacactctcgcatgaactggtaggtcttggacttgatttcctggttcttggtcaggtttcctcgggcccccttcaggtcctcctccttcacaggggggcgcttcttcttgataggggcttcctgagcaccagcctgggacatggtgggtattgtgtaagcgctgggtctctgaaggcgcctctctggcagcagcagc

SEQ ID NO: 176846 - DNA, 246 bp, Homo Sapiens
tttattttttctgaatgtcactagacaattaaacttttattgaagcgtaaattgtggtacagaaatacatttcaactgatttaagtccaacaccagtgaaaggagaaattatggcaccaaaactttccctcttctatcatacgatgatttagattatgattcaaactacatttctcctttctaggctttgtcccataaaaatttgtgcagtttttcaacattagaattcttaattctattggaaac

SEQ ID NO: 176847 - DNA, 542 bp, Homo Sapiens
ttcttggacccctagaagcggcgcaatgtgaggtccccaacggttatccggcttcaattatgcacgaatgacctaactgggggatttgccaatggggagattagcccccaaggcgatgaattttcacttacagtcgaggcctggagaaattccctcttttagaaccaggcttccggagcggagtcaggccctgaactccaatgactccccagctttgaggcccgatctacaatgttgggtgaatgggcctgccgggaccctgctcacaggcaggcttttcctccaacctgtggcgctgcagcagggcaggaaggggaaacacagctgatgaactgtggtgccacatgactcttgtggaacagatgcccacgtatgtgaaacacacatggacatgtgtcccagccacagtgttatgctctgtggctggctcacctttgctgagttccggggtgcaatcggggagggagggagggaaagcttcctcctaaatcaagcatctttctgttactgatgttcaataaaagaatagttgccaaggctga

SEQ ID NO: 176848 - DNA, 536 bp, Homo Sapiens
atcccaaagaaatgtccttaaccaatactccagttcctgagtttgcttatatccgaactagttgaactgtgactgacagtaatccttaatatatccaaatccaactgaataccaaatgagatggccaaattttgtttgatataagttgcttgttaggcatatgccctagaggccctccatccctgtattctaatgtttttactcaaagctctagcctttaggataggtgaatatgtaaatcttttatcactttctcaaattcaaactaaaggggaaagatcaaaccccttcccttcctacctgttttctgagctggctgacttgccagccacaagctgctcttgcagagttcttaccattcctgtaaatgttttgacttgttgcagaaattcctatctactttattaagcagtattgatctgactgtggaaacatcctctcacttgcattcttttaacttaaaactatttaagaactgatgttccgattattgtatatatttttctaaaaaccaaataaagctacctatgaaaatg

SEQ ID NO: 176849 - DNA, 438 bp, Homo Sapiens
  misc_feature (25)..(25): n is a, c, g, or t
  misc_feature (38)..(38): n is a, c, g, or t
  misc_feature (72)..(72): n is a, c, g, or t
tcccttgaaccctcccccaaatctngcccccttctccnatgaaacttaaaatcaaaaaacaacttccctccnatctcctcctgctcctgcgtggaagggggaatgtgtgctggctagggtggaggactgagcacctgaaacctggggctggctccccggggtccccgactcagctggtggctgtggagctgagtcccctccccgtaacctctgcaaggccagcacccaccatcactacctgcacctgctgtggtcccaccctctggaggcctgggaacctggctgcagcctgggaaggctggagaggcagacggtgggacccaccagctctctccccatcccgcttcttccctggggccaggccctacctgtgtggtggtgggtgggctgtcaagacgtgtcatgtacatttgtatcaaaaataaagaagtgaccatg

SEQ ID NO: 176850 - DNA, 441 bp, Homo Sapiens
  misc_feature (57)..(66): n is a, c, g, or t
  misc_feature (406)..(406): n is a, c, g, or t
  misc_feature (428)..(428): n is a, c, g, or t
gacaggccccaacctgtgtgctggggtccccagaagcaaacactggaaagtctgttnnnnnnnnnnctttcttcttccccaccccttaattttaactttgtggtaactgagtgcccccgcgtgcctgcgtgttgagtgtgtgggcggcagtgccttaccggaggcctggtccatctggagttttgaggggtgaggggaccagagcagtgggaccagcatggggatcagcttcccttccccacctgggagccagggactgtccgggtagccagttttggtcctgccagctgcctccctgatccctccccactctcgccccttctctatgaaacttaaatcaaaaaccacttccctccatctcctcctgcttcctgcgtgggagggggaatgtgtgctggctagggtnggaggactgaggcacttgagcngggggtgggttcc

SEQ ID NO: 176851 - DNA, 1148 bp, Homo Sapiens; identical to SEQ ID NO: 63230
  misc_feature (884)..(1006): n is a, c, g, or t
  misc_feature (1008)..(1014): n is a, c, g, or t
  misc_feature (1022)..(1036): n is a, c, g, or t
  misc_feature (1061)..(1070): n is a, c, g, or t

SEQ ID NO: 176852 - DNA, 523 bp, Homo Sapiens
  misc_feature (236)..(245): n is a, c, g, or t
ggtcatttataagaacatagtaattaagtgaactaagcattcattgttttattaatactttttttctaaaataaaacttgtacaccagtttattactctaaaaagagaattacacatgccaaatggaccaatgtccatttgcttattggaggcaaagctacaatagaagtcagagcatcaccagaatggtctttaatgagcatggaacctgagcaaagggaataggtgggatgaannnnnnnnnnaattgtgaaacaattcataagcacaatatgatttacagaataataaacattcatgtacccactatcaggttaagaaatagaacatttattaatatgtaggaatgttaagaaataaaacatttaataagatctcagaagactccagtaaatctgcaattgtatctctctcctttttaaatgtaaatatcatcttgacttgttaattattcccttgcatttcttttagtttactgccaacacatatattcatcaacaatatatttaattttgaaaaacct

SEQ ID NO: 176853 - DNA, 539 bp, Homo Sapiens
ctgcctgccaaagcccccctttaggccttgggtggctggaaggctttgttaagggactaggagaaatgggggtatctttcccctttcctgccctttctgctcatctcaacctctcacagaggtgtcttctccccctaacctacagctttttgtacaagccattttgtgtaaattatttatatttaatattattccctgctttgtcaggagcaggtacctaggctctggggcagtgaggaactagatccttctctcctcagcctagggtggaggtcactgcactaccacccacctctggaagactggctgtgaaaagtcaggtggcagaaacctggggccacatagagcctctctcttttcctgtttcttggctctagaagatcagcactgcactgttagctgagagtgcgggcaagacataaactgtccagagtttgaaggttctcggaaagaccggagggcttctccccacagaaggcggagagagctggggctcagacatgggtgtgcaccttaataaaccctgctgtctgcctact

SEQ ID NO: 176854 - DNA, 428 bp, Homo Sapiens
ccacagcctctagtacactttagcaataccaccagactagttagagttccccactcaccaagcaagacatgcagtttcatgcctctgtgccttcgctcatgctgtttcttccgactggaatgccttcccctgctcctcctgccttgtctgcctggcaagttcatctctcacgatcccctcaaaggccccctcctccaggaaggcaacccctgtgcccctcccctccaggctacctctgcactttgtcaatgcttctcttgtggcacttatcacactgtattttacttgtttacatgtttgtctccccttctagactgtgaatccttaagggcatggactgtatcttatgcatctctgtatttctgcgcctagcacggtcgcctagcacacagtaggcgctcaataaatgttgaatgaatgaatgattt

SEQ ID NO: 176855 - DNA, 447 bp, Homo Sapiens
  misc_feature (34)..(35): n is a, c, g, or t
  misc_feature (37)..(37): n is a, c, g, or t
acatggtaaactagaggtttaagatgatggcacnncnggttgtggctgagaatgctggagatgctcagttctctccctcacaaggtaggccacaaattcttggtggtgccctcacatctggggtcttcaggcaccagccatgcctgccgaggagtgctgtcaggacagaccatgtccgtgctaggcccaggcacagcccaaccactcctcatccaagtctctcccaggtttctggtcccgatgggcaaggatgacccctccagtggctggtaccccaccatcccactacccctcacatgctctcactctccatcaggtccccaatcctggcttccctcttcacgaactctcaaagaaaaggaaggataaaacctaaataaaccagacagaagcagctctggaacaaaaagtacaaaaagacagccagatgtgtgcggagagggtgag

SEQ ID NO: 176856 - DNA, 373 bp, Homo Sapiens
taaaggaaagagcaggtgtgggggttaagcacttatttgaggtgggggtgttcacctctcttctcatcccttttcagaatatagggctcctctcattcctgtgaacccccagtcccggcttctttgtttgaggggattgtgtgaggttcagttgtggggtgggtggtgagctgctgcatattttttattttgtttctctagtgttatggcagtggaggtgggaatttagtccccaggtgggacaagggaagttttttcattttggagctagttactgggagtaagggagggtggggtgggggggagttcaggtttatgtgtgtgcatttcttttttattattattaaataaacaacttggagggagttgaagg

SEQ ID NO: 176857 - DNA, 377 bp, Homo Sapiens
gccaagcgcaagagatcagcgcctgagaagtcgtcgggcgatgtccccgcgccgtgtccctctccaagcgccgcccctggctgggctcggtggagcagaccccgcgcaagaggctgcggtgagccaatttagagcccaaagagccccgagggaacctgccggggcagcggacgttggaagggcgctgggcctcggctgggaccgttcatgtagcagcaaccggcggcggctgccagaaagcagcgttcggttttgtttttaaattttgaaaactgtgcaatgtattaataacgtctttttatatctaaatgtattctgcacgagaaggtacactggtcccaaggtgtaaagctttaagagtcatttatataaaatgt

SEQ ID NO: 176858 - DNA, 769 bp, Homo Sapiens
  misc_feature (72)..(72): n is a, c, g, or t
  misc_feature (91)..(91): n is a, c, g, or t
  misc_feature (119)..(119): n is a, c, g, or t
ggagcggcccccaatcacctcatctggctcatcttcttctactggctcttccactcctgcctgaatgccgtngctgagctcatgcagtttngagaccgggagttctaccgggactggtngaactccgagtctgtcacctacttctggcagaactggaacatccctgtgcacaagtggtgcatcagacacttctacaagcccatgcttcgacggggcagcagcaagtggatggccaggacaggggtgttcctggcctcggctttcttccacgagtacctggtgagcgtccctctgcgaatgttccgcctctgggcgttcacgggcatgatggctcagatcccactggcctggttcgtgggccgctttttccagggcaactatggcaacgcagctgtgtggctgtcgctcatcatcggacagccaatagccgtcctcatgtacgtccacgactactacgtgctcaactatgaggccccagcggcagaggcctgagctgcacctgagggcctggcttctcactgccacctcacacccgctgccagagcccacctctcctcctaggcctcgagtgctggggatgggcctggctgcacagcatcctcctctggtcccagggaggcctcctactcctatggggctctgtcctgcacccctcagggatggcgacagcaggccagacacagtctgatgccagctgggagtcttgctgaccctgccccgggtccgagggtgtcaataaagtgctgtccagtgaaacaccacaaacaaa

SEQ ID NO: 176859 - DNA, 429 bp, Homo Sapiens
  misc_feature (52)..(52): n is a, c, g, or t
  misc_feature (64)..(64): n is a, c, g, or t
  misc_feature (232)..(232): n is a, c, g, or t
tgaaagctggttaaggggcaaaccccctaaggtgaaagcctcaatggcaaanaaaaagtgcctnggtgccctttaagtgatgcccctggctcaccctggacaaccctcaagggcaccctttgcccaaactgagtgagctgcactgtgaaaagctgcacgtggatcctgagaacttcaggctccctgggcaacgtgctggtctgtgtgctggcccatcactttggcaaagaantcaccccaccagtgcaggctgcctatcagaaagtggtggctggtgtggctaatgccctggcccacaagtatcactaagctcgctttcttgctgtccaatttctattaaaggttcctttgttccctaagtccaactactaaactgggggatattatgaagggccttgagcatctggattctgcctaataaaaaacata

SEQ ID NO: 176860 - DNA, 439 bp, Homo Sapiens
  misc_feature (32)..(32): n is a, c, g, or t
aaatcctttggggaaactgtccactccctgangcctgattatgggcaacccctaaggtgaaggctcatggcaagaaagtgctcggtgcctttagtgatggcctggctcaccctggacaacctcaagggcacctttgccacactgagtgagctgcactgtgacaagctgcacgtggatcctgagaacttcaggctcctgggcaacgtgctggtctgtgtgctggcccatcactttggcaaagaattcaccccaccagtgcaggctgcctatcagaaagtggtggctggtgtgcttaatgccctggcccacaagtatcactaagctcgctttcttgctgtccaatttctattaaaggttcctttgttccctaagtccaactactaaactgggggatattatgaagggccttgagcatctggattctgcctaataaaaaaca

SEQ ID NO: 176861 - DNA, 425 bp, Homo Sapiens
  misc_feature (11)..(11): n is a, c, g, or t
  misc_feature (74)..(193): n is a, c, g, or t
  misc_feature (389)..(389): n is a, c, g, or t
  misc_feature (411)..(411): n is a, c, g, or t
cccaagttagnagttgacttaggaacaaagacctttaataaaattgacagcaagaaagcgagcttagtgatacnnnnnnnnnnnnnnnnnnnnnnnnnnnnnnnnnnnnnnnnnnnnnnnnnnnnnnnnnnnnnnnnnnnnnnnnnnnnnnnnnnnnnnnnnnnnnnnnnnnnnnnnnnnnnnnnnnnnnnnnctgaagttctcaggatccacgtgcagcttgtcacagtgcagctcactcagtgtggcaaaggtgacccttgaggttgtaccaggtgagccaggaccatcactaaaggcaccgagcactttcttgaccatgagaccttcaccttagggttgacccataacagcatcaggagtggacagatccccaaaggactcaaagnaccaccaacttcatccacgttncaaccttgccccac

SEQ ID NO: 176862 - DNA, 410 bp, Homo Sapiens
ggctttttgtcttactcagtgaccatcactacgaatgtcttacattgaagcacagactgcagagcacttgttaacttagtcctcctgcataatgcactcgtgaaaagtagtgcttgctaggtgtttgaagattttatgatccgtgtgcttgggctcgttgagttatttgtaaaataaacatttagtttgagttgatgcagtaagttttttggactagtagtatccaggtccctactctactgaaaatataatcttcactatctccccttaagtcagaggagatgtagcatttagaacaccttgagacatgacattgtaaaatagcttgttttatgttcctgaagctatcttgttctctgttaaagctactaattgtctcagtgtaagttttaaataaacatatttcttta

SEQ ID NO: 176863 - DNA, 922 bp, Homo Sapiens
  misc_feature (709)..(709): n is a, c, g, or t
ggggtagctgatcggcccggaagtgctcacacgtgtgctccctgccctgctcctggccccttggccggccgggctgtttctggccatgggtcgctcccgccggacaggcgcgcaccgagcgcactctctagcccggcagatgaaggcgaagcggcggcggccggacttggatgagattcaccgcgagctgcggcctcagggatccgcacgaccccagcccgacccaaacgccgagttcgaccccgacctgccagggggcggtctgcaccgctgtctggcctgcgcgaggtacttcatcgattccaccaacctgaagacccacttccgatccaaagaccacaagaaaaggctgaagcagctgagcgtcgagccctacagtcaggaagaggcggagagggcagcgggtatgggatcctatgtgccccccaggcggctggcagtgcccacggaagtgtccactgaggtccctgagatggatacctctacctgacatggcctgaagatgcagggcagaggaattgcccatggacagtgacgcaaggactaggctgggagggagcgtgccaaccccttttgcctctgggtttggggagcggaagggcctctttcttggtgcccctgccccaaataaaggaaactgggcccccggatttcccccacccactcccaaccaccacccgccaccaacacacaactttcttcaaaccanacacagagaagattataaaaatcctttttacgggcccgccctcgcgcctccccaaaaaagcttttcttaaaaccaattctgttttggggcgccggggggcccccgtgaaggggtagagggaacacacgtgggccacaaaaccttgttttcccccagagaaagaaccgcggggccaaagagaaacaagggcgcttggggattttctcccaccac

SEQ ID NO: 176864 - DNA, 512 bp, Homo Sapiens
gggcttttaggatgcgctaaagggtcgtgagggctctcttaaaattttcttcacaagcggttatccagtcgtgccccgcggccctgctgctggccccggggatctgagtcgtaccctcttgtttttctctgagtcagtcttaaggtgaaatgaagtgtggcccagtggctcctcactgtcgcttctctagttttctgcctccttttagaaaattgaattgaaaagacaggatgaagtggacacagcatgtgaagacaattctttcaagaagtttggctgtcaaggaaaacagagaatgtgctaaagaacatacagacacagagcagacaggccacctttgcaaccacatggaggtttgtctgatattgaagctaaagaagctaagctggaagacagagagaccaagtcctgatgacattgtttgaacccagagatccagacatgcctgaaaactagttttaccactggacttatccgttgaatgagccaataaactctcttttatacttaaa

SEQ ID NO: 176865 - DNA, 380 bp, Homo Sapiens
ctccgggcctcccctgagaccacactcagcagtggcttcttcgttgctgtaattgaacgggtcgaggtgccaagctcagcctcacaggccaaagcatcagcaccagaacgcacacccagcccagccccaaagagaaagaagagacagcaaagagccgcagccggtgcttgcacaccgccttgcacatagcagaggctccgggctgactccttcctggtgggaaaggaagatgcctgtcctctccgtggaggaccctgggccctcaccgcaggaagcagtttgggttttgaaaggttattgggtcccttccttgggctgtgttcttgctggtgagcaaagtgttgcctgcaaaaataaaatgcagaacgtactctacgata

SEQ ID NO: 176866 - DNA, 1087 bp, Homo Sapiens
caagatggctggcgcccatggagctgttctgctggtcagggggctgggggctgccgtcagtggacctggacagcctggccgtgctgacctatgccagatttactggtgctccactgaaggtacacaagatcagcaacccctggcagagcccttcaggaactctgcctgcccttcggaccagtcatggagaggtcatctcagttccacacaagatcatcacccaccttcgaaaagagaagtacaatgctgattatgatctgtcagctcggcaaggggcagacaccctggccttcatgtctctcctggaggagaagttgctcccggtgctggtacatactttttggatagacaccaagaactacgtggaagtgacccggaagtggtatgcagaggctatgccctttcccctcaacttcttcctgcctggccgcatgcagcggcagtacatggaacggctacagctgctgactggggagcacaggcctgaggacgaggaagagctggagaaggagctgtaccgagaggctcgggagtgtctgaccctgctctctcagcgcctgggctctcaaaagttcttctttggagatgcccctgcctccttggacgccttcgtcttcagctacttggccctgctgctgcaggcaaagctgcccagtgggaagctgcaggtccacctgcgtgggctgcacaacctcttgtgcctatttgtacccacatttctcagtctctacttccccctgggatggagctgaggtaccaccgcaacgccagacaccagcaggcccagagactgaggaggagccataccggcgccggaaccagatcctatctgtgctggcaggactggcagccatggtgggctacgccttgctcagcggcattgtctccatccagcgggcaacgcctgctcgggccccaggcacccggaccctgggcatggctgaggaggatgaagaggaatgatttgtcctcacgctcccaagactggtttttctactctcatgcattccagaggcccccgtgcctcctcgttgttggtacagccggacacggggtgctgccacccagaataaagccactcacactg

SEQ ID NO: 176867 - DNA, 419 bp, Homo Sapiens
  misc_feature (16)..(16): n is a, c, g, or t
  misc_feature (41)..(41): n is a, c, g, or t
  misc_feature (60)..(60): n is a, c, g, or t
caaacgggaaaacctnaacccccagggcccccacccggcangttaaccattttggacagntttttttaaatccccccacaacctgtaaagaatgtatatatccctttccagcatcctcagtttgaaaaagacatgccagttaaacttgacccttttgataatcgctcttacaggtcattgtctgttcctaacagcaaattgtaaacatgtgcttcatagatattgtggctctcagtcatcactttgtccctatggtatttattgaatgttcacatactaatggtgcacaggtgtttttttctataaatcttctgactgtcctgtaattcattcttaagctttaacttgaacgtatcagtaattgccggcatttgatgtttagcaataaaagaataaatgtgtaccagcattttatgttt

SEQ ID NO: 176868 - DNA, 369 bp, Homo Sapiens
ttgccagctcctcctatcccgtggcactggccaagctttagggaggctcctggtctgggaagtaaagagtaaacctggggcagtgggtcaggccagtagttacactcttaggtcactgtagtctgtgtaaccttcactgcatccttgccccattcagcccggcctttcatgatgcaggagagcagggatcccgcagtacatggcgccagcactggagttggtgagcatgtgctctctcttgagattaggagcttccttactgctcctctgggtgatccaagtgtagtgggaccccctactagggttaggaagtggacactaacatctgtgcaggtgttgacttgaaaaataaagtgttgattggctaga

SEQ ID NO: 176869 - DNA, 581 bp, Homo Sapiens
tggacaatgactacgtggagtcaccatgctgagtcgcccttctcagcgctccatcgacgcacacctgctatcgtggaacagcctagaaaccaagggactccaccaccaagtcacttcccctgctcgtgcagaggcacgggatgagtctgggtgacctctgcgccatgcgtgcgagacacgtgtgcgtttactgttatgtcggtcatatgtctgtacgtgtcgtgggccaacctcgttctgcctccagctttcctggttagcgcaacgcggctccacgaccacacgcacttcagggtggaagctggaagctgagacacaggttaggtggcgcgaggctgccctgcgctccgctttgctttgggattaatttattctgcatctgctgagaggggcaccccagccatatcttacactttggtaaagcagaaaaccaggaaaattttcttaaaatatccacaatattccttgagtgagtcagaatctatagccagttagtgatggtttcagacagaatcgtgttcgtgtctgttttgctcgattcctttcctaagttaaataaatgcaagcctctgaactctgaa

SEQ ID NO: 176870 - DNA, 937 bp, Homo Sapiens
  misc_feature (594)..(594): n is a, c, g, or t
  misc_feature (844)..(844): n is a, c, g, or t
agcaaaagctaccctagggaagagccggtgacgtgcacaggccgagcagcacggctggtgagctgcaggctgcggccttgcccggacacttggtaatgccaaacaagtacgtgtggctactcattggtctatgaggacgatgacaggcttcgactctgtggtttctaaagcatataatattctcacgtacttctttcagcaaacgccaaacagtagtaattcttgtaactaccttgaaccctttgtggaaagaacctgggtgtgagtgaataaaaagtaaagagcgacgcgcttatatcggccattaaatactcggggctgtccgtaacaccctgtgcttcccaattgtagcaccatgttctgtgtgaatatgcataaaccagagtgaccccccccagcacccagcatgcccggctgtgcccctctgggtatgctcacatgcacatatatggacatacagtttcgtagcagaacgtggctgcccaggggctgcctatctgggcgagtagaccgcctggctcaacccacaggcctgccagcatcccatagcaccccgcccttgccccatcaccctgtgggctacatgcaggacancggcatgggcctgctccccagaggcacctgtttggggtcttcttgaggcttgtgctttcacagctctctttgaagcagatgtcttggtgaactcggtagactcttttatacctgttgtcacaagaaagctttgtaaaaccagacagtgaagcaaaatgttgccaactgcttaacctaggctatgtgaacccacagtaaacctgaaggtgtttgagggaaaaactgctattttctgaatgaaacgtgaccncctattgatgtattaaaatgtctaacataaaggtcatgtgatttgtaataaatttattgtggtacagtaatatgcataaaataaacccatttt

SEQ ID NO: 176871 - DNA, 595 bp, Homo Sapiens
  misc_feature (166)..(176): n is a, c, g, or t
  misc_feature (234)..(274): n is a, c, g, or t
gcattcatccagaaatagagaagaaagtctgccagacttgagttatgttgtcttttattagcagggaatgtcatcacagattggatagtacatccaggtgcaatgtcaccatcagcaaggtcagcttgacactcaagtggaagattagggaagaatgactaggatnnnnnnnnnnnggagggcaccaagggaaagggatgatggggtgagctggcgagtgtgggtgggaaatgnnnnnnnnnnnnnnnnnnnnnnnnnnnnnnnnnnnnnnnnnccacattttctcgtttccttttccaaacagatgcacattacccccaccccacatgctctgtccctccagctatcagaagacagtctgattttcctcctctccacttcagttttaccatccacgcatccctctctgttttttacacaatccaaagacaggccaaaaaaagcaccacagtttattaagtacttactaagcacccatccactgccacacactgtggcaaggattgtgaggggtaaagaagcatggggcacaatattctgctgccttcatgtaacttacagtctcacaaataaatagaacttcagttgaaatact

SEQ ID NO: 176872 - DNA, 1137 bp, Homo Sapiens
ttggacaacaaaaataaatcctagaggacaaaaattaaactcaatagagtgtagtctagttaaaaactcgaaaaatgagcaagtctggtgggagtggaggaagggctatactataaatccaagtgggcctcctgatcttaacaagccatgctcattatacacatctctgaactggacataccacctttacgcaggaaacagggcttggaacttctaagggaaattaacatgcaccacccacatctaacctacctgccgggtaggtaccatccctgcttctctgaagaagtgaaagagcactgatttcagcagctaagaaatgggctcttttaaggcgatttagacattgcagattgttccacagagaaggtaccttagcatttcctgttaataaggtacctaattaagactaaagtccccagaaatggtaaagaaagaatcacctttctgggctgggagagtaaaatccttctttagtgactagagtgaggaaccctgaacttctatttcatctaaagagccatgaagcaagttcctgtgtggtctgcagaacttggataatgagatgaaaaaacaagaatgaaattataggaaaaaaatcaagaggaaaggagtaagaagaaaataaaagttatcttaaaaaatatttctttagagtgtgtggttaacgtggactggtccttggtagtatggtccattagtatctgtaataattaggtttgaatggcccatttttgttgagtcccagatattttgcttggtcatctgtcagctctgtaaggtgggcatcaaatgatggcagatgcaagctggcaacgtattcatccattttcttaggaagcaagtacacatcctgcctggatcgcccctcgggtgcattatagagttctatcagtgccaaagcctgtgttgtggctgtgatggacagaacaaaggtgggaactgtggagcagctcaaattgagtagacgaccctctgccaggaggacaactcgtttgccatctggccagatgacatggtccacctgagaacgtactcgctcccacgtcagctccggagtgcggaggctggtcacatcgatttctgtgttggagtggcccatattgcatacgatacaactgtttttcatgcgatccc

SEQ ID NO: 176873 - DNA, 724 bp, Homo Sapiens
  misc_feature (253)..(263): n is a, c, g, or t
tcttttctttccctctcatggtacctgctcatggttatgaagctttcaaagtaaagaacacgaaatacctcccaagtattaccagtgggtaccaaaaaaatgtccccttgagtcttttccttgtttttagatgttaattctctcccttggcatccggttagccccccaggggggcagcatgtggagaacttgatatttagttactgatgctcttccaggacacaaaaagaacccatctttgaatatcaatgannnnnnnnnnnaagtactgttccggggagaaaaacagtctcaaaacttgaacttctttgggaagagaagtgttgggctgagaagtaacattcccaggaaatagtgagaagctcgccctgtgtttgaaacccgtgtgggtctcctgtgttcctggaagaaaacagggaagcagcatcttttaaagcctgttctttaaggtgtctcgttagagcccaaagtggaatccggaaggcagccagagctgaggctgccccaagactcagacttgctaagaattacgccgccgacttcaaacccagagagcatctttcttttaggcgaaaacgcatatatttattttgtgtaagttataccattctttcacattagataaactaagtttggggggatcctttgtgtaaatgacttacactggaaaatgcgaacatttgcagtaaaaaaaatatctctttacaacaaacaacaaataaac

SEQ ID NO: 176874 - DNA, 165 bp, Homo Sapiens
tgacggggccttttagtgggaggagttgccattacactacgtccagtaagctccagactttcggaaaagattggtggacgggaatgctgtcatggatgggatcttgccaagaaccatcacgtgttaatttagttgcttaaacaaaaggtgttctgtttcttaact

SEQ ID NO: 176875 - DNA, 987 bp, Homo Sapiens
  misc_feature (33)..(33): n is a, c, g, or t
  misc_feature (37)..(37): n is a, c, g, or t
  misc_feature (120)..(120): n is a, c, g, or t
  misc_feature (306)..(306): n is a, c, g, or t
  misc_feature (580)..(639): n is a, c, g, or t
agcgctgagcagatgctggtccttatgcccacnctgntaggcaattcacgaccgataggctgcaacacccgggcacaaaatacacgtaccactactctcgccgaggatcccccctgccgnacgcaggcgaccacacgcggactctaaacgctcagtcggctgtgaggagcggacaggggacgtgtcatgtcatcgatacgagccgcgctaattcacagaaatcggcgctatcgatgcccactcgccggcgggagccccccgagctatatcatatctctcgtcaggtagagaccgttattaaggctncgcggtcccagcgcgccttgctttggcctctactcacttgtatcgtgtgcactactcgcccgcccggggcgtatcactcgtcttcaccggcgcaccatcgtgttagtagacacacactgtacgtgcgctcacttcaccccggcgcgccagcccacccatctattccaccgctccgtctccacttcctaccgcgtccccgcgtaccgccgccaaggtaataaggcacccgaacgttagtctgcggtcatctctcctgaccttgtcctcaccctannnnnnnnnnnnnnnnnnnnnnnnnnnnnnnnnnnnnnnnnnnnnnnnnnnnnnnnnnnngccaggtcggggaggggtccccccactcaaagtgcctctaaagaaaccagctttttgcactaaagccaaaccacaccgctgtccccttagccccaagggccctgggggcagccaccctcccacctgtcggcccgtagatttatcaagggtgttatgggcccagctttggggggccagtcccgatgcactttgaggggtgttggagaggggactcccccactcgcacttaactcaacggctctcgggccctggggctgtttttaccatgtttgtttttgaagctcaggtgtctcacgtctgggctgcaccaggcgaagagagaaattaaagatttgaggtttttcccgg

SEQ ID NO: 176876 - DNA, 372 bp, Homo Sapiens
gtgtgtgtgttaatttaatcatacaaatattcatttatacaataaggaaaaacctcctcatctttatctcctcctaggcaccatgaggccccaccacaaacatccagctggctttctacacacaccactgtccaggggggaagggcagccactgctgctcctgcattcacccaaggaaacaaaggaaaggtgcggcgaggcagggtggggtgagtaatcagcttgcacttctgagcccgggcaaccctaccatcctctcctgctgggctcagattgaatttggggaggtatttattctcatgcccatttcccaccatggccaccctcaggccacaccagctgtttggtgaggttctctccaggctggaagta

SEQ ID NO: 176877 - DNA, 961 bp, Homo Sapiens
  misc_feature (225)..(225): n is a, c, g, or t
agccacgaagaaagggggccccctttagggccattttgtttctgggaacccccaatttcccaattgaagggggaagaagagaaattgaaatgtgattcctggataccccttcccttgggcttgggggaaagcccatgggaaccccctctggccttgccacttcccatgacttggcactttacttctgggccctctgcaaggaagcttcatctcgccctcccaagngatgtgcacagaaaatggtttgttcttgggaagggagacaaggtgcttgggacatttaacttgccaagtgtggttgcctagaagcaagaggaagagcaagacgactctggcaggcccagacccactgacggtggcccatgaagcccctgctgggaaactgggaaggggcacccagtgttgggcagaagaggaagtcaggaaagcaggggttgtgaagcctcccacaatcctgccagggacagtggagatgtgctgcttcaaggctactaagcagtaagaacagctgggcatgcatgggctccagggaggcagtgtctcaggagactggtaccagcagcagcagtctgggcctaatgaggccctcagacaaaaagccatcctgaggcctgtggcgtgggtacctggcagagacttccctctgctctgctagggagtggagcactcccatgtgcacagaaaataggtgctccagagtaagctctagtgaagtcccagacccagctgcaccacgcttctcagcaggctggctccagccacccccagggcttctccagtggaataaagtttatgcccccttttattttttggggggtggggaggtgaagagggaatttcacacaagcttttctcccacaatcaagctctaaaaaaacaacagtctcagaagaggatgaggaggaacaaacaacacacattttttggaactcagacacccagacagaaacaggcaggcaga

SEQ ID NO: 176878 - DNA, 384 bp, Homo Sapiens
gggctttgcggttccaacatggcggagctgacggtggaggttcgcggctctaacggggctttctacaagggatttatcaaagatgttcatgaagactcccttacagttgtttttgaaaataattggcaaccagaacgccaggttccatttaatgaagttagattaccaccaccacctgatataaaaaaagaaattagtgaaggagatgaagtagaggtatattcaagagcaaatgaccaagagccatgtgggtggtggttggctaaagttcggatgatgaaaggagaattttatgtcattgaatatgctgcttgtgacgctacttacaatgaaatagtcacatttgaacgacttcgggcctggtcaatcaaaataaaaactgcc

SEQ ID NO: 176879 - DNA, 879 bp, Homo Sapiens
  misc_feature (601)..(608): n is a, c, g, or t
  misc_feature (610)..(689): n is a, c, g, or t
  misc_feature (691)..(692): n is a, c, g, or t
  misc_feature (694)..(718): n is a, c, g, or t
  misc_feature (730)..(808): n is a, c, g, or t
aagcattataaatgcattaatccttatagtcaattctgtgccttaggatttgtgccaggaacagttcactgactaggaaaagcactacattttaaattcagcattagtgcattgggaaggatctttactgctttgtgcttggcatgtcattattttccatttgacattagggcctttccaaaatgaatgtgaggaattgctttcacttcaagactttccttcttttcactaaaactctagaaggtgttacaagggggagggaaggggggcaaagtccttgaacattttctttggctcgtgccatgttatgatcatataccttttaaataaggggaaatagtatctttaaagttaatgtctagccaagagtttagtaaacgaagaattaaactgcactgttgatcggtgctttgtgtaaatacatctttaacatttgggtggagaggggccttaagaaggacagttcattgtaggaaagcaattctgtacatgagtttaagcattcttgttgcattgtctctgcagattctatttttgtttacaatattaaaatgtatgttagcaaaatgggtggattttcaaataaaatgcagcttccacnnnnnnnnannnnnnnnnnnnnnnnnnnnnnnnnnnnnnnnnnnnnnnnnnnnnnnnnnnnnnnnnnnnnnnnnnnnnnnnnnnnnnnncnnannnnnnnnnnnnnnnnnnnnnnnnnaaatgtgggggnnnnnnnnnnnnnnnnnnnnnnnnnnnnnnnnnnnnnnnnnnnnnnnnnnnnnnnnnnnnnnnnnnnnnnnnnnnnnnnaaggggccctaaaagcggttttctcccagaggaaaaccccggggccataaaacaagggggggttggaatat

SEQ ID NO: 176880 - DNA, 432 bp, Homo Sapiens
  misc_feature (103)..(103): n is a, c, g, or t
  misc_feature (272)..(272): n is a, c, g, or t
gcccacgctgccagtgctggagcttccatcgcctaggtcgcggggccgcacgggtgtaaggcaagctcgggtgctggcccttttcctgactccccggcgccgnctggccgccgcgggggtcccattcttgctcagcgccaggcagagctccttaagcgctaggttctccgcagcagctcctctggcggccctccagctcggccagcttctgccaacagccgcccaggtcctcgcgcacggcccgggatgcttgggtcccgaagagctgccancgtggtgcggcgcgtctctgtggcgctccgagtccaggaagcagcagagggcgcgcagctcacggttctctgcctgcagacgccgcctgagatgcttgagctcgcggatctcgcccaggtggccctgcagctgccgattcacctcctgcatgaggcggcc

SEQ ID NO: 176881 - DNA, 469 bp, Homo Sapiens
gaacagaacagtaacagacctaactgggactcagccagcactagcctcatcttagctgccccttttctctgctttgcagtttactgcttccctgggctagccataacggggttctgggcaggtcagactcttcagcaagacagtgtattaatagtgtgaattagatacactgatgacctgctctgcctagttaagaaactgaattaatcagcagttacaaagcacatactttgttacgtgctaagctttgcctcctggcctctagataattaagacggcccagggaataccagcagagaagtgctaattgtatttgggtgttacaaaagcagacctagacgagctgttcacttaactggtacctgttggtcagaaaaagaatttatttagagattatgatcatgtaaaattacagtactcaacccttctagcaaagtatttttttgaaaaataaactaaatgcctttat

SEQ ID NO: 176882 - DNA, 605 bp, Homo Sapiens
  misc_feature (46)..(46): n is a, c, g, or t
  misc_feature (373)..(474): n is a, c, g, or t
  misc_feature (483)..(495): n is a, c, g, or t
cctggtatacgaggccttcaactggcgtcatggggtgtttgtgggncagccatgcgctctgagtccactgctgcagcagaacacaaaggacttctgggaacaggaggttcgtgacattcggagctacctgacagagcaggtcaaccaggatctgcccaaagaggtgttggctgagcttgaggccctggagagacgtgtgcacaaaatgtgacctgaggccctagtctagcaagaggacatagcaccctcatctgggaatagggaaggcaccttgcagaaaatatgagcaatttgatattaactaacatcttcaatgtgccatagaccttcccacaaagactgtccaataataagagatgcttatctattttannnnnnnnnnnnnnnnnnnnnnnnnnnnnnnnnnnnnnnnnnnnnnnnnnnnnnnnnnnnnnnnnnnnnnnnnnnnnnnnnnnnnnnnnnnnnnnnnnnnnnttggggggnnnnnnnnnnnnnaaaaaatttttcaaaaccttcttttgggcgcggggccccagagggaagggaaacggggccatacgggttccaaagaaaacccgggccagaaaaagggttgggttcccccc

SEQ ID NO: 176883 - DNA, 984 bp, Homo Sapiens
  misc_feature (28)..(28): n is a, c, g, or t
  misc_feature (31)..(31): n is a, c, g, or t
  misc_feature (875)..(912): n is a, c, g, or t
  misc_feature (915)..(923): n is a, c, g, or t
ccatgcgctctgagtccactgctgcagnganacacaaagggaagatcatcatgcacgacccatttgccatgcggcccttttttggctacaacttcgggcactacctggaacactggctgagcatggaagggcgcaagggggcccagctgccccgtatcttccatgtcaactggttccggcgtgacgaggcagggcacttcctgtggccaggctttggggagaatgctcgggtgctagactggatctgccggcggttagagggggaggacagtgcccgagagacacccattgggctggtgccaaaggaaggagccttggatctcagcggcctcagagctatagacaccactcagctgttctccctccccaaggacttctgggaacaggaggttcgtgacattcggagctacctgacagagcaggtcaaccaggatctgcccaaagaggtgttggctgagcttgaggccctggagagacgtgtgcacaaaatgtgacctgaggccctagtctagcaagaggacatagcaccctcatctgggaatagggaaggcaccttgcagaaaatatgagcaatttgatattaactaacatcttcaatgtgccatagaccttcccacaaagactgtccaataataagagatgcttatctattctaaaacgacactgtgcatccttcggaaaagttcccttgtcgggccgccttcggcccctccaaaaaacttttttttaaaaccctttctcattttggggcgcgccggggcccccctttaggggaaaagcgggaaaccgtgggcccacaaaaacctgggttttcccctcaggggaaaaacccctggggggcccagggaacctaaggggcggtctggggaattttnnnnnnnnnnnnnnnnnnnnnnnnnnnnnnnnnnnnnngcnnnnnnnnnaacaacccctcggaaaggcgggttttcttttggaaaacacaaaaaatctccccacaataaa

SEQ ID NO: 176884 - DNA, 666 bp, Homo Sapiens
  misc_feature (21)..(21): n is a, c, g, or t
  misc_feature (84)..(84): n is a, c, g, or t
  misc_feature (116)..(116): n is a, c, g, or t
  misc_feature (125)..(125): n is a, c, g, or t
ctggcctcccagggcgaaatngtcaacgccatgcaccagaaattgctcgtatggccctagcattactagatgcagtttcttccnttcgcatccggcaccgaccccatgaccagctnaggctacgnataggggtccatactgggccagtctgtgctggggttgttggcctgaagatgccccgttattgtctttttggagacacagtgaacactgcttctcgaatggagtctaatggtcaagcgctgaagatccatgtctcctctaccaccaaggatgccctagatgagctaggatgcttccagctagagcttcggggggatgtggaaatgaagggaaaaggaaagatgcgaacatactggctcttaggagagcggaaaggacctcctggactcctgtaaacccccattctttccaagtcagatagtcttctgctgctggtacctgggtgggcaatggccaccatgtctgcacacaccagaaatggacattttcatatgcaatggaaaacagccacaaaaaaacctaccttatatggaagttgtagccctctgcagctcagccctgtacatatacctgtccctctctggcttggtccccttcctcccgtgctttctgtaaatatctgtatctaaaccagaatattttggtcaaatataaaacaataat

SEQ ID NO: 176885 - DNA, 519 bp, Homo Sapiens
aatgcctgcctcctcactcctccgtcgctgcccttcacaccttttggtgctacccctccccagagttaagcactggatgtctcctgatcccaggctgggacccctacccccaccccctttgatcctttctacttccacggtgaaaggactgaggtcggactacagagggaagagggacttcccttgactgggttgtgtttcttttcctgcctcagcccagctctgcaaatccccctccccctgcccctcacctccccaggctcaccttgccatgccaggtggtttggggaccaagatgttgggggggtgaatcaggatcctaatggtgctgccctatttatacctgggtctgtattaaaagggaaagtcccccctgttgtagatttcatctgcttcctccttagggaaggctgggatatgatgagagattccagcccaagcccggccccccaccgccaggccatagggcataatttgcatctcaaatctgagaataaactgatgaactgtgaaataaaa

SEQ ID NO: 176886 - DNA, 922 bp, Homo Sapiens
tatctgtcatgtagctatactcgattataattcgtaggattttatttgtactcagtttttaaaatttcatgttttaattgaataattgttccactgggcttggggtagggtaggcattctttttgttgtttattgctgcttccagaccagagtccctccctgcttcccaaaagctcccacatgtgaatatcgtgtcattcagactctgccacctattagctttcttggttctactcatcttctgtcccctgggtttcacttctcctggctcactctcactctccccatataatcactcctgtcctaattcttggtgatttcagtattacaaagatgatcctcccaacaccttgacacctccctcagtaatcttgttctccactctcagtaaatgaaattatttttagcttagacaagagtgatagcagtaaaagtggtatgaaacaagcatatttgggatataatttgaagacaaagctgaaagatttgatgagggattggaatgtggaggaattctagaaggggcaatgtggcttgaggattgcctatgcaagaaggaatggcacaagatcatggctaaagacagagcaattcaggccacagaaaggtgttagaagttgttcaaagtgctgttgcattcttttaagcgccggagtatcattttctatttgcttttaactttttcattgtgaaacatgacaaacatacagaaaagtgaagcccactgagttaccgcaaaatgaacccccatgtaaccaccaaccaggtcaaatttggaatgttgccagcacccagaagccctctcatgtttcttctcaataccagtctcctcactctccacacaaaggtaaccactgcccagaattttatggcattcacttccatacttctcctatggttttgccgtggaagcatacatcca

SEQ ID NO: 176887 - DNA, 829 bp, Homo Sapiens
  misc_feature (538)..(547): n is a, c, g, or t
  misc_feature (561)..(561): n is a, c, g, or t
ggggacttcagctgccacactgtcacctggggcgagcagccgtggctgggatgacggtgacacccgcagcgagcacagctacagcgagtcaggtgccagcggctcctcttttgaggagctggacttggagggcgaggggcccttaggggagtcacggctggaccctgggactgagcccctggggactaccaagtggctctgggagcccactgcccctgagaagggcaaggagtaacccatggcctgcaccctcctgcagtgcagttgctgaggaactgagcagactctccagcagactctccagccctcttcctccttcctctgggggaggaggggttcctgagggacctgacttcccctgctccaggcctcttgctaagccttctcctcactgccctttaggctcccagggccagaggagccagggactattttctgcaccagcccccagggctgccgcccctgttgtgtctttttttcagactcacagtggagcttccaggacccagaataaagccaatgatttacttgtttcacnnnnnnnnnnacccacctaaaaanaaccctgttcggccgccctccggccctcgaaaaaactttcctaaaccatttcggtttggccgcccgggccccactaggttaagtggaacatgggttcttaacctgtttcccaaggaagattccgggccatgaactaagtggcttggaattcctcccccaataaaaaaaccgcccgggcgggaaacccgaagggttcttgaaacaaattccagaaggggaagtcttgaaggccccttcaccggggaactcttcaacccgggagttccca

SEQ ID NO: 176888 - DNA, 1002 bp, Homo Sapiens
  misc_feature (992)..(992): n is a, c, g, or t
gggcggacggtcatgggacttcagcatggcggtgtttgcagatttggacctgcgagcgggttctgacctgaaggctctgcgcggacttgtggagacagccgctcaccttggctattcagttgttgctatcaatcatatcgttgactttaaggaaaagaaacaggaaattgaaaaaccagtagctgtttctgaactcttcacaactttgccaattgtacagggaaaatcaagaccaattaaaattttaactagattaacaattattgtctcggatccatctcactgcaatgttttgagagcaacttcttcaagggcccggctctatgatgttgttgcagtttttccaaagacagaaaagctttttcatattgcttgcacacatttagatgtggatttagtctgcataactgtaacagagaaactaccattttacttcaaaagacctcctattaatgtggcgattgaccgaggcctggcttttgaacttgtctatagccctgctatcaaagactccacaatgagaaggtatacaatttcccagtgccctcaatttgatgcaaatctgcaaaggaaagaatgtaattatatctagtgctgcagaaaggcctttagaaataagagggccatatgacgtggcaaatctaggcttgctgtttgggctctctgaaagtgacgccaaggctgcggtgtccaccaactgccgagcagcgcttctccatggagaaactagaaaaactgcttttggaattatctctacagtgaagaaacctcggccatcagaaggagatgaagattgtcttccagcttccaagaaagccaagtgtgagggctgaaaagaatgccccagtctctgtcagcactcccttcttcccttttatagttcatcagccacaacaaaaataaaacctttgtgtgatttactgttttcatttggagctagaaatcaatagtctataaaaacagttttacttgcaatccattaaaacaacatnatcttacttc

SEQ ID NO: 176889 - DNA, 964 bp, Homo Sapiens
  misc_feature (460)..(593): n is a, c, g, or t
  misc_feature (602)..(615): n is a, c, g, or t
  misc_feature (653)..(822): n is a, c, g, or t
  misc_feature (834)..(852): n is a, c, g, or t
aagaggataaggttatatctaggacaactctttgagttggtccttcatataagaatcgtgacggtaagagaataaacacttgtactgggatcagaatacatgatggatgaaattctttacatgttttagcagaatgaatttgtttaatataataaagtttgctacttatctgtatgtaggttgctaaaaaggattttcttaactcagattttaagccaaataaccatttaacactagtatttgttaaatgggttatttttctgtatttgtatgtttcactataataagggaattaaggataatgtgcattgagaatattttgaaaaataattgactcaaattttatttcttggtcttttgctgtttaaatgatgattttgaaagattaaacctgtactgttggtattgtgttagtgtatggaccaatactgcctgtaataaagattttatatatagatgnnnnnnnnnnnnnnnnnnnnnnnnnnnnnnnnnnnnnnnnnnnnnnnnnnnnnnnnnnnnnnnnnnnnnnnnnnnnnnnnnnnnnnnnnnnnnnnnnnnnnnnnnnnnnnnnnnnnnnnnnnnnnnnnnnnnnntttgggggnnnnnnnnnnnnnnaaaaaatttttaaaacctttttttgggggcggggcccnnnnnnnnnnnnnnnnnnnnnnnnnnnnnnnnnnnnnnnnnnnnnnnnnnnnnnnnnnnnnnnnnnnnnnnnnnnnnnnnnnnnnnnnnnnnnnnnnnnnnnnnnnnnnnnnnnnnnnnnnnnnnnnnnnnnnnnnnnnnnnnnnnnnnnnnnnnnnnnnnnnnnnnnnnaaatttaatttnnnnnnnnnnnnnnnnnnntccgaaaaatgggggaaattttttaaacttttggcccgagggggaaccccccccaaaggggttgtaaaacccgaattcccccgggggtttccccccctttggccccctttgg

SEQ ID NO: 176890 - DNA, 346 bp, Homo Sapiens
aatcatgactcacgattgctgaagcctgagcaggtctctgtgggccgaccagaggggggcttcaaggtggtccctggtactggggtgaccgagtggacagcccagggtgcagctctgcccgggctcgtgaagcctcagatgtccccaatccaagggtctgaaggggctgccgtgactccagaggcctgaggctccagggctggctctggtgtttacaagctggactcagggatcctcctggccgccccgcagggggcttgaagggctggacggcaagtccgtctagctcacgggcccctccagtggaatgggtcttttcggtggagataaaagttgatttgctccc

SEQ ID NO: 176891 - DNA, 599 bp, Homo Sapiens; identical to SEQ ID NO: 13758

SEQ ID NO: 176892 - DNA, 806 bp, Homo Sapiens
  misc_feature (520)..(528): n is a, c, g, or t
ggcagctgccccagggaggaggagggcagcaccatccccatccaggaggattaccgaaaaccggagcctgcctgctccccctgagccagcacctgcgggagctgcactacagccctggcctccacccccaccccgccgaccatccaagggagagtgagacctggcagccacaactgcagtcccatcctcttgtcagggccctttcctgtgtacacgtgacagagtgccttttcgagactggcagggacgaggacaaatatggatgaggtggagagtgggaagcaggagcccagcccagctgcgcctgcgctgcaggagggcgggggctctggttgtaaaacacacttcctgctgcgaaagacccacatgctacaagacgcgcaaaataaagtgacagatgaccacccctacaacgacgaggccccaacccgcggcataatcctgccggccgccccggccctccacaagccttcccgaacctccctttgggccgcgggccacccaggccacgggcacatgnnnnnnnnngtccccaaccctatccccgccatgacctcgccccgcggatccacctccgaaaagtatgccccgcgccacccactaggcttccttgaacacgcaatcccccgcgaagtccctgccgacccccgccccgcccacgtcacggccccgccctacttcaccgcgcccccgcggcgatgacaagaaaacgcccgcgcccccgggcgctgtagccggcacgcccgcggaccaccagagtccacaactccgacccagcctttcgcggcgcaccccccccaccgcgg

SEQ ID NO: 176893 - DNA, 939 bp, Homo Sapiens
  misc_feature (50)..(50): n is a, c, g, or t
  misc_feature (54)..(54): n is a, c, g, or t
  misc_feature (64)..(64): n is a, c, g, or t
  misc_feature (89)..(89): n is a, c, g, or t
  misc_feature (145)..(145): n is a, c, g, or t
  misc_feature (175)..(175): n is a, c, g, or t
  misc_feature (480)..(565): n is a, c, g, or t
  misc_feature (595)..(613): n is a, c, g, or t
  misc_feature (670)..(758): n is a, c, g, or t
aaccttttggaaaaaataaatgacgtgattagacctcaactaaacattgnctgnactataaagnacagtatattcaccatgtcgctggncaatatgtcattgcgtaacaccaaataaccccccagaagtgagtccagaggccagntttgaacatcacaattctaagtgttttagntaactatttctggcgtgagtcaacagatcatgtagatagagtcaattattgtttgtggagtttttcagctataggggaggggaactattaaaatccagttgtttctattcaataggtaataaaaattagttgtccctgggtttgggaaacttaaatgcccattacagccctggggaagggttttctgtcttatggagtgagtcttagcatttaagttatacagttgctgccttaaaatagtagcctgctacaatgacttctttgggtagccattttcataagaaataaaatacaagatatgagtnnnnnnnnnnnnnnnnnnnnnnnnnnnnnnnnnnnnnnnnnnnnnnnnnnnnnnnnnnnnnnnnnnnnnnnnnnnnnnnnnnnnnnccttggcggcccccccggcccccaaaaaannnnnnnnnnnnnnnnnnnggggcgggggccccaaaggaaaaggaaaagggccaaaactgtttccaaagaaaaccnnnnnnnnnnnnnnnnnnnnnnnnnnnnnnnnnnnnnnnnnnnnnnnnnnnnnnnnnnnnnnnnnnnnnnnnnnnnnnnnnnnnnnnnnctttacgggatttttccacgggggtcccaccgagctcaatttcaatttaacccccgccctggccttttttgaaaaaagggtggaattccttaaacattctccccaaaggggaacccctccccaacgggttttattaaaccggaaatcccccggggggattaaaaaccctttggcccccttt

SEQ ID NO: 176894 - DNA, 679 bp, Homo Sapiens
  misc_feature (424)..(611): n is a, c, g, or t
  misc_feature (621)..(634): n is a, c, g, or t
agtgtaataaatcctaagagggaactgatttaagaaacaaggccgccaaacaaaggcagcagttccgactccagcagctgggaaaggaaggaaagtgaccccactttcactcctgcacagcccactggttaccaaaaccaccgtgcaagtcgggatgacagcagggacttctggccaggtgggaaaggtgcctggaagcgggatgcgcctgtgcgtctcttggccatgatgttcttgtgggcatgttattcttggtgctgcctggggtgttgctgagcggacaggctctccagctggagtccatggagagcccagatggctggagccctgcctgggccttcggagcctcctgcctgcaccctccacctcttctaaaccatgatgtggcacattttggtgttaataaaacacaacacacaaagtnnnnnnnnnnnnnnnnnnnnnnnnnnnnnnnnnnnnnnnnnnnnnnnnnnnnnnnnnnnnnnnnnnnnnnnnnnnnnnnnnnnnnnnnnnnnnnnnnnnnnnnnnnnnnnnnnnnnnnnnnnnnnnnnnnnnnnnnnnnnnnnnnnnnnnnnnnnnnnnnnnnnnnnnnnnnnnnnnnnnnnnnnnnnatttgggggnnnnnnnnnnnnnngaaaaattttttaaaacattttttggggggcggggcccccaaggg

SEQ ID NO: 176895 - DNA, 975 bp, Homo Sapiens
  misc_feature (541)..(541): n is a, c, g, or t
aggagcgaggcctgggtggcgattctcacgagggggtgagagtggggagggggcactggcctttgcagcacagtaaaacatggtccagacaacctgtggccccggcctcatgagcaccccctgcacaggcccagcccaagccaggcgctagaagggctggttgtggagtgcttatccttgacaggtatggggccaggtgagggcaggggacaaggtgcagctgaggcctgagcccaactaggtcctgggcacccctgcaggtgggagtggtccttgtcctcctggtatccagcagacacccccctctccccaccagccccattctcaggtcctttcctctttgtcaccaacaccaagaatctgtccagggttcttggcttatcttttatctcttttcactcctagagaggaattgcaattgactcagaatgacacatttttggcaccacgtgtgtagaaagcccccactgttagatgatagcctcgtgaaattcatgtttctgtattctcctatttcttttcaaaaactaattttccattnagtgtaataaatcctaagagggaactgatttaagaaacaaggccgccaaacaaaaggcagcagttccgactccagcagctggcgaaaggaaggaaatgtgaccccactttcactcctgcaccagcccactggttacaaaaaccaccgtgcaagtcgggatgacagcaaggacttctgggccaggggggaaaggggcctggaagcgggatgcgcctgtgcgtctcttggccatgatgttccttgggggcttgttattcttggtggctgcctgggggtggttgctaaccggacagggctctcccgcttggagtcccatgggaaaggccccaagggttggtgggcccctgccctgggccctttcgagagcttcttggccctccaccctttaaccttcttcctaaaacctttaatggggcccacacttcttcggtggc

SEQ ID NO: 176896 - DNA, 888 bp, Homo Sapiens
  misc_feature (846)..(846): n is a, c, g, or t
ttactgccacatctccatgcatcagcaaaatgttggtgacatttttctagcctggcagaacagattacttaaagctatttcacttcaaagcagactgaatgtgacttcatctaaaggcagcattaggtactgcatggaaataggtcattaacttgaaactcttatcaaaatatattttaccagtttccagaatttccagtacaggaccgcctgaagagagagccattgttcaattccaattcagtgtgagtgacaaagtgaaatttagaagtgaagttgtctatttgatatttaactctttattaaatctttctttaaatttctgcctgtcagtctatattgctgtttttattatacatcagtttctttgtataacttgtgagttccatgtgttttgtttttattatgtaaatatcattataaataaacttatttataaatcaaagatttgttaatttttggaaatcatgcttttcaaagcatcctaacttgctaagatgctaggtagtacgaccctctggatttggaaggcaaataaaactcttacagtgattatttagatattaaagactgagaactcacggcttaaccccagtcttgatggtatattgaacagactgaatatattttaccattacagggctaaaaggagtcttcgtgtgttaatactacctccttgtacatcactatacccaaatcagttattcaaattgttaggaattttaccttttaaaatctcataatggatatctcatgttttctgtattaatgtattttcaatgataggctgtttctttttttgttgttattgttgttgttgttatatccatacttttatctctaatngaatgtagttgggttcttcctgtaatgcgctattatgtcttg

SEQ ID NO: 176897 - DNA, 880 bp, Homo Sapiens
gggagacggctctcagatccgggggctgcggataaatccccgtaggccgcgggcagggagatgttgcgttccggtgtgggtgtgggtgtgcctccgacggcgtctcggtgccagtgtcgaggttctttctgcttagctacccggagccgactacggaggaggacacctgagtttacgtctcttccatctgctgctcacctcagctgcctgggtccccgacgagagccaggtgacacttaactccgccatctgcgttttgagcactgttctcataatggagtttcctgatttggggaagcattgttcagaaaagacttgcaagcagctagattttcttccagtaaaatgtgatgcatgtaaacaagatttctgtaaagatcattttccatacgctgcacataagtgtccgtttgcattccagaaggatgttcacgtcccagtatgcccactctgtaatacccccatcccagtaaaaaagggccagataccagacgtggtggttggtgatcacattgacagagactgtgactctcaccctgggaagaagaaagagaagatttttacataccgttgctcaaaagagggctgcaagaagaaagagatgctgcagatggtatgtgcccaatgtcacggccaacttctgtatccagcacagacacccctttggaccacagctgcagacacgggaagtcgccccaccatcaaagctgggtggagaagagactccgcctgcgatggctcggagcaccccagtagcatgcgtggaagccagcttacactctagtgggaagtggagccccattgagcaccatcccacactggctgctgatcttgtttgttgagggagatgggactataataaaattgaatgctgaagttg

SEQ ID NO: 176898 - DNA, 749 bp, Homo Sapiens
gtcgtccttcctcagagggcctcacgccaaacaaacggccttttcgtgtgaaacatcttcagggcgggaaaggggccacttctggctttgttagcaataactgaccttcagtttacccttctgaaggagcagggactcagcacagaattcactttagacggggctgaaggagtgtccctcctctatgtgaaaagaaaattgttttattcttcattctgactttttaactgtttggctcacttccagttagtttgaatgaaaataataattttctacttggagttgaagagggcagaatccgcagctctcatcattgtgatgtgtagcatgtctgccctctgactggacatcattgccattaactttcttctggggcattcacgggcaatgtcacgattgcccagacttgggagcaaggcaaccttggagttcagtccactcataaaatatgggaacacccatttttaaaatttaagttttgtccttaaagacaactccagtggttaattataaaagttgtgttacttcgtcctaaattaaattgatagaaagatttaaaaatgtgttttgtttctactattcagaaactgcgaactagggaaaggttggtatgaagaaatgtctttccttttttcaatgtacatagttcaactctttctttgttacatttaaactatatccatggatatcagtctgctttagactcctctgctagtgttacagatggaaataaaaccattaatttgaac

SEQ ID NO: 176899 - DNA, 721 bp, Homo Sapiens
  misc_feature (13)..(13): n is a, c, g, or t
gcggcagaggctngcaggtgactgaacttagcccagggcaagctccacatcctgggaacactttcatgtaaccccttctagttttgaactctgcagcaggctggtgctgtgtagtggccacccagtcaccacccttggaagggtgtcagggtctgggctcgcatgcaccctgctcccttctgccagcctgcatcctctcctcaggcctccttcccacatcatctgtcttctctaagttagggaaccatatttgagactttcaaaaagggaacttctaggtttaagctcctcccagtagattcctgaacccaattatcaggaaatcatcctgagcactcacaggttcatttaacactcactcatcaagcaccttcctatgtgctaggtgctggggaaaacttgaccaaggaagagttcctgtcctgaagcttccaggacccagctttccttttctggtgtggccttgtagctagtgcctgggcacaggtgtttttctttttgcagttttacctagtgctgggagttcagttctttttcctctagaaaaatacctctgtgctccagagcctaatttttcccagatgcatatttagctctagggagaggactaggaggaaatccccctccctttagctgcctgaactgactgaggcccactcactagagccatgttcagtgctactgtgattagtagtaattaaatatatatctggtattctca

SEQ ID NO: 176900 - DNA, 477 bp, Homo Sapiens
gagctgtcagctgcgactgcaggttctctaggaggcattccagaatagagtagcacactgtgtctgcagttctcgatgaccgaaagttatcaaaaatatttaaaatatttaaattgtgaacctattgataaagaatatttataaaaactgatctgtaggcctgtactaatctctacgcattagcaatattgactgtaaacccacattaaggaaaccactacgggtctggcagtgcgtgtcccgtggggtgtgcattttaaaactcgattcatagacacaggtaccatgttccatttccgtcatggtgaagcaaatgaattggcctggctaccactgtggtcgcgtgctacaggtttgacaaaaagatatcatgtttcgatttttttgtgtgtggacaacaatatggaagctaaaattgacatatttttatgtaaagtttttctattctttgatttttaataaactttggaaaccagt

SEQ ID NO: 176901 - DNA, 403 bp, Homo Sapiens
agcgcctggagctggatctctctccggtcgcgcacgccgaggccagtagggagagaagatggtggttctccgcagcagcttggagctgcacaaccactccgcggcctcggccacgggctccttggacctgtccagtgacttcctcagtctggagcacatcggccggaggcggctccgctcggccggcgcggcgcagaagaaacccgcggcgaccacagccaaagcgggcgatgggtcatcagttaaggaagttgaaacctaccaccggacacgtgctttaagatctttgagaaaagatgcacagaattcttcagattctagttttgagaagaatgtggaaataacggagcaacttgctaatggcaggcattttacaaggcagttggccagacagcaggctgat

SEQ ID NO: 176902 - DNA, 503 bp, Homo Sapiens
catggccacttcttagagggaagagcaaacaccatagaggaaagtgctcacagctggaggacatgggtgcccgccggggctcagccccaaggggggcacaagctgaaagtaggcagggcccaggcttctgcccccatccgctggtggggaggttctgtggctcagaggaggtgggtttggaggacagctggactaggtgggttctggcccactggggcacaggattggccgctgtcttggttgcgggtgtgatgtagggagctgtggtggctgggcccatggtggtttgagagctgggcaggctggggtgggcactgctgcttggtagcccggctctgacctgctcacaatcttggcatcttagtgggtgtcaggtgggtctgaggcctgagcctgggcctgcacagtggtaggaagcacaggcagggcagaggggatggctggcaagtgggggtgcggtcaagttgggggtcttggtggccaagtaaagacagtgcttccgg

SEQ ID NO: 176903 - DNA, 569 bp, Homo Sapiens
  misc_feature (21)..(21): n is a, c, g, or t
  misc_feature (112)..(112): n is a, c, g, or t
  misc_feature (118)..(118): n is a, c, g, or t
aaaacccctctgctcctcaanggcgccccacagagaccccggcctcagcctcctgcatcgggacaggccctcgtcccactgagggcacgatttaaacatttgacatcagaanctttanttgtaaacctcacacagataaggacccaagggctggcggtgtggccagaggacaggggaagctgaaggccccgtgcttgagctcggcagtcctgctccttgcagtgaagccaccatgggtgaccgtccagcctcacccggtggcctgcacagtgagggaagggcttcagggccatctgctcccagggcaggggacaggccaccaaggacctttggcaaatgaaggtttacatttctgtagtttgtttgttttagagcttaatttgtagttttttagctattaaaaccatttgaatttttaacgacctgatgagggcatcaggtaaattaaaggattttgggaagattcttattttcaattctaatatctgacagatgccatcaagaataagcattaaggtataaaaaatactgtgtgtataaaacaatgccaaaccacattcctacagcaa

SEQ ID NO: 176904 - DNA, 838 bp, Homo Sapiens
  misc_feature (326)..(355): n is a, c, g, or t
  misc_feature (768)..(768): n is a, c, g, or t
ggtgattcctgagcaaattccctcaaagtgaactcttgttcttaaattttgaattttatggtgagattgtaaagatagaggcaattgaaacattgttccttatttatgaactgcttgaagtgaatacttaatttaagtttgcactttaataccaaacttaaaaccaaacactcatttaaaagtaggttaagtgatcatggatcattgttattagctttgtggctttgtgaaattctaaaggaatcaaataattcatcatgatttaaattttctagagattttgatttttttataatgtttctttcctgtagattgtgttcttgttnnnnnnnnnnnnnnnnnnnnnnnnnnnnnnaaaattacagtgttcattgtcattgacctcagcagcaaatttgacttgaattcacttaggatcgcaggaatcaggggaaagtgattttaaaggtggcctctccagcacattttaagaaaagggaccaaaagttattttagcttcctcaatagattgcatgttgcttattacgataataaattaatattaaatgcaatatatgtcttgtctttattatggcatctatttaggagttgttcaaatcactgcagtagggctctgcaaataaaataatgtaacctattatcatggatctaatgtactgtaactttatcagtgaaaagtaaaatctcaaataacaagtacaaacattgaacaattacctataaagatttgtaaaagtaaaatttttcccaatagatttcatccttggncattttggaagaagaacctgcaggccacctgtttgtaacttttttaataaaatagacatctgtattactg

SEQ ID NO: 176905 - DNA, 946 bp, Homo Sapiens
cgcctccggagttaccggagcggaactgcgggtaccgcgaagtcgagtactgggatcagcgctaccaaggcgcagccgattctgccccctacgagtggttcggggacttctcctccttccgtgccctcctagagccggagctgcggcccgaggaccgtatccttgtgctaggttgcgggaacagtgccctgagctacgagctgttcctcggaggcttccctaatgtgaccagtgtggactactcatcagtcgtggtggctgccatgcaggctcgctatgcccatgtgccgcagctgcgctgggagaccatggatgtgcggaagctggacttccccagtgcttcttttgatgtggtgctcgagaagggcacgctggatgccctgctggctggggaacgagatccctggaccgtgtcctctgaaggtgtccacactgtggaccaggtgttgagtgaggtgagccgcgtgcttgtccctggaggccggtttatctcaatgacttctgctgccccccactttcggaccagacactatgcccaagcctattatggctggtccctgaggcatgctacctatggcagcggtttccacttccatctctacctcatgcacaagggcgggaagctcagtgtggcccagctggctctgggggcccaaatcctctcaccccccagacctcccacctcaccttgcttccttcaggactcagatcatgaggacttccttagtgccattcagctctgaggccagagcatggtcctccacccttcctgccattctgccctgggctcctcaggtagttggaattcctgacttaggacttggggttgggtccaaggtgcttacatcccaggggcctcatgcctaagatagagggtgggagcgaacccacatgaaccaatacagcccagctccaactagaacaaaagaaaacacaaaaacaacag

SEQ ID NO: 176906 - DNA, 1470 bp, Homo Sapiens
  misc_feature (135)..(135): n is a, c, g, or t
cggacgcgtgggcggacgcgtgggcagaaaagtaggtttacatttaacatttttcttaactacattcacttcttaaaaaggaacaagaagtgtaaataagtatgtatagagtgagggattaagcatatttgcatnggggactcgtgtattatgcttttaagtcaaaattaatattctcaaattcgaatttgatagctattatttctaaatctttttaatcctcaattttcctggtaaccttctttcaagagtctccttcttctaaaagttgccaaaccctttatatttaagctttttccactcaggactcaattagagtggtcaacagggagagggatggtcccatttgatctttgccactgagcaaaacaaaacttcaaatgaacttttcaaactgtagctttagtcttctggtataaagtggggaagattacacttatgtgatcaccaaaggatttactagtatcttggtcattccaattgcacaatgttaactgtacaacacacagcagaaaagtgaatagacttcactaagggattctaagtttagaaacataggtttcgttttcttaaaaaatttcgtgtataatacaaactaatgaaaactatacatattctccaattcctatagtaataataactgtaactgttacaccaactttcctcatatttgagagatgagtacattgttggattgcagcatttcttcatgttaaaaacatggaatattattcaaatatagtacttggggcctaaacaactaaaattagtcaccgcataactagttgaaaatggcataggcataaaatgttaataaagaatggcagttatatttatgctcacttcctggagtaattgggtaatattcagaaaggcacatcgtggtagtttaagtgtacaaggccttagggcagtatctagcccagtattattccagattctcctgagctctatataaagggcattttggaggaactcttctgggcaatatctttcccaatctcatctaaattctgggaaatattttccatagcagacaacccagctctgaaactaagcacctggtgatctttagtttgagatgtctatatggtacttttgagttatatcaattaagatacaagctatagacatgataaaacatatgaaatcaagatatagctcagtgggattggattaagacataataatagttctaagaattcacttttgattgtatgttttaccaattcaataattccactaatcaagtattccacaattttttgggactttttggattaacattaacaacaatttggacacttacgaactttagcacgacatcacagactactacagggcacatcaatacaaccaaggcggaacaaacccaaccaatagaacccggacgatgtatcgcgctatcaacaaaacaaagagggggggtgccccataattataccccgggcgcgcaacacgcgccgccca

SEQ ID NO: 176907 - DNA, 1037 bp, Homo Sapiens
ttccctgggtgggaacggggtcttggggtccctggctgggtggccagaccccgaagccagcgctgggaagggctgcggatgcccgggtcagaggaaggggcaggtccaaggacacgcgggtctggtcctgggcaagaaccgccccctctccgggcctgcttcagtcttcctttgcagaacaacaggccaggccccttccctctgcccccgggtgcttgaagtctagccccatcctggtccaatgcgctcttggtagcctcctttcccagctgcccgcccgccgccatgccgcccttactgcccctgcgcctgtgccggctgtggccccgcaaccctccctcccggctcctcggagcggccgccgggcagcggtccagacccagtacttattatgaactgttgggggtgcatcctggtgccagcactgaggaagttaaacgagctttcttctccaagtccaaagagctgcacccagaccgggaccctgggaacccaagcctgcacagccgctttgtggagctgagcgaggcataccgtgtgctcagccgtgagcagagccgccgcagctatgatgaccagctccgctcaggtagtcccccaaagtctccacgaaccacagtccatgacaagtctgcccaccaaacacacagctcctggacaccccccaacgcacagtactggtcccagttttacagcgtgagggccacagggccccagttggaggcagcagccaacaccaaccaaaaccaacccagggctggggggaactggcctccctcttcatgcctgaggggggcatggggcctcggcacctacaatttgcctttccgggaagggtggaaagcaaaatggccccctttacacttctattgggaattgaaaaaaggaatcggggaattcaattccacggggtcgtttcttaacaaaccaaaaaagcccccggggggcacacggggggcaaaagagggtttctgggccccccctgtggttttccgtaatgtctccgggcggcgccaccccggggccttaccccgcgc

SEQ ID NO: 176908 - DNA, 289 bp, Homo Sapiens
aagtcctctaaggtactaatttgtagctgctctgaagtaaggatttcggattcagctggtagggaaagactctgcaccctgctgtccttagggaagaaatggttcaaatcccatgtggtgacattgcattagtctccctttcactgttttcttattctgtaattgtttgttatatttcccaaaaacgtcttgatcactaagcaaagctgctagtgggattctatatttcgtgtcatcttttttattataatttattgcaaatttttttctgaataaatatatgttgtgt

SEQ ID NO: 176909 - DNA, 677 bp, Homo Sapiens
aagacattgaggacgtaacacctgtgttcccccagctttccaggtccatcatctctaaattgctaaatgaatcagaaacaaaggtccagaaaactgaggtagaagatgcagatatgcttgagagtgaagaatgtgaagcttctaaaggctactatctcactaaagccttgactggacataacatgtcagaagctcttgtcactgaagcagagaatatgaaatgccttcaattttccaaggacgttattattagtgacacaaaagactattttatgtcgaagactcttggcattgggagactgaaaaggccctccttcttagatgatccactgtatggtatcagtgtgagcctttcatcagaagaccaacatctgaaactcagttctccagagaatacaatagcagatgagcaggagactaaagatgcagcagaagaatgtaaagaaccctaatcaaggacttgctgggtgtgcttttcagaaagttggtaatgaagttaaattaaatttcttattgaattatttgaattcaatgaatgcactgcagagactattctttattgattttgacatttggagtcgctctttgtggattatatttccttgatatttttgagacttggggtgtaattgttcagtggtttttgctcattaaaatttctgggaccattgtttata

SEQ ID NO: 176910 - DNA, 412 bp, Homo Sapiens
gcatatttatcattaggagacaggatgggtttaaagcaggatggtgtgtgtgtgaacgggcatgagcagaggtgagcgtgagcgagcgggtgtgtatgtacgagtgtgcacgtgtgtgcgtgtgcacagagggtgtggtgccagcttgagtgggagtgtgtgagtgtgagcaggcgggcgagtgcgtgagtgcacgccagcgcgtggcccatgtatgaggagtgaaggggcccaacgcaataaccacgtcccccacccgggccccccgccgcggctgaggccacatggcttcctgtgggagccccggccggcacccggctggtcccaccctaaatacctcagccatggagaccatgtcatgcagaattaacaaggtagcaccgagcatatcaataaatattattctgataat

SEQ ID NO: 176911 - DNA, 274 bp, Homo Sapiens
gctccagttccacaaggactccaccacagtctttaggatggagaaaaatcactggttttccatgtgctcctattttgacctcttcacttagactgcggatcttcttttttttcaaatccatcacagctgcattaatattatccacctcgatgcagatgtgatgcattcctccagccttgtttttctgcagaaaacctgcaatatggatgtcacgtcccaatggatgaagcagttccatcttggtatttccaggatgacaaaacaacagatatag

SEQ ID NO: 176912 - DNA, 441 bp, Homo Sapiens
ttaattataacaaaataggcagctattgtgggtaaaatattcagtaaaatctgactcctaagaatacatttgaagttttaggctatgaattggactcctataccattgccatgatggttactacgtcaccactgtaacgtctgatttatctgtatttatatctaggaaattttctcaatcttctgtgtaaaaggcgaacttccttagcacctgaacatggcctcaattcacgaaatgtgatgatcatttacatatgaacaacttttgtaagacacgatagtgttgctcaagtagattaaaaacattgaaacgttgttattcctagcaaatgtcctgggaaaaaagaaccgtcaaatactaaaaggctttaagaatgttgaggaaaaaatgaaatcccttatgaaagtcaactcagacatgaatttttaaattaaaaaatgt

SEQ ID NO: 176913 - DNA, 350 bp, Homo Sapiens
aaatatacatatttgcaggaaaatatataatttttagatgtcatggatcattttaggaaagttgtagtcagttaaaaagctgtcatatcattctacaaaggaggagtaaagtaggagcaattgtgtggcccaacatttgtttgttttttagccaagcttagatttataaagcaatgagggtgtggttttaaccacaaagtgaaagtgttagacagttgttggctctctcctaaaaagtgaatgagatttttcctatacattttccttcttgttgactaatatatgatgaatacttttttcagcatggatataccataaatataaaaataataaagccaaagaatttaagc

SEQ ID NO: 176914 - DNA, 386 bp, Homo Sapiens
  misc_feature (36)..(36): n is a, c, g, or t
  misc_feature (104)..(104): n is a, c, g, or t
cccggtcaagccgcctcgccttgggcctggccggancgcagaagcccagccggaaagcccagcctgcgctggagcccacgctggagccagagcctccgcagganaccgaggaagatcccgggagacctggggctgccgaagaagctctgctccaaatggagagtgtagcctgagggctggtgttgcctgcctcccctgtgcttgtgccttgtcccaaaataaatcctttcagaatgtagcactcacgccctaataaggagcgaatcctacatccaccaaggcggcgctctggccctcccttccttaagcccagtcctgtgtcctctgaaagaggtgcagtcactcacaacctttgcgctcaccatcaataaaagtaatttcacccg

SEQ ID NO: 176915 - DNA, 804 bp, Homo Sapiens
gggggcgcgtcggccatgagcgagttgccgggcgacgtgcgggcgtttctgcgggagcacccgagcctgcggctccagacggacgcccgcaaggtgaggtgcatcctgacaggtcacgagctgccctgccgcctgccggagctccaggtctacacccgcggcaaaaagtaccagcggctggtccgcgcctccccggccttcgactatgcagagttcgagccgcacatcgtgcccagcaccaagaacccgcaccagttgttctgcaaactcaccctgcggcacatcaacaagtgcccagaacacgtgctgaggcacacccagggccggcggtaccagcgagctctgtgtaaatatgaagaatgtcagaagcaaggggtggagtacgtgcctgcctgcctggtgcaccggaggaggaggagggaggaccagatggacggtgacgggcctcgcccgcgggaagccttctgggagcccacatccagtgatgaggggggagctgcaagtgatgacagcatgacagacctgtacccacctgagctattcaccagaaaggaccttggaagcacggaggatggggatggcactgatgactttttgacagacaaagaggatgagaaggcaaagcccccaagagagaaggccactgatgagggcaggagagagacgaccgtgtaccgagggctggtccagaagcgcgggaagaagcagttgggctcgttgaaaaagaagttcaagagtcatcaccgcaaacccaatgagcttcagctcctgtaaacagccaggttaataaaagcacatgccgtg

SEQ ID NO: 176916 - DNA, 907 bp, Homo Sapiens
  misc_feature (162)..(162): n is a, c, g, or t
gtcacggttaagaactggtatccccgcagggccattttcataatatatggatttccacaggttacatttggatccacggcccccacaccacaatacagggctgctgtctcccacaagaaatgatgatgtcaggggcatcaggaaaggtaagggccgggaaanccgggcccttggagaaccctgcccaggggaggcccagcctactcacaggatccgacactcccaggcagagcagagggcaggagaggcccaaagagctaggtcaagcagctggctcccctgggaggggagccgggagacagggaggtcctcacactgcccccgtggccacgcatggctgtctgcacactccatcaggaggaagggcaggggagaagtcacatgcagtacagtgaaactcatcagtgtcacacacgcccagcaggaggggagagctctgctccacacgctggcggccttggctgctccagagcaatccgctgctccagcttcagccatgggaccaagagggtaaaggagcagcttctggaggccccaggcagaggccaccttgcagcagtgactggcgactttgcagtacatctctgctcacttgctgtcccttgggagtgagcaccgtctataacacatcgccatctacaaaagcctggtcacagtgttcaccagcacattcatgaaaatttaaatcaacattaaccaaagtacctgcaagtaacactgcttactcttgctgtttgcctcatctgactggaaaccttagcccccaaatatgaaatgccttctctagattaaaaggattcagagatgttgcactattgcactatatttctgcttcccgatctcgtttctgagtcctagtgaaatcgtaaacaagagatgaaataaacgtcgctccattttaataccg

SEQ ID NO: 176917 - DNA, 630 bp, Homo Sapiens
agcagccactccagcctctgctgcagcagccaccctggatgtggctgttcggagaggcctgtcccacggagcccagaggctgctgtgcgtggccctgggacagctggaccggcctccagacctcgcccatgacgggaggagtctgtggctgaacatcaggggcaaggaggcggctgccctatccatgttccatatctccacgccactgccagtgatgaccggtggtttcctgagctgcatcttgggcttggtgctgcccctggcctatggcttccagcctgacctggtgctggtggcgctggggcctggccacggcctgcagggcccccacgctgcactcctggctgcaatgcttcgggggctggcagggggccgagtcctggccctcctggaggaggactccacaccccagctagcagggatcctggcccgggtgctgaatggagaggcacctcctagcctaggcccttcctctgtggcctccccagaggacgtccaggccctgatgtacctgagagggcagctggagcctcagtggaagatgttgcagtgccatcctcacctggtggcttgaaatcggccaaggtgggagcatttacaccgcagaaatgacaccgcaacgccagcgcc

SEQ ID NO: 176918 - DNA, 589 bp, Homo Sapiens
gggaacaatgggagttggtttgggatttgctattgcagctgccgtggtggctaaagatagaagccctgggcaatggatcatctgtgtggaaggagacagtgcatttgggttttctggcatggaggtagaaaccatctgcaggtacaacttgccaatcatactgttggtagtgaataacaatggaatttaccaaggttttgatacagatacttggaaagaaatgttaaaatttcaagatgctactgcagtggtccctccaatgtgtttgctgccaaattcacattatgagcaagtcatgactgcatttggaggcaaagggtattttgtacaaacaccagaagaactccaaaaatccctgaggcagagcctagcagacacaactaaaccttctcttatcaacatcatgattgagccacaagccacacggaaggcccaggattttcattggctgacccgctctaatatgtaaataaagacgccagttggtggtcttgagttttctctttcttgcaagatgaaattttattttccacagcaaaattactctactgttaaaattgtgcaaaataaaataaacatttaaaatgtc

SEQ ID NO: 176919 - DNA, 769 bp, Homo Sapiens
  misc_feature (108)..(108): n is a, c, g, or t
  misc_feature (629)..(639): n is a, c, g, or t
attaaaatatttaactttattaacagaatatttacatttcttttaagaccttatttaaccatagtgagtgttccaagtttaaaaagcattaagcaataaccacacacnaagatgaaaaccagtgtaaactatacagttctttatatacaatttttacaaagtaacacttttttaaataatataactggacacaaaaatatacactatagagaaattcacatcggtaattgtataaagctctcctctagggtcctgaaaatttaggacaaacattagctctgtaaataaagtgttactgtgacagtcctgaaaggccactatatatatttatctacataatagatatcacactgacattttcaaggctaccagctttactatataatttttagattatgtattcaagtgttgaggtgcttatgattatgcaaacattaaaagaatagtggtataagaagtagctggggaataaatttgagccagcatttagattacaggctctaaataccccaacttaaatgctaaatggctgatactttctcacttcaaaaacagtagtgaataatgtttaaaagtactgcaaacaagctcaaaacatgattcagatttagtacagttttcttaagagnnnnnnnnnnnaaatgcaaacaattcatttaccatttctttgttttagtgcatctgcattaaggctttgaattatttgacccaagattacaatattaaaatctgactcaaaattttacaatgttaaaacaaataggtcccc

SEQ ID NO: 176920 - DNA, 475 bp, Homo Sapiens
ccttcgttttaggggttcaatgccccgttggccagcccttgaaaccggactctaccatttactgggtgacgtttaccctttgtagctgaaattctgattctggaccaaattatttgcaaaaaactttttcccttaagggggggtgatactgggcagactcttcctgaaggggtaaatttgcgagacattaaaatattgcctcgaccccttcagctggtggccagtggaactgtacagcttggagaaaatgccaagatctgttgggttaaagaggaatgaagccttttaattcagaaatggggccagtttagaaagaattatttgctgtttgcatggtggttttttatcatggacttggcccaaaagaaaaactgctaaaagacaaaaaagacctcacccttacttcatctatttttttaataaatagagactcactaaaaacaagactagccagtgtttttatatctgagataag

SEQ ID NO: 176921 - DNA, 870 bp, Homo Sapiens
  misc_feature (568)..(568): n is a, c, g, or t
  misc_feature (725)..(725): n is a, c, g, or t
  misc_feature (729)..(729): n is a, c, g, or t
aggagagaaaaccacttagactgcacttttctgttccgtttactctgtttacacattttgcacttgggaggagggaggctaaggctgggtcctcccctctgaggtttctcaggtggcaatgtaactcatttttttgtcccaccatttatcttctctgcccaagccctgtcttaaggcccagggggaggttaggagactgatagcatgtgatggctcaggctgaagaaccggggtgctgtttaagtccctgcttttatcctggtgcctgattggggtggggactgtcctactgtaacccctgtgaaaaaccttgaaatataacactccatgcaggcccagctgttgagggttttcttgatgaatgaatggggtaccatacatggttaagataaagccttgggctccggactttatctgaggtgtctggagaagttctcctgcccctccactttttggcacctactctcactaaaggagtataatgtcaagccccccaactttcctaaaattaataggaataaatggtagcagatacacccttcctaacttgttatggaggactataaantgaagttactaaaaacaatagactgaaatttttagtttaaaatatgcaagcctgaacaaggggaccaacattcccaagaaactggaacccagtcagacatatgatcaactgcttaatgtgtatgccatgtatgtcatgtgtcattcctttcccccancccntccctagtggaagtgcttgcctactcccctaggacaggtaagtcctcggaaagtctaatcctcaatcttttgggcacaagttttataagggccaaccaagcatggagtcagggaaaaataggatcgagggccacaaaaaaa

SEQ ID NO: 176922 - DNA, 621 bp, Homo Sapiens
gactacatggaaagagataaagaaaatccaaaccagtacaactatattgcatagaatgttggccttgcagcatttggtgtcatatgcagtagccagtggataaactaacctgttgattcaatattatttgactccttttttactaccgatgaccaaatgaagcagtgtaattaatggaaatagttgagtggactttttctcagtggttaacatgcccattttaaagagtaatacttacctttaagaagaatgttgttgaactctttgcatgttatttagtatgatgtgcagaaaacacttaagaacgtacctggtcttcatgaattcctctttggaactgggaaagagatccctgtccctattaaaaaggggggagcgttcttacacaccattaattatgaagcaaaaggtttatttgcttaaaatgtcatttaaagatacttaaactgcatgcaaactttatttactgtacagagttctggatgtatttatcaaatagaaaaaccacccttgacttggttgttcacccgtttgtgatttcccttgaaaagagaaatgaattgtcatagctattgatattttactaggtgatgttctgttacactgaaagggatgttttgt

SEQ ID NO: 176923 - DNA, 788 bp, Homo Sapiens
cgtgggctccctgtgccgccgcgctgagcgatttagagacgccttcacccaggagctacgccgcggcctccgaggccgctcggggccaccaccaggtagccagaggggccctggcgcaaacatttaatcctgggctgtgcggggccgaggctgcttgcttttccttccgggctctacagtggcatcaatgtggaggggtcattccgggcactgcgcgcggcttcgaatcccgactgggattgttggcctgcagacatcccacgcataagagcctaggccagaccgcccgctccgttgaagtcttgtgattggacaagacacagtgtggagaaagacccctaagcctaacagagatgaaggtaggctgggtccagacacggcacctacggagagccacggaccgaagccagagagcctttcctctgcaagtgggactgaaactcttgacagatgctgctcaatctgactggtatagcaggacagttaattccagggacgatatggatgaaaagacaaccctacagctgccaaattcctttgattaaatgtgtgagctggttgataggcatgagtgtgatacttctcaggcaagatgtgttaagaataccggggactgtaggcctatggtaataataaacacgtattttatgaacatgagtcttctgtgctgggacctggctcattggcactctatgtggtaatctcactccttacaacgacattcacatgagggaagcagattactttttggaatttttgtagagatggggatggtcctcgaacttctt

SEQ ID NO: 176924 - DNA, 745 bp, Homo Sapiens
  misc_feature (187)..(202): n is a, c, g, or t
gtgtcccaggccttggctggttggctgggcccagctcctgggggctgggcaggcatggcagggccgggtccacttccattgttagcagttgtttgcagaattttctcttttaccattcctctctttttgttctcgcccagagtgggtggtttttgcttgttgttttagattttcatgtgaaggcagnnnnnnnnnnnnnnnnaactccccatccccctatgcagggtgtcatttcaccatccacatccacatccttgtttgtgtttctggccctcgtcctccctgcctctcatctgcctccccaaaccccacctacccactgctcccagggtctctccaggggcagggggatttcaggagatggggtgggggccagcccctactagacccttgtaatctgatttggagacaatccccccgatgggaccagcagccccgccggcccacgtgtggggtcccctcttaacatctgccttgttgcgggggtcagtcatgagtgccagggtctggctggggtcttggcactgtacttactggccggggcctgaaaccttagccccaagccggcctgagtgggggatattgacacccccagctaaagcacaagcaccttagtcacccctcctctccccccaagtgagattgcacatttaactactgtaaggagaggagcggcgttggcaaatgtgaaccatgagaatatcagtgatactgatgagaataaactaaacgcctttgtaacagc

SEQ ID NO: 176925 - DNA, 1017 bp, Homo Sapiens
gtgaactgtatttgttactgtggtacccacggttagatacgcgtttaaaaagattgaaatttaaggtcacacctctaagtttgatgtactatatacagatcgtgcagaatatgagttaaacagatacaaattagtccatgcccaaaaagatatactagggtacagaatcatcttcataaatacatataaaattcttgtgtagaagcgaactgtccaggttttctgagacacttctaagtgaatcaaggcacaaaatgtacatacaccatggtgaatacacacattctagactttgtgcctctgacatagcccaaggatttagcttcatgactcttataaaactaaatgtactgaatgagattctgcttcttgggtgaaaaaccacaggaactataaacatcatgtagataattactccaaaatatggagaatacaaatacgagcactttattttaaaaagcaaacacaaaagactggtgtaaatccaagtgtttaaatgcctccgttttggataatttaattaagaaccgatacaagtttgttcccagaagctaatgcatcactagtctctactgaggaaaatgagttctaaaaattaacatggttttcagtaattcaaatttcactatttatataaaaacctagagagaccaataatatccagtagcttcaaaagataagctaaagattctttgatgtaatcaactttaccaatgtttgtatgggtgtgtttaatatatacacaaggaaaatacactcactctataatttcttataaaatagcaagtaaggagtagaagtaggagatgtagaaggggaaagagaattcagaaagtccttctcttcagtaactttgacttcagaatcatcaaaaagcaaccacttcccctcatactcctttaagctttgcactacgtatgaaattttgttctcaaatccactaatattaatgcctgtttggtcactggattccttgtttctatcagattcatgggtcccagtagtatcactagtccc

SEQ ID NO: 176926 - DNA, 773 bp, Homo Sapiens
  misc_feature (518)..(527): n is a, c, g, or t
  misc_feature (545)..(560): n is a, c, g, or t
tgcacccgaggaagcgggccgcaatacactgtcgtactaacgtcacattaatgacgcaagcgtatgcagcccgaacggatagcgaaacatatgccccgggaattccgccattacggacggggttgatacttcctggggtttgtcacccaagaagcaaaatctcattcagtacatttagttttataagagtcatgaagctaaatcctggggctatgtcagaggcacaaagtctagaatgtgtgtattcacaatggtgtatgtacattttgtgccttgattcacttagaagtgtctcagaaaacctggacagttcgcttctacacaagaattttatatgtatttatgaagatgattctgtaccctagtatatctttttgggcatggactaatttgtatctgtttaactcatattctgcacgatctgtatatagtacatcaaacttagaggtgggaccttaaatttaactttttttaaaaactgggaaggtcaataaaatttaaactgcttaactatggtnnnnnnnnnncccccgcaagaaggagcnnnnnnnnnnnnnnnngaaccttgtcgggccgcccttcgggccctccgaagaaagcttttttttaaaacccagtttcggttttggggcggcggccggggcccccacagttagaggtaaaagtggcaaacactgtggggccaataaaccttggttttccctgaagggaagacatccgctggggccaatggaaccatacggggcttttgggtatttcctccccccacaatt

SEQ ID NO: 176927 - DNA, 778 bp, Homo Sapiens; identical to SEQ ID NO: 55174
  misc_feature (562)..(609): n is a, c, g, or t
  misc_feature (612)..(619): n is a, c, g, or t
  misc_feature (621)..(642): n is a, c, g, or t

SEQ ID NO: 176928 - DNA, 334 bp, Homo Sapiens
gccctgcctgtgcctgtccgctagcctggggggcctgggcttatctgggccttctcactcagggactctcttgacgctgacttgcccccgcagtggtggccagtgctgcctctgctccaagctgcccctgcgctgggaggggtgggggcggtgccattggtctggtgcagcatagccctgccagtggcctcatccccagcaggcctcccgtgcctctgccagcaaggaggggccggccagctctgcttgcacagggggccccatgtggggccagcgcacgctcatgtcactgagttccagccgcttttagagtaaagtcgtttatcatcaaaaa

SEQ ID NO: 176929 - DNA, 513 bp, Homo Sapiens
tctggtgtggagacctctctattgcacacaacgtcccagcgcactccactctccacccactcctggggcctctctgtcctcccttccttagccttgggtcattcgttattcctggctcgggtccactccgaggtcctccttagctgccagtcatcacaggggatggctgcctccacactgcctgctccagggacacgagtccactccacggagagccttgcccagctgtggccagcctgtgagtatcttggcccggcacaccctggctttcccggctgcaagtgcctgctccagctccagtcccagcccctcctcatggctccagctctcgggagaggcgggagagttcccgctggttgtcaatgaccttcagctgctggacataagcccaggtgctggctggactccgggtgctcagggactgctccgagcatgtggaaatcctcgccacctggctgtcctcgtggaggtgggaaactcggcttctgagtggtgagagaggcacagggttgt

SEQ ID NO: 176930 - DNA, 744 bp, Homo Sapiens
  misc_feature (26)..(26): n is a, c, g, or t
  misc_feature (464)..(588): n is a, c, g, or t
accccccactccccatataagcattncaatcagtgtaacttgcaaaatgcataaacatccggacagtttggaatttatagtgttgatggaagaaatcatttttaatgtgtactgtaaaacttgaaatactcaggagctgagtgaatatgtttgttgctacttacaatcccgacctgttagtcccagtagttttgttttaacatggtctttttcaactttgtttcctgtttaactacagatgacttctgttgtagactcacaagtttaactgttgtattataacagtattacatgtcaacggtgtggttatgacctttatttatataaaaaccaaatatttagtcaatttaccgtgtcttaatttaatctttgtacaccttccatttttaagtgcttaaatgagtactatattgcaataaaatgtagtgatataattaaccagccattaaaaatttacttctacnnnnnnnnnnnnnnnnnnnnnnnnnnnnnnnnnnnnnnnnnnnnnnnnnnnnnnnnnnnnnnnnnnnnnnnnnnnnnnnnnnnnnnnnnnnnnnnnnnnnnnnnnnnnnnnnnnnnnnnnnnnnntgggggggcccctccggccccccaaaaaattttttaaaaccctttcttttgggcgcgggggcccccctaggggtaaggggaaaaggggcacaaagcttgttccccaagaaaaaacccgggcgccaagaaacaagggcgttgggattccccccccac

SEQ ID NO: 176931 - DNA, 448 bp, Homo Sapiens
ataaatatgagcatttatttggcacccgatggcaatacaaaatcctggcagtgggagtggaaaggttctctctctcaaatacttccatactatgtcgacccaaaggcaggacttggcagcaaggctcacaaaccacccaaacaaatatttattgagcaccttgactactacaggcctagcattttgctagggaccatgggagatgtgaaggaagttatctcacacatgatatgtcttcaaggagctaaaaatgccagtgggataaaaggcaaaacacatgggaaaaacaaagtacaaataataatccgtgtatattgtcaaaaggaacattttatcaaaaggtaggattgtagctaaggttggcttgccttcttccctcttttattcaacaaacatttaatgaaggcccactatgtgccaagcacttggtacatgatggtgaataaaa

SEQ ID NO: 176932 - DNA, 626 bp, Homo Sapiens
  misc_feature (443)..(572): n is a, c, g, or t
ggtctcaaatagctgggcttacaggcatgagccaccacacctggccaggatttggttgtttaaatataaatctgatcacccccctgcttagaacccttctgctttctattacccctcatttaaaatgtaaactcttcaccttggtttatgagaactggttcttgccttccccttgaacctcattaaatggtgatttcttgctaagctccagcccgagtggtctcctctcagcttctaattttgtgctctttcctgcccttttcctgggccttctcagctctccacccccaccactcttgactcaggtggtgtccttcttcctcaagtcttgacaattcccgggcccttcagtccctgagcagtctacttctgtgtctgtcaccacatcttgtcttttcccctcattgcatttattgcagtttatatatatgctacttttactnnnnnnnnnnnnnnnnnnnnnnnnnnnnnnnnnnnnnnnnnnnnnnnnnnnnnnnnnnnnnnnnnnnnnnnnnnnnnnnnnnnnnnnnnnnnnnnnnnnnnnnnnnnnnnnnnnnnnnnnnnnnnnnnnngaaggcaagccaaccttagctacaatcctaccttttgataaaatgttccttttg

SEQ ID NO: 176933 - DNA, 420 bp, Homo Sapiens
  misc_feature (46)..(91): n is a, c, g, or t
  misc_feature (93)..(222): n is a, c, g, or t
  misc_feature (309)..(309): n is a, c, g, or t
  misc_feature (358)..(358): n is a, c, g, or t
  misc_feature (369)..(369): n is a, c, g, or t
  misc_feature (384)..(384): n is a, c, g, or t
  misc_feature (390)..(390): n is a, c, g, or t
cttccattctttcttcctccagtctgttctcacataacagagtagnnnnnnnnnnnnnnnnnnnnnnnnnnnnnnnnnnnnnnnnnnnnnnannnnnnnnnnnnnnnnnnnnnnnnnnnnnnnnnnnnnnnnnnnnnnnnnnnnnnnnnnnnnnnnnnnnnnnnnnnnnnnnnnnnnnnnnnnnnnnnnnnnnnnnnnnnnnnnnnnnnnnnnnnnnnnnnnaaatataaatctgatcacccccctgcttagaacccttctgctttctattacccctcatttaaaatgtaaactcttcaccttggtttnatgagaactgggttcttgccttcccctttgaacctcatttaaagggtgnttttcttgctnaagcttccagccccnagtggntttcctcttcagttttctaaattttgtggt

SEQ ID NO: 176934 - DNA, 925 bp, Homo Sapiens
  misc_feature (340)..(361): n is a, c, g, or t
atagatatatagatacatggaaagatatatgatataggaggtataataaaatgtaaggagaggaatatagacgacaggaagatgttaactgtaaaattctttcaacttttatatgtttaaaatttttaagaataaaattttggaaaaataatatattgaaaggcttagcttcctggtagctacaggaggggaaataacagaagcacaaccacctacatgtggtcaggatgactgtgattctacaagatagaaaatagcccacctgctcagaagtaagcctttcctgtcttagtggtctaaggagaatttaagcatggattctcacaaagggagcatcagnnnnnnnnnnnnnnnnnnnnnncaagatggctaactagggatgtcagatgccagttctcctcagaaataagatcaaaattataggtgaatggtcaaaatctgaatgaaaaaatgaaggaagacaaccaggatctgtcagagagtccagagaatgaagctgtagtgcagaaaaggaaagcagcaggagtgcagcagagatcaacccctgagaaacccatagccctacggaaagggtagggcttctctgctcctcttacccctgtaacaatttgctgaccaccaaatttttgaggagtccctgtgctctcatgaccccaggaaatgctgttggtggcaatctgggaacttccagggatagagaaccaggtaccaactcacacagaagtgcctgcataccccttaggcctgaactgagacagcaggtgccatattggttgttcaccgattgtggcccactgccctccccagggaacctcagcctttgaattgccacatcaccagaccccctgcaaacgtaccccacaacccgctttgactttcacaacaacaggggccagcaggtctctagggaactgcagaatctctg

SEQ ID NO: 176935 - DNA, 523 bp, Homo Sapiens
ggactcctggcctcaagcaatcctcccacctcagcctcctaaagtgccaaaattataggcgtgagccactgcacccggcccctatttgaagacgtcttttgtaaaagctagcttctagaacctgagaaaagctcttttctcagaggagatactccttttgatatgttaatgattaagagtggttgcccaggcctagtttcagtggcagaataggattggaattaaaaagcagaactcatctggcttcagcagattgccaccaagaggatacaggtggtcaggtcctggctggctttgtctttgggcctgggcaggcttaggatttgactttctttgaagtacctgatgctgattgattccactaatagtaggaagcaagagacttaactatgagggacgttatgtgaatcttaagtcttaccagtccttgcattagtacattaaatttggatgttctggaagcaaattcatatgatcgtgagtgatttcgccaaagaaaaaaagccttgtccagcctggcgga

SEQ ID NO: 176936 - DNA, 438 bp, Homo Sapiens
ggtgaacttgatgaaaagtttaaaaaggtagaaaatttattgccaaaaaaactgaagagtcagctgatgccagaaggaaagccgaaatgctacaaaatgaagcaaaaactcttttagctcaagcaaatagcaagctgcaactgctcaaagatttagaaagaaaatatgaagacaatcaaagatacttagaagataaagctcaagaattagcaagactggaaggagaagtccgttcactcctaaaggatataagccagaaagttgctgtgtatagcacatgcttgtaacagaggagaataaaaaatggctgaggtgaccaaggtaaaacaactacattttaaaaactgacttaatgctcttcaaaataaaacatcacctatttaatgtttttaatcacattttgtatggagttaaataaagtacagtgcttttgtatat

SEQ ID NO: 176937 - DNA, 962 bp, Homo Sapiens
  misc_feature (700)..(862): n is a, c, g, or t
  misc_feature (879)..(887): n is a, c, g, or t
ggtgtgaacaaagcggaatctgctctggcccagcaagccaagcatttctcagccctgcgagatgtcatcaaggccttgcgcctggccatgcagctggaagagcaggctagcagacaaataagcagcaagaaacggccccagtgacgactgcaaataaaaatctgtttggtttgacacccagcctcttccctggccctccccagagaactttgggtacctggtgggtctaggcagggtctgagctgggacaggttctggtaaatgccaagtatgggggcatctgggcccagggcagctggggagggggtcagagtgacatgggacactccttttctgttcctcagttgtcgccctcacgagaggaaggagctcttagttacccttttgtgttgcccttctttccatcaaggggaatgttctcagcatagagctttctccgcagcatcctgcctgcgtggactggctgctaatggagagctccctggggttgtcctggctctggggagagagacggagcctttagtacagctatctgctggctctaaaccttctacgcctttgggccgagcactgaatgtcttgtactttaaaaaaatgtttctgagacctctttctactttactgtctccctagagatcctagaggatccctactgttttctgttttatgtgtttatacattgtatgtaacaataaagagnnnnnnnnnnnnnnnnnnnnnnnnnnnnnnnnnnnnnnnnnnnnnnnnnnnnnnnnnnnnnnnnnnnnnnnnnnnnnnnnnnnnnnnnnnnnnnnnnnnnnnnnnnnnnnnnnnnnnnnnnnnnnnnnnnnnnnnnnnnnnnnnnnnnnnnnnnnnnnnnnnntttgtggggcccccctnnnnnnnnngaaaaattttttaaaccctttttttgggggcgcgggcccccaaggagaaggagaaagggggaaatttgtgtcccc

SEQ ID NO: 176938 - DNA, 1164 bp, Homo Sapiens
  misc_feature (193)..(221): n is a, c, g, or t
ggtcaaggaggagatagtgactttgagataggaacagtttaagatgcagtgtgagtctggcctgcgtgcggtgaggaggccccgccaagagactggtggacatctgactgtgggatgtgctctcaagtaggacgtcatcaggacagattctgaataggcatcatgagagtgctggtcagaaacggctgccacnnnnnnnnnnnnnnnnnnnnnnnnnnnnnaaaggaaggaacaatagctaggtaagatttttatcagctttctctgtctgaatccagtttttcctctgtcagtcctggaagcttgaatagaattatattgttgaagccttcaggtcacaaactgtcttttgtaacctcctgtccctcctaaaacacgccaacccctgcagtcaaatcacattagtaatctgatttgctgacagtcctgccctgcctgctcctcgttttcccacatgtcctgcatccctcccccactggagtgatttcagtgaatcagacaaggaaggatgtgtaggatcactactgcattgcaataccctgttatcctcagcaacaaaacccacatttcatacatcctttgtgtactcaggataaagactgatgtttactctctgggcactgttgtaagataggttttgtcagagcataatcattgtctgcaaagtgtttggtgcgaggaagattattgctaattttgtgaaataaagagtctagccctctccttttaatgaacttaactctcgctggcatctgtagtatcattgggagcttaggcgcacatggaaatgagagcccggcgcatggattttaatgtttttctaacaactgtggagatttgagggaatgtgtggtgaatgtaaaatacctagtttacttgccagtctcttgtgtaaattacagtaaaacaaagtaaatgaaatttaaacaaaaaataaatttgatcacaaaatgccaaaaacacccacccaaccttccgccgaaaaccatcacccagttcctctccttttgtcggcccgccctggccccccgaaaaagctttctaaaaccaatttcgtttgccgccgccggccccagtaggtaaagggaaacatgggccatagcttgctttccccaggaaaatccccgggccctgaactaatggcttgggatttctccaccaaat

SEQ ID NO: 176939 - DNA, 621 bp, Homo Sapiens
  misc_feature (172)..(205): n is a, c, g, or t
gaaatgcctcaacacgccgtactgtctgggcccaacctgttcatcaataacctaaacaaaacagataatggtacataccgctgtgaagcttcaaacatagtggggaaagctcactcggattatatgctgtatgtatacgatccccccacaactatccctcctcccacaacannnnnnnnnnnnnnnnnnnnnnnnnnnnnnnnnntccttcccatcatcacagattcccgagcaggtgaagaaggctcgatcagggcagtggatcatgccgtgatcggtggcgtcgtggcggtggtggtgttcgccatgctgtgcttgctcatcattctggggcgctattttgccagacataaaggtacatacttcactcatgaagccaaaggagccgatgacgcagcagacgcagacacagctataatcaatgcagaaggaggacagaacaactccgaagaaaagaaagagtacttcatctagatcagcctttttgtttcaatgaggtgtccaactggccctatttagatgataaagagacagtgatattggaacttgcgagaaattcgtgtgtttttttatgaatgggtggaaaggtgtgagactgggaaggcttggggatttgctgaa

SEQ ID NO: 176940 - DNA, 394 bp, Homo Sapiens
  misc_feature (84)..(92): n is a, c, g, or t
  misc_feature (384)..(384): n is a, c, g, or t
gggattctgtaatgttcctccatacagttaaaacatcctaacttgtttttcaagctcactcaggcctacgccaaacgtttctgnnnnnnnnnaaccatgaggtttaatttatttttgtgataggagggatatttacatattttagtggaccacattttaagttggatggtgtgctctaaaatactgaaaaacaatagcccatatacctatgtatttgtttttgatgggttgtttactctgaaataaaatgtatggttttcttaaaaggaagttttaaagtacctattttgtgtcatcctgtattgaaaagaatgtcaagcttgttaaaatgacatgtaacaaaaatgtattttgatttgtatttcagaaactaaaaaaaatatntgttgaaagc

SEQ ID NO: 176941 - DNA, 679 bp, Homo Sapiens
gggggggcctgctgggtggcttagcactgcagggctctgcgcgggaacgctaacctggtccggagcgagtctgggtctcagccccgcgaacagcctttcacgagtcttcaagctttcaggctatcttctagtcaagatgagtgataagccagacttgtcggaagtggagaagtttgacaggtcaaaactgaagaaaactaatactgaagaaaaaaatactcttccctcaaaggaaactatccagcaagagaaagagtgtgttcaaacatcataaaatggggatcgcctcccaacagcagatttcgacattacctgagagtcttgattttaggcttgttttttgtaaacccatgtgtttgtagagattttaggcgtcttcggatatcttctcacctatgttccctggctaagaagtcagaggtagccaatgtttccttaaattcatttttaaacttaccattggtgcatatgttccagatggcagatgctgtcaataatctcaccattgatgacctttgtgtatgtagttcttgcatcctatactggataagcctgttttaacctgctatgatgggtgcttccattgcttcataatcttcatgaagttgcatgcttttgcagcttttcacagtttatttgcatttctaatgtagtaataaagtaaccaatataatcacga

SEQ ID NO: 176942 - DNA, 812 bp, Homo Sapiens
  misc_feature (526)..(679): n is a, c, g, or t
  misc_feature (692)..(703): n is a, c, g, or t
aggagcaagccgtggctgagctgaggacagccctgagcgactgcatatacagaagcaagcactgcaggagaaggcaaggcggacagaccagttcatcggcgccgggaactgtacagacggcagcacgcctcctaggaactgtgggagaaaagcggagtgggagggagacgcagtagacagagacagaccgagagaggaagggagagacagagggggagcgaaaacaggagcctgactccactgggagagtgcaggagcacgtgctgttttttatttggacttaacttcagagaaaccgctgacatctagaactgacctaccacaagcatccaccaaaggagtttgggattgagttttgctgctgtgcagcactgcattgtcatgacatttccaacactgtgtgaattatctaaatgcgtctaccattttgcactagggaggaaggataaatgctttttatgttattattattaattattacaatgaccaccattttgcattttgaaataaaaaactttttataccnnnnnnnnnnnnnnnnnnnnnnnnnnnnnnnnnnnnnnnnnnnnnnnnnnnnnnnnnnnnnnnnnnnnnnnnnnnnnnnnnnnnnnnnnnnnnnnnnnnnnnnnnnnnnnnnnnnnnnnnnnnnnnnnnnnnnnnnnnnnnnnnnnnnnnnnnnccttgggcccccnnnnnnnnnnnnaaaaattttttaaaccctttttttgggggcggggcccccaaaggaaaagaaaaggggtctattcttttcccaaaaaaacccgggccaaaaaaaggggttgatccccccc

SEQ ID NO: 176943 - DNA, 795 bp, Homo Sapiens
ggggccagcggcggagtctccaactgggagagctgcagctgccgagaggaggagaacgctgaggtcggtcggaccaacggacgcgctgaccgctgccaactgcagctcgcgctgcctcctgctcgcgccgtgccactaaggtcattcccgcctccgagagcccagagccgagatggaaacggtccaggagctgatccccctggccaaggagatgatggcccagaagcgcaaggggaagatggtgaagctgtacgtgctgggcagcgtgctggccctcttcggcgtggtgctcggcctgatggagactgtgtgcagccccttcacggccgccagacgtctgcgggaccaggaggcagccgtggcggagctgcaggccgccctggagcgacaggctctccagaagcaagccctgcaggagaaaggcaagcagcaggacacggtcctcggcggccgggccctgtccaaccggcagcacgcctcctaggaactgtgggagaccagcggagtgggagggagacccagtagacagagacagaccgagagaggaatggagagacagaaggggcgcgcgcacaggagcctgactccgctgggagagtgcaggagcacgtgctgttttttaattgggatttaccttcagagaaaccgctgacatctagaactgacctaacacaagcatccaaccaaagggagttttgggaattgggggttttggtggcgggggcaaccccggccttgggccttggacatttcccccacccggggggggaatttaccttaaatggccgtctaccc

SEQ ID NO: 176944 - DNA, 616 bp, Homo Sapiens
tttcgggtgcgggctttcccatgtcatgttctcatgatctccagggcccagaagatcttgtcaccagggggagtacagatttctccaagggttcacacataaatccatgggcagtatgatgacaggtcctctgttgcaaactcagttccaaagtcacaggaagaaagcagaaagttcaacttccaaagggttaggactctccactcaatgtcttaggccaggagttgtgtctaggctggaagagccaaagaatatcccatttccctttccttgtggttgaaaaccacagtcagtggagagatgtttggaaaccacagtcagtgcgacccgggtggtacccaggctttagcattattggatgtcaatagcattgtttttgtcatgtagctgttttaagaaatctggcccagggtgtttgcagctgtgagaagtcactcacactggccacaaggacgctggctactgtctattaaaattctgatgtttctgtgaaattctcagagtgtttaattgtactcaatggtatcattacaattttctgtaagagaaaatattacttatttatcctagtattcctaacctgtcagaataataaatattggaaccaagacatggt

SEQ ID NO: 176945 - DNA, 466 bp, Homo Sapiens
ccctatttaaatgaaaggagtttaaaaacattttttaaggagggagaaaggagaaattttggtttttcaacactgaaaaaatactacctataggaaagtctgtcaggtttggtttttttgtacaatatgaaaaggatattatctacctgttctgtagctttctggaatttacctccccttttctatgttgctattgtaaggtctttgtaaaatcttgcagttttgtaagccctctttaatgctgtctttgtggactgtgggtctggactaaccctgtggttgcctgccctcctgagcctccgccttcccagcagcggcaccaaggggccttagggagccccaaaacctaccactcgcgtgttccccaagcgcctggctgctgcttcttgcttcccgtcccccagccccatgctcccttttacattctgtgtgtatctaaaggatggaaaaataaaacgcaattaaa

SEQ ID NO: 176946 - DNA, 704 bp, Homo Sapiens
gcttttcagtagtaagcatcttagagacagactgaaaatgtgatgttcttcttgaaaacaccctttccaatgtcatcagtctgtggtgtttggtgactgtccccttccccactgtgcgagtacttccctcagggctgctctggtgatctacctggcgtgttttttcttttcagtgccgaagacgcagatgaaattcagcatccagacgatgtcccccatcgaaggcgaagggaacattgcacgtttcttgttctctctgtttggccagaagcataatgctgtcaacgcaacccttatagatagctgggtagatattgcgatttttcagttaaaagagggaagcagtaaagaaaaagccgctgtttttccgctccatgaactctgctcttgggaagacccttggctcgctgggaatgaactcaccgtagcagacgtggtgctgtggtctgtactccagcagatcggaggctgcagtgtgacagtgccagccaatgtgcagaggtggatgaggtcttgtgaaaacctggctccttttaacacggccctcaagctccttaagtgaattgccgtaactgattttaaagggtttagattttaagaatggtgctctttcatgcctattatcagtaaggggacttgtattagagtcagagtctttttatttaggccagttgtcaagtgtcaataaaagcatcatgtaattg

SEQ ID NO: 176947 - DNA, 461 bp, Homo Sapiens
gcagtgcaagaactctgcctccacagttcgacctgcggctgctgtgtgccttcgcggtggaagccccgaggggcgcgatcttgaccctaagaccggcggccatgatggtgctgacctctggtggccgatcggggcactgcaggggccgagccattttggggggcccccctccttgctctgcaggcaccttagtggcttttttcctcctgtgtacagggaagagaggggtacatttccctgtgctgacggaagccaacttggctttcccggactgcaagcacgctctgccccagaggcctctctctccgtcgtgggagagagacgtgtacatagtgtaggtcagcgtgcttagcctcctgacctgaggctcctgtgctactttgccttttgcaaactttattttcatagattgagaagttttgtacagagaattaaaaatgaaattatttataatctgggaa

SEQ ID NO: 176948 - DNA, 248 bp, Homo Sapiens
ttaaaaccacacacaccttgcaaagaaaaagggaaactggcagtctctgtagaggaagccggtggcatcgctcagagccacaaactgtatttctaaacagccctttccctggttccctctctcctcgccccactttttttaaaatccagactgtaaaaaacacatctactcgacactcactttactttaaaaaaacgaagagaaaaagtaaagcgttacaagactttcctcctggaaactataaactg

SEQ ID NO: 176949 - DNA, 742 bp, Homo Sapiens
gggagagctggcgctctagcccacggagttggttaactcctctcaccggcccctggaaagggttccaagtcctttagtacccgacgctgtctgggaattccgggcgtttcggctccttggtcgcagaggcaggaggcacccgaccgcatgtctgtcatggacctcgccaatacttgctccagctttcagtcggacctggatttctgttcagattgcggctcggtcctgcctctgcccggggctcaggatacggtcacctgtattcgctgtggcttcaacatcaacgttcgggactttgaggggaaggttgtgaagacttcggttgtgttccaccaactggggacagccatgcctatgtcggtggaggaagggcctgagtgccagggacctgtggttgacaggcgctgccctcgatgtggtcatgaaggaatggcataccacaccagacagatgcgttcagccgatgaagggcaaactgtcttctacacctgtaccaactgcaagttccaggagaaggaagactcttgacctttttcctgggcaactctacagtccctccctcctttcggaaggtgaaggatactgggtttttagatgccttgtccatcctgtctggttgcaatgttttgctcccagaagagaatcagatcatcatgtggggattaccattgttcctggagtactcctacccttagttgaatttccttattaaagttatatttttctataagaccctgaaaaa

SEQ ID NO: 176950 - DNA, 317 bp, Homo Sapiens
ggccgctgcgtgggctgctctctttgtcgactaaggcgactgcggaggctgtgagttaagaaattgtcgccagtcccagctcgctgttgaggaaaacttgtatcacactcttgcagtttcttagaccattttgcctttccttcgcgcatgagaaaaattgctgtatttctaacctttacggccttcgcagacagcgcgcgtcttcttccttctttcatcagggctcatcatcgcgttcttcctacgggaaaagcgtggttttctatgtcttggcgtttccttttcctatttgaaacaagggaaaactcttttaaatt

SEQ ID NO: 176951 - DNA, 873 bp, Homo Sapiens
  misc_feature (547)..(604): n is a, c, g, or t
ggggggagcggctgccatcctacaagccacaccccctcctctgagctctgaatatgggacccagtgccaggagctggaagacaaggtgtttctgccaaacggggacctccatccagagaaaaggaagaaggtgcagggtgggccaagaggcaagtgaaggttggcctgagtctgggccggaaactcagaggatgtttctcctctgctgggagctgtagtttcttatcaaaatagatattgttccaccatccccctccttggcccttcaagtgggctgaagcccttggaaagtgacataggaagtccccagatcttgcccttctcactccagaggctagtggtcacagacagctgggaatggcagccacagagggtcccctctgggagaaacagcttcaccccagcctcagggccctgggccatcactgcagtggccctgggaggtgaggaagaagctggctagaggagggggctcccacctaccttttatttaagccagtattctttgttcctgcttgtaataaaacttcagtttataggaacacgnnnnnnnnnnnnnnnnnnnnnnnnnnnnnnnnnnnnnnnnnnnnnnnnnnnnnnnnnnttgcccgacccctccttgtaggcccgcccacctcacccgcccacccttctcgctgtggcgccccccctccgatcccagcacccctcccctcttggctttctgcgctgaatgcctcccgggccacgcacaggaagacatgttgttgacccaccttcttttctaaccactgcccgcgcacacccaatccagtccaaaatggggccggtaccacgccgtggagctcccatccccccccgtctctcccccatctgcgtgaccagccacgcccg

SEQ ID NO: 176952 - DNA, 619 bp, Homo Sapiens
aatagtaagcaaagaaggaaagacacaaagcacagaaagaaggaaggaaagaaagcaagctgttttcccctgccttgcccctgctcacctttgaattcttttctgggcaaagccaagaaccctcgtgggctaaaaccccgctttggggcttaaagtttgcaaaatcctcccattaatctattgggaccagttgccacttaggagcattctttgataacttttacaaaacatcttttgtggtttttgaaatgttttcattttgtagatcattagcccttcttttttgaactggaatacatttcacgggaattttcaaatttaagtctgtgcaatgttacataaaatacctttgattattaaaagccatctgttttgctataacttcccttttttgttctaaagtttgtctatttctgctatttgtttttttaccatagaaatattgatttccttaagttttcaaagaaccaagttattaataatttctctaagaactagtctcaagcttgctatacaatcctatggttgatagactgtggctttcttgttgatttccatttgttgttcatttcctccaattttccttttttaaaaattataattattgtttggattaaaa

SEQ ID NO: 176953 - DNA, 323 bp, Homo Sapiens
gggtctcttccagggggaattctcagctcttgggaacccccttgctcccaggggaggggaaacctttttcattcaacattgtagggggcaagctttggtgcgccccctgctgaggagcagccccaggaggggaccagaggggatgctgtgtcgctgcctgggatcttggggttggcctttgcatgggaggcaggtggggcttggatcagtaagtctggttcccgcctccctgtctgagagaggaggcaggagccccagggccggcttgtgtttgtacattgcacagaaacttgtgtgggtgctttagtaaaaaacgtgaatgg

SEQ ID NO: 176954 - DNA, 846 bp, Homo Sapiens
  misc_feature (344)..(450): n is a, c, g, or t
  misc_feature (462)..(472): n is a, c, g, or t
  misc_feature (541)..(621): n is a, c, g, or t
ggtaccagacccttctggtgccagatcctcttctcaaagctgggattacaggtgtgagcatagtgagaccttggcgctacaaaataaagctgttctcattcctgttctttcttacacaagagatagagcccgtgccctaccacacatctgtggagatgcccaggatttaactcgggccttagaactttgcatagcagctgctactagctctttgagataatacattccgaggggctcagttctgccttatctaaatcaccagagaccaaacaaggactaatccaatacctcttggattttatttaatgtcataatgttgtcagaataaagagaaagatgaaatnnnnnnnnnnnnnnnnnnnnnnnnnnnnnnnnnnnnnnnnnnnnnnnnnnnnnnnnnnnnnnnnnnnnnnnnnnnnnnnnnnnnnnnnnnnnnnnnnnnnnnnnnnncttgggggcccnnnnnnnnnnnaaaaaatttttaaaaactttttttggggcccgggcccccaaaagaaaagaaaaagggccaatatttttnnnnnnnnnnnnnnnnnnnnnnnnnnnnnnnnnnnnnnnnnnnnnnnnnnnnnnnnnnnnnnnnnnnnnnnnnnnnnnnnnacccaaagggggtttggggggcttttcgggatttttcaaagggagccccaggggatccaaattaaaattcccccccgcccttgcatctttcggaggatgggtgaaattccttaaaccttttcgcccacgggggaaccctttccaaaggcggtttggaagaacctgaaatccgcacggggaatccaaaccctttggccccccttgggataaaaaatttttcgcccc

SEQ ID NO: 176955 - DNA, 575 bp, Homo Sapiens
ttcccagcatcggttgcatcacatcttagtagattccacttcaggttgtactgtttatcaacttttttgagaatattcccacttgtagttccatacaaaattcttcgatcacttcaaacccagcaatggtttctcaaaaaataaagcctaggcagtactgactagtaagaggcaaagaattaacagtgtcatttgatgttgtgtccaaaatcctcattcttcaaactactgttctcatcaaagggctgatgtcttaattttctctggacaccatgtctttgggttggttactatcttcaagcacgatgtaattcagcattagtaaatggttttctttgcttggctaacaaataggctacttgtaaacattttggttgcagcctcatttttattacttttgtgaaattttgctgtgatgtttcatttaaattttctaattcttctgactgttgctttcccaccagttgggaatattgtgatgttagtctgatactgtcagtctattcttttaccagttatggtgacactgcattataaacacaacgtaccagcatataataaaatagtccatattc

SEQ ID NO: 176956 - DNA, 418 bp, Homo Sapiens
gccacatgttggggaagtggggtgacccaaacttggtgacataggttgattgatcagaccctcagccttacaagcaagagctcatgcagatccacagagccatgcacatcctgtcttcctgaccttcctcaggtggcaccacctgcgccccatggacctgctgtatcggtgtcatgtggaggtctgatgaatcctttaaaacctaactgtgatgtcgtaaatgtaactgtgctacctttatatctactgaagggcagcgtctgcatccgagggaaattcaacatgaaacaaccatcgttttagttgcactcagtctgtccatatgacatacacatgaagtgaatgtttccttatgttttcaggtctacaatgtttagtacatgtaaataaggaaaaaatttgataaatatggtaaatt

SEQ ID NO: 176957 - DNA, 427 bp, Homo Sapiens
ggagtcgggggtggagggaactggccacaacccactgctctgatgggtggtttgtccaaggatgctgaatgtaatgcctggtcaatgtggaagcccatgaggttgcccagggaagcctccaaaagctgggatgcttgagggtatccaagttgaaaaagacaaaatctgaccatcagccagtgacagtcctggcaaatgaaggtggggcggggcagtgaggggtgggagaaggtgaatgattcattattccaccccgaggtttgctggggtgaggggaagaatcgatgctgctttgggaactgaaggtttttctgttgggaaggccctcttggttttggagagaaagacaagttatgagtagctgctaccctggaacggtgggcagagagcctactaggaaatgtgcagaataaactattttttgaag

SEQ ID NO: 176958 - DNA, 418 bp, Homo Sapiens
  misc_feature (299)..(299): n is a, c, g, or t
  misc_feature (341)..(341): n is a, c, g, or t
  misc_feature (354)..(354): n is a, c, g, or t
gcacatttcctagtaggctctctgcccaccgttccagggtagcagctactcataacttgtctttctctccaaaaccaagagggccttcccaacagaaaaaccttcagttcccaaagcagcatcgattcttcccctcaccccagcaaacctcggggtgggaataatgaatcattcaccttctcccacccctcactgccccgccccaccttcatttgccagggactgtcactgggctgatgggtcagattttgtctttttcaacttgggataccctcaaggcatcccagcttttgggaggnttcccggggcaacctcatggggcttccacattggaccagggnattacattcaggnatccttgggacaaaaccacccattcaggaggcagtggggttgtgggccaggttccctttcaccc

SEQ ID NO: 176959 - DNA, 820 bp, Homo Sapiens
gggctttgttccagggctggagcggctctgggctccggaatcgcccgcagccggtactgcgggacccactgcggatatggctgtcttggctggatccctgttgggccccacgagtaggtcggcagcgttgctgggtggcaggtggctccagccccgggcctggctggggttcccagacgcctggggcctccccaccccgcagcaggcccggggcaaggctcgcgggaatgagtatcagccgagcaacatcaaacgcaagaacaagcacggctgggtccggcgcctgagcacgccggccggcgtgcaggtcatccttcgccgaatgctcaagggccgcaagtcgctgagccattgaggatcgcgacgcagtcggcgggaccctcatggaagcatcgccctcgcctcggaccttgcctggcgctatttttgcagggagctggggagcaggaacgcctcggacctgagtgctctccatattgtggggttgaagtctggatgggagcttgccaagtccctttttaggctttttaattaggaagcatttcgaacctgcgcaacagaccaaagaacagtacaaagaacatccgtgtacccagtaccctgactaccgactacctacaacccgtccctgccccatcctgagttcttttgaagctgatctcaggcatcggattatttcttctgtaaatatttcagaatgtatctctccaagatgagagctcattaaaagataattacaaagcttatcacatccaaaagaattatcaataattttgaaatattattaaacgtgtaataaatgttcaaagttccacttgcc

SEQ ID NO: 176960 - DNA, 513 bp, Homo Sapiens
agcagtgtagacaaacccttggggcttttttatttggagaaccgtccagcatgcatcctggcccacggcctgagcaagctgcagcccttctgaggccatgggcttcgttggctaaagttgggggtcttagccttgcatgcgttgtgggcatcaaatctacctccaaaagacccatcctggggagccctctggcccctcgttgccttttcacttcaaaacctcttttttctgggagaggccctgaaccctgtgcgggagagctggtcctccagccctggcaggccctcagccagcttcccagcaagacaaagggcacccttgtggctttgggacctaagtggttggggttcccgaggtcactgaggactggtacctcgggaacgcaagctgtcagtggaactgtcccacaagaattcacaggtctcaaagcaggaacagtgggtttgtgtctcacctgagtatctggaattttattttttcaagtaaaattttcaatgaaacgtccaaaaaaaa

SEQ ID NO: 176961 - DNA, 492 bp, Homo Sapiens
aacgccaaagagcaccctagtttattacctgactctgcctgcttcccgagtcatagcacagcatctaacctcgcagtctgccgctcactcaaacgacagccccccacgcctccaggaagtcttggccgcaagtggtctcccgggcttcggcagcgaagcccccttcttttcctcctctctcctcatcttcaacggttacctcaagttcatgcagcacctcaggggttcagccctcgatgccaacagacgactattcggaggagtctgacacggatctcagccaaaagtccgacggaccggcgagcccggtggagggtcccaaagaccccagctgccccaaggacagtggtctgaccagtgtaggaacggacaccttcagattgtaagctttgaagatgaacaatacaaacaaatgaatttaaatacaaaaattaataacaaaccaatttcaaaaatagactaactgcaattccaaagcttctaaccaaaaaa

SEQ ID NO: 176962 - DNA, 463 bp, Homo Sapiens
  misc_feature (50)..(95): n is a, c, g, or t
cgatcctagcaccgcatctacctcgcagtctgccgctcactcaaacgacnnnnnnnnnnnnnnnnnnnnnnnnnnnnnnnnnnnnnnnnnnnnnnacgcctccaggaagtcttggccgcaagtggtctcccgggcttcggcagcgaagcccctttcttttcctcctctctcctcatcttcaacggttacctcaagttcatgcagcacctcaggggttcagccctcgatgccaacagacgactattcggaggagtctgacacggatctcagccaaaagtccgacggaccgggcgagcccggtgggaggggtcccaaaggaccccaggcttgccccaagggacagtgggtcttgaccagtgtaggggaacgggacaactttcagatttttaaggttttgaaggatggaacaattacaaaacaatggaatttttaaattacaaaattttatttacaaaccattttt

SEQ ID NO: 176963 - DNA, 716 bp, Homo Sapiens; identical to SEQ ID NO: 15544
  misc_feature (473)..(482): n is a, c, g, or t
  misc_feature (485)..(485): n is a, c, g, or t
  misc_feature (488)..(491): n is a, c, g, or t
  misc_feature (495)..(553): n is a, c, g, or t
  misc_feature (626)..(626): n is a, c, g, or t

SEQ ID NO: 176964 - DNA, 655 bp, Homo Sapiens
cactgagtcctggagctatagatggtcatgacagtgtggtagacaatgtctccagccctgaaaccttgttatttttagtggcatgcaggctatacctcagtattgtggacatgcacccaggaatatgtacagtcacaagattactcatcaggaccaatgagaccctttgcacagcatccttggaggggattcgcaagtggcagccctgttgattaatctctacatcattttaacagctggtatggccttaccttgggtgaactaaccaaataatgaccatcgatggctcaaagagtggcttgaatatatcccatgggttatctgtatggactgactgggttattgaaaggactagccacatactagcatcttagtgcctttatctgtctttatgtcttggggtaggggtaggtagataccaaatgaaacactttcaggaccttccttcctcttgcagttgttctttaatctcctttactagaggagataaatattttgcatataatgaagaaatttttctagtatataacgcaggccttttattttctaaaatgatgatagtataaaaaatgttaggataacagaatgattttagattttccagagaatatgataaagtgctttaggtatgaaaataaaatcatctttgtctgat

SEQ ID NO: 176965 - DNA, 954 bp, Homo Sapiens
ctgtgcccaccgaggcctgctgtttgtgccgcccaacgtggaccggcgcacagtggagctgcggctggctgacaacttcatccaggccctggggccccctgacttccgcaacatgacgggactggtggacctgacactgtctcgcaatgccatcacccgcattggggcccgcgcctttggggacctcgagagcctgcgttccctccaccttgacggcaacaggctggtggagctgggcaccgggagcctccggggccccgtcaatctgcagcacctcatcctcagcggcaaccagctgggccgcatcgcgccgggagccttcgacgacttcctagagagcctggaggacctggacctgtcctacaacaacctccggcaagtgccctgggccggcatcggcgccatgcctgccctgcacaccctcaacctggaccataaccttattgacgcactgcccccaggcgccttgcgcccagctcggtaagctctcccgcctggacctcacctccaaccgcctggccacgctggctccggacccgcttttctctcgtgggtgtgatgcagaggcctctcccgcccccctggtgctgagctttaccgggaaccccctgcactgcaactgtgacctgctgcggcttgcgcggctggcccggccggacgaccgggaaacttgcgccttcccgcccgggctggccggccgatacttccggagaatgccccagggccaacttccctgtgaaaccccccttattgtccgccacccgcagggccctttgggcgctggaaaggccattgggccccctttccgggccggggccctgggtggaatcccgcccctaccatgcattgggccggaccccgaccaacacggctggttgggcacacccttccccaagcccgacggcttttcccaaaacggcccccctcacaaatttgggagggcgacaccgccca

SEQ ID NO: 176966 - DNA, 370 bp, Homo Sapiens
gagaagacacatttacaatcattcattgggccttttatctgtctatccatccatcatcatttgaaggcctaatatatgccaagtactcacatggtatgcattgagacataaaaaagactgtctataacctcaataagtattaaaaatcccattattacccataaggttcatcttatttcatttttagggaataaaattacatgtctatgaaatttcaattttaagcactattgtttttcatgaccataatttatttttaaaaataaattaaaggttaattatatgcatgtatgtatttctaataattaaaaatgtgttcaatccctgaaatgtctgccttttaaatataacacctactatttggttaaaa

SEQ ID NO: 176967 - DNA, 541 bp, Homo Sapiens
  misc_feature (197)..(197): n is a, c, g, or t
gttaacaggtaggtttgtgtaggccttgctgggcactctgtacaattagttgcttattacgtatgattactcgcagcgatctattgttccatataaccaaaaagcatggtttattcattgaaacacggttgacctgaactcgtgccttaggaattaatgcccccttatggaacctgcctgaattgcacctgcgggtnggaggctccggctgtgaagtcactgaacagaacgtcgctgatggagaaagggctcccgcagaaggaacggcctgtaccgtgcgctccggcacaatcgcgtctcttgtgtctcactcacggaaagaaacaacctgaaggccatcccgtcggtctgcacgtaaccgtgaagacgtgtggccgcgtgcccacctgcggctgggtaccctgcacccggcactgtaggagtcacgtgcagcctttctcaggggactgtcattgaaaaggaaacgtttgatgtctgtgtcagctgtctttgtagttaggaaatagatccaataaagccgtatttttttgctggaaaaaaa

SEQ ID NO: 176968 - DNA, 504 bp, Homo Sapiens
gatatgcaggggaacagatttgtcgcagtgaaagttgtagaaagtgcccagcattatgcggagacagccttgcatggaataaaattgctcagatgtgttcgagaaagtgatcccagtgacccaaacaaagacatggtggtccagctcattgacgacttcaagatttcaggcatgaatgggatacatgtctgcatggtcttcgaagtacttggccaccatctcctcaagtggatcatcaaatccaactatcaaggcctcccagtacgttgtgtgaagagtatcattcgacaggtccttcaagggttagattacttacacagtaagtgcaagatcattcatactgacataaagccggaaaatatcttgatgtgtgtggatgatgcatatgtgagaagaatggcagctgaggccactgagtggcagaaagcaggtgctcctcctccttcagggtctgcagtgagtacggctccacagcagaaacctataggaaaaatatctaaaaac

SEQ ID NO: 176969 - DNA, 379 bp, Homo Sapiens
tgtctgccaagattttatgttagcgctcggattgaggcagaaaacggaagcaccaggtttaacactgggatgacttgggttgtgttcctggaggtttgaagtgggccttcccgccttttgagggggaaaactgactgttttgaacacatatcctggattagttgggttgttttgtattgaggatccctaaaagacaaaagagtcttggaaaggactgctggcttcgtcttgaacgttcgccccatcaccagtgtgagtccgtggggaagtcttcctcaagtggggttcagtctgtaattttcctgtctgttcttagtttgttctgagttattttggattttgttctttagccaaataaaggcaatgtggttttacctga

SEQ ID NO: 176970 - DNA, 312 bp, Homo Sapiens
gggctagcttctcacagcaggaggcctttgccccccacagcccctccacgcctgcctcagggcctgagaagccaccacttgcatcccccttgtggttagagtcctggattttactgcaaaggtgttcatgttcctcgtgaagtgtgggctcttaggaagcctgtgggctcctctgagcagttggcctttgtagctgcaacagcagccacctgcaggttgggtgaagtgccctgacactgctgtagcccccttctaacttctaaccgaagacaagacagacacccatgttcttaaataaataaaagtaagcct

SEQ ID NO: 176971 - DNA, 463 bp, Homo Sapiens
attaggaagttaacacttgggtctcttgaggagcttgccaattgggagcaccggttggggagcagagacactaacgacttcagggcaggcctcggatattccatgaatgtatcaggaaatatatatgtgtgtgtatgtttgcacacttgtgtgtgggctgtgagtgtaagtgtgagtaagagctggtgtctgattgttaagtctaaatatttccttaaactgtgtggactgtgatgccacacagagtggtctttctggagaggttataggtcactcctggggcctcttggtcccccacgtgacagtgcctgggaatgtattattctgcagcatgacctgtgaccagcactgtctcagtttcactttcacatagatgtccctttcttggccagttatcccttccttttagcctagttcatccaatcctcactgggtggggtgaggaccactcctgtacactgaa

SEQ ID NO: 176972 - DNA, 1459 bp, Homo Sapiens
  misc_feature (353)..(361): n is a, c, g, or t
  misc_feature (547)..(608): n is a, c, g, or t
  misc_feature (629)..(642): n is a, c, g, or t
  misc_feature (808)..(818): n is a, c, g, or t
ggttcaagtaagcaacagattgaagaagtctctcctaatcttgctcgatatgatgatactgaaggggctaattactctccagcaagcaaatgagctctcaaagctagtgaaccagcagcttcttgctgacccacttgttccacctcagctaactataaaagacttctacatgacagattcaattagcagagcctcacagacaatggccaaatgtgtcaaagctgtcacagagggtgcccaggcagtagaggaaccatccatatgctgaagcttctactaggatcccagttttgccgcagataattaatggacaactgtagtgcagtgatcctttacaggtttatttctttgtnnnnnnnnntaataataatttgaatcatgtaatatttaaggttatactatgcctatttgaaaatgatattagttatcaactttgcagtttgaaaaacatgtattgtgtgtaaaggttaaataacaaaactatgcagatgctcttaaaagcattgataacctttgtgacgaacataaagagatccttaaattatgnnnnnnnnnnnnnnnnnnnnnnnnnnnnnnnnnnnnnnnnnnnnnnnnnnnnnnnnnnnnnncataacccggcgcacgccagnnnnnnnnnnnnnngaaagagagaggtctgtggcgggccgccctccgcccctcaaaaaaacttttcaaaaacctttttttggggcgccgggcccctaagagggaaagcgacacgcggccctcacttgtttccataagaaaacactgggatcatgaataacggccttgaatttccccaccnnnnnnnnnnncccgcccgcgggccacgccgcgccctgtttcgtcaaaaacgctccgaagggcggttggtctgggggagcgtattgcgcgggggttccttcaacgaacggcgggagtgcaccagacgaggagccccctaaatatagaaaattatcgctcgccccctgggccatttggcaatatctttgttggcggaaggggagccgggtggtgtggaaaatattgacttatggagcccctctttcttgcggccgcgagatgtgggaggacaactgctctgagctcgaaaacggggggcctagcaggcgaaaaaaccctgctcagtctcccctcgaggggggagaagttcacagccacctgtcttggccccccacgaaagcgcgaaacaaataagaatcctccaaccccctcgcagcgcagaacacctccggcggaggagataaaaacactatgtgttcccacttatgggggcgcgcgcgctctttccaatatcgtacgaagggaggcggggagggaacatctgcgtgcccgcagggagctgtagggctccgcagcacacacgcacaaccgtcctttttgtctcccacgacacaccccgcgagtgaggggggacgacggtgcggggatgggtcctttgccccaatacacacgg

SEQ ID NO: 176973 - DNA, 377 bp, Homo Sapiens
gcgaccgcgcacgaaacgggtccactggcggtcacggcacccagctgggcgaggcgtaccagtgccgtggccgccgtcagcgccaccagcagccaccgcgcccaggctccgagccgcagcacgcgccagccccttccctgtgccaagtacgggcctcggcacggcgaactgcacggcgaacagcagcaggcacaccgaggtgagcagaggcagcgagaggcacgcgctgaggcgcagcacgcaacaggggcggacgctgagggcggccagggcgcggcggccggcgtaacatcgaggcgcacgtgacggcggcgtgcagcccacggccgggctgtagcgcgtgagtccaggaacacagcgcggctcctgttgtccag

SEQ ID NO: 176974 - DNA, 459 bp, Homo Sapiens
  misc_feature (323)..(410): n is a, c, g, or t
gacggacctaagcaggaagtcatccaggacaggagtggctcagtgttggggatggacgctgtcgcccagccatgctccaccagggccaccaatgtgtagttggctggtggtcttcgggcatgtgagacctgctcttcactgtttccaccccacttggtggcctccaggatggtagtggcaccctcagagccccatcttcagcatgttctgaagcctcagagtggaaattcctgctaaggctctgtgtggacgcctttctcccgtgatctaaaggggacactgtactcaagcttttgacctcatgccttgtgtagtaaaaaagnnnnnnnnnnnnnnnnnnnnnnnnnnnnnnnnnnnnnnnnnnnnnnnnnnnnnnnnnnnnnnnnnnnnnnnnnnnnnnnnnnnnnnnnccatgtagaccagatatttgaaagggcagacgatggctagaggtgtaat

SEQ ID NO: 176975 - DNA, 486 bp, Homo Sapiens
  misc_feature (30)..(30): n is a, c, g, or t
  misc_feature (42)..(42): n is a, c, g, or t
  misc_feature (168)..(229): n is a, c, g, or t
  misc_feature (396)..(396): n is a, c, g, or t
cccagaaggtagggcaccctcaaaccccancttcagcatgtnctgaaaccctcaaaatggaaaaccctgctaaggctctgtgtggacgcctttctcccgtgatctaaaggggacactgtactcaagcttttgacctcatgccttgtgtagtaaaaaaggatttggggnnnnnnnnnnnnnnnnnnnnnnnnnnnnnnnnnnnnnnnnnnnnnnnnnnnnnnnnnnnnnnctttcctctttgtctttccatgtagaccagatatttgaaagggcagacgatggctagaggtgtaatgtgcagacttgtttatacggtattttgggaaacttaccttggatgggaaatcgaatcgtggattcaccaggccggtgctggcacactcaccctcgcccttntcctccggttcagtacctattgtttctcctttcaaatatgtgattgtactagctctttccatatgaaagaattctccttatttaaataaa

SEQ ID NO: 176976 - DNA, 486 bp, Homo Sapiens
  misc_feature (30)..(30): n is a, c, g, or t
  misc_feature (42)..(42): n is a, c, g, or t
  misc_feature (168)..(229): n is a, c, g, or t
  misc_feature (395)..(395): n is a, c, g, or t
  misc_feature (404)..(404): n is a, c, g, or t
cccagaaggtagggcaccctcaaaccccancttcagcatgtnctgaaaccctcaaaatggaaaaccctgctaaggctctgtgtggacgcctttctcccgtgatctaaaggggacactgtactcaagcttttgacctcatgccttgtgtagtaaaaaaggatttggggnnnnnnnnnnnnnnnnnnnnnnnnnnnnnnnnnnnnnnnnnnnnnnnnnnnnnnnnnnnnnnctttcctctttgtctttccatgtagaccagatatttgaaagggcagacgatggctagaggtgtaatgtgcagcttgtttatacggtattttgggaaacttaccttggatgggaaatcgaatcgtggattcaccaggccggtgctggcacactcaccctcgcccttntcctccggntcagtacctattgtttctcctttcaaatatgtgattgtactagctctttccatatgaaagaattctccttatttaaataaaa

SEQ ID NO: 176977 - DNA, 481 bp, Homo Sapiens
  misc_feature (372)..(372): n is a, c, g, or t
  misc_feature (416)..(416): n is a, c, g, or t
  misc_feature (447)..(447): n is a, c, g, or t
  misc_feature (456)..(456): n is a, c, g, or t
  misc_feature (464)..(464): n is a, c, g, or t
aactctcatttgaaactgaccaacagacagggtagatgagctctctcaagattctcagctttatgttttttgttccctctcaatacctttatgcaaatgaaactgaaaccaccataagaaatccttgttaaggggaaaagaggcaaaaagacctctaaatatagtcaaggttaaccctagttctcaatttcctaatctgtgacaaaagaggggcaggaatctctaccctaaattgatgttgaggtatcgatgctaaagagtcatttcctgttactatcgttgggaaggaatgagacagctgcagagagcttcaccagaacctcaatgatggagaggtagtcattgaaaaaataagacaacttgacggaaggnaaacaaaatactgaatggggcagatgaggaaacagaattattcntcagagtcttggctaccaaacagggggaaancacaaaccnaggtgacncacgggccttggtaggt

SEQ ID NO: 176978 - DNA, 839 bp, Homo Sapiens
ggggccgaaacttccgccgccgcgtccgccgcctccggaactaaacggggtgaggtcacattcggttatctctaacgttggaaaacgatggagctaacacccattatggagattaaccacttttcatcaggtttttaacttaagtcgtgaggaatacaacggtgaacacaagattcattttattttcatcaccatgggacgtatcctgttgttgagttctctgggtcagacctctgaagacttctcagatggatcctagtctctgggcttgccctgaaaattactcgctgctcagggagagagttgaaatggttggcatcctcccactctgttgctccggctgtgtcccctcgctctgttgttccagctatgtcccctctgttgctccaactgcagctcattctgttagagttcctcattcagctggtcactgtggccagagggtgttggcctgctcccttcctcaagtattcttaaagccatggatttttgtggagcatttttcttcctggctctcccttgagttattttcctttcttcgccatcttgggactcttctttgtgcttgcggacatcggttgagaagaagacttccttctttccttgtctccttggtggttgactcgtgggttgctccttcaaaactggactggaagctcttgggttttctccttcatcttcaacaagtcagtctctctcaagggtctcacgttgcaacattcttaccagagggcattgggccctggagttccagttccaggggtctggaaaatcaacctcagctcaacaatctcatgccgggttgggcaatttgtcagcagaaaaccgatgccctgccc

SEQ ID NO: 176979 - DNA, 438 bp, Homo Sapiens
  misc_feature (16)..(16): n is a, c, g, or t
  misc_feature (24)..(24): n is a, c, g, or t
  misc_feature (67)..(67): n is a, c, g, or t
cctgctccccttcctnaaagtaanccttaaaacccatggaatttttgtggagcatttttcctccccnggctctcccttgagttattttcctttcttcgcccatcttgggactcttctttgtgcttgcggacatcggttgagagaaggacttcttcttccttgtccccttggtgttggctcgtggttgctcttcaacaactggactggaggctcttggttttctcttcatcttcaacaagtcagtctctctcaagggtctcacgttgcagcattcttaccagagccattgggcctggagttccagttccagtgtctggagagtccacctcagctcagcaatctcatgccggttggcaattgtcagcagaagccgatgcctgcccatcagttctttactctgaggtgttagagtggaataaaaatataaataccggaaag

SEQ ID NO: 176980 - DNA, 390 bp, Homo Sapiens
  misc_feature (54)..(54): n is a, c, g, or t
  misc_feature (75)..(75): n is a, c, g, or t
  misc_feature (89)..(89): n is a, c, g, or t
  misc_feature (105)..(105): n is a, c, g, or t
  misc_feature (121)..(121): n is a, c, g, or t
ctgggaaacctgttaagtaaaacccaggttggccaaaatgccaatttgattttnaaccccgtaggtccccaactnacccttttgccagnagctaagtaaggcagnagagctgacttgggantccctggctcggccccaacagggagcccccttcccaccatccctcggcaagctcaccacctcatccttctgccaaggcagctttcctttcttttgtgtgttttctgtgttcttagcctccaccctcctcctgccacccgtgtggactaggaccaggtcctgaccccagtcagaaaatgatgatatgtacagtggcacaccttaaccagtcactaattttcactgttgtgaaagtgatttgatttagaattaaacaaatggttttacatt

SEQ ID NO: 176981 - DNA, 412 bp, Homo Sapiens
tgctatttatgacaaaatggatgaacccggagggtattatgctaagtgaaacaaaccagacacagaaagaaaaacactgcgtaatctcatatgtggaagctaaaaaagtcaaacacacagggggatggaggtggaagaaatgaggatgttggtcaaagctacaaagttgcagctacataagatgtataaatctagagatctcatgtacagcataagttctatagttaataatgctgtattgaatactggaaattttctaagagtagatttcaggtgctcttactgcaaaagagggtaattatgtgaggaaatgcatatttaatttgcatgactgtagcaatcatttcactatgtaatggatgtcaaaacatcatttgtacaccttaaatatatacaataaaagattttcccc

SEQ ID NO: 176982 - DNA, 439 bp, Homo Sapiens
gcgctcaggcaaggatgactacatcaatgccagctgcgtggaggggctctccccatactgccccccgctagtggcaacccaggccccactacctggcacagctgctgacttctggctcatggtccatgagcagaaagtgccagtcatcgtcatgctggtttctgaggctgagatggagaagcaaaaagtggcacgctacttccccaccgagaggggccagcccatggtgcacggtgccctgagcctggcattgagcacgtccgcagcaccgaaacccatgtggagcgcgtgctgagcctgcagttccgagaccagagcctcaagcgctctcttggcacctgcacttccccacttggcctgagttaggcctgcccgacagccccagcaacttcggcgcttcatccaggagggcacgcacattacctgcatcagcggccgc

SEQ ID NO: 176983 - DNA, 453 bp, Homo Sapiens
  misc_feature (313)..(313): n is a, c, g, or t
  misc_feature (362)..(362): n is a, c, g, or t
  misc_feature (395)..(395): n is a, c, g, or t
  misc_feature (404)..(404): n is a, c, g, or t
  misc_feature (409)..(409): n is a, c, g, or t
  misc_feature (426)..(426): n is a, c, g, or t
tgcaaagttgctggggctgtcgggcaggcctaactcaggccaagtggggaagtgcaggtgcaaagagagcgcttgaggctctggtctcggaactgcaggctcagcacgcgctccacatgggtttcggtgctgcggacgctgctcaatgccaggctcagggcaccgtgcaccatgggctggcccctctcggtggggaagtagcgtgccactttttgcttctccatctcagcctcagaaaccagcatgacaatgactgacactttctgctcatgggaccatgagcccagaagtcagcagctgtgccagggcagtnggggcctggggtttgccacttagccgggggggcagtattgggggagaanccccttccacgcagcttggcatttatgtaagtnaatcctttnccttnaagcgaaaaacccacanggttactttttcataaggggattgaca

SEQ ID NO: 176984 - DNA, 369 bp, Homo Sapiens
  misc_feature (353)..(353): n is a, c, g, or t
cctaagaggctgccctcctgtgctcagccctgaggacagatgcctccttcctcttttccttcccaaagcaagcaagaggccgtggctgctgtgggaaatggtactgtacagctggctctacttccccatggccctgagcgagtggagtctgccacccaggatccccaaggcacttgagggggaaggattctgctggcctctgcgagtggtttcttgtgcactggaccaagtgcgggtccggcagcttctgccccctgcagaaccggagagccagctaaggggtggggctgcgggggttccgtgtccacccccatacatttatttctgtaaataatgtgcactgaataaaatanaaaaccggcaaaaaaa

SEQ ID NO: 176985 - DNA, 251 bp, Homo Sapiens
cgccccctcccgaggccatcagcgggttgcccgccgctgactgtgccaggatgcacagaccgaccgacagacctcagtgcccaccacgggctgtggcggactcccgccccctgcgccctaatggtgctaaccccctctcactacccagcagcaggctggggacctcctccccctcaaaaaaggtatttttttattctaacagtttgtgtaacatttattatgattttacataaatgagcatctaccattcc

SEQ ID NO: 176986 - DNA, 985 bp, Homo Sapiens
ggaaaaacaataataactttagtataagcctctcagctgacaatgacccaagtactgttcagcggcccaggcacctgaggaggcaatgacagtctacgaggacatcttctgcagcaacagccatcaggagaccagcagcagcacagcactcagggctcggtgtccacctccctgcagatcactttctccctcactggaatcaaccgcagcacttggagtctactcatggagtagaaacttctttatggggtctggcagaggcagcgaaggaatcagatgaagccggtgtttgccaagagctcttctcacagccacacggcacagacacagcaaggttctgggaacacttctggcctctttaaagacctgcaaggcctcagggtccacttttcttcttcctctcgactctgggcccagcgattcccacttcactagattcaggttggctccaaattctacccagcaggctcacgaaggctgcctcacagccgtggcgcagaacagcatccatgacgcacccaggggagcccctgtagaatccctgtgtgttgacaggaccattgcagttgaagtcagggttcgcgccagccaggaggagcagccggaagcactggaggttgtggtaggctgcgctgatgtacaaggggcagaccaccaaggaggtgagccgccgggagaatcgaggctggacatcaggagtcaggtggtggttgacgtcaacatcagccccgtacctgatgagggccttcaggatgtctgcccggcccacgcgagaggcgtggtagacaggggtgctgcgatggtgccggcttccgttggggtccgcgccagcttcgagaaggatctgggtactctctaggtgcccgttcaccacagccacatacagggccgtctgtccttttacgtccaccagatccacctcggcccccttccggatgaggaagtccacacagctcccatggcctgcagtggccgcgattcgccc

SEQ ID NO: 176987 - DNA, 392 bp, Homo Sapiens
  misc_feature (192)..(192): n is a, c, g, or t
  misc_feature (279)..(279): n is a, c, g, or t
  misc_feature (308)..(308): n is a, c, g, or t
tcactctcaaatgagattaaaaacaaggaagcagagaatggtcagagaatgggattcagattgggaacttgtggggatgagagtgacccaggttgaactgggaagtggaaaaaggagtttaagtcactggcacctagaagcctgcccacgattcctaggaaggctggcagacaccctggaaccctggggagnctactggcaaactctccctggattgggccctgatttttttggtgggaaaggctgcccctgggaatcaactttccttctgtgtgtggnctcaggagttcttctgacagagatggcgnctatctttcctcctcctgtgatgtcctgctcccaaccatttgtactcttcattacaaaagaaataaaaatattaacgttcaaaa

SEQ ID NO: 176988 - DNA, 829 bp, Homo Sapiens; identical to SEQ ID NO: 5615
  misc_feature (578)..(578): n is a, c, g, or t
  misc_feature (758)..(758): n is a, c, g, or t

SEQ ID NO: 176989 - DNA, 484 bp, Homo Sapiens
  misc_feature (469)..(469): n is a, c, g, or t
ggtgactttcacaaaatttaaatcataaacaggcaaaccaaacagcacactgtagctatagttgttatgtgattgttttttaattgctgtaggatcctggttctttcagcaggtgaaaaataaaacgcagttcaaatttcatggttttaattttcaactcagaagcactcaaaaatgcaaaatgtgataatgggcacttgtttaaaagaattagtgtatccagccttcactccagctggttaaaaatgttgcacttatcagcaaccctaccactttcatctgctgaaaggacaaatgtgcttggttttactattatgtaatcacaacttactttctgcttgtagttgcttaaaattatgtattttgtcttgggctgcaatttgttttatgcttattttattattactgcagtagttgactttgctgtatggaaaaataaagtgaaattgccctaataaaacttcaaaancttaagtaaaaaaaa

SEQ ID NO: 176990 - DNA, 672 bp, Homo Sapiens
tccatgtgatgtttctggcccaggtcccgaaagatgcattgactttttgtcgtggcagccagtggtgactggattgacctactaggtacccagtggcagtctcaggttaagaaggaaatgcagcctcagtaacttccttttcaaagcagtggaggagcacacggcacctttccccagagccccagcatcccttgctcacacctgcagtagtggtgctgtcccaggtggcttccagatgaacccaactgtggagatgatgcagttggcccaacctcactgacggtggaaaaatgtttgccagggtccagaaactttttttggtttatttctcatacagtgtattggcaactttggcacaccagaatttataaactccaccagtcctactttagtgagataaaaagcacactcttaatcttcttccttgttgctttcaagtagttagagttgagctgttaaggacagaataaaatcatagttgaggacagcaggttttagttgaattgaaaatttgactgctctgccccctagaatgtgtgtattttaagcatatgtagctaatctcttgtgttgttaaactataactgtttcatatttttcttttgacaaagtagccaaagacaatcagcagaaagcattttctgcacaataaatgcaatatgcaaaatgtga

SEQ ID NO: 176991 - DNA, 289 bp, Homo Sapiens
attggtctctttgtgtgataatgacctacacatggacagggtccaaaccatctggaagatgtctgattccaggctgaaaagcagttctcaacaaaactggtcttctgcagccaccacaaagcaccaggaaaagggcacctccgcggccatccccagccaggccagcacagcgctccgtgcccgctgaaccgtcccaggcagtcctctgatgacccaaaccaccaccacctttgggcccagagcaggacaaatgaaatttcaacaggggcctgcctgtgaccgaaaatta

SEQ ID NO: 176992 - DNA, 514 bp, Homo Sapiens
gtcttaccgtggacctccatttccagtctgaaggctgtggccagggaacaccttgaactccttaagcatatgcacactgtgggggaaaaggtgattgtagattttgctgggtccagcaaactccgcttccgattgggctaccacgccattccgagtatgagccatgtacatcttcatgtgatcagccaggattttgattctccttgccttaaaaacaaaaaacattggaattctttcaatacagaatacttcctagaatcacaagctgtgatcgagatggtacaagaggctggtagagtaactgtccgagatgggatgcctgagctcttgaagctgccccttcgttgtcatgagtgccagcagctgctgccttccattcctcagctgaaagaacatctcaggaagcactggacacagtgattctgcagagcctgagctgctgctgtggtgtggcccactggagcaaactgctggcacctattctgggttgcttggcaaaaaatcagtctggcac

SEQ ID NO: 176993 - DNA, 488 bp, Homo Sapiens
  misc_feature (470)..(470): n is a, c, g, or t
cttgactcttgatggacagtcaaggcaaagtttacttatgaaatgtaaagtatggagtgttttaaaaaattcaaattgagtttattcactgttggaggaattgaattctattgcctccctcatttccattatgttcattgttacaattgtgctgctctgttctcattgtgatgcttagttctcgtgtagaactgagtgctacattgtgattagaaactggagttgtgcttgagtcagtcctggaaaacaggacccatttttaagaagaacggaacataccactttggcattctggctgaccctaatttctgcagagttccttggtgttaaaatcatttgaggtcatagttgctgcttatggtttatatacacaccatctgctgctctaagttcacatcctctcaaaagcatgcaagtgcttgaaatttaaatatttcccagatctaaaacaacttgtgactacctaaganatgcttgaaccaaataag

SEQ ID NO: 176994 - DNA, 373 bp, Homo Sapiens
ttaatttttgtctgatcttacgatgccctgccttttactagctactttagaaatagaaaatgtgaagagtgactatttacatgtatactcctttggctgctagaacttatctgtagtcctttattatttacactgaattccaatttcatttctgcttccgctaagtaagagcacctcattcctgtgttttctctactattgagctgtagacgaactgtttctctaattataaagcaaactgtttgttatattcagggaaactaccccaatgttatgttgtcatttaatgggaaaggctgggatcatatgtatttctatgttctgtaaagtatttgacttactagttctcaataaaattttattaggactataa

SEQ ID NO: 176995 - DNA, 433 bp, Homo Sapiens
ccaactcagcagctctatttacataacagcgtcgcccacaccccggaagattttttcctgtaaaatggcttgtatttccacaggtacaatagtgaagaaataaacttttcaatttgacatgaaatataaaacaacaattttacaaacatattcataaaatttaactgctaataacacaatacatggtaaatgtgaccatccccttaacttctagactatttaatacagagaagcaatctgtcatctcagctaaaaagaaacatctttcctttcattgagtttatttttgtttgtttagaaactgtcaagcaaaactggaaaatacttattttccttatcttcctctagggattcttcatgagggcaaagacttatttgaaaggatgtaagttatactaaaaagaaaatactgaaccttttttttgtgttactg

SEQ ID NO: 176996 - DNA, 942 bp, Homo Sapiens
  misc_feature (597)..(628): n is a, c, g, or t
ttaaagttgttctattttattattattgttgttaatcttttactgtctaatttagaaattaaacttcatcataggcatgtatgtatcataaaaaacacagtatatataggattcagtactatctgcagtttaaggcattcactgggggtcttggaacgtatcctgcagataagggtgggctactgcacaaacatctggacgttcattcatgtgccactaaggatcatcacacagtgaaaagcataccacactctggaaggctctgatcaactttttctgcttctccaagacaatttgaagcatcaacttgttctttcaaaaaatcaacacacattttcttcacaggttcaatctgatattggtttgctgcatccagcaaagactgaacattgttgctattcacggaaattctagcagtataagcaaattccaccagttgttcaataatatcaggttcagcatctttgagttctacttcaaaggactttgattcaagcatgttagttgtgaacattaagttaaaaaaatgactggctgcagcaagaacaacacgatgagcaggtatctttctttcctggaccatgaggatcacgtcannnnnnnnnnnnnnnnnnnnnnnnnnnnnnnngacgcccatgaaacccgccaacaatttagcttcttcccgagcagcaagtttcttctcggtcttcttcttgctgctcttctccaccccagaggctgccatcctccctcagctcggttcacgcccggggctcgccgggccgggcgaggggtcgcactctctgggcacactggggattctatcgaccaaacacggcgatcggcagtgcagctgcagcgcccagctctggaacgcgcggcaggcggcggtggctcggccactgccgaaagacaaggccgggcggcccccttagaaacgctcagggagcgacgcgcccc

SEQ ID NO: 176997 - DNA, 588 bp, Homo Sapiens
gcgcccgctcgcaaggggtgccgtggcgggcaagtcgtcctgcatgaagcggggcgagaagcggttgaagttgtgggggtgcggaggctggttgaactgcgggtgctgctggtggggcgggaagggcccccggaagtgtgggggccgctgcatgcgacagggtggctcgcgctggcccccgccccaggggcggtgcctcgtgctggctgttccaggggccctcgaactggctgttccaggcggcgtcgggctggttgttccagggcgcgtcgctgagaccgttccagccggggtcaccgcgctgctcgccccacatgccctcatggctgttgttccagggggggcagtggggtgggccgccctggtggtgcgagtaggctggctgctctggcggctgctgctggccccaaggagccacggggtgaggctggtcaaaccaagggggcttgtttggtgggatctggtcgtgtggaccggggcccgggggcggacagatgcaggatcctggaaccctcctggagcttcgtactctcaacagccacgcatctggatgggaggcttgctgtcatcaggctcggtggtgggcgg

SEQ ID NO: 176998 - DNA, 918 bp, Homo Sapiens
gcaaagtgagcagccccacagtgaacactactctgagaaacctgggagctctgtataggcgccagggaaagctggaggctgctgagaccctggaggaatgtgccctgcggtcccggagacagggcactgaccctatcagccagacgaaggtggcagagctgcttggggagagtgatggtagaaggacctcccaggagggccctgggagacagtgtgaaattcgagggaggtgaagatgcttctgtggctgtggagtggtccggggatggcagtgggaccctgcagaggagtggctctctttggcaagatccgggatgtgctccgcagaagcagtgaactcttggtgaggaagctccaggggactgagcctcggccctccagcagcaacatgaagcgagcagcctccttgaactatctgaaccaacctagtgcagcacccctccaggtctcccggggcctcagtgccagcaccatggacctctcttcaagcagctgacattcaacccggcccccaggtctgctgggtccccccacccccacagccctcacagcattccccattgctcctggctcttccccacccctaggtgggacagtgaaggggagcagtttaaccagaagattgctgctgcccttagggtctcagctccctcctcaggaatccctcttaggaaggaccctcaggacaccctctctgcaccctgtggtcctctagagtagctagctctgaggccccaaggtgggtacaaagcaggtatggccctcagagatgcagcctgctgctggcttttcagtcagagggttgggggctggccagccaagctgccttgccctggccgctcttactccctccctctgctgtctcacttcaggtccatgtatttcacttttcttaaataaaagaatcaggtaaccttt

SEQ ID NO: 176999 - DNA, 352 bp, Homo Sapiens
  misc_feature (260)..(260): n is a, c, g, or t
gcggggcctgggcacaggggcagccgcagggaggtagggatggcaaggcgtgaagccaccctggaaggaactggaccaaggtcttcagaggtgcgacagggtctggaatctgaccttactctagcaggagtttttgtagactctccctgatagtttagtttttgataaagcatgctggtaaaaccactaccctcagagagagccaaaaatacagaagaggcggagagcgcccctccaaccaggtctgttattcccctggnactccgtgacatctgtggaattttttagctctttaaaatctgtaatttgttgtcctattttttcattctaaataaaacttcagtttgcacct

SEQ ID NO: 177000 - DNA, 539 bp, Homo Sapiens
caaaagccaaaagcaatggaggtcaagctgcccggtacatgtttctttacgcctgacctcctgatggactcactagataaaatgctccttcttgtagccagcaagcaaatgagtacttttttatggcttacatctgtgcctggtcggccatcaagtctgggtgccactgtttgagatttggggctgtttcctgcaactgatctctgctacagataaggcttccctcctgaggccaaagccctggttaacgttaagagctctatgatgatgcaaacttcagaggcgatcacctaacataacaaaaacctccccagaaccagaacctgttttttcaccaaaacccttccgctgcttgaataagaatgtcttttcctttcctacaatttgtgccatggaaatgtgaataatttttcttagcggggtaaatcatagtggttacttgaatgccaaaaagatgctggaggggcaggtggatatgttgaaaagatatagaaagctttgtaaattgcttttgaataaatatgtgactagttccctaa

SEQ ID NO: 177001 - DNA, 1417 bp, Homo Sapiens; identical to SEQ ID NO: 2847
  misc_feature (716)..(820): n is a, c, g, or t
  misc_feature (972)..(981): n is a, c, g, or t

SEQ ID NO: 177002 - DNA, 528 bp, Homo Sapiens
aacaaaagaaaacattttattgcaatttgattaacaaggagacaggagcccagctcaaatctgtcccattgtacttattttaaagagttattttagtagaaaaggtgtagggagtggattctgtgattagtaggtgattgacagaaagaaaaggaagggctggaaaatcctcgggcatgggcagttacctcttcatgcctcctcatgggtcccatgtgcaaactcagagggagttagtatgaaacatgcggtacaaatttaggctgtgtgtcagcaagctcattctgcacaaactctggttttatctctttatcttgacacctgaagggtgtgcataatcccatcactccccaaaatatgccctacatgcagaatttaaattcatcctgcctccttgactctgagggccacttcctaccacagctagggtcccttttctgtcagcattctttctggagcttgcttatatcaaacctaagaaaagcaactccaggactccagacaaaacagatctccacccatctggcg

SEQ ID NO: 177003 - DNA, 760 bp, Homo Sapiens
  misc_feature (306)..(351): n is a, c, g, or t
gtcccaacttcattcagtccggcctggcctctgtccccgggtgaccgcggaatgggggggcgggagctagcgagcaggccctcaagcgcgtctggccgcctcctttgtcttgatgcccacgtctggttaggacccctgctgtccattttattaaaggagctgtagaaagcggcctggggcccagcgacctgcccagggcggacgaggaggcgcgactggcccgatgccgcaggctctctgcccagtgtgctcaggtgggagggcggggacatgaatcgagccacagagtgccctgggcacggactnnnnnnnnnnnnnnnnnnnnnnnnnnnnnnnnnnnnnnnnnnnnnnggccaccgaagcccgtgccactcgccagctcctgcgagacgagcctttcgagcgcagctcaggcatttggttcagggtcctactgccggagtcgtctgaggcctccatccgtctgtcgtcacgaaaaaggttttggggggactaataagcacttcctgaatgcacatttgctccacgcccctgctgtagggagagggtctgcagacacttcaacaaatagaatcctaggaccttacctgtgagtacaagagctggaatcttcccaccaacttcttaaaattcaatcctatacttggtccatttagcttagactggaaatttcccaggcagtttgttttgcaatcttttgcatgattttagctctgtatagtttagtgaatgtttatggtactgaataaaacagtctaaa

SEQ ID NO: 177004 - DNA, 636 bp, Homo Sapiens
  misc_feature (45)..(45): n is a, c, g, or t
  misc_feature (179)..(179): n is a, c, g, or t
  misc_feature (276)..(276): n is a, c, g, or t
  misc_feature (621)..(621): n is a, c, g, or t
aatgaactgctttctctggactcgagtttctataaaaccctcacntccatcaagcgctatgatggggacatcactgacctgggcctgacgctgtcttacgacgaggacgtcatgggtcagcttgtttgccatgaactgattcctggagggaagaccattcctgttacaaatgaaaatanaattagctacatccatctgatggcacattttcgaatgcacactcaaataaaaaacaaaacagctgccctcaattagcggatcccgttcccattatcnaaacccgagtggatccgaatgttctcaactcctgaactgcagcgtctcatctctggcgacaatgctgagattgatctggaagatttaaagaagcacacagtctactacggtggtttccatggaagtcacagagtcatcatctggctctgggatattctggcctccgacttcacaccggatgagagagctatgtttctgaagttcgtgaccagctgctccagacccccgctcctgggattcgcctacctcaagcctccattctccatccgctgcgtggaggtgtcggacgatcaggacaccggggacactctgggcagcgtcctccggggcttcttcatccaattncaagcgggagccagg

SEQ ID NO: 177005 - DNA, 1086 bp, Homo Sapiens
  misc_feature (81)..(148): n is a, c, g, or t
  misc_feature (1067)..(1067): n is a, c, g, or t
ttctggctgtcaggagcaaagcctgaagacttggagctgcaggactggaagaacagtggagccccgtgggtctcacccttnnnnnnnnnnnnnnnnnnnnnnnnnnnnnnnnnnnnnnnnnnnnnnnnnnnnnnnnnnnnnnnnnnnntagagcgcagagttcctgattccaagtcacctgtgctttctgggaccaaagaatgggcacctgctggagtccgggcagagctttctcagttgtattgctactccagacctcaccataggttggggtcccagtaggaaggctcagggtctgtgccagccctgtcggtgctgctcagaccttcatagcctctcttgtcattctttgttgccccttttctgtcaccagccaaccacatagccttgggaccagcctctctgggggaccagaagtagtgagagaaggaaggggataggcagctttgacaggtgctgctttcaattcctctgcaactcctcccccttttatttccccaatttaagcaaagattctgccaactgtggaaacttcagtccctcaggctggcagccatgccagtacctgcctgggggtggggggtgcctggcagccatgaagcaggctgaaaggcagaggggctccaggtcctgtttccagctcccctcactgcacatggtgaagctcgctccctccctccctcccttcccgcttttcccagagctaatacacaggtgctattattcagaaaaaaactggtcagctctagccaacagggaggtttcttttcttctgccctaactattgtgtagcctcttatgctgaaatcggcttctgctggcttctcgggctttcagagccctgaaacaaagagaaacaggatctgtccctacccacccagcaaatggttgtaataagttgccaaagccctcataaagccctcgggctgaaggagaaagtgaaatagccatggggttctgccctctggtgcccttaggctgggccgcttctccctctgcccttctttccctgggaactccagggtgggggggaactgaagccctgttagggggaacaccatggccgntctttgcctgttgggcccc

SEQ ID NO: 177006 - DNA, 888 bp, Homo Sapiens; identical to SEQ ID NO: 89205
  misc_feature (777)..(782): n is a, c, g, or t
  misc_feature (797)..(798): n is a, c, g, or t

SEQ ID NO: 177007 - DNA, 476 bp, Homo Sapiens
  misc_feature (101)..(101): n is a, c, g, or t
ttctccccaccctcagctcctcactgttctcagagggatgtgagggaactgaactctggtgccgtgctagggggtaggggcctctcccctcactgctgganctggagctgggctcctgtagacctgaggggtccctctctctagggtctcctgtagggcttatgactgtgaatccttgatgtcatgattttatgtgacgattcctaggagtccctgcccctagagtaggagcagggctggaccccaagcccctccctcttccatggagagaagagtgatctggcttctcctcggacctctgtgaatatttattctatttatggttcccgggaagttgtttggtgaaggaagcccctccctgggcattttctgcctatgctggaatagctccctcttctggtcctggctcagggggctgggattttgatatattttctaataaaggactttgtctcgcaaacaaaaagacacagagg

SEQ ID NO: 177008 - DNA, 435 bp, Homo Sapiens
cagctgtgcctgtgcgagaggtgctgtggtctgggcagcccctggaaaagcacctttgctgcctgtcattgttgcctgaagaaggctggagttgctctgagagcagtttgggtttggagtattatatttggcttctatttttattattttggatcaccattctccctatcccttcttgcctccctcccttctaaacatgtgtaataactatacagagactgctacaaaattgtatatagtttttggatcaaatagcatgaggggagaggaaaccattaaaaattggggctcctactctcctttgctttgtaaattcaaaagttgggggtgggtaagagggatagttaaaatgtttacaaaactttaggctccctcggaacttttgccagtgtggaggaaaataaaaaagaacttaaataaaatctgattgtattc

SEQ ID NO: 177009 - DNA, 1251 bp, Homo Sapiens
  misc_feature (590)..(590): n is a, c, g, or t
  misc_feature (612)..(612): n is a, c, g, or t
  misc_feature (640)..(744): n is a, c, g, or t
ggcatccatccaacctttaacttgaagagcctttcctgcagcctggaggtgtccaaggattcccgtacagtgactgtgtctcaccgcccacaaccctatcgctggagctgtgagaggttttctaccagccaggtcttatgttcccaggccctgtcttctggaaagcattactgggaagtggacactaggaattgcagccactgggcagttggggtggcttcctgggagatgagccgcgaccaggtcctgggaaggactatggactcttgttgtgtggaatggaaggggactagccagctctctgcatggcacatggtcaaggaaactgtccttggctcagacagacctggggtggtgggcatctggctgaaccttgaggagggaaagcttgccttctattcagtggacaatcaggagaagcttctgtatgagtgtaccatctctgcctcctctcctttgtaccctgccttctggctgtatggcttacatcctggaaattacctgataataaagcaagtaaaggtgtaaggtttcctaagggattacaacacagtgggtttcctgggtctctctccctgtcatccaatcanggggtagtaacttggacttaangaataccactttttagaaaaattacgannnnnnnnnnnnnnnnnnnnnnnnnnnnnnnnnnnnnnnnnnnnnnnnnnnnnnnnnnnnnnnnnnnnnnnnnnnnnnnnnnnnnnnnnnnnnnnnnnnnnnnnnaccacacctggccaagaataccacttttgaagttaatccttttgtgtgatacaggatgaacttgggatgtttgaaccctggacattccaaataaagaataggcccctgcctggctcctgggagataacctctaagccattagaatatcttgcctgataagagtgtttttgtttacctgtgggccttgggccatgcagtatcagcttgaccttgcaaggtcaagctgaggagactaagttagccatgtgggcagtgaagcatgccaatgtgatcaatccctagtaaaagccctggacacctaggcatgggtgagctactctggttggtaatactctgtgcacacatcattgtagccacacatcattgctgggagaattaagcattatcctgaagactctgccaggagaggataatcggaagttctcttggaccttaccttatgtgcctttcttcattgctgattttaatctgtatcctttcactgtaataaactgtaactatgagtgc

SEQ ID NO: 177010 - DNA, 930 bp, Homo Sapiens
  misc_feature (299)..(334): n is a, c, g, or t
gaggctggtacggtcggaattcccgggatatcgtcgaccacgcgtcgggactttccaattttgaaattatggataaagtcctaaattttctatagtggcttcttttctgtctgcatattttgttaaaattgtggatctaaaagccatatcctgtctttggtggtggcctggtaggaatggcttgtcctagttcttcaaaggtaagattgaccaaagcaagttctcattggtggtctgtgtttacatcttccgtgtcaagatattttaaagcatgaaaataaagccattcttgccctttnnnnnnnnnnnnnnnnnnnnnnnnnnnnnnnnnnnngggggggccggctcctaaaagtttctcccctgggggggcccaagttttaggggttacccgagtttctgttgttgtaccaagaggtgggctccctatatatagggcgagcgctcggatattataataagcgctataggagcacgggcgccgcgctcggttttaaacaaagcggctcggtagactgtgggagaaacacctgtggcgatagcgcttggggggagactctttttggtgagaagagagacaccttttaacttctcgttggggggtgagtgtggacacaatatattttgtggggccacacaaagatttattacatctcatagacgagagaagtatttttataagacggctcatctataagggaggacaaaatttatctagaccaattcttctataaaagggtgtgtactatatacagggtgggtgtctttcaaacacacttagcggctgcccatatatgtgacctgcggcgcgtgctcttgtggaaggaaagatctttgtgggtcatatagcggggagtatatgtgagaactctctagtgacaaacaactttttttattacaccgcggggaagctctatggcgtgcaataac

SEQ ID NO: 177011 - DNA, 745 bp, Homo Sapiens
acgtctcgggctccctctccgtcaggtctcatgtcactaagccgcctgcctggaagccgcgaacgggactgggaaaatggcagcaatgcctcctccccagcgccaagtccaacaagttcatcatccacaatgccctatcacactgctgcctggcgggcaaggtgaacgaaccgcagaagaatcgcattctgcaggaaattgagaaaagcaaggccaaccacttcctgatcctctttcgcgactcgagctgccagttccgggcgctctacacgctgtcgggggagacagaggagctgtcgcggctggcagggtatgggccccggaccgtcacgcccgccatggtggaaggcatctacaagtacaactcggaccgcaagcgcttcacccagatcgccgccaagaccatgtccatgagcgtcgatgccttcaccatccagggacacctctggcagggcaagaaacccaccactcccaagaagggcggcggcacccccaaatagccccacccgggcggtccacgggccgggccctgtgtgctgcggccgccatcccctggaggacagtcagtcggtattcctgggtcctgtctgtccccaaccgtgtctgggtggggctggagtctccaccctctgactttgagtccagtcctgctgtgggggctgagctgggaggttcagggactcagggctcagctcagtccccttgtctgtcctcccccacttcttgaataaaataatttaaagtg

SEQ ID NO: 177012 - DNA, 350 bp, Homo Sapiens
ccctgccagaggtgtccctggatggtgaaggcatcgacgctcatggacatggtcttggcggggatctgggtgaagcgcttgcgttccgagttgtacttgtagatgccttccaccatggcgggcgtgacggtccggggcccataccctgccagccgcgacagtccctctgtctcccccgacagcgtgtacagcgcccggaactggcagctcgagtcgcgaaagaggatcaggaagtggttggccttgcttttctcaatttcctccagaatgcgattttttttgcggtttcgtttcaaccttgcccgccagggaaggcagttttgataaggggcatttttgggatgaatgaa

SEQ ID NO: 177013 - DNA, 479 bp, Homo Sapiens
  misc_feature (48)..(48): n is a, c, g, or t
  misc_feature (61)..(61): n is a, c, g, or t
  misc_feature (463)..(463): n is a, c, g, or t
aaatttcctcccaaaaatacgaattcttctacggttcgttcaaccttnccacccaagacancattgtgaataagggcattgtggatgaatgaaacttgttggaacttggcgctgggttctttgtaacacccgtggaacctgtgttactcgggcactaacgctggggaggaagcattgctgccattttcccagtcccgttcgcggcttccaggcaggcggcttggggacatgagactgacggggagggagcccgagacgtgggcctcttcaccccgaggttattgtgggcctcgttggccacagtggacagtgacagggtggactgggaatagattttgctcagccgagagcctggggacagagattgcaggtcagtgcccaccagaagcccctgccctccacaacacccggtccagcaggctgtggggggaacacaggaggagtcagtcctgcccaagacccnctgccctgtgccgaat

SEQ ID NO: 177014 - DNA, 538 bp, Homo Sapiens
cctctcccatcaatatttgtattatggtgctatatattggtaatgatcctttaatattgggaagggattttaaaaatactgtgattaaactgggtttcttcctttgattttcatattttaaataaagccacagtcatttatacaaaagaaaagcatctgtccctgggcaaatcttttgaggacagaggtcaaagtaaactgccataaggtttttaccatcatttcctgtatgtatttgatatatagatcaatatctgtacaaatttaatcttttattttccttggtaactcgtgatcattgagaaagtgtttgaaactttcctcatgaagtgtatatataatggcgtgaaaaattcctttggaaaaatttatgttcctttcatttttaccaaattgcaaattttcagcatggatgtgaaaagcattaaaattataactttgtgtacaagatgaaaataattcactaaatttgcccttttttacacaaaataaaatgttaaagcaacaaaattccgcgccacccgcgttgccgccgtgt

SEQ ID NO: 177015 - DNA, 488 bp, Homo Sapiens
gtggcgggctcagtctgaatctgcccagagcaagatgctgagtggcattggaggcttcgtgctggggctcatcttcctcgggctgggccttattatccatcacaggagtcagaaagggctcctgcactgactcctgagactattttaactgggattggttatcacttttctgtaacgcctgcttgtccctgcccagaattcccagctgtctgtgtcagcctgtccccctgagatcagagtcctacagtggctgtcacgcagccaccaggtcatctcctttcatccccaccttgaggcggatggctgtgaccctacttcctgcactgacccacagcctctgcctgtgcacggccagctgcatctactcaggccccaaggggtttctgtttctattctctcctcagactgctcaagagaagcacatgaaaaccattacctgactttagagcttttttacataattaaacatgatcctgagttatccgaaa

SEQ ID NO: 177016 - DNA, 324 bp, Homo Sapiens
cacagagggagactctgtctcagaaaacaaaaggccaaaataataacacatctttgcattggagttattttttggatatagctcccccaatgtacacattgggtgttgttaactcaaacagaaagtatcagagagactcttgaatcttggtttggttcctcatcggctgtgcaaacttgagcaagttccttaacttctctgagtgcttattccctcagctgtaaaatggagcaaatagtgccttcctagatgagtgtcaggattaagggactcagtatagtccctgccgtattgagaataagcaataaatggtcattattgtta

SEQ ID NO: 177017 - DNA, 524 bp, Homo Sapiens
  misc_feature (53)..(53): n is a, c, g, or t
ggagaggcacctgcggacccccgtgctcacctttgctggcggcctgccagatngtgccggtgacttcagcgccagtcaccgcgttctaccgcggctgcatgacactggaggtcaaccggaggctgctggacctggacgaggcggcgtacaagcacagcgacatcacggcccactcctgcccccccgtggagcccgccgcagcctaggcccccacgggacgcggcaggcttctcagtctctgtccgagacagccgggaggagcctgggggctcctcaccacgtggggccatgctgagagctgggctttcctctgtgaccatcccggcctgtaacatatctgtaaatagtgagatggacttggggcctctgacgccgcgcactcagccgtgggcccgggcgcggggaggccggcgcagcgcagagcgggctcgaagaaaataattctctattatttttattaccaagcgcttctttctgactctaaaatatggaaaataaaatatttacagaaagctttgtaaaaa

SEQ ID NO: 177018 - DNA, 711 bp, Homo Sapiens
  misc_feature (22)..(22): n is a, c, g, or t
  misc_feature (145)..(145): n is a, c, g, or t
  misc_feature (148)..(148): n is a, c, g, or t
  misc_feature (189)..(189): n is a, c, g, or t
  misc_feature (209)..(209): n is a, c, g, or t
cccatttgagaaactccccggntcctggcctggcatccctctgacatcactcccagcagaagaaagggaaggaacacgcctgcaatacccccgtggtcacaaggtcccccgtctgaactgcccttcactcccaccctttcagagnccntatgtttgttttgtgtatattatccaaggggttttaggtcncttagtcggaagaatagggnaaagtatgtctactccagcttaatggaagtggaaatctcctgagaacctttttttgatacaaaatatgtacttgtgcatattttgtatcaaaatatataatgtacatgtcccttttgtacatgtatataaattgtatataaatatttagggttataaaaataaccaaagacaccaaaaactgccacaggtggatttgagaagatgtggaaatgcctcactgctaagacatgctcattcttgacaggctgggaaccctgaatgctgtagtgtcaccactgccctgtcctgtacctacctatcttttcactcatttcctccaagctcaggttttcagtttggggtatgtgccacctaacagtgagctgtggaactgcagcacaatcatcaaattcaaaaaaggcaaggacatcttgctcagtttttaagatacgccatagatggagtaaaccaaaacctttgattccagatccttaaccctgattaaaaacaacacaacccttc

SEQ ID NO: 177019 - DNA, 524 bp, Homo Sapiens
  misc_feature (228)..(236): n is a, c, g, or t
aatctagaaagtatccttaaatttttctgtcaccggtgtcaccctaggctgcttttgacctgactttagacagctcactggttttaagtcacatttcatcaacccttagccataataatcaggatcctctggttaagtggaatgtctaaccaaaacaaaacaaaaactgatttctttcatactcttttaaatgttcattctgcagacatactgtagattatatttgtnnnnnnnnntcaatttttggtggttacccccacttcccccaaaagaatcacagagaaaggaaagaggaataggtaaagttttaaacttcgtctcaggtaaatgggaaacgagcttgatttttcagggtcttagataagacacttgtatatactgaacaggtgctgcttttggcttgtatcaccaatgaggcagcaaagttagaactcgaaactagggtggggggtggtggctgtataattaggtcacaaagaaatgtggtaaggactttgcatgaataaagtaggtgctttataagg

SEQ ID NO: 177020 - DNA, 414 bp, Homo Sapiens
ttggtataacttctttcctgctgctgctgcttcccggcaaacatagttttcctatttcaggcagagtgcggtatattccaggaaacactgtttcctactcacttagcttacttctttgttgaatgcctcactaatgcaagtttcaagatgttttgggtgacaatgcacacatgctgggcaaaagggtgatggccagtggctggcagctgggccagcagaagctaggacatctgtgagttgtcattctcatctatccatgtccactggcctgccagcatccgccagtgccttgccagtgtgcacggtcccacactgtggcccctgagtcccctaatgtacacgctgcagccagaatgcagatggagctggcttggctgttccctggatgggcaataaagaaagtgctgcatccta

SEQ ID NO: 177021 - DNA, 1643 bp, Homo Sapiens
  misc_feature (924)..(1008): n is a, c, g, or t
  misc_feature (1332)..(1332): n is a, c, g, or t
  misc_feature (1535)..(1543): n is a, c, g, or t
ggtgactccccctctttcacttcatagctcaccaggactgttttataaactgctgtatttggaaaccccttctttacttcccaggccagcaagctcttcactgaaactggttgaagggtgttgcacccttttgggcctagaattctgaactttatctgttctgtttctgtgggaagagaaagggaagtatgtttttggggggctgcttccctgtctgagtaagccctcaggagcctctgctcccctgtgaacccactgaaccttctgagcccccactgcttctatggggctctctcttctgccttctcaggaaagctggtgtctgattttggccatcaggactctgacgtcttctttgggtcttgttgattttcctctgggcatatcccttccccagatctgctcctcccctttcacaggtgggatcggcactcagggggtctggaaagaaggtcataagggagcatgataggatttggggcagagggacaggctcctctggggaaaccccccagagctctttaccaaggatgaaagaggagccaggccttgggctcctgatgaggagaaaggggccccaccggggtctaatggtgacagtccaaaccactccactggcctcctggcagaagccgagtgtgctggggtctccgaagagggtccctcctttttgggggaaggtcagcccagcccctccaaaggtctgatgtctccactttcacccgcaggccttaccgctctgtttatagtgacccaccctagatcttccccaagagggactggggtttctggggtccattctctgagtcagtggttatttgaaaatttgattttgattttattttttctctgtaaacttccaagctggcttttcccatttcaattcctgtgatttatgccaataaagtttgcccatgattttcnnnnnnnnnnnnnnnnnnnnnnnnnnnnnnnnnnnnnnnnnnnnnnnnnnnnnnnnnnnnnnnnnnnnnnnnnnnnnnnnnnnnnttattttggtgggcccggcctcgcccctcaaaaaagttttcaaaaaccattcgtttgggccggggcggccccagaagggaaaatgaaacagggttcaaagtgggttccccaaggaaaactccgggcaaatgaaaaagggcgctgggattctcccccccaaataacaaaacccccgcggtggggaacaaagaaagggtgttttgaaaaaaataccccaaggtgggtgttttgagagggttcttaaacgggggactctatttacaagggggggcgccccaatggcgagcacctccaataacaccaaaattttgacgcccctccggnccttggggcacttcttattcagaaagaaacacgtggtgcgaaaactttcattttaaaaacccttttccgggctcggaacagtggggagagaacccttcccccaacacggggggtggggagtgagaaccgtgaaaatccgcgaaagagggggattaacaagcccctttgtgggccgcagtgtggaaaataaaataatttttcgnnnnnnnnnggcgagcaaaaccaggggagcctcaaaaaaaccaactatcctcttttttcgttgccggccccccctaccaatatcaacgccgcggtgcgtgaaaaccctt

SEQ ID NO: 177022 - DNA, 446 bp, Homo Sapiens
tctcagaggaagggcacagagaggaagggaagaattggggggcagccggagtgagtggcagcctccctgcttccttctgcattcccaagccggcagctactgcccagggcccgcagtgttggctgctgcctgccacagcctctgtgactgcagtggagcggcgaattccctgtggcctgcaacgccttcggcatcagaggatggagtggtcgaggctagtggagtcccagggaccgctggctgctctgcctgagcatcagggagggggcaggaaagaccaagctgggtttgcacatctgtctgcaggctgtctctccaggcacggggtgtcaggagggagagacagcctgggtatgggcaagaaatgactgtaaatatttcagccccacattatttatagaaaatgtacagttgtgtgaatgtgaaataaatgtcctcaactcccg

SEQ ID NO: 177023 - DNA, 881 bp, Homo Sapiens
  misc_feature (728)..(729): n is a, c, g, or t
ggggggggtgggatctgaacatggcggcggtggtagctgctacggcgctgaagggccggggggcgagaaatgcccgcgtcctccgggggattctcgcaggagccacagctaacaaggcttctcataacaggacccgggccctgcaaagccacagctccccagagggcaaggaggaacctgaacccctatccccggagctggaatacattcccagaaagaggggcaagaaccccatgaaagctgtgggactggcctgggccatcggcttcccttgtggtatcctcctcttcatcctcaccaagcgggaagtggacaaggaccgtgtgaagcagatgaaggctcggcagaacatgcggttgtccaacacgggcgagtatgagagccagaggttcagggcttcctcccagagtgccccgtcccctgatgttgggtctggggtgcagacctgaggagcgctgcgaccctcctaggctattgactgttaagtcctcaggtttggcccagattccagttcgtgcctctgaggtccaccagagggcgcatgaagcccaggctgttgccaaaccctaccctgccccacaccaaggagccagccaaaggcaaataaagttattgagtgtttagtagaaagggaaaaaatacattcccaatatcccccgttacatactcccgcccatactccacgctatcaccgcgtgggaccccatatcccatccagcgttattttnngtcttgtggggcgcgccccgggcccctggaaagactttttcaaaaaccattctgtgtgggggcccggggccccccggagggaaaggaacccgggggccattacgggtttcccaaggagaaccccgggccctgaccaaagggggtgggattcc

SEQ ID NO: 177024 - DNA, 343 bp, Homo Sapiens
gcccacagggctgtgtggatggaggaaaccgtccctgcccagtgcatcccccaggtcatcacggggaagcaggaggcaggccctgccctgccctctcctcacaggtttgttgcagggactccaaaaaccattttgggaaccgtggatgggggcggaactggggtttggtgcagtttccagggtgcagtacagcagggcctgaatactggccctggactcccttttccagaacaccaggtgtggccacctggggctcaggtacacagtggggtctctcggaagccaccgtgtggttctttcacaggcacgtttattttgctgaaataaaaagtttttaatcggg

SEQ ID NO: 177025 - DNA, 483 bp, Homo Sapiens
gaacacagctacaaccctaccctggcagggacctgagagcatctcaggaggggcagcgcatgtgtgcatgtgctgtgtgagtgagcacacccgtgtgcacactcatacacatgtgcacacacacgcactctccccactcaggggcctggaggtctggctgagcccctggggaaaggtgagttctttcatctccctcctccaggtcggagtgcctggagtcaggtgtcgaggccacattgctggctgccccctctttgtagctcctataaagggcccacacctggtggatacctggttgagcgtgtggtctctgccccagcctgtccttgtcacgatcacaggccttgcttttgtaacaatgatgaccccggcctgtctcatcttctgaagaggaaaagtcaaagtgttgctgtggctccatatttcaactaaaaatatatctgttggagaaagaaattaacaataaagaattttcataggtta

SEQ ID NO: 177026 - DNA, 375 bp, Homo Sapiens
gcggccgccccccggcagtacatggagcccaggccgtggaactgctcccgccctgcggtgtcccagatggagatgttgtaggagcgccactgcttcaggtagaaggcgccgcccaccgtgctgaccgtgtccgggaagcgccgctccatataccgctgcagcagcgacgtcttccccacgttcatgtcccccaggagcacgatcttgctgtcgggcttcctcatcttcccgtaagaacccccagcgcccccgcgccctctccccgaggctggccggctcgtgcgccctggcagaagcgcgaggagcggaccccggactcgccgggacccggattctcgtgaacgctccgggaccttcgcctccggacgcccggga

SEQ ID NO: 177027 - DNA, 562 bp, Homo Sapiens
  misc_feature (44)..(44): n is a, c, g, or t
tgaggtgttagagagggaccatgtgtcacttgtgctttgctctngtcccacgtgtcttccactttgcatatgagccgtgaactgtgcatagtgctgggatcgaggcgagtgttgggcatgtgatcacgcctggctaataaggcttgagtgtacttattaatttatctattctattcgtttttcattcatcccattaatcatttccccataactcaatggcctaaaactggcctgacttgggggaacgatgtgtctgtatttcatgtggctgtagatcccaagatgactggggtgggaggtcttgctagaatgggaagggtcatagaaagggccttgacatcagttcctttgtgtgtactcactgaagcctgcgttggtccagagcggaggctgtgtgcctgggggagttttcctctatacatctctccccaaccctaggttccctgttcttcctccagctgcaccagagcaacctctcactccccatgccacgttccacagttgccaccacctctgtggcattgaaatgagcacctccattaaagtctgaatcagtgcaaaa

SEQ ID NO: 177028 - DNA, 548 bp, Homo Sapiens
atgagccactgcgcccggccatggacctgggctgtctttatcatccccacaaacattttgaaactggaatatttgtcttcagaaaatgggaaacaagactataaatgataagccctgtccctagcaccacctctcctgtgtgtggaatagaggcccctcgtgctaccaacacttaccctgtgtttaaaaagatcttgtaccaagccaacggcgttcctggctctcctgcccacaggatgaacattttcggcttccttaggagttttgccctaccgtattccaaagcgtgtgctggtttctcatattgtctgtaggctcactcagcccgcagtttatgtgtgtgcttttttctatgaaaaatgatgtattttgctacttcctgtgtacaaagttttattgtaaatgttttttgtgctttgcatgaacaggggccacgttgttgcaattgtttcagtagaactggtttgatttctaaaatgttcctgtaacatatcttttatgaacaaatctgaacaatttgtgaaataaaacattgaaaaccatcaaaa

SEQ ID NO: 177029 - DNA, 476 bp, Homo Sapiens
aatgaaactgatggtacttgttttcaccattgggctaactttgctgctaggagttcaagccatgcctgcaaatcgcctctcttgctacagaaagatactaaaagatcacaactgtcacaaccttccggaaggagtagctgacctgacacagattgatgtcaatgtccaggatcatttctgggatgggaagggatgtgagatgatctgttactgcaacttcagcgaattgctctgctgcccaaaagacgttttctttggaccaaagatctctttcgtgattccttgcaacaatcaatgagaatcttcatgtattctggagaacaccattcctgatttcccacaaactgcactacatcagtataactgcatttctagtttctatatagtgcaatagagcatagattctataaattcttacttgtctaagacaagtaaatctgtgttaaacaagtagtaataaaagttaattcaatcta

SEQ ID NO: 177030 - DNA, 720 bp, Homo Sapiens
  misc_feature (450)..(485): n is a, c, g, or t
gggagacctgctcgcagcaccctgctgtcttcccggtccggcccgctgcccgcggcgccagcaccatgctcttctattcttttttcaagtcccttgcgggcaaggatgtggtcgtggaactaaagaatgacctgagcatctgtggaaccctccattctgtggatcagtatctcaacatcaaactaactgacatcagtgtcacagaccctgagaaataccctcacatgttatcagtgaagaactgcttcattcggggctcagtggtccgatacgtgcagctgccagcagatgaggtcgacacacagttgctacaggatgcggcaaggaaggaagccctgcagcagaaacagtgatggctcctcctcctcttcccctccctctttcattggtgacccataaccccaagtcccagcccagaacccctaacccccaatacttgaaggggttttnnnnnnnnnnnnnnnnnnnnnnnnnnnnnnnnnnnnaagggatgagtggatgagaggagtaatagggaacagctatcctctcttgagaaggggaggataagtaggctgggaaacttcaaagccttcccagtccccagcacctgcctttctcactacttctctggagatggtaggagagtttcctaggtctttccagggcagcatgtgattcatttggggatggaaggaatctgtcccgcatcgggaataaaatttatggatggaaaacaaa

SEQ ID NO: 177031 - DNA, 1036 bp, Homo Sapiens
  misc_feature (481)..(567): n is a, c, g, or t
ctttgttttgtgttctttgaaagtaactgatacttttcgggtagttaattcagcagtccataaatatgatccagtaacttgcttatattttattgaagtctcgacagctcttcagaagtaaatttagaacgatgctgtcagttcatatttatagatattagtgttttagcagataaaacaaaatcaacaaaaattaagttcattatgtgattaaacctgcaaccatttttccagttactttttttctatagttaatggttattgccatgatttcttctgtttggttctactaagctagaaagccagggtgaagttaatgataattcccattattttatttctgtaccatgagattgctgttgatgactgaaataccaggtgcaaaaattaatgatttgatttttgtacagtttcaatgagtattttttactctattaaaccacactacaattaacgagaactggtaacgaaaggaccgatnnnnnnnnnnnnnnnnnnnnnnnnnnnnnnnnnnnnnnnnnnnnnnnnnnnnnnnnnnnnnnnnnnnnnnnnnnnnnnnnnnnnnnngagaaacccccacagcccccgccagcccaccgaggcccgcgcacacacacgaggcagacaagagaacaagaccgagcgacgaaacgcagacgacaacttactacgcaaacaaaaaccagacacaggagcaatgtcacacaggagacgacgagagaaaaacagacaaacacggcaaaaccgtaacgcgcagagaactcagagcgacatagaacgggctcgacgctagcgcgacaggtgcaaaggtacctcgtagtcttctgctcaagacgtgtggaggaaagaagagcggcaggggagcgttcatggagatggaagtcagtgttagaatccgtctttgttagatgaagatacaatcgacttcgcttatagggataacggcaaggacgcagctattcagtttgtgctatgtctctgttataggaaagaggaagaacatacaaagaaaagcggagctgggcggtgatagatt

SEQ ID NO: 177032 - DNA, 611 bp, Homo Sapiens
gggaacgctaagtagtgtgtccggcgccgtgttccagctccgcgttgttccgcgagaaagcgagaggccgagcccgggctggtgcgatggccgcggtggtggccaagcgggaagggccgccgttcatcagcgaggcggccgtgcggggcaacgccgccgtcctggattattgccggacctcggtgtcagcgctgtcgggggccacggccggcatcctcggcctcaccggcctctacggcttcatcttctacctgctcgcctccgtcctgctctccctgctcctcattctcaaggcgggaaggaggtggaacaaatatttcaaatcacggagacctctctttacaggaggcctcatcgggggcctcttcacctacgtcctgttctggacgttcctctacggcatggtgcacgtctactgaaatgggggcccgggggacttttttaaaaaaccagatcgggaggactgtggccagcaattaacaccatgtagacttccttagttcttaagtggttgaattcgctgcttgttctgtaacgttataaataatttatatctgaagacggagagcctgtaatattcttcagattaaatgaagcgtgagacaaaaaaa

SEQ ID NO: 177033 - DNA, 726 bp, Homo Sapiens
  misc_feature (92)..(92): n is a, c, g, or t
agagatctatttccaggtgtgagcctcagcagcgatttcattgctggctttagtgggtgagacggaggaagatcacgtccagacagtctctntgctccgggaagttcagtacaacatgggcttcctctttgcctacagcatgagacagaagacacgggcatatcataggctgaaggatgatgtcccggaagaggtaaaattaaggcgtttggaggaactcatcactatcttccgagaagaagcaacaaaagccaatcagacctctgtgggctgtacccagttggtgctagtggaagggctcagtaaacgctctgccactgacctgtgtggcaggaatgatggaaaccttaaggtgatcttccctgatgcagagatggaggatgtcaataaccctgggctcagggtcagagcccagcctggggactatgtgctggtgaagatcacctcagccagttctcagacacttaggggacatgttctctgcaggaccactctgagggactcttctgcatattgctgacctgagaggatggcctcagagctgacttgggcaatcctccccaacaggaaggggagacattgcctgccactgaggaaacaggtcatgaaggtggagataagctgcaaggggcgaagcaactttatgtcagtggaaaacgtgtctctttaaagctgctatgtgaacagcttttacagtccattacattttacctaaacctaggttac

SEQ ID NO: 177034 - DNA, 543 bp, Homo Sapiens
ctactgtcattctataacaacctagaagggtatattcttgctgaacgagaacatcaagaagacaggaaggaagctgaagatatctctgtcaagtcatcctctgtgtctgtcatgtgtcccacatgtgtagtcctaaatgccactgtctcacagttggcctcttatcaggacctaagccctgtggagacagcaacttgcagagccccattccaggggcagcaaggggtgggcaagatggaatcactcagcttaaggaaggtcttccccatctatgcttttgaagaaggaagaagtgggactatcattcactagtctaatcttactgctaaaattagactgagtgctccatctccaaacctggagggccatggtgtggtgtgtgtcacacaagccaaaagttgttcttcccaaggtctgggcagtggaagcagtataaacactgatgaataaactcatctgaattttaaaaagatgaagaaaattgttcctgtcccctggtggaacttttcaagtgacattgacaaataaacctctcaaaacctg

SEQ ID NO: 177035 - DNA, 608 bp, Homo Sapiens
agcttggagtggctcacggtggatgcattgacgctgcagacgccagcaagtgctacaaaccagagctggcctttaactcagactgatggagaaggtgttaataatgcagattagacttaaaagtgttgaagccattgcactgtgaacagcaaaaaaattgaagaactcttctggcatttaaaaacaattactcagttcagcagagaagtcactgacaaacgagatcacactgactgctttgtcgttttggttttgtcttactcattaatgcaaataagaacattcactagcatctgtgtcgggcctaccctccctggtcaaatacagctacagtctccctgcagatacgagttttccagaaatgagccgatgttttctgcgagaatcaattggtcatatacaatttacaaaaatgagtactgtatactatatttgtaaactgtacactgcagatgctttatttcactgaaatttataatacacttatccatgtatatgcatgcatgcatttttgttcctgagatccagctgtgaaatgtttaccagcacataaattaccagcacatgctcttttttgttaacctactaggtaaaatcttcatttatta

SEQ ID NO: 177036 - DNA, 794 bp, Homo Sapiens
  misc_feature (66)..(66): n is a, c, g, or t
tcggcacaggggagctgcagaaccgcatcgccagctgcctgaaggagcacgtggcagctgtggcgngcgagcccagccagccagctgcctgtcacgtctgttgggcaaactgcccgagctgcggaccctgtgcacccagggcctgcagcgcatcttctacctcaagctggaggacttggtgccccctccacccatcattgacaagatcttcatggacacgctgcccttctgacccctgcctgggaacacgtgtgcacatgcgcactctcatatgccaccccatgtgcctttagtccacggacccccagagcacccccaagcctgggcttgagctgcagaatgactccaccttctcacctgctccaggaggtttgcagggagctcaagcccttggggaggggggatgccttcatggggtgaccccacgatttgtcttatcccccccagcctgccccggcctttatgttttttgtaagattaaaccgtttttaacacatagcgccgtcctgtaaataaccccagtgctgctgtaaatacaggaagaaagagcttaaggtgggagcggggctgggaggaagggatgggccccgccttcctgggcagcctttccagcctcctgctggctctctcttcctaccctccttccacatgtacataaactgtcactctaggaagaagacaaatgacagattctgacatttatatttgtgtattttcctggatttatagtatgtgacttttctgattaatatatttaatatattgaataaaaaatagacatgtagttggaactg

SEQ ID NO: 177037 - DNA, 577 bp, Homo Sapiens
  misc_feature (71)..(71): n is a, c, g, or t
ggcttgcatggtctcccaagggaatcagccccatcaacaaagttcaaatcggggcagaggctgcacttgtnccccagatgtttctgaggagccagactagggctggcattgctgtagagtgacggctgctgcccagagcgtgtcccagacatcacagcggggctcagcagttcccacagcctctgcctgccttggctaaacatgaagttaaacagcaaaacgctcctccatgtctggatggggccggcaggtcctgtgtcccctgcaccctggaggagagcaggctagaggcacagcggccacatggtgctggctctgaacgttggttggtggctggaaaacagccctgcttctgagggccgctcagttctgcacacgaaaccacctcctgagggctcagctctgcccccgccctgggctgcagcctctgcacgcaagcaccaggcatcctttgtgttgtcaactccgtgtaaccagtaactacagccatttacaattgactccgtttccttttgtaggtttccctgtctgtctgtgttagtagaaaaataaaatcctatgaaatctgagtacgttg

SEQ ID NO: 177038 - DNA, 591 bp, Homo Sapiens
gggaggcttgagggaagcatggaggtccatggcaagcccaaggctagcccgagttgttcgtcgcccacccgggattcctcaggagtcccagtgtccaaggagctgctgacggcgggaagcgacggccgcggaggtatatgggacaggttgctcatcaactcccaacctaagtccagaaagacctccactcttcaaacagttcggatagagaggagtcccttattggaccaggtacagacatttctcccacagatggcacgggcaaatgaaaagctaagaaaagaaatggcagctgcaccacctggtcgtttcaatattgaaaacattgatgggcctcatagtaaagttatacaaatggatgtggccttgtttgagatgaatcagtcggattcaaaagaagtggacagttcagaagagagttcacaagacagttcagagaacagttcagaatcagaagacgaagatgacagcatcccatctgaagtcaccatagataacattaagcttcccaattctgaaggtggaaaaggcaagattgaagttttggacagtccagcaagtaaaaaaaagaaatagtcaaataaattatct

SEQ ID NO: 177039 - DNA, 484 bp, Homo Sapiens
  misc_feature (277)..(285): n is a, c, g, or t
  misc_feature (340)..(340): n is a, c, g, or t
  misc_feature (350)..(350): n is a, c, g, or t
  misc_feature (387)..(387): n is a, c, g, or t
  misc_feature (403)..(403): n is a, c, g, or t
ccttggcctacctggagcaggcatctgccaacatccctgcacctctgaagccaacgtgagcaaagggcagaggcagttggcctatgagtgggctgatgcgtgaggttggccacacattccttcctgtggacttgacattttggaagaactctttgccagataatgagttcattttagttttatgctcccattgaaaaattttccactatttttataagctgttaatttcttgagtactttataacatgtctgtagcttggataaaccaagtaagtannnnnnnnnggtctttagcgaagtttagactgtgaatatgatgacacagattcttttttatggnggctttgctngttttaaatttttgcatgacttttcatctttttatgngtgtttcctgtagttngatccgaaggaaaagagtatagtagcctgagaatcaggagatgggagttttagtcgtaggccttatgataattaccccgcg

SEQ ID NO: 177040 - DNA, 767 bp, Homo Sapiens
gtaggatataaaactagaatgtcaatttaaggagtttggtccttattcagtaggcaatgggaatcgaggtagcaagatctaaccctttaagggagaaaactcaaagggttgagacatcaagattacaaggttatctattgaaagagtcttgtaagagatagcaaaggctgcgatagtgacaactgtgatggtagttgtactatgggaattcaaaaaagaacgaaacccctgtggactggaagcgctataagcagaacctgagctaggttctgtgaagagtgagtaggagtcaacaacagccctgttgtaaacttgaattttaaattagttttataccacagcatatctcagtgacaaaaaagcaaacaaccattatttagcattttatttcaaccaaataaaagttgattaaaagtgaagtcttatttcctgatatttgagtctttcaggtatatctatttaaaaaaactgttctcttcaagtttaagggttagcgtgtcaggaattaattaagccctgtagtcatatgagataggaaaaagtggacctgaaatgaggacaagagaaggacaaattgcagaaatgaggacatgtaagtcttcagaagaatgtgtcacacaatagaattaatgcgtaagggtgaagaaataatgatttgtagtatcatgggagaataacaaaagaatgtaaaagactcacagagaataagaggggtagtgggctaaattcctcaactcaaaattaataaatgaagaggaatgatcaag

SEQ ID NO: 177041 - DNA, 741 bp, Homo Sapiens
ctcgaggaggaaggtgcgaagtcctggagtattgtttgggtctcggaatgggcgcataacctgcgctgaccagtttaggggcttagcagatgcctgccagctgacctcgttggcaggagggttgggtggagatgtttttagcagagcttccattagtgtagacctgtagccacctgtcagaaggtgggtggcatattggggacctgggaatgtgtgaaggaggagatcaaatttcagtggctttggacagaaaagaaggctctggatttaagcgggtggtcacctgtgagaccaggtctaccttgggactgttatttaactgaatcagttatttccttgaaatttcacagtagtgggtgggcctgttttaaggctctgacagataccacgaaacatgaagcacgtggaactacacagacccccggggtctttctgagtgcaaggctgaaatggacaagggctcctcacgggggtggagggagccggagcctgccttgtgttccttttttgacttgtgacatttttcaaacacataattaaaaggacttatgctctgctgtctcaggacataatgctttttgtactgagaaattcatagtgggatggctctcagatagttgagagcgaaaatgtttctctcagtctcttcagacacaagcacactctgctcctcactccctccgacccagcacacacacccgacccagtacaaacacccgctgaacagtgtggaacaggaac

SEQ ID NO: 177042 - DNA, 64 bp, Homo Sapiens
  misc_feature (64)..(64): n is a, c, g, or t
ttggctggaagtggtggcgctactgtggtcccagctactcgggaggctcaagatcacttgagcn

SEQ ID NO: 177043 - DNA, 423 bp, Homo Sapiens
cccgctccaagaagggcaagatgcggaagaggatgtgaggaccaggacccagccccgtggctccttgattggccttagggtgggcatcagcagacgttcccgtgcaccactgtgtgcctggccctgtgctgggcactgggggcactccctgcaggagccatcaatctgtgaaaaggagcactgtatggccacagaagggcagcagctgcgtcagcctaagacagagacatttgaacagggccttgaagggtgtgcaggagttcgccagcaaagccaggcaggccaagacttgagttggcaactcagctgctgctgcttccatgtgttctgggttcagaggtcatggctgcaccggtcagagccctgagtgcctcagggtttggcaatggaatttttaatgtaataaatctttattgagcacta

SEQ ID NO: 177044 - DNA, 665 bp, Homo Sapiens
gtgtgagacagtgcacctggccgaaatagctcaagtttctgaaaaacaaatctgaatctatttgttattcttagcgtcactggtctggctttcagaattaacatacaaggttgccacacctagttctgcccagctttatgtcttttattccagtattccaccaaagtttgttttcctgcattccagttctcaagtcttaagataaagattgtacttgacagtttagtatatccataaaactatttgaggtggttaaggttcttgggttcattttccttaatactttgctgaatattgtagattgtaggcaatgaaaaagtctactaaattaggaaaaccttgaataattaggtatcctaggtaagagcccctaaacatcaagcaatctgtgagtctgtaaagaaataaatattttttggattattcttatctaattccacccctgttggaagatgatttctttgttctttgcaactatggaagctgtgaaaatcatcacaagtgcctctgaaagcgagtgttaggttggttagagggtttaatattttctgcaatggtttgtaggaattttaataaatgtagtatattttctgagatgattttgtaaaagtactattttaaatatcaaatcaaccaataaattcacatttgtgttaggaacataa

SEQ ID NO: 177045 - DNA, 646 bp, Homo Sapiens
cattaatatatttattcacatcctcactgtcttaaatgtgtatttacagactccagcaggtaattatgtcagtactcctcagactcccagaaatttcaaatgatccaggcaactcttgtgaagatcaaattttcaaaatcctcaccaaggacatccttcaggtcacctttatgctcccagatggtattcagctagcagcagtctacacttcaggcatccatcttccacctgtagggtaggtgatcactcccgacgagcaccgcacgtggaaacagctgtaaccaggcacgctgcttttaagttattttatacgggggcagggcaagcataaagtcagttatacggtaaggccttttcactgacgaaaataaaaccaggcttatctggagaactccctggcatagtcgatgatgtaaacacaaatcgacgaagctccccgtttccaaacgtgggaacgcaggcctgaggccaggccgctgcccttgttcacggccccggacacttcggacacaggccgccgcagtcgactcaccagactcagggtggccgcgttcccccgcccggcgcccctgcgtgagagaccacgcggccacagccaggcgccatcccagaggacccagagcaaaaaccacagcaagctcgcacc

SEQ ID NO: 177046 - DNA, 531 bp, Homo Sapiens
gtgaactggagttcactcgcggccccgacctccccggatctacggtttccggcggtccggctctacttctgtctccggggaactgcggcggcgctatcggggaagcagcggctgggcccgcagccgttcccggagctgtgccacgggtgccaggaggtgggcgcccgccgaaggaggaattgcccagtcacgccctcgtgaccagtggtgcctgcattcagcccttccccgcgccccaagtgtgaaagtggaaggatgaacccagtggggtgcgacactgacaggagaaggcattgagcggtcctaggaaagtgaccaggctggtgtcccaggatggtccacacctggcacctctccagtcctctcatgccctccctttacaccgagcttccactgcagtcaggtgggcctcccttttccctttgaggatgcagatttcctcatcctttccagagaggggttgtatgtctgtttatctcttgccacttaacctcagcggcttcaaataataaaaatcattctattattaaa

SEQ ID NO: 177047 - DNA, 1005 bp, Homo Sapiens
ggggaaaaacggaaaattgtatcattgactgtctagtagccatggttgtcaaactttccgaggtcacattcaggcccctgttcttcaagctgtttgattgggctaaaacagaagatgccccaaaggacaggttgttgacattttacaacttggcagattgcattgctgaaaagctgaaagggctttttactctgtttgccggccacttagtgaagccttttgctgacaccttggaccaggtgaacatctccaaaacagatgaagcattttttgactctgaaaatgaccctgaaaagtgctgcttgctgttgcagtttattttgaactgtttatacaaaatcttcctttttgatacccagcattttataagtaaagagagagcaggagccttgatgatgcctctggtggatcagctggaaaacaggcttgggggagaagagaaattccaggaacgggtgacaaagcacctgataccatgcatcgcacagttttcagtggccatggcggatgactctctttggaaaccactgaactaccagattctgctaaagacgagagactcctcgcctaaggttcgatttgctgctttgattactgtgttagcactggctgaaaaactaaaggagaattatattgtcttgctaccagaatccattcctttcttagcagagttgatggaagatgaatgtgaagaagtagaacatcagtgccaaaagactattcagcaactggaaactgtcctgggagagccactccagagctatttctaagactttctgtggtgtttcatactctactcagagttcacactcatatttcatatttttatttttgggtgttgggtgccatgttacttttggtgccttaatacacctacttggattacttacaaatgttttatcacttcgttacaaaatccccacctggcttgtgctgccacataagcctctcctgcctatcgtatagagctgcagaaagagtaaatgatacacggtatttttatac

SEQ ID NO: 177048 - DNA, 775 bp, Homo Sapiens; identical to SEQ ID NO: 6898

SEQ ID NO: 177049 - DNA, 407 bp, Homo Sapiens
ggggaggtttcgtcttcccggaagcgttggaggacattccctgttgactgcgtcgcgatgtgtggcgactgtgtggagaaggaatatcccaaccggggtaatacctgcctggagaatggatctttcttactgaactttacaggctgtgcagtgtgcagtaagcgggattttatgctgatcacaaacaaatccttgaaagaagaagatggagaagaaatagttacctatgatcgagtataccatgctgtgtctgttatgcggcaaagccgaagatactatcagtattctccctgatgacccccgacaaatgactctcttattctaaggatccttctacagatctgttataactatattgtgttggtttacaatacagcaagcctgatggtttgtcttatttcattcaa

SEQ ID NO: 177050 - DNA, 529 bp, Homo Sapiens
  misc_feature (132)..(141): n is a, c, g, or t
gagatgatcttgaagtgtcacatacactaaagtccaaacactatgtcagatgggggtaaaatccattaaagaacaggaaaaaataattataagatgataagcaaatgtttcagcccaatgtcaacccagttnnnnnnnnnnttaatgctgtgtaaaatggttgaattagtttgcaaactatataaagacatatgcagtaaaaagtctgttaatgcacatcctgtgggaatggagtgttctaaccaattgccttttcttgttatctgagctctcctatattatcatactcagataaccaaattaaaagaattagaatatgatttttaatacacttaacattaaactcttctaactttcttctttctgtgataattcagaagatagttatggatcttcaatgcctctgagtcattgttataaaaaatcagttatcactataccatgctataggagactgggcaaaacctgtacaatgacaaccctggaagttgcttttttaaaaaaaataataaatttcttaaatcaaaaa

SEQ ID NO: 177051 - DNA, 166 bp, Homo Sapiens
aattatcaaactttattggctggtgaaaaatgattgaattcagcaagtacatttatgatctatctacattgttaaaacagcactaaaaataaaattttttaaaatgattatccattatttacagaaaatgtggaaaagatggcttttaaacccagaacattatagg

SEQ ID NO: 177052 - DNA, 645 bp, Homo Sapiens
ggggttggccctgggctttagtctggcagtgtatggggccagctaccactctatgagctcgatggcacgagcagcgttctctgaggatggggccctgatggatggtggcatggacctcaacatggagcagggcatggcagagcaccttaaggatgtgatcctactgacagccatcgtgcaggtgctcagctgcttctctctctatgtctggtccttctggcttctggctccaggccgggccctttacctcctgtgggtgaatgtgctgggcccctggttcactgcagacagtggcaccccagcaccagagcacaatgagaaacggcagcgccgacaggagcggcggcagatgaagcggttatagccattgacattgtggccacaggccactggccctgggtggctctgtcagggtgcacagcccctcatgcctggagcaatgagggtctagtccaggggccaaaagcagtctgaggtattgggtatacttatactctataggggtcgttgaaataaatggcttaaaatgtgaaaaaaacaaccaaccaaaacaacacagacggcccgcagggcgaaagcaggacaagaaagaaaaagcagaaagaagccggcaaatggccataaaatttttgtagaacagggaac

SEQ ID NO: 177053 - DNA, 445 bp, Homo Sapiens
  misc_feature (229)..(229): n is a, c, g, or t
acaaacagaaccccactttattagcagttagttcgagattgtacattaatggaggaaggtctcacctttaacacaacccaaaacggctggttcgagagccctcatcaggcgaactggatagcaccccctctccccactttccccacccccctacaagggaaggaaacctctgcctgcttccccagtgtgccccccaccctttccagtcggccctctcctctcccagganaatgacatgaatttcatggcacaaattacaaaaggagccctcttgctaataataaaagctaacacagtcataggaaaaccctctcctccctcatttctcctccagggccggaaacagtaagagcaggagggatgaacttcttaggataaaacgcatccagtttcccccaggttcctgggattgaccccacaaaaccctatgccagtcccttaggga

SEQ ID NO: 177054 - DNA, 1084 bp, Homo Sapiens
gggattccccacacagcacccacaatcagccactgcgggcgaggagggcacgaggccaggttcccaagagctcaggaacatggagctgatccaggacacctcccgcccgccactggagtacgtgaagggggtcccgctcatcaagtactttgcagaggcactggggcccctgcagagcttccaagcccgacctgatgacctgctcatcaacacctaccccaagtccggcaccacctgggtgagccagatactggacatgatctaccagggcggcgacctagagaagtgtaaccgagctcccatctacatacgggtgcccttccttgaggtcaaagacccagggaatccctcagggatggagactctgaaagacacaccgcccccacgactcatcaagacacacctgcccctggctctgctcccccagactctgttggatcagaaggtcaaggtggtctatgttgcccgaaacccaaaggacgtggcagtctcctactaccacttccaccacatggaaaaggcgcaccctgagcctgggacctgggacagcttcctggaaaagttcatggctcggagaagtgtcctacggatcctggtaccagcacgtgcaggagtggtgggagctgagccgcacccaccctgttctctacctcttctatgaagacatgaaggagaaccccaaaagggagattcaaaagatcctggagtttgtggggcgctccctgccagaggagaccatggacttcatggttcagcacacgtcgttcaaggagatgaagaagaaccctatgaccaactacaccaccgtcccccaggagctcatggaccacagcatctccccccttcatgaggaaaggcatggctggggactggaagaccaccttcaccgtggccgcagaatgagcgcttcgatgcggactaatccggagacagatggcaggctggcagcctccagttccgtcttgagctgtgagaggggctcctgggagttcactgcagagggagtgtgcgaattctaccctgaccaatggggcccagaaataggctgattcgaagtccagcacaggggtcatggtcggaatcc

SEQ ID NO: 177055 - DNA, 361 bp, Homo Sapiens
  misc_feature (1)..(1): n is a, c, g, or t
naagagccaccgtgcctggcaatttcaattattttttttaaaaaatcattaatctattacttgaatttggcaattttgtattttaaatgcaaataaaggctcaaaatatttcaaaatactctgattaaaacccaacaaaaataaaatcctccaaatctaggggaaaaaataaaatttcaggataactctgtttaattctatttttcagcctatatatgtatgtggagattgcttgccatccaacatatgttaggatgtctactgaagcacagccaagtgtaacagcaatagtttccaaactttcttcttcattcattaatctattcaacagacaacttattaagcaactacctattgggct

SEQ ID NO: 177056 - DNA, 502 bp, Homo Sapiens
  misc_feature (465)..(465): n is a, c, g, or t
  misc_feature (473)..(473): n is a, c, g, or t
acctgagcaaccaagtacctccaaaaatgttaccgaggaagagctggaagactggttggacagcatgatttcctaaaaaggggaaaaaaacggcctgaagcaaatcttggttgccttctaacggcaggtgggcataaggctgtccttcaggaccagccagtttacaagcatgtctcaagctagtgtgttccattatgctcacagcagtaaatgcctacctctgtgtttgacatctgaaagaatacattgaagcagcttgttgcatttgtttttctggcttagtaatctaatagatttccttaagggcaggagatagactctggcccttgtttctagcctccttccttgcagtgtttacaacatagccagtgtttacagcatagcagatgctgctgctgattaagagaatagatgcaaacaaggcatgcatttggccaaaataaacaaatgctggtctgtcccganccccccanacacagagaacatacaaaacctgtcggag

SEQ ID NO: 177057 - DNA, 365 bp, Homo Sapiens
  misc_feature (81)..(136): n is a, c, g, or t
  misc_feature (174)..(184): n is a, c, g, or t
aaaaatcaaaagggcccgggtggttttttcccctgggggggaaaaaaacccaacccccccattcccgaaaacccccggaannnnnnnnnnnnnnnnnnnnnnnnnnnnnnnnnnnnnnnnnnnnnnnnnnnnnnnnaaggggaaatggggtggggccccccaaaaatggaaaannnnnnnnnnngttaagggggcctttaaaaacttaattttgccttttgccaaaattttttggggggaattccaattaaggccttttccccccaaaggggttagttttgttgcccgggcgggtttttcccttttttaaaaatttccccggtcctttttggtctaattttaaaattggcccctttttccaaaat

SEQ ID NO: 177058 - DNA, 410 bp, Homo Sapiens
  misc_feature (281)..(281): n is a, c, g, or t
  misc_feature (309)..(309): n is a, c, g, or t
  misc_feature (367)..(367): n is a, c, g, or t
  misc_feature (399)..(399): n is a, c, g, or t
tcgccgcctggtgttgtcgtgaccgctgccgccaccgccgcctcctcctggggactttctccgcctcttttcggcgctgccactgtcactgctgctgctgcagcctccgataccgtttaacagcctttgcagcaggtcagagaagcgctgcatttcagcagccgcggcctcatcgtcatcgtcccctctccacaggccgccgctatccgagcctccgccagacgaggagagaggccccggcgagctaagcccggggtccagggtgccagtccggttgcctnggggtccaggagatccgccagttccagncccagacagaaagtccatatcctccgtctcttcccccgggaggctgggcgatcgcctncctcctccatcttcctcgggggaggggcgtgnggaaggccaag

SEQ ID NO: 177059 - DNA, 543 bp, Homo Sapiens
  misc_feature (15)..(15): n is a, c, g, or t
  misc_feature (35)..(35): n is a, c, g, or t
  misc_feature (531)..(531): n is a, c, g, or t
gggaccccatttctncagccagtgtctcctgggtnccttctgaggactcccacccccatcccagtatctcatctgtcccctctcctggggcttaagtgggttgcttccaggcagaagcagccaaggaccgattccaggcactttctgtagcaaatgactgtgaattacgacttctcttgcccttcttctagcagtctgtgcctcctctctggccagtttggagggcactgaagaaaggcaagggccgtgctgctgctgggcggggcaggagaaggagcctggccagtgtgccacattaaatacccgtgcaggcgcggagaagcaaccggcacccccttccggcctgaaagccctccctgcaagaaggtgtgcaggagagaagaggccccggcatggggatctgggttctagagggcatgtgatgactgtaaatgttcactgggtgggtagggagtggtatccagtgttcaagtgcagaaatctttggctttgctaccagttccatatgatgagaaataaacgttcgcaaanaaatttgtttca

SEQ ID NO: 177060 - DNA, 221 bp, Homo Sapiens
gtcttcctgtcctgactgtcccacaaaccgcttcttcttacggtccctgcaggagagggagttgggacggctgccgtggagggaaacccttggagtgccggctgccgcttggggcctgtctcctcacccgaccctcttgtcaggttgttggagcattaaaggaaagcagtgcagccatgtctggcatgcagttggcgctcaataaagaattcttccctatc

SEQ ID NO: 177061 - DNA, 950 bp, Homo Sapiens
gaactgaaacgggtcgggatgccgatgccggcttggagttagagatgagtcaccgctgagaagcagctgcagtagctgagcagtggcagcagagaggcagacgtgagctgagggcgcagaggcaggcagcatctctgagggtccccaaggaacatggctgggagccgtgaggtggtggccatggactgcgagatggtggggctggggccccaccgggagagtggcctggctcgttgcagcctcgtgaacgtccacggtgctgtgctgtacgacaagttcatccggcctgagggagagatcaccgattacagaacccgggtcagcggggtcacccctcagcacatggtgggggccacaccatttgccgtgggccaggctagagatcctgcagctcctgaaaggcaagctggtggtgggtcatgaccttgaagcacgacttccaggcactgaaagaggacatgagcggctacacaatctacgacacgtccactgacaggctgttggggcgtgaaggccaagctgggaccactgcaggcgtgtctccctgcgggtgctgaatgaaccccttcctgcacaagagcatccagaacagcctgcttggacacagcgcggtggaagatgcgagggcaacgatggagctctatcaaatctcccagagaatccgagcccgccgaggggctgccccgcctggttgtgtcagactgaaagccccctccagcccggttccgcagggactagaacggctttcggcttttttgggacagcaaactacccttgtcttttgggaaaataccttttttaaaataagaaaggggggctctcatatttttcccctaacgccaatccctggggggccctccttctttaattcccttcgccctcccaagctggggggttttaacaggtaggaacagggaaccccctgtttcctggggggggaatgggttaca

SEQ ID NO: 177062 - DNA, 836 bp, Homo Sapiens
  misc_feature (724)..(730): n is a, c, g, or t
  misc_feature (734)..(734): n is a, c, g, or t
  misc_feature (737)..(737): n is a, c, g, or t
  misc_feature (739)..(739): n is a, c, g, or t
aggcaccagcctcatctattggaccctctttacactgggcctggatctttcttggtccatcagcctagccttcaagtggtgtgagcggcctgagtggatacacgtggatagccggccctttgcctccctgagccgtgactcaggggctgccctgggcctgggcattgccttgcactctccctgctatgcccaggtgcgtcgggcacagctgggaaatggccagaagatagcctgccttgtgctggccatggggctgctgggccccctggactggctgggccacccccctcagatcagcctcttctacattttcaatttcctcaagtacaccctctggccatgcctagtcctggccctcgtgccctgggcagtgcacatgttcagtgcccaggaagcaccgcccatccactcttcctgacttcttgtgtgcctccctttcctttccctcccacaaagccaacactctgtgaccaccacactccaggaggcagccccatccccttccagcccctaagtaggccctcccctccctaaatctgcttccgcaccacctggtcttagccccaaagatgggccttctctctcccagataagttggtcctccctctgcctttcctctcaagcccccaaagagcaaaggcaacagcaagaccagcggggttcttgcaacactgtgaggggcaaccagggcgggcccccaataaaggccccttggaataacttnnnnnnncaancancnacctccacccacaacatctaaaacaatccacacaaaaacccacctccaaacaagcccacctactctctccccaggaggcgctctttcttatggccgc

SEQ ID NO: 177063 - DNA, 468 bp, Homo Sapiens
tcagagaaaaggcgaacagggccctcaccctgcctgtctcccgaagcaggttcgagccacaagggccaaccaggaggcccctggagcccagatctgtcatctggtgctgccagctgtgctcactctggttttctgctcagggtctgaagcagctgctgtctccctcctctgcccccatcccctggctctcccctgggcacagtgccactcccttggaagggagggaaccacccgtgagccccagggcttgggaagcctgaggcgggcctctgcctctccctgcccccagcacaattggcagagatgaggcgggtggtggacggctgggctgtcgtggcagggtctgcacagggccatgtcctggctgtaacccaggcagtgggaggtctgcagcctggtcatggcctccacagcaggtccctgtggacagacatatctgcatatttatcaataaagccttttgctccg

SEQ ID NO: 177064 - DNA, 813 bp, Homo Sapiens
  misc_feature (762)..(762): n is a, c, g, or t
ggggcagccgccgagtgtgaaagcgacgcacacgcaaggagcgaacgcggccgcccgcagtctcctgagctccccgcgggccgacgcacagccgcggagaaggagccagcgcccggccagacagtctcagcccgccgtcggcgcccgccgcgctcgcgcccggctgctccgaggggattagtgggccgtccgcgcggctcgtcggcgcgggagccatgttgaccgagggacttggcaacgcgtgagacacccgcggcccctcccgaggctccggacccgcggcgagagccggaaggcggctgtggcggcggaggcctgcgctcggaagcgcctcacgtctgccggccgctgagacccggacttgcatccggtcgccgcgggcgtccgcggagcagcttccccccgcgcctctcttcgcctcgcctcgggacccgcggtccccgctcttgctggatttttcaagccacattcaattgataggatgaaaaaatttaagagaaggctatccctcacactccgaggaagtcagactattgatgaatcattgtctgaatgggctgaacaaatgactattgaagaacacagcagcaaggataatgagcctattgtgaagaatggtcatgcctccaacggtctcacagcatgcattcgtttcctccaccagtacacagggatcttttcaagaagccccccattgcggaagaccacaccagtggttatttggaggggagcccttggcctcctttcatggcaatgccccantaaatggaagccaaattagaatatttgtttcatgaaaaatctaaaaaaggg

SEQ ID NO: 177065 - DNA, 463 bp, Homo Sapiens
  misc_feature (47)..(58): n is a, c, g, or t
catattagcaaatatgaaattctgtgaaaaaaaaccctttgatcttnnnnnnnnnnnnccacccccccccttctgtagcaggaaacaaattgcttgttcttgagaactttcccatcaagaatttagtagaagcaggtatacttctatcattttgatgtttttgttaatgtttccaaacaatgtactttgaaatcagaatcacttcttatcgttttcatatacttctgatgctcttcatcacattagtgatcagaaatgaggtgtaattccccaacccctgcccgcaagagctaagtaggatcttactgtaagttgaagggagttttgccctaactcatggattgtgcaagaatgaactgctgttgggtttgattgactgtcgatggattgtggtgtggtgtatctgaaggctattgaatgcaacttacaatgcttaataaaaatctttattcttttagtataa

SEQ ID NO: 177066 - DNA, 1701 bp, Homo Sapiens
gggggcagggccgcgtaggtccccgcccccagagtctggctttccacggctgcccgcctcgcgcgtcttccccgcccgggtctcctcgctgtcgccgccgctgccacaccatggccttcgtcaccaggcagttcatgcgttccgtgtcctcctcgtccaccgcctcggcctcggccaagaagataatcgtcaagcacgtgacggtcatcggcggcgggctgatgggcgccggcattgcccaggttgctgcagcaactggtcacacagtagtgttggtagaccagacagaggacatcctggcaaaatccaaaaagggaattgaggaaagccttacgaaagtggcaaagaagaagtttgcagaaaaccctaaggccggcgatgaatttgtggagaagaccctgagcaccatagcgaccagcacggatgcaccctccgttgtccacagcacagacttggtggtggaagccatcgtggagaatctgaaggtgaaaaacgagctcttcaaaaggctggacaagtttgctgctgaacatacaatctttgccagcaacacttcctccttgcagattacaagcatagctaatgccaccaccagacaagaccgattcgctggcctccatttcttcaacccagtgcctgtcatgaaacttgtggaggtcattaaaacaccaatgaccagccagaagacatttgaaatctttggtagactttagcaaagccctaggaaagcatcctgtttcttgcaaggacactcctgggtttattgtgaacccgcctcctggttccatacctcatggaagcaatcaggctgtatgaacgaggtgacgcatccaaagaagacattgacactgctatgaaattaggagccggttaccccatgggcccatttgagcttctagattatgtcggactggatactacgaagttcatcgtggatgggtggcatgaaatggatgcagagaacccattacatcagcccagcccatccttaaataagctggtagcagagaacaagttcggcaagaagactggagaaggattttacaaatacaagtgatgtgcagcttctccggctctgagaagaacacctgagagcgctttccagccagtgccccgagtgcctgtgggaatgctctttggtcagacattccctcacacagtacagtttaataaatgtgcattttgattgtaatctatcgaagtgattattacaccagctacagcagtaatagattctccattaagaaataattccctttttttagtctgttcatttctgcgtattttctaaacagctttacccccttggtgccttggaagcaaacatgtttttttgaaccttgcccatttttgtgaaaaattggcctagattcccttctctcatcaaccggaaaagaacttccttctgagaagtgggaagtggcaccatggctccctggctgcctgccggggttacaatcccctaacccccctgggccagccaaaatgggccatcagtccgggggaaaaccactggccagcggaaccaccccgccctggggattctttggcccttttatatcagcaaacaattcttaacctccccttgtacggctttctgaaggcgtgtggcccccaccgatttttgtgggcatttcggccttcaaagcaaagggggtcctttctaaatccacgcgcctccctccctctggaaacacaatg

SEQ ID NO: 177067 - DNA, 448 bp, Homo Sapiens
  misc_feature (43)..(43): n is a, c, g, or t
agccagccagctgtggccgggggcccggctccatgtgtccccntgtctgtgtgctgtgtctcccgcgccgtgtctgatgtgtcagtgctccggccgccgctgtccctttcatcaaagccttaacctttgctttatgctcttgtgggaggcgacgggggggcaggcgggagcaggcacgggggtgatgctgccacagggggctggtgacacccagagccccctccccagccctcaggccctccctgccaaactggagaaccccaccccaaggcatgccacgtccgcagccccggcctggctgcggtgtcgcgccgtgggaaagcacactggggaggggtcagtgcttcccttggtgtcagggacctgagagtaagcacatgacagcgtctgcttgcgttgtgtctgttttatgtttttatatctacatctatatatctataattttatt

SEQ ID NO: 177068 - DNA, 400 bp, Homo Sapiens
agttgtttctctcttttctccctcatttcatggaggtgttaatgatcatggctggccgtgatgtacacatgggctgattttcattttttcagtttcatagctgagaaattcagctttgttttagttgaatcatcatattggaaagcagacattgaaagttttcttttctatctttgttatgaatgtgctatggccccttttggagacttctattgggtaatattctatgtgagagaaggaaacttggtattaaatgttgtggaaaataataatgatgataataataaagtatatgctgcaatggtgtactgccaatcagattgcttgggagaagaaaatttattcaaatccaacgataaaaaattaatttcttattgaataaacagtatgttcccatatg

SEQ ID NO: 177069 - DNA, 457 bp, Homo Sapiens
  misc_feature (222)..(257): n is a, c, g, or t
agaatgtgaacatgtgtgtgtgttgtgttaattctttctcatgttgggagtgagaatgccgggcccctcagggctgtcggtgtgctgtcagcctcccacaggtggtacagccgtgcacaccagtgtcgtgtctgctgttgtgggaccgttgttaacacgtgacactgtgggtctgactttctcttctacacgtcctttcctgaagtgtcgagtccagtcctnnnnnnnnnnnnnnnnnnnnnnnnnnnnnnnnnnnngcatcttgctgctaatcctgaggctggtagcagaatgcacattggaagctcccaccccatattgttcttcaaagtggaggtctcccctgatccagacaagtgggagaacccgtgggggcaggggacctggagctgccagcaccaagcgtgattcctgctgcctgtattctctattccaacaaagcagagttagacaccgt

SEQ ID NO: 177070 - DNA, 712 bp, Homo Sapiens
  misc_feature (30)..(30): n is a, c, g, or t
tacgtcctgggggccaggttggttctgagnggtagaaggccatccacccattcgcacggctgctccaggagggcttgccacagctgcttctcctcaggtgtggaatccatccagggcacctgcagcccatagctgctgcctggatgtgggtgggcaggggttgagggcatgatcacactggacaccttggggcccccaaacacctgcctggtcccagattatgcactgtcccccgttaccaccctcagttctcagtagatatcaaagctcaggaaaggacagagaggtatccagggccacacactgagcccccatctcccagggcctgtcccagggcctgtctcagggtgctgtcccacttaccggtgcccaggctgaggcgtgtgccccccagctggcggttggccagggccccaatggtccaagaggaagagctcggcaaaagcctggcgaaggtcaagcaggcccaaaagccatcgtacaccatggtgtgattgaacacagggctgaggctgcgtcgcacaacccttgtacgctggcggctggcctggctgtcatcaggcagcacgaagctgtgcgggaggtggcctggcatcaggtgacccccctcacactccctagagtcatccagtcaccacgtcccactcattctctctcacatatgtccatgtcccctggctcctgcctgcctggccttagaccctcactgccc

SEQ ID NO: 177071 - DNA, 427 bp, Homo Sapiens
  misc_feature (22)..(22): n is a, c, g, or t
  misc_feature (30)..(30): n is a, c, g, or t
  misc_feature (93)..(93): n is a, c, g, or t
  misc_feature (103)..(103): n is a, c, g, or t
  misc_feature (119)..(119): n is a, c, g, or t
  misc_feature (126)..(126): n is a, c, g, or t
  misc_feature (192)..(192): n is a, c, g, or t
  misc_feature (209)..(209): n is a, c, g, or t
aaaaaagacccctgggaaaagncccctggnaaaatgggggcctcagtgtgtggccccctggaaaacctctctgtcctttccctgaactttganatctactganaactgagggtggtaanggggganagtgcataatctgggacccaggcaggtgtttgggggccccaaggtgtccagtgtgatcatgccctnaaaccctgcccacccanatcccaggcagcagctatgggctgcaggtgccctggatggattccacacctgaggagaagcagctgtggcaagccctcctggagcagccgtgcgaatgggtggatggccttctacccctcagaaccaacctggcccccaggacgtagccccaccaagcctctctctctggacccccatctcagggcctcccttggctaaagtcaataaaaactattct

SEQ ID NO: 177072 - DNA, 600 bp, Homo Sapiens
  misc_feature (473)..(473): n is a, c, g, or t
  misc_feature (504)..(504): n is a, c, g, or t
  misc_feature (582)..(582): n is a, c, g, or t
gggccgcagtgatgggaggtgggcggcctccccgcagagcttcacggggcctggctgcttgggccgcagctccccctccaggtggctcttgtcgagctcttccaggtgcttggggagccccttgtcgtgggtcagactgggtgagctcacagggctgacgggctccaccccttcgggcctgtagctgctgccgtggtaacccagagaacggagttccagttcctggatggaaaagggtttactttgagtcttttcccggtgcgggtccgaggccgaggcaggtggcgccggcgggtccgggctggcgtggtgaggtgcgaggttcttcgcaggggtgcgggcgatggtggcgtggccagagacaggaggcactaggggccggggctccgagcccttgctgggggaggaggcgggctccagcccggagcgggctgggggcttggcgaggaaggcatggccggtgtctgctcggngccgctctggccgggcgaccccgggggcctncttgggcagcaagacgggctccattgaaggtaggtagaccccaatcgaggtgcccgccagttggccatgggtttgaangtgggatgtggcaccggg

SEQ ID NO: 177073 - DNA, 360 bp, Homo Sapiens
ggggccctggtcgcgtgtcttccgaactctgctgcttcgccccggcaagagcacttccttccgcggctgctaaaactggtgcgcgggttcccaacttcgcagaagcagcttcatcggccccccgctagagacctcagaccgcagccatcgacgcctcgcctcggggatctgtccccaccctcggggccagctcaccatgagtcaggccctgtgctaggtgctgggatgaagcagtgactgacacaggcctggacctgtccttgggaagagtgcgtctgtgacacagatactgtgccatgtggcaaagtaagcgcgtgggacagcagagccttgaatgcccctaaagtaatatcacaagtc

SEQ ID NO: 177074 - DNA, 526 bp, Homo Sapiens
gcggccgcctgcacctctgatgcggagaccaaggatgatgccctagcatggaagacagcactgctgggaggcaaactccaccccggtgcgcgtctacagcccgtaccaagactactacgaggtggtgccccccaatgcacacgaggccacgtatgtccgcagctactacggaccgccctacgcaggccctggcgtgacgcacgtgatagtgcgggaggatccctgctacagcgccggcgcccctctggccatgggcatgcttgcgggagccgccactggggcggcactgggggctcgctcatgtggtcgccctgctggttctgagccctgggacttcggagcactgacccctgcgcttggattgctagactcctcttcctcctggaccccatcctctaccatccaagccctgtcccactttggccctatcctctccattagctccttccgggtttggaccattccccccactccctacccttaatccccacatgggaagaagctatcatcacaggtacaaacatcg

SEQ ID NO: 177075 - DNA, 828 bp, Homo Sapiens
tgagagcatatatccttattagtaaactatgcatgactgtgtatacaatacctttataggtcaaaagcagtcaaatactggccatgagatacacttagtccaagtacacaaataattgcagaaggagaaagtgaaactcctcttacttcctgtcccactcatttatcacaaagcacacagaagtcagaataacacctgccctttgcaatttcagactcctctctttctgcctctccaaacctgtcccacgtttggcgattcctttcccttcgacctccccccatcaggtcgcaggttcctggtctacaccccttctgcgtccccaaccacttctgagtctcacaacctctggtcccataacccctctgcactaaggagcaataaacaaaattcacgcccgaacaaagaggccaaaacagcaacccaggatgtttgcgcctgcgcactctgggcgcacagtactcaggccggcagcccagcaccggcttatctgtgagagcaattaagatgactttcggagggtccaaccgccttcccagctccgaactacatctcccagaaggctcagttgtgcgattatctttccatgcagacttgtcctctttctgaggctgtccagcgcctgggggcagtaggacgggtccgggaactaagcccatctcaaacacgtcggagtggctttctttgggggccaaggcccgagcctgaggcgggactccatgaggcctctggggcgcgagcggtttgactagggggggcgatcctttcggcggggctgaagcaaggcgcggacaggaattctgacgatcgggaacaatcttgtccggc

SEQ ID NO: 177076 - DNA, 208 bp, Homo Sapiens
  misc_feature (137)..(151): n is a, c, g, or t
cctttggcctgggaatttttcccatttttatgaaggggttttaaattgtttcattttgtgtgctgtgcttcaaagccttaactgtcaaatcttgcattatcttgtttgtacagaaatatactggcctagcagaggcnnnnnnnnnnnnnnntgaattttattttacttgtcacacctgtcttaataaactggagttttgctgctaaag

SEQ ID NO: 177077 - DNA, 469 bp, Homo Sapiens
tttgctaaaaaggaagaaatgtgtaataactcctggagagataaaatgccaacgtttaggtatatttatgaattagaagcttccaaattgatatggagtaaagcagtgtcagatttttaaagtaagggttgaaacttggtttgccaaagctttcagggtgaaatcaagacaatcaagtactttaagtcaccacatccatacctaaaacatgctggcctgacccaagcttgaggtcctcagactgaacaggtgcaccgctgggatgctttcaagctcctggacggaaccgcctagctgagtgctccagggaggaatgccgctgcccacatagactagtggtactaatcaaagaaataaagcatttacagtcagcgctttaaaatgcaccttttggcacctggcgattttccaaaaaagtgcagaagaaaaagtccgagtcctctgggagtgtctgaagttgcagggaaaa

SEQ ID NO: 177078 - DNA, 142 bp, Homo Sapiens
gcccacgcgtgaccccctggacacgtgacagggcccgcgcggccccagacacgcccctggggcgcagagacaccgggttggcttggaggcgcgcggtttgcatgggatagggtgggggcgggctcccctagggacaggtgcc

SEQ ID NO: 177079 - DNA, 540 bp, Homo Sapiens
tgaatttttacaatgggagcccttcatcacagctttgtagttacctcaactctggctgttgagtaatttgctcagttaaatctgtttgtgggtgtagtgaattacaacctcctctggttccctcgagatcaagtctaacctggtgattgcgtcatctggtgggagagcacggctacaacagcaggtggaaaccatgctcgggtcctggccactttgcctaggatgaaagctgttgtggcaaacaggggaaagagcttcaagctttgtagtaaaaggaatctgggcttaaattcctcttatcagcactgtgaccttggagaattaatcattcttggttgtggtgagggttaattgagatcaggtatttaaaggacatctgacagtgcctggcacgggataggtgctccataaatgcctgtagctataattattactgttccactagctgtttacttaagtaacattgaatttccacagaatgcatttcgaatcaggtggactatgattatactgatttttaaaataaagagctgcatctgt

SEQ ID NO: 177080 - DNA, 872 bp, Homo Sapiens
  misc_feature (251)..(468): n is a, c, g, or t
  misc_feature (573)..(581): n is a, c, g, or t
aatgttgcaactagcaactcatcttcggaagacacagccaggagaatgaagtagaagtgaaaggtttataaatccatttgtaagcatttatcccatatattttaaattcaagaaaaattgtgtttatctttagaattttgtattcaatactttatgtactatgtgactcatgcttctggataaataaagcaccaaatatgtatctgtaaccacaatcacacatatcacattaaatatatatctatataacnnnnnnnnnnnnnnnnnnnnnnnnnnnnnnnnnnnnnnnnnnnnnnnnnnnnnnnnnnnnnnnnnnnnnnnnnnnnnnnnnnnnnnnnnnnnnnnnnnnnnnnnnnnnnnnnnnnnnnnnnnnnnnnnnnnnnnnnnnnnnnnnnnnnnnnnnnnnnnnnnnnnnnnnnnnnnnnnnnnnnnnnnnnnnnnnnnnnnnnnnnnnnnnnnnnnnnnnnncacccggtcggggccgccgccccctaaaaagatacaccaataacaaacctgcggtcctaaaaagaaacccgtgaaaagcaactctggctggataccttcaaaccnnnnnnnnncccgcgggggaacgcaaccactcatacgcgacaaccccccgggaggggccaaagttccttaactatagaccaccccaccaaggagagccctgaaccaaaccccgaatttataatccggtccaccccccccggcctaaacctattactaagggaaagatgtatcaacacttattacacacccgccgccatcaacacaacactattccataaagagagactgttgaaaatactccccccacgaccaggatcgtcctacccaaccaatttgtgcacccaaattaaatatatttt

SEQ ID NO: 177081 - DNA, 420 bp, Homo Sapiens
gggacggcggagccaccggagcgagcgcgagcggcgccgggaccgggatcgtgaccgtgaccgtgaccgcgagcacaaacggggggagcggggcagtgagcggggcagggatgaggcccgaggtgggggcggtggccaggacaacgggctggagggtctgggcaacgacagccgagacatgtacatggagtctgagggcggcgacggctacctggctccggagaatgggtatttgatggaggtgcgccggagtgaagaggtcgtcctctccatctgctgtgtttggacgcgttcctgcccagccccttgctgtcatcccctcccccaaccttggccacttgagtttgtcctccaagggtaggtgtctcatttgttctggccccttggatttaaaaataaaattaatttcctgttaaaaaa

SEQ ID NO: 177082 - DNA, 1154 bp, Homo Sapiens
  misc_feature (525)..(525): n is a, c, g, or t
  misc_feature (683)..(692): n is a, c, g, or t
tcccccatcggttgtgaagaactgtgctacattcaggcttacccattgaactcagtatatatatttttttccttcctgtcttttgtctggcaggataccattcttgttgctcttctgtgtaatgaagtttaaatgcttgtttggaaaactttatttaacagtttagaaggcttgatagaaagagtgcattagtctgaagagtatacattggataggaaagaatttccttcttttgtttctccaaatctttccgccttatttagcttgagatctttgcagcttggttcatggattctagccttgcccgttgcgcagtatatactgatccagatgataaaccagtgaactatgtcaaaagcactctcaatattacatttgacaaaaatgttttgtacttttcacataacttgttgccccgtaaaagggttaacagcacaattttttaaaaataaattaagaagtatttagcgcacatgtaaaattctgccagccatgtcacccaatccctgtccccacgtcaggaanatatatgccacttttgtgtcggcccgccccggcccctcgagaagttttcataaacttttcgttgggccgcgcgggccccaggaggaaaggtgacatggcccataggctgttcccaaagaaaatcccgggccatgacatagggctcggcattctccccnnnnnnnnnnccgcccggggggcaaccgaaggcgtttttaaaaaaatcccaaatggaacttctgggggccttcaccggggatttatccaaagggaggcccaaagcgaccccccattaatcaaatttacgccccccgcccctggcacctttattgccaagaactgggtgctaaatctatttaaagtctttttcggcccgaaatttgggaaggccccttccccacaacggggggatgggttggaacaccttggatatcgcccccgagcggggtatattcccccactcctttgggccgcgcctcctgggccgatattaaattattcttgcccccacctcgggaggagaacaaaacggcgggggggcgcaaaagaaaaaatctgctctcccacttaattgggccgcccacctctttcttacacactcccaaaaagcgtgggtgggaagattgtcctcgcctcccccggggcgcgtt

SEQ ID NO: 177083 - DNA, 815 bp, Homo Sapiens
  misc_feature (230)..(238): n is a, c, g, or t
  misc_feature (550)..(560): n is a, c, g, or t
  misc_feature (736)..(745): n is a, c, g, or t
gaggggcattttcacccagagcgagcaaacgctgagacctgaaaggacatggatgagaagaggagcccgcttcctgtacatatatttaagtgacaaacacggtcaaaagcttaagggacaggttttatggttgcttgtgtaataaagcatgtccttcgtatgtcacagtttggggcaacggaagtcttttagtgatggctaatgggtctgggcagcatcccttcatgaannnnnnnnnaatccaatatccgttgatttgattgtgattagagaaccttggacattttgctgctaaagaatcttttttcccctctcccccttcctgaccctacttgcactgctgtggatttttttaagagaagcaaaaacaaaagtaaactcctttccctggccctccaaacatatattctgtgagataactgtgcctgctaccaagtgttaatcctgggatcgtatttttatatcatattcacatatttgtttttttaattggtgttagatgacatgattaataaaaaaggcaagatattttcagaatttgaatttcagnnnnnnnnnnncttttgaaatgtccctttaagatttttttattctaaacaaaataaagaaaatcctgctgctctggtccttgtgataagcctctcttcggcatctgaggagcagctgcagcaaaatctaggggtgtaagtgtatcaggacttatgtgacttatattttgggaagatgaaggttgggnnnnnnnnnnaatgctacgtgacagtttgaaaccttcacagttatcctctgggggggtaaatcaatttcttccaaccctt

SEQ ID NO: 177084 - DNA, 438 bp, Homo Sapiens
  misc_feature (289)..(289): n is a, c, g, or t
  misc_feature (370)..(370): n is a, c, g, or t
  misc_feature (415)..(415): n is a, c, g, or t
acatatcatataaatatatttgttcaaactacaaagggatggatatcagggggaagcttttattgctgtggggggacctggagagggaggggggccttggaaatggggatacctgggaccacttgttccccccattcctcacagaaggcacaaatacattatttctttccatgtgaggagatgcgaggagaggatacagaatacaggaatcctcaaaaatacaaaaaacccctccaaactgaatacctaaggttatggaaaaggctagggtggggcacagaagtcaatnggggggaacagaaagaggaaccaatgaaactgagaaccaaaagggacctgagaggccatgatgtccatgctgctgcctctntgcagaccccagagaaaacttcagggtaaaccaacggaaactccnattaagggagggtagggttcccc

SEQ ID NO: 177085 - DNA, 689 bp, Homo Sapiens
  misc_feature (451)..(526): n is a, c, g, or t
cagacactaaatcgcacgtaggtggcgttgttccactcggatcaggccacagcagccccctggtgcggcccgagaccgggcagagtggacctcacctggaaactcaccttcagcgcctcagccctggactgttagaggtgctgcagctgctcctgctctctgatcttattgcttataaactttggtgacggtagtgtgtaaggccgtatttttagcatctgacaggtgtttacaaaaaagtggttgtcgcactgggaagtggagtgatggcctcgtctccagtgctcctctgggctcttgagttgctgcttgaattgccgtgtagacatttgcttggagagtccacttgttatttgacggaggtaggtttcaacccagagttaatgtcaagcatgctaatttaactagtcactcacagatgacttttctttaataaagtcccttttcctannnnnnnnnnnnnnnnnnnnnnnnnnnnnnnnnnnnnnnnnnnnnnnnnnnnnnnnnnnnnnnnnnnnnnnnnnnnccttgtcggccgccctcggccctcgaaaaagttttctaaaccatctcttttggcgccggcgggccccagtaggttaagggaaacagtggccaataccgtgttctccaaggaagaatcctgtggccagtgaacatagggcctgtggaatctctcccacccaaat

SEQ ID NO: 177086 - DNA, 697 bp, Homo Sapiens
  misc_feature (456)..(460): n is a, c, g, or t
  misc_feature (462)..(467): n is a, c, g, or t
  misc_feature (469)..(469): n is a, c, g, or t
  misc_feature (472)..(473): n is a, c, g, or t
  misc_feature (475)..(528): n is a, c, g, or t
  misc_feature (564)..(564): n is a, c, g, or t
catcaaatcgaaaaatgtggatgtgaatgtgaaagatgaagagggtagggctctacttcactgggcctgtgatcgaggacataaggaactagtcacagtgttgctgcaacatagagctgacattaactgtcaggacaatgaaggccaaacagctctacattatgcctctgcctgtgagtttctggatattgtagagctgctgctccagtctggtgctgaccccactctccgagaccaggatggctgcctgccagaggaggtgacaggctgcaaaacagtttctttggtgctgcagcggcacacaactggcaaggcttaatcaaaagactggaaaactgcagtctgtaatagcataaggcttccattatgaaagaaaactacaaaaataatacttcttttccacccgtctttggtatgtattggctaataaaatcagttctgtggaactgggaaaannnnnannnnnnanaannannnnnnnnnnnnnnnnnnnnnnnnnnnnnnnnnnnnnnnnnnnnnnnnnnnnnntcatcaaccttcccccggaacaaacacattcaccancacttaaagaaatttgtggccccccttgggcccttaaaaaatttttcaaaacatttcttttgggcgcccggggccccgtagggaaagggaacccggggcccaaacgggtttccccaaggaaaaacccggggcc

SEQ ID NO: 177087 - DNA, 402 bp, Homo Sapiens
cattcgtagcgatatgagtagggtgcgtcaataaaggaccaaccagatgcaggagtggatgacttcattgctcgggactttgttgcttgggtgaccctgaccttcaggccccggcaccctaggccaggacgctgtcgatccaggccgcatagctcgccacgcgggtgtagatcccgggcttcttgcggttgccgcaaacgcgcgagcccgaggtgaccacgccctcgagcacgcccccgcacaccagcgggcccccggagtcacccttgcagctgtcccggcgattgctctccgcgcacatcaagcgctcggtgatggcgccgtcgtggtgcgtgcgccggtttgcaggtggcgcggtccagcactggcaagagcacgtgctgcaggctgtccgggcggcgg

SEQ ID NO: 177088 - DNA, 467 bp, Homo Sapiens
tttggtgggtagctaatatggtatatttatttcacagtttcacatctttatcattgtttttatataaaaacaatgcttaagtggggtttcagaacagatatttcctttaaaactttttttaaaaaatcacaaatatgattggctcatacaaccacattacacctcttttcaccagcactcccacccattcccgttagaaatatttggttaaaaaaatcaggtgatcaaactcatagaaactgaattgtgagaagtataatgggaaaaggaatgagaacctgtggctctagggagttacagaagggaaatcatcttttagagccttggtttatttctgacaggaaaggtaaagccgtgcatttattagaacaggaagctaagaaattaaagatggcgagattgtctaaaataactgaggctgaactggaagcctttaccctggcacactcaaaaatcacttttggtac

SEQ ID NO: 177089 - DNA, 1099 bp, Homo Sapiens
  misc_feature (347)..(418): n is a, c, g, or t
  misc_feature (623)..(631): n is a, c, g, or t
  misc_feature (995)..(1003): n is a, c, g, or t
gagcgaggcctgggtggcgaattcggcacgaggggaagaggtttgttaatacgttcgccatgtgctacgatcttgggacgaactgagccacgagcgtggctttgagggccgtccgaacgctgcaggccggccaggtccctgggcgtccaggcctggcctacgcaccactttgtcccttagcgtttaaaggtttcttcccgaatctcaggccctcagctacctgcaggtttcgtcgcgagccggctgcaagttttgaacctaagtaaacctcaatccggagggcctagcggtaaggtgggcgctgtgtctattgaggtgcttagcaataaagaaaggtagtgagttgnnnnnnnnnnnnnnnnnnnnnnnnnnnnnnnnnnnnnnnnnnnnnnnnnnnnnnnnnnnnnnnnnnnnnnnncctcagggcttttttgtcggggggggaaaaaaaggaaatgaaagggcccagggccatagttgttcccggacccactttttttgaaaaaaggggaaaatctgccggcccccctatagggagccgaattatttccaaaaacccaggtaaccctgcttaaaggaatcggttgcaaaacccggaaatttaccccccctaatgagggggnnnnnnnnngggaccaaaaggatcttctggaaaccctttttttcggcaagaaatctgctgtttgaaaacaaaaaaacccccgttaccagggggggtttgtttgccgaatcaaaagttcccacctttttttccaaaggaaacgggttttcccaaagcgcaaatcccaaatacgggttcttcaaagggaacccgaaatttagggcacccctttcaagaactctgaaaacaccggcctaattaccctggctcgggaaaacccgggtaacaaggggcttgctgcccaggggccaaaaaaaccggggcttttacgggggtgggaacttcaaaacgaaagtttacccgaataagggcccaggggtcggggtttttaaannnnnnnnntttcgtggaaaaaaagcccaattttgggaagggaaaagaaccttaaccccgaactggaaaatcccctaccgcgggggggccttatgaaaaaagccc

SEQ ID NO: 177090 - DNA, 483 bp, Homo Sapiens
tgaggctgcctcagaagcaccacttgctgttttgaatgactctactagtatgagaaggatgtgaaggtggttggctggttgggctttaacttcctgggattcataatttttaagcttggaagatagctgctgttcccatgatgggcacatttcctgagaagcttgaatgactgatgagcatagagcacccctgccttcctcaggaaacctgaccggcaggggctctctggcttcctgaaagcttcacctcttccctcgtttatatctcaactgtaagggcattttcaagcttctgttcatggaatgagcaactcagactgtctggagcttgctgagtacaaacacaccaccactaagtttcagaactttccttagaacttgggcaaaatgtggtggtaactcttaagtgcttttggtatctcttgagattctaacttttaaagagcaaccattaatgtgtaaaatgattcctattattcaagg

SEQ ID NO: 177091 - DNA, 547 bp, Homo Sapiens
atcttgggagactcagtacaagtagatcaacccatctcctctctacattttcagggaaatttggctcagagtccaaggctgaaccttgtgatgaggaaaccttgctggaagctgacctttactgtaggggccctgattcaatatcctatatccacaaaaaatgcacatacagggcagcgaggttctagccttcccctctgccatcttgatctgtgagggtctccttggaaaagtctatgtgtctcctacagtgccaagcaggggaggaatcagaattagtccaggtggcagcatccttttatgatatgatataaactcaacaaattaggtatagaaggaatgtaccacaacacaataaaggccatatatgacaagcccacaggtgatatcacacttaacattgaaaagttgaaagccttttcctgaagattaggaacaagacaatgaatgatgcccacccttgccatttctattcaacatagtactggaagtcccagcaagagcaattaggcaaggaaaataaataaaaaacatctacattggaaag

SEQ ID NO: 177092 - DNA, 417 bp, Homo Sapiens
  misc_feature (12)..(12): n is a, c, g, or t
  misc_feature (21)..(21): n is a, c, g, or t
  misc_feature (37)..(37): n is a, c, g, or t
  misc_feature (63)..(63): n is a, c, g, or t
  misc_feature (78)..(78): n is a, c, g, or t
  misc_feature (91)..(91): n is a, c, g, or t
  misc_feature (128)..(128): n is a, c, g, or t
ggccccattatnccccaaggnaagtggtgggcctggnataacctggacaaaaaccccggcccngcagcccggtagggncggatataccctnatataaacatcatcctgcattattaatattaatagcngccattttataagcagatagggaatatttaaataatcattatcagataatcaaatctaacatactcttaaagggtaatattaatttaagaaaaaaattactattactaacatcatgattgtacaaccagttttacaattttgtacaacctttagttactaaatctgatttttgtgtatacttttcaaatgtctctttaatgcagtgccttaaaacaaacataaatgcgcaagtccagcttgatcagtttttcagtagttttccagcctttcttgattactagaaaataa

SEQ ID NO: 177093 - DNA, 501 bp, Homo Sapiens
ttctaggaagctcagagctagattcaggggtgcacccagacctgtcctagcatgctcctttccctaatgaccgagtctttcctgttgaattatcccattctccatgggtgcctttgactttggcctccttactggaaattagcggagctgcttgtttgcacacactgagctgtgaggtggctttccttggaagtggatgatagtgtcctcttcccttcttgcctctctctttctcctgagacaggatccccctggggcctaggtttgctcctttgttgtacaggggctgtcccagttagtgctgacctcatcccagaaccccctgggaaatatcccctgtcctcagagctgtgtcccctccccaaggacagtgcagactaactgaggagcctgataaaccttagctgcatggcacacttgcaattttaaaatccttctgaagttgactggtgtttgtacttgcttctcttttttatttaataaaatccaatgatccaaacc

SEQ ID NO: 177094 - DNA, 831 bp, Homo Sapiens
gggagctaagccagacccgggtggcggtggcagctgcgaaacccagggagccgatgccacgtgacccaatgtggacttcttttaaacctttctaatgcccataacccagcctcagacccatggagcccacgagagactgcccgctgttcgggggcgccttttccgccatcctccccatgggggccattgacgtaagcgacctccgaccggtcccggacaatcaagaagttttctgccatcccgtgacggaccagagcctgatagtggaacttctcgagctgcaggcccacgtacggggcgaagcggctgcgcggtaccactttgaggatgttggtggcgtgcagggggctagggctgtccatgtggagtctgttcagcctctcagtttggagaacctggccctgaggggccgctgtcaagaagcctgggtcctctctggcaagcagcagatagctaaggaaaaccagcaggtagcaaaggacgtgacacttcatcaggccttgctgaggctgccccagtaccagactgatctcttgcttaccttcaatcagcccccccctgacaacaggtcatctcttggccccgaaaatctgtcacctgcaccctggagcctgggtgactttgaacagctggtgaccagtctgacccttcacgatcctaacatctttggtccccagtaaaagcgctgaaacactgcatgatgttgctgagaacttggggactcgggtctgggagggggaaaagaggttgaaaagagggtttcctcttatttcctccctgtgcgtaaacataagacaatccctcttcagaataaacttgctttattaatct

SEQ ID NO: 177095 - DNA, 447 bp, Homo Sapiens
  misc_feature (46)..(46): n is a, c, g, or t
aaccccggggtggcgcaaccctgagggtctctgggggtgtttgccnaggctccctgggatgggcccgctttcagaaagccctgcagtgcctccagatggaaaggcgggcccggcctccggttgggtctgcattttggagagtccacaccacggacccaggttttcccccaaggcttggctttgtgtagctactaacttcttggggcattctgagagtgtgggcagagagaattatgtggcctcatcctcccccaaggctgtgcttgcagcccgggcaccttcccactttctagctctggagaggttggattttgcttttgtaaacacatgaatccttatgataaaagtctgtcagtcaaaaatacatttataaattatttaatgccagtcctcatgtaacctcaggtatcttcagcttgtggagaataaatctggtttaataaaaaa

SEQ ID NO: 177096 - DNA, 1382 bp, Homo Sapiens
  misc_feature (718)..(718): n is a, c, g, or t
  misc_feature (720)..(722): n is a, c, g, or t
  misc_feature (724)..(724): n is a, c, g, or t
  misc_feature (727)..(727): n is a, c, g, or t
  misc_feature (729)..(744): n is a, c, g, or t
  misc_feature (1125)..(1145): n is a, c, g, or t
tcagagttcctggcccggtgcacctgagaggtcgctctccgactcccgcgctggaccctcttgcgccattgaaccccctgatccgggggcctcggaccccaggctcaggaggactgaaccaagacttacccgaagttgccgcggggccttccgatcccctaggccattgcccaagtctggccaggctgatgggaccagcgaggagtctctgcaccttgacattcagaaactgaaggagaagagggacatgctggacaaggagatctcccagttcgtatctgaaggctacagtgtggatgaactggaggaccacattacccagcttcacgagtacaatgacatcaaggatgtggggcagatgctgatgggcaaactagctgtgatccgaggtgtcaccaccaaagagttgtatccagagtttgggctggacatgaatgactgagcaggctcatcgccccttgtccacagctcccagggacagaagggtgtggacatgataaacactgagagcccaaccagcacacctacagagtttccagcgagacaatgccagaagcacttttctagagagcccaagcccaatcaggaggaggctagagaagaggcgggcagggaggaaggggcgttcccagctccaaggttcctgaaatgtcgcagtgatacttgtgtaggggtacatgtactttatttgtcaataaacgtatctgtacactggaanannnanaangnnnnnnnnnnnnnnnnccttgtcgggcccgcctccggccctccgagaaagcttttctaggacacattcgtttttggcgcggcggggccccagttagggtaaagttgaaccatgggtccataggctggtttttccttaaggaagaatcctggggcccttggacataggtggccttgggaattccctcaccccaattaaaaaaaacacgcccccggggcggggccaaacaccgaaaggcgtttttctgtgaaacaaaaaatctccaaagtagggggaagttttcctttgaaagggctccaatattaaccccggggaagatctttatttccccaaccaggggaatagtttccccaaaggcggggaaagctctccggagaatagatctcaaaatattttannnnnnnnnnnnnnnnnnnnngttggcgccacctttctatttcggcgaaagtaaaactgggggttggggcaaaaattttccaattttataagggcgattttcctcttgcccggaaacaattgtgggaaaagccccctttcttccgcaaaaaaccggggtctattggagatgtgaaaaaccctttgaaaaattccgcccaccaagggggggatatatacaacgccacacaccttggggttcgcagcccttgtggggccg

SEQ ID NO: 177097 - DNA, 1257 bp, Homo Sapiens
  misc_feature (1027)..(1027): n is a, c, g, or t
  misc_feature (1041)..(1042): n is a, c, g, or t
  misc_feature (1044)..(1047): n is a, c, g, or t
  misc_feature (1049)..(1050): n is a, c, g, or t
  misc_feature (1056)..(1061): n is a, c, g, or t
  misc_feature (1063)..(1064): n is a, c, g, or t
  misc_feature (1066)..(1067): n is a, c, g, or t
  misc_feature (1102)..(1103): n is a, c, g, or t
gggaagataaagcgcggccgacgggctccgagcgcggcccctgggttcgaacacggcacccgcactgcgcgtcatggtgcaggcctggtatatggacgacgccccgggcgacccgcggcaaccccaccgccccgaccccggccgcccagtgggcctggagcagctgcggcggctcggggtgctctactggaagctggatgctgacaaatatgagaatgatccagaattagaaaagatccgaagagagaggaactactcctggatggacatcataaccatatgcaaagataaactaccaaattatgaagaaaagattaagatgttctacgaggagcatttgcacttggacgatgagatccgctacatcctggatggcagtgggtacttcgacgtgagggacaaggaggaccagtggatccggatcttcatggagaagggagacatggtgacgctccccgcggggatctatcaccgcttcacggtggacgagaagaactacacgaaggccatgcggctgtttgtgggagaaccggtgtggacagcgtacaaccggcccgctgaccattttgaagcccgcgggcagtacgtgaaatttctggcacagaccgcctagcagtgctgcctgggaactaacacgcgcctcgtaaaggtccccaatgtaatgactgagcagaaaatcaatcactttctcttttgcttttagaggatagccttgaggctagattatctttcctttgtaagattatttgatcagaatattttgtaatgaaaggatctagaaagcaacttggaagtgtaaagagtcaccttcattttctgtaactcaatcaagactggtgggtccatggccctgtgttagttcatgcattcagttgagtccccaatgaaagtttcatctccccgaatgcagttccttagatgcccatctggacgtgatgccgcgcctgccgtgtaaaaaaggtgcaatcctagataacacagctagccagatagaagacactttttttctcccaaatgatgccttggnggtgggggaatggnnannnngnnaaaaannnnnncnncnnaagggggaaaaaaggaaggggggattggccccgtnncggggtcacaaaaaaaggaaacccggcctaaactcttgtcgcccaccagacccgcgtcgccgctactcctccggggccctcgttttccgcggggcgcaagaaaaaagggggcaattaaagcggggagggggcagtaccggctgtgttgcgtggc

SEQ ID NO: 177098 - DNA, 688 bp, Homo Sapiens
ggggaactaacacgtgcctcgtaaaggtccccaatgtaatgactgagcagaaaatcaatcactttctctttgcttttagaggatagccttgaggctaggttatctttcctttgtaagattatttgatcagaatattttgtaatgaaaggatctagaaagcaacttggaagtgtaaagagtcaccttcattttctgtaactcaatcaagactggtgggtccatggccctgtgttagttcatgcattcagttgagtcccaaatgaaagtttcatctcccgaaatgcagttccttagatgcccatctggacgtgatgccgcgcctgccatgtaagaaggtgcaatcctagataacacagctagccagatagaagacacttttttctccaaaatgatgccttggggtggggagtggtagggggaagagctcccaccctaaggggcacacactgagttgcttatgccacttccttgttcaaaataaagtaactgccttaatcttatactcatggcttggagttaccttatattcaggtatatgtgatattttgcctggtttgttaaaattgccccatttagattccttctataattgttcttatagataagtaatttatatatgagctgtgttagtattttttcagtgtgagatctctggattctttcacaataaagctgttgaattttacaa

SEQ ID NO: 177099 - DNA, 669 bp, Homo Sapiens
ttgtatgttctacatgccgggcccagcttcgcggccagcatttctacgccgtggagaggagggcatattgcgagggctgctacgtggccaccctggagaaatgtgccacgtgctcccagcccatcctggaccggatcctgcgggctatggggaaggcctaccaccctggctgcttcacctgcgtggtgtgtcaccgcggcctcgacggcatccccttcacagtggatgctacgagccagatccactgcattgaggactttcacaggaagtttgccccaagatgctcagtgtgcggtggggccataatgcctgagccaggtcaggaggagactgtgagaattgttgctctggatcgaagttttcacattggctgttacaagtgcgaggagtgtgggctgctgctctcctctgagggcgagtgtcagggctgctacccgctggatgggcacatcttgtgcaaggcctgcagcgcctggcgcatccaggagctctcagccaccgtcaccactgactgctgagtcttcctagaagtacctgctgggttctcagttccagttcccatcctttgattgatcactctccctgacatccacctgtatgactttgtcaccaaatgctgtcttctctttctccaatcaagaaataataatccctcgagtttaccaaacc

SEQ ID NO: 177100 - DNA, 444 bp, Homo Sapiens
ctgggtgtcctcatctggtgtgtctactggagggtcccacaggagaggcagcagaggggtcaggggaggtctcctgccgggggttggcctctcaagcctcaggggttctagcctgttgaatataccccacctggtggtggcccctccgatgtccccactgatggctctgaaaccgtgttggtggcgatgtcccagaaaatcccacccaggacggcccagaaatccctaactggcttcgctggtggctcatctcgaacatccacgccagcctttcctggggccggccacccaggccgcctgtccgtctgtcctccctccagcagcaccccctggcccctggagtggtggggccatggcaagagacaccgtggcgtctcatgtgaactttcctgggcactgtggttttatttcctaattgatttaagaaataaacctgaagaccgt

SEQ ID NO: 177101 - DNA, 477 bp, Homo Sapiens
ccggaacgagccgtccaggttggcacggtggatgaagctgagcttggcgtcagcccagtagagcttctgctcctccaggtcgatggtcagtccattgggccagtaaatgtccgagtccacaatgatcttccgggtgctgccatccatccctgcccgctcaatccggggcgtctcaccccagtctgtccagtacatgtacccgtgagcggggtccaaggcgatggccctcggctggtcaaggtcctgccagaagagcaccttccgggatgtgccattgaggttggccacctcgatgcggttggtctctgagtccgtccagtacagcttcttgcccacccagtcgcaggcgaggccgtcgggagagaccaggccggagatgaccacgttctgcacggcggcccccgtctggttcaggtaggtctgcttgatggcctcctcgctcacgtctgtccagtacacggctcccttggaaaactg

SEQ ID NO: 177102 - DNA, 533 bp, Homo Sapiens
gtgagacccgggacctgccccggacccccagttcctgggttgaacgaccacatcatgccacggtgcttgctcaggggaagccacgctccctctgtggggcctgctggggcctgggagccccccactgagcccacaatgccacggaaatccttgttggctgcccccgagaggggccttcccagctgggaagagctcagagctgacagctgcctcctgccatgtcaaggccccccaaagagcctcaggggctctggggccctggagggtggggttggggggtgggactctcctcccccactcctgctccctctcccttttcactgttgctttctatgtatagctccctagacctttcacttttttaaaaacgcgttttgtgtagagaataaggaacgtggatctttttattttgcaatcctgggccagctagaagccaggagctgattgaccttttaacttttttcagtggccacattttggttatcgatgtacctagaagtatgtaaattagattaaatttctcttctggaaac

SEQ ID NO: 177103 - DNA, 439 bp, Homo Sapiens
ctgaatgatagcatgaaaagtgtcaaagtggtttgtccgctagcgtctgtctgcagaactttcaggatgactattaattcctctcagatgtcatttttgagtggtccaagcctgctgttttgaacccacagcagtggagatttgtattcttatttacagttgtgtactataaagtgtgtgttacataggttttgtgtaataattatttgtaaatattatttagatttgtatttagacatgatttatatctaatatagatacaaagtctgtgtctaaatattatttaaagaagtgatttttcattctcttggattctttccagtgtggtgccttttatatgcctcacatagtctccttgttctcccactaatattcccaagctccatatgccaattaaagaagaaacaaaaataaaagtttgtcttgcttgtgaaacatt

SEQ ID NO: 177104 - DNA, 1346 bp, Homo Sapiens
  misc_feature (626)..(757): n is a, c, g, or t
  misc_feature (912)..(921): n is a, c, g, or t
  misc_feature (987)..(1031): n is a, c, g, or t
  misc_feature (1178)..(1178): n is a, c, g, or t
tccttggttttctcctccacctctctgaaatcatctcctattgagggatagaaattgttactagaagagaatcacatgttctgtgttcattatccctacacatgtaaattaattattttatcaatactagatagagttcacatgctgactccctggatacctacagttgagaagaaaatgacagacaattatttttcctttaggtcaaaataatgtcactgctatctggataaattataagttcatatatttgaaataagatcctggaaacgaatttaaatggtgtcaaactgcagagcaacagggcttcagtatattcacatctaataggttaatatgtacatttggatgatgatttttcttgataacattaacattaattttattttttcagacatactgtaatttaaaaattaatgtgagcgtttgttttaagttcacagaaaacttaataattcaaattctcaggaattaaggactcaccataacattgtcagttctaatgaaattttgtaaaagatggcaagtttgttacctcacttgagtggggttttccttttcccccaattctaagagaatataatgtgtataataaaacattaataaacataattttgaaaatttcnnnnnnnnnnnnnnnnnnnnnnnnnnnnnnnnnnnnnnnnnnnnnnnnnnnnnnnnnnnnnnnnnnnnnnnnnnnnnnnnnnnnnnnnnnnnnnnnnnnnnnnnnnnnnnnnnnnnnnnnnnnnnnnnnnnncttgtccgcccccctccgccccctcaaaagtttttccaaaaccttttgtttttgcgcgcgcggccccctaaagagaaaaggaaactggggcacatagtttttttcccaaaaaaaaccctggcgccagagaaagagggtttggatacctccccccnnnnnnnnnncccccccgggggggaaaccccagaagggtttttgtaaacaaaaatcccaaaaaagtgagcttcttnnnnnnnnnnnnnnnnnnnnnnnnnnnnnnnnnnnnnnnnnnnnnaagctcccaaagcgggaacgctctccggaataattccgaataatttcccaccgcccccaccccccgcacgcatgagcaaaatctaatatattcagagaacagaaaaaccatgggtgatgggagagaatatctgtcctattataaacncgcgttctttttcgcgcgccacaaaatatgggtgtaagaacccctctctccacgacacaaaagcgggcggaggtgtggagggagaacaccctggtaaaatactcccccccaaggcggggataatattagggaccacaccttcttttggcgcgccgcctttggggcgcg

SEQ ID NO: 177105 - DNA, 432 bp, Homo Sapiens
  misc_feature (17)..(17): n is a, c, g, or t
aaacattactcattatnctaataaaataaataagaaataaagaagaatgggatcaagagaggaaaaggcattctgctcaaaggacgtttatagctttgctgtggttatccactaagtgcatcagttaaagaagcacgttttatcttcttttttgcttctgtttagacttcatgttaaaatggctctaggcttttctattaatagctctagctagttggtctttatgaagacatgctgcactaaatttgttctcatgattagaatcttgtaatcataattacaagaaggtatcttctcaacccctcaaattactcatttgtttttatagaggctgaaataatagagggctgtaagatttgacattcatccaagttaacccctttattgggttgttatggtgaggggaataaaaactgaccttctttcttcctt

SEQ ID NO: 177106 - DNA, 751 bp, Homo Sapiens
  misc_feature (367)..(375): n is a, c, g, or t
acgggaattccttatttgggatgtcaagagggcagctgcaaactgaaaaacaatccagtaaatgtacttgttttatgtattgtagcaggcaattaactactaaataatagctttgacatttgcaattgttgcatagagactatttttgctagaagatgattagctcttgcctttattttacagtgcttagtgtgataaacttctagtcatgtttcctatccaagagaccagttaatatatgtacataaaccacagaaatagtataacacactatttttaaattatcgttttcctacttaaattttgtttagcttaagacttcttaggacatttgtaaaagcaggttaaatttaataaggtttctgannnnnnnnngtaaccggagatagtttttacaagtgaaataacatttcagctaaataaaacatcgctaaataattgatatttgatgaaaatctgctttgtataatttctgtaaattatccttgttctgaaaaaggtgtaatgccctaatatttttaaatccttatcctttgattttttaaaaactgacctattgataaaactataaattttcattttccagtgcagttagttacctttttaaacataaatgcacaacaagcaaatgaatttaagagaactaaactggaataagtgttcataaatgaaacccttggactatttaataaagttgaaatgtggattaaggaaaacttttgttaataaaaactttcttttaagtgaaaaa

SEQ ID NO: 177107 - DNA, 1076 bp, Homo Sapiens
  misc_feature (559)..(567): n is a, c, g, or t
cggatagaattcgtttcgagcggttggtccaaggaaataagggggtgttcaagtgggcgccaggtccatgcgccactcttcgccaccgccctctcccgtcgcttagtggcgtaccggcctaatagaaatcgcctagacgtgcgacatgatggagtccgcgagttgatcgaaaaagggaagtgtttttatgaacccgaaagttttcccctagattcaccattggaaatgtgaattaagtgatgcgcaaggggtttcaatttaatgggcccttaattcccagcatagtttttcgtaaattccatttgcttggttggtgcatttatgttttaaaaggggtgggtaattgcaatgggaaaatgaagatttatggttttgtcaataggtcagtgtttgaaaaaaggataaggatttaaaaatattagggcaattacgcctttttcagaacaaggataatttacagaagattatacaaagcagattttcatcaaatatcaattatttagcgatgttttatttagctgaaatgttatttcactggtaaaaactatctccggttacnnnnnnnnntcagaaaccttattaaatttaacctgcttttacaaatgtcctaagaagtcttaagctaaacaaaatttaagtaggaaaacgataatttaaaaatagtgtgttatactatttctgtggtttatgtacatatattaactggtctcttggataggaaacatgactagaagtttatcacactaagcactgtaaaataaaggcaagagctaatcatcttctagcaaaaatagtctctatgcaacaattgcaaatgtcaaagctattatttagtagttaattgcctgctacaatacataaaacaaagtacatttactggattgtttttcagtttgcagctgccctcttgacatcccaaataaggaattcccgttaagtaaaacctgcagtgcaattcactcagtggttagtttcaggccaagcctccccctacccctcgtgcggaattcgccacgcaggcctggctacggggtctctgtctccattacaaacagttatatgcgcgagaaaacgcg

SEQ ID NO: 177108 - DNA, 820 bp, Homo Sapiens
  misc_feature (658)..(658): n is a, c, g, or t
  misc_feature (668)..(668): n is a, c, g, or t
  misc_feature (675)..(762): n is a, c, g, or t
  misc_feature (770)..(770): n is a, c, g, or t
gggacccacggccggccgcggagccgagtgctgacccgggtgagaggttcccgcggctcagggaagatggcggcagccgtggtgctggctgctgggttgcgcgcggcgcgcagagccgtggcggccacgggggtgcgcggggggcaggtccgaggagctgcaggtgtgactgatgggaatgaagtggccaaggcccagcaggcaactcctgggggagcagccccaaccatcttctcccggatcctggacaagagcctcccagctgacattctctatgaggaccagcagtgtcttgtgttccgtgatgtggcccctcaggctcctgtgcacttcctggtcattcctaagaagcccattcctcggattagccaggctgaagaagaagaccagcagcttctaggacacctactccttgtggccaagcagacagcaaaggctgagggcctgggagatggataccgacttgtgatcaacgatgggaagctgggtgcacaatctgtgtatcatctgcacattcatgtacttgggggccggcagctccagtggcctccaggttgaacctgccaactgattaaaggacaccagactctggatgcttggatggaaagggaaaaatggaccctgtgatgctaataaaactgttctcccttaaaaaaanaaaccccaanaaaaaannnnnnnnnnnnnnnnnnnnnnnnnnnnnnnnnnnnnnnnnnnnnnnnnnnnnnnnnnnnnnnnnnnnnnnnnnnnnnnnnnnnnnnnggattccntcatcacctgtacgccctctagagttactcttagcccgttacctctgcgt

SEQ ID NO: 177109 - DNA, 1480 bp, Homo Sapiens
  misc_feature (468)..(478): n is a, c, g, or t
  misc_feature (632)..(703): n is a, c, g, or t
  misc_feature (1152)..(1152): n is a, c, g, or t
  misc_feature (1194)..(1194): n is a, c, g, or t
  misc_feature (1430)..(1430): n is a, c, g, or t
caccacctgacgctgcatcagacattgacaccagtaaagcccttcttgggggcactgctccctaccccagggccctggccagccgggagcttggctctcctctggctagagtgggaagagggggctggccatggggccctcccagaacctcagcatttccttccagcccatccaaacactgaggcagccttggggaaccccgagctggggggttggcagcccactgcaccgcctcagggttttggggtcctgggctggggccaccatccctgatggcagaactcccacaaccacatgtatttattcctctgtcctaaaccgtcccctccttccctcacccccagcacagggggattctgagcagtgcctcttgtctgagggacatatcagtgacctcgacgttgcctttagactacagttgtgttagcctcttgcgtattggctttttcagagtcatttatgagcagnnnnnnnnnnngtaaaactttgctaatattccaaacaagcccaaaaaaacccccccgagtttccacacccctcataagccccgccccttttatacccatctttccccctcgcctgcgccgtcccccttgtttcactccccccgcccgccccggccaaaaagccannnnnnnnnnnnnnnnnnnnnnnnnnnnnnnnnnnnnnnnnnnnnnnnnnnnnnnnnnnnnnnnnnnnnnnngcgcccccgcggccgcgccctttccttctcgatttacccgccccaattttgttttttcgcgccgcgcctctctacaaaataacacacaccgatatgtctctctgcgactacctacgcaccgccggcgttctcttcgtacccttataacacaccaccccgcccgcgcgcggcgtgttacgactacaccctgttacgccgcgcgcgccgataatattatacctactattatataagcgacttcggcgccgccgccgcgcatatatataatcctcgacccgacggagctgtcgtaagcagagaccgcgctccagacgcacgcgcgcgcggcgtcgtatcacttgttagtcgaccccggccggcgcggcctcatatcgagtatgcgacattgtgtgctgctctctcgtgacgtcacggcgcgggcgcgcggcgtgtcgtcaaacgacgttcgngatatccacccgtctcgcgcgcccgttcgctcccgcatattnttactattcatcaaccctggtgcgtgagtatgcgacgccattgccaccccccggcgacctcgcacgtatatctaccacgcttctattcttctctcgtactcaatgactccgccgtcacgaataacacccatgactgccagcacaggccgagatgtactggtagagagccgttatcataccggctcgtatacttctacgcggcggcattcgcccccattcttctgtattaaagcganggcgacgaccgccccgcctcgtcgcaggctgcacgcacaagcacgctctc

SEQ ID NO: 177110 - DNA, 966 bp, Homo Sapiens
ggtgacctgttcacagcacaggcttcttttgtgttctgatggtgatatttgaccaacaataatcacaaccactctgcacatttactatatgcaaatttctgttcatctctgatctcctttcctgcttcaaacacccagtgagcttggagttttaccaaaggggaaaccaggacttaggaagtaatgagggatgttgttgaagacttcttgtcattagaccaggttattggtccaaagtaatgaaggtaaatctagtccctgaggacaggctcactaccaggctataatgggaatttgtgctaattagagaaactttccctttctgctgcgctttgtcccaaggacccaaatttggccagtgttccccctctctataaccaaaatatgtcttatttccctctcttttaataccaggaggggtccctctactccagtcgaaagacaatctttgagtgctttgacccgaatacatcctcccacatctcagggtcccacaacttccccatcagggcccaaccccagcatagaagccattaaagctgacattcaacatcctttgtgattctgctactcttctaatgatggctggggcccaatcttctattctttctgccctgaggctccaggaaataagaataaggactcaggttccttccaaaacaccctatgatgtttgcgtcatctcctgggtcagtgctgagtcacggatttgttcatgtccctgcctgccagaagaggaaagacacgaaatagaagacaaacaatgtccccaatcatcagagatgtgtggaaggtgcatagtcacgtccactgaaaactcgctcacgcatgcacctgcagttgcacattgagggatcatgtgatcaaggacatttttcacaaaaccagtgtcattgtccacttaaattttaagtgttcaaatcactaaatttcataaagttattaaaataatttcctcatatcatc

SEQ ID NO: 177111 - DNA, 462 bp, Homo Sapiens
ccttgtgggtctctccaagaagcgaccacttgccctgcagcgtgaagctcacgggctgcggggagagccaggcctggagcagcccttctggatatcgtcggtggcagccctcctcaacacagaccttgtggccacaggctcccacagctcctgtgtgcggctttggcagtgtggggaaggcttccggcagcttgaccttctctgtgacataccccctggtgggttttatcaacagcctcaagttctccagctctggggacttcctggtggctggggtagggcaggagcacaggcttggccgatggtggagaatcaaagaggctcggaattctgtctgcatcatcccactccgcagggtccctgtacccccagctgcctggttcctgacactcttaatcctccttatttaagtccttcccgagctatgccccaccctctttgtattaaaagcctcctcttttg

SEQ ID NO: 177112 - DNA, 430 bp, Homo Sapiens
  misc_feature (401)..(401): n is a, c, g, or t
aatgcgtgtttacaagtggcccaagactgtgggactgacgtacttgacctgtggaccctgatgcaggacagccaggacttctcatcttatttatcagatggactacatttgtctccaaaggggaatgaatttttgttctcgcatctctggcctttgatagagaaaaaggtctcttctctacctttgctgcttccttactggcgggatgtagcagaagcaaaacctgaattaagtctgctgggagatggagaccattagccaatcacaggagacccaaatctgcttgttatctacagaactcaaagttgtcaatacgtagaggtacgcttttttcctcaggcttaaacctttgccactgatattaataataaaagtattagatgattttccaggggaaaaangagcgcgaggacactaacgaaacatgtcg

SEQ ID NO: 177113 - DNA, 376 bp, Homo Sapiens
agccaagcttgatgattgcaacccgggagcatagatgcaagttgccctgaatatacactccaattagcagcagttacaagtggatttttaatggcaaaaaaagctgacagggagtggactgctacaaagttttttgtcaggaattcttaatggtttacagaaataacattggttagtgattggctgtaaattgttaaactatacgacgtgggttatagtgttgtgtatggcattattaggttaatttatagctacttgtggcaaaagtaagcagtctcaagagatgaatacatagctcaaagggaagagtgaggcatgattgtgatctcttttaatgtctctctaggtctggtaattaaaaggacttgcattcctc

SEQ ID NO: 177114 - DNA, 1496 bp, Homo Sapiens
  misc_feature (71)..(83): n is a, c, g, or t
  misc_feature (669)..(677): n is a, c, g, or t
  misc_feature (916)..(916): n is a, c, g, or t
  misc_feature (1107)..(1107): n is a, c, g, or t
  misc_feature (1340)..(1349): n is a, c, g, or t
cgacgagggccgtttgagctgctgattttcatgagtcgccttcaaaactctcgtgtagggttgacaatgtnnnnnnnnnnnnnatccagcttattcttttattttcaagtccattcttggggctggtggggaggcaggagaatacccctccctaagcccttagtgtgtgccgagcttgctttgtgatgttggcaggggaggggagacctgggtggtgactgagttccctttatcaaacccttcaatgggcacaaaattgagtgcttgattttaggttttatttttttatgaatgtccaaatctgtgtttccccctgccctcccagactgtgtggccagttgaaagtgtctggtttgtgttcatctctccctcatttctggagcagggcctgagaccctgccacatctcctatgctctgcatccacgcctcttttggacattaaaggttgattgatcacaaacacccccgaacagaaggcgtgccccgcatggtcggcccgccctcggccctccaggaaaactttctaaaaccacttcgctttaggcgcggccgggcccacgcaaggtaaaggggaaaccttgggtacatcagcctgggctttccttagagaagaatccttggcgtccattggactaagggggctttgggaatttcctccacccacaatnnnnnnnnnccccccccagggcgcggacataaccccgaagccgtttttctttgaataaatatataatctccccagaaatcggggagaggcttctctgcgagaggggcgccattctgtaacgtttggggggcattcctctattttcagacagcacgcgcgggcgagtgttcccccaatagagcctgcgcagacgcctctctcggataatagtaatccccagaagaaatattataaccacagctgcgcgncccgcgggagcccgcccttgttgggggacccgagagttttttgcatattctcccgggcgcaagaggaaaaacaccgtgtcggtgtcggcgtcgaacagatttgctgcccacagttgtatacagcggcgcagattgttttttcttttcggtcgcccgcgagtaaaacacctgggttgggggaaacaaaagcncccccctaattatccttagcatgaaaataatagaggggagtaacaatcggtcgtatctgtcacagacgccccctgtcgtcacaaattgtctcaccccccggccgcgccgcccctttttctcacggccgcgccccccttgggggggcgcgcgccccctttttgggccgccccacatcacatatcagtttcttctggcgccctccacgtgggcgcgcgggagaataacaacagannnnnnnnnnccgggtagaaagaaaaaactatgtgagtccgtcctcactattgcggggcgcctcaacccctttttttaaacggccccaatacacaacccgggccgggcgcgaagacccctccacccccctcaggggtgaaatatgcgggccgcattg

SEQ ID NO: 177115 - DNA, 385 bp, Homo Sapiens
cctatgaagttatcaacatacaagccacccaggaccagcaacggagcgaggagctggctcgaatcatgggggagtttgagatcacggagcagccaaggctgagcaccagcaaaggggacgatttgctcgccatgatggatgagttatagctgttctgaccaggcgtcctctgaccccagggagaggctgctggatggtgacccctggggaatgccccatggcccagaatgatgctgctagttttctactgagtgaagccattacgtctatttcttatttatgttgtaaggaactgtgtgagtctcccttgaggagcactcactcttgaaggcacacacatacacatattttcagtgaaatatattctgacttttaaacttgaaaa

SEQ ID NO: 177116 - DNA, 499 bp, Homo Sapiens
  misc_feature (407)..(407): n is a, c, g, or t
  misc_feature (415)..(415): n is a, c, g, or t
  misc_feature (480)..(480): n is a, c, g, or t
cttttacctggggattattacaattgcaataagtcattaatgttttcttcacacagcttcttaaaccaagtttctctgcagctctttcggttctgcttacagtgtgtgggaaatctgatttttttcccctagtaatagtttgataagaaatttagtgtattgactgcctcagtgacacaatttatctttaaaggtgtggaagctggtggggaccaaatgttacctgtgtttttgctgttgattgctattttcagaagcaaaccatgtttttcacttacagtaggagtcaacaaatttgggattttagaagggggaggagggagctatttgtgtaagactgctgtcatatttgactacatattaaaaacagtaaatgagcattttgtttttaatttctttaaataccntgtctttncaacatacgttttgtttcccttcttccctttggtgtttcaaagggtctacccttgtgggaaccgntactggctgggggggccgt

SEQ ID NO: 177117 - DNA, 999 bp, Homo Sapiens
ggcctgggtggcgatccaagacgagggcacaccgaagacccacctcctggccttctccctcctctgcctcctctcaaaggtgcgtacccagctgtgcccgacaccatgtacctgcccctggccacctccccgatgcccgctgggagtacccctggtgctggatggctgtggctgctgccgggtatgtgcacggcggctgggggagccctgcgaccaactccacgtctgcgacgccagccagggcctggtctgccagcccggggcaggacccggtggacggggggccctgtgcctcttggcagaggacgacagcagctgtgaggtgaacggccgcctgtatcgggaaggggagaccttccagccccactgcagcatccgctgccgctgcgaggacggcggcttcacctgcgtgccgctgtgcagcgaggatgtgcggctgcccagctgggactgcccccaccccaggagggtcgaggtcctgggcaagtgctgccctgagtgggtgtgcggccaaggagggggactggggacccagtccccttccagcccaaggaccccagttctctggccttgcctcttccctgccccactggtgtcccctgcccagaatggagcacggcctggggaccctgctcgaccacctgtgggctgggcatggccacccgggtgtccaaccagaaccgcttctgccgactggagacccagcgccgcctgtgcctgtccaggccctgcccaccctccagggggtcgcagtccacaaaacagtgcctttctagagccgggctggggaatggggacacggtgtccaccaatccccagctggtgggccctggtgcctgggcccctgggcttgatggaagcatggtcccgtgccccagcccctttggctgcaggcaacacctttaactttgggctccacccattgccgaacccccaataattaacaccccttgccctgggtcttgttctggggatcccccaagggtattgggccacaac

SEQ ID NO: 177118 - DNA, 986 bp, Homo Sapiens
  misc_feature (931)..(931): n is a, c, g, or t
agaggcacaccgaagacccacctcctggccttctccctcctctgcctcctctcaaaggtgcgtacccagctgtgcccgacaccatgtacctgcccctggccacctccccgatgcccgctgggagtacccctggtgctggatggctgtggctgctgccgggtatgtgcacggcggctgggggagccctgcgaccaactccacgtctgcgacgccagccagggcctggtctgccagcccggggcaggacccggtggacggggggccctgtgcctcttggcagaggacgacagcagctgtgaggtgaacggccgcctgtatcgggaaggggagaccttccagccccactgcagcatccgctgccgctgcgaggacggcggcttcacctgcgtgccgctgtgcagcgaggatgtgcggctgcccagctgggactgcccccaccccaggagggtcgaggtcctgggcaagtgctgccctgagtgggtgtgcggccaaggagggggactggggacccagccccttccagcccaaggaccccagttttctggccttgtctcttccctgccccctggtgtcccctgcccagaatggagcacggcctggggaccctgctcgaccacctgtgggctgggcatggccacccgggtgtccaaccagaaccgcttctgccgactggagacccagcgccgcctgtgcctgtccaggccctgcccaccctccaaggggtcgcagtccacaaaacagtgccttctagagcccgggctggggaatgggggacacgggtgtccacccatccccaacttggtgggccctgtgccctgggcccctggggctgatggaaaaaatggtcccgtgcccagagccccttgggctgcagggcaacaacttttaagctttggggtcccccatgcagaacccccattatttaacaccnctgccctggtcctggtctgggaatccccgaaggtattggcaagaggttggcaact

SEQ ID NO: 177119 - DNA, 1457 bp, Homo Sapiens
  misc_feature (616)..(649): n is a, c, g, or t
  misc_feature (1235)..(1235): n is a, c, g, or t
  misc_feature (1264)..(1264): n is a, c, g, or t
  misc_feature (1332)..(1333): n is a, c, g, or t
  misc_feature (1386)..(1386): n is a, c, g, or t
  misc_feature (1390)..(1390): n is a, c, g, or t
  misc_feature (1427)..(1427): n is a, c, g, or t
gggtgtccaaccagaaccgcttctgccgactggagacccagcgccgcctgtgcctgtccaggccctgcccaccctccaggggtcgcagtccacaaaacagtgccttctagagccgggctgggaatggggacacggtgtccaccatccccagctggtggccctgtgcctgggccctgggctgatggaagatggtccgtgcccaggcccttggctgcaggcaacactttagcttgggtccaccatgcagaacaccaatattaacacgctgcctggtctgtctggatcccgaggtatggcagaggtgcaagacctagtcctctttcctctaactcactgcctaggaggctggccaaggtgtccagggtcctctagcccactccctgcctacacacacagcctatatcaaacatgcacacgggcgagctttctctccgacttcccctgggcaagagatgggacaagcagtcccttaatattgaggctgcagcaggtgctgggctggactggccatttttctgggggtaggatgaagagaaggcacacagagattctggatctcctgctgccttttctggagtttgtaaaattgttcctgaatacaagcctatgcgtgacnnnnnnnnnnnnnnnnnnnnnnnnnnnnnnnnnngagagaaacacggacacaacgagccaagcaaaaaaccatacccgcgtgcgacaaccgctacaacaaaacgcgcgaacgacctaatgcagccacacgaccatttccgtgggcgtccggtaacagatccgcaaaaaaagccaatcaaaactctcaggctgggggcgccggcgccgccgtataccgccaacatcgcctttgcccgtaacactgcgcccctgctgcgggtctttagtaacacacactcagcgccttttgacgatccgccgccgccctaaatatatgacggccgggatgcgagtacccaccacacttttcctctaagacgccacacccccacgcgccgccacatccatcgatggtgtttcatctccctgccacttcatccccagaaaaaacacacgcccccgcggggacccttccctcggaccacgaacagtggtagacggcacgcccgcaccccgcacgcccgctcactatcggtgcgagcgcgtcctagagagacgagacatttgacgctactcagcgacgaccctccctctgagagccaacgtacgatgcagagaacctatcctgccaatacgaagancacaccgtcatctcacgaccgatatctanagcccgcatctgcgtataccgcagcgcgcacgggcgcagcatgtactgaaccgacgtcggttgacatnnacagtatctcgtcgagtgcgacacgaatgatatcacatcctatcagtaccccncctncgcgacgcgtcgatatctcttctctgcttcgtctgancactatcatacaacatatatgcactccgcc

SEQ ID NO: 177120 - DNA, 971 bp, Homo Sapiens
  misc_feature (957)..(957): n is a, c, g, or t
cctggccttctccctcctctgcctcctctcaaaggtgcgtacccagctgtgcccgacaccatgtacctgcccctggccacctccccgatgcccgctgggagtacccctggtgctggatggctgtggctgctgccgggtatgtgcacggcggctgggggagccctgcgaccaactccacgtctgcgacgccagccagggcctggtctgccagcccggggcaggacccggtggacggggggccctgtgcctcttggcagaggacgacagcagctgtgaggcgaacggccgcctgtatcgggaaggggagaccttccagccccactgcagcatccgctgccgctgcgaggacggcggcttcacctgcgtgccgctgtgcagcgaggatgtgcggctgcccagctgggactgcccccaccccaggagggtcgaggtcctgggcaagtgctgccctgagtgggtgtgcggccaaggagggggactggggacccagccccttccagcccaaggaccccagttttctggccttgtctcttccctgccccctggtgtcccctgcccagaatggagcacggccctggggaccctgctcgaccaccctgtgggctgggcatggccaccccgggtgtccaaccagaacccgcttctgcccgactggagacccaccgccgcctgtgcctgtccaggccctgccccaccctccagggggcgcactccacaaaacagtgccttctagaggccgggctggggaatggggacacggggtccacccatccccacctggtggccctgtgccctgggcccctgggctgatgggaaaatggtccgggccccagccccttggctgcaggcaacacttttacccttgggtcccaccatgcagaaccaccaatattaacacgctggcctgggtctggctggaatccccaagggaatgggccaaaggtgcaagaaacctanttccccttttcctt

SEQ ID NO: 177121 - DNA, 798 bp, Homo Sapiens
gtcaggtgcactttgatgaggggaaggctgtctacctgaagctggacttgctggtggatggtgtgctggccctgcgctgcctggaggaattctcagccactgcggccagttccctcgggccccagctccgcctctgccaggtgtctgggctgttggccctgcggcaagggtcctccctgcggatccgcaccctcccctgggcccatctcaaggctgcccccttcctcacctacttcggactcttccaggttcactgaggggccctggtctccccacagtcgtcccaggctgccggctccccttcgacagctcttctgggcacccggtcccctctgccccaccctcagccgctctttgctccagacctgcccctccctctagaggctgcctgggcctgttcacgtgttttccatcccacataaatacagtattcccactcttatcttacaactcccccaccgcccactctccacctcactagctccccaatccctgaccctttgaggcccccagtgatctcgactcccccctggccacagacccccagggcattgtgttcactgtactctgtgggcaaggatgggtccagaagaccccacttcaggcactaagaggggctggactggcggcaggaagccaaagagactgggcctaggccaggagttcccaaatgtgaggggcgagaaacaagacaagctcctcccttgagaattccctgtggatttttaaaacagatattatttttattattattgtgacaaaatgttgataaatggatattaaatagaataagtaata

SEQ ID NO: 177122 - DNA, 488 bp, Homo Sapiens
gctcagagcccacatcaacactgcccccctcccagcaccccacagccctcacatcccctggcctggacccaggagacccaggagaaagcaccctcccttaggaatgaggagtgggcatcaggcctgggacactgctctccttccccgcccccagcctgctaagttaagtggacaggcccacaagatgaccttgcatgtgagcagatggcagagatgggtgtgtgaggggtgaggaggcatcagcagttgagccccgaaggagatcaggcagccccacctgcaggagaacgtcagccctccaggggatcagcccctgccagttccacccagctgcaggtgccagcacggcagggatgggagaggggtggggagcgagtcactgcctcctctgagcagagattcagagtaggatcacatgaataggggaaaaaagagagtctatttttgtctaataataaagaatttctataaactttagccgaaaaaaa

SEQ ID NO: 177123 - DNA, 439 bp, Homo Sapiens
  misc_feature (58)..(58): n is a, c, g, or t
tggaaacccggtcaggtaaagaaagtggcaggaggcaagtcaaagccccaggcagaanaggggtgggtaccctggtgaaacccaaccttaaagctgaagacagtcccggctaaatcctcatactgaattgagaacctgtcttccccatttggtgtgctttcctccgattgatcccaacccttcacctattttacgtatacctgccctttcctaattggtttttacactgctgtgcccaccttttgagtggtgcctttgcatacttacaaatcagtcaacgtgtattcccctattctgagcccataaaagacccagactcagctgcagtgaggagagaaatcaccctgctgtgggggttggggaccactccctgcatcccctctccactgagagctgttcttttgctcaataaaattcttttctacccatcctcaccctt

SEQ ID NO: 177124 - DNA, 833 bp, Homo Sapiens
  misc_feature (488)..(546): n is a, c, g, or t
  misc_feature (664)..(712): n is a, c, g, or t
tacttctagagatagtacataaaggtggtatgtgtgtgtatgctactacaaaaaagttgttaactaaattaacattgggaaatcttatattccatatattagcatttagtccaatgtctttttaagcttatttaattaaaaaatttccagtgagcttatcatgctgtctttacatggggttttcaattttgcatgctcgattattccctgtacaatatttaaaatttattgcttgatacttttgacaacaaattaggttttgtacaattgaacttaaataaatgtcattaaaataaataaatgcaatatgtattaatattcattgtataaaaatagaagaatacaaacatatttgttaaatatttacatatgaaatttaatatagctatttttatggaatttttcattgatatgaaaaatatgatattgcatatgcatagttcccatgttaaatcccattcataactttcattaaagcatttactttnnnnnnnnnnnnnnnnnnnnnnnnnnnnnnnnnnnnnnnnnnnnnnnnnnnnnnnnnnnaacacctatcccaaaccaccttattttggccccccgcccccgaacggtaaagcgcaaaagggccctaaccagcctacccccgggtaatcccgggccctcgcctacgggggcttggaannnnnnnnnnnnnnnnnnnnnnnnnnnnnnnnnnnnnnnnnnnnnnnnntttctctccctgaaagttctttttccaaaccccctcctttctcctgaagccgcgcaaccccccccaatggtggggggccccaaaccgggcccctccaaagggttttggtgttaaaacggca

SEQ ID NO: 177125 - DNA, 428 bp, Homo Sapiens
  misc_feature (14)..(14): n is a, c, g, or t
  misc_feature (31)..(31): n is a, c, g, or t
  misc_feature (44)..(44): n is a, c, g, or t
  misc_feature (87)..(87): n is a, c, g, or t
  misc_feature (117)..(117): n is a, c, g, or t
  misc_feature (125)..(125): n is a, c, g, or t
  misc_feature (140)..(140): n is a, c, g, or t
aaatacccaaaacntggctgggaacctcccnaaaaactgggaanggggaaaaaatggggaaaagcgaataacatcaacgccatgaanagtgaacgaacgccgccgctgggaaacaantttgcaancagaagcatccgctnccctgggtcctgggctgcccacggacagggatctcggtggggcctgtccaccacaggaccacgacatgcaggggctggcggagcgcatcagtgttctctgaggtcctgtgccctcgtccagctgctgccctccacagcggttcttcacaggatcccagcaatgaactgttctagggaaagtggcttcctgcccaaactggatgggacacgtggggagtggggtggggggagctatttccaaggcccctccctgtttccccagcaattaaaacggactcatctcctcgc

SEQ ID NO: 177126 - DNA, 396 bp, Homo Sapiens
  misc_feature (33)..(33): n is a, c, g, or t
  misc_feature (38)..(38): n is a, c, g, or t
  misc_feature (53)..(53): n is a, c, g, or t
  misc_feature (70)..(70): n is a, c, g, or t
  misc_feature (80)..(80): n is a, c, g, or t
  misc_feature (141)..(141): n is a, c, g, or t
ccaaaacttggctggaccctcccaaaaaactgnagggnaaaaatggaaaaccnaatacatcacgcatganagtgacgacncgcgctgggaagcagtttgcagcagaacatccgctgccctgggtctgggctgcccacgganagggatctcggtggggcctgtccaccacaggaccacgacatgcaggggctggcggaacgcatcagtgttctctgaggtcctgtgccctcgtccagctgctgccctccacagcggttcttcacaggatcccagcaatgaactgttctagggaaagtggcttcctgcccaaactggatgggacacgtggggagtggggtggggggagctatttccaaggcccctccctgtttccccagcaattaaaacggactcatc

SEQ ID NO: 177127 - DNA, 1006 bp, Homo Sapiens
  misc_feature (513)..(558): n is a, c, g, or t
  misc_feature (692)..(708): n is a, c, g, or t
  misc_feature (723)..(913): n is a, c, g, or t
ttcagtgggcacaagtggttttattgtttctgcccggaagaggaagccctggcagcagcagggacacagagaggacacggcgctgcatcctgccggcagtgtggatgctggtggcaggagtccaggactgtgaagagctgtcagcatatgagctggagccgctgaggagctgcacctaggcctgcagaggccaccagcttgagaagggggtcccagcctcaccgatgccgctttcggatgctctgcagctcctggtagatggtgctgaagctgggccgctgcccaggctcataggcccagcactgctccatgagcctgaacacggcatcaggacacagctctgggcagggcagacggccccctgtgaggagaggcacagcacaccaggcatgaggagggagtttgagggtcctcggcagactctgggggataccatgagccataggagctgcttaagatgcactgttctgaaggatgcactgttctccaccaagggcccaaaggacaaagagnnnnnnnnnnnnnnnnnnnnnnnnnnnnnnnnnnnnnnnnnnnnnnctgccagcctgtttttccatctgagaaagggacatattaatccctaccacacatgtagtgatgagcaaatgaaataacatgtgacctagcacagaccaggtgctcactcagtagtagctacagggatattctannnnnnnnnnnnnnnnnctgagatggagtctnnnnnnnnnnnnnnnnnnnnnnnnnnnnnnnnnnnnnnnnnnnnnnnnnnnnnnnnnnnnnnnnnnnnnnnnnnnnnnnnnnnnnnnnnnnnnnnnnnnnnnnnnnnnnnnnnnnnnnnnnnnnnnnnnnnnnnnnnnnnnnnnnnnnnnnnnnnnnnnnnnnnnnnnnnnnnnnnnnnnnnnnnnnnnnnggtcaaactccctagaactcaaggggatcccacctttcctccaggctccccaaaaatgttgaaaaaattacaggccggtgaggcccactggcg

SEQ ID NO: 177128 - DNA, 748 bp, Homo Sapiens
ggcaggagaggcgtttctggggctccagagaagtgccacgggaggcagaagtccagaactgcccatatagatgcccttctacatcctggagcccaaatcagtcatgtgggtgggaagttcccagggcagtggtcacatcgtgaaaattagcaggaaaggcggggcctttcttgtcatagctatttctgaggatgaaatgggagacatatgcccagcacctgatgtaagtttatataatgtaatattatgtacctaccactaagaaatacatgaaccgtgccatgaggacagtaagtgttcataaagcaacatgaagcaagaaacagtgcagggtgcccagtgcacacactagagagaaattgtgaacattaaggacaaggagaattggtgtctttctaaaacatacttatttaaaaacacatacccacttactaatgtggaattacacagtttgtaacaagaaaacagtctctcccattctctagtactgctcccctacccagcagtcacttccagttcattcagctatttttaaaatgtgcttatatgactcttgcttgatatatcaatcttagacattacctgttgactccctgttgtcatacatgaggctttagctctcttttgtcagcaaccctcccccatccctagttattaggttaaaaaatactcagattactatttctattactatgtgaaagttaactgcggagccaagagttggactataattaaattaccttccttg

SEQ ID NO: 177129 - DNA, 534 bp, Homo Sapiens
  misc_feature (137)..(223): n is a, c, g, or t
cgggaaaccttttccccgttcccattttaagcgccccctctggggaatttgcccccggggccagaaattcgccccggggttaaaattaaaggggacatcccgccactttaggaggcccaggcgggggaatcacttgnnnnnnnnnnnnnnnnnnnnnnnnnnnnnnnnnnnnnnnnnnnnnnnnnnnnnnnnnnnnnnnnnnnnnnnnnnnnnnnnnnnnnnnttaaaatgccttcttaaaggaaaaatgccaactccatccttaatctcaaggaaatctgattgtccaaatagatctgttaatatgtaacatattaataggtaacttgctgtgtaaaattataagccatattttaaaaggttttaaaaatacttattgtgctccatttgtgatataatttctaacatttctgctctgtgatgggggtttatttgtaagaataagaggcaaaggaatgttagcatagcaaaaatgtgtttgaatgagttaaccttttaatcgcaaccctatgtgaataaaattactccactgtt

SEQ ID NO: 177130 - DNA, 757 bp, Homo Sapiens
caacgacctgaaggcggtctctgtggagagtctgctggcgttctcagggctctccgcagacatgctcaatcaggcgattgggcccctcacctcttcaagaggccccctggaccttcacgagcaaaaggatataccaggaggggtcctcaagattcgagatggcagcaaggaacccaggtcgagatgggacattgtgcggctcatcccacctcagacgtacctgcaagctgagggtgaagacggccagaacttggagaagagacggaatcttctgaactgcctcatcgtccgaatcctcaaggcccatggagatgaggggctgcacattgaccagcttgtctgtctggtgctggaggcttggcagaagggcccgtgtcctcccaggggtttggtcagcagccttggtaaggggtctgcatgcagcagcactgacgtcctctcctgcatcctacacctcctgggcaagggcacgctgagacgccatgacgaccggccccaggtgctgtcctatgcagtccctgtgactgtcatggagcctcacactgagtccctgaacccaggctcctcaggccccaacccacccctcaccttccataccctacagattcgctcccggggtgtgccctatgcctcctgcactgccacccagagctttctctaccttccggtagccctagacttggggtcaggggaaggtagagctggagcttttacagaaataaaacccaagagtttgattatcaccaaaacaaaaagg

SEQ ID NO: 177131 - DNA, 1003 bp, Homo Sapiens
  misc_feature (791)..(791): n is a, c, g, or t
  misc_feature (803)..(803): n is a, c, g, or t
  misc_feature (898)..(898): n is a, c, g, or t
  misc_feature (901)..(901): n is a, c, g, or t
  misc_feature (973)..(973): n is a, c, g, or t
gtagcgaggcctgggtggcgaattcggcacgagggtacacgccggggtagggccggggtcgggttgtggtcgggccgggattgggctctcctgggccatggcagccgaggcgcgcgtgtcgcgctggtacttcggggggctggcctcctgcggggccgcctgctgcacgcacccgctggacctgctcaaggtgcatctgcagacgcagcaggaggtgaagctgcgcatgacgggcatggcgctgcgggtggtgcgtactgacggcatcctggcactctacagcggcctgagcgcctcgctgtgcagacagatgacctactccctgactcggttcgccatctacgagactgtgcgggaccgcgtggccaagggcagccaggggccctctccccttccacgagaaggtgttgctgggctccgtcagcggtttagctggaggcttcgtggggacgcccgcagacttggtcaacgtcaggatgcagaacgacgtgaagctgccccagggtcagcggcgcaactacgcccatgcgctggatggcctgtaccgcgtagctcgtgaagagggtctcaggagactgttctcgggtgcaaccatggcatccagccgaggggccttagtcactgtgggccagctgtcctgctacgaccaggccaagcagctggtccttagcaccgggtacctctctgacaacatcttcactcactttgtcgccagctttattgcaggtggatgtgccacgttcctgtgccagcccctggatgtgctgaagactcgcctgatgaactccaanggggagtatcanggcgttttccactgcgccgtggagacagcgaagctcgggcctctggccttttacagggcctcgtcccagctgggcatcgcctcatcccccaacgnggntttactttttggggtttctggaacagctacccaaaaacttttgggcatccaaagtgccatccctgaccaaancctgggggaaaatgggcttggggcctggct

SEQ ID NO: 177132 - DNA, 475 bp, Homo Sapiens
ggggagacagccctgagatcacctaaaaagctgctaccaagacagccacgaagatcctaccaaaatgaagcgcttcctcttcctcctactcaccatcagcctcctggttatggtacagatacaaactggactctcaggacaaaacgacaccagccaaaccagcagcccctcagcatccagcagcatgagcggaggcattttccttttcttcgtggccaatgccataatccacctcttctgcttcagttgaggtgacacgtctcagccttagccctgtgccccctgaaacagctgccaccatcactcgcaagagaatcccctccatctttgggaggggttgatgccagacatcaccaggttgtagaagttgacaggcagtgccatgggggcaacagccaaaataggggggtaatgatgtaggggccaagcagtgcccagctgggggtcaataaagttacccttgtacttgcaagaa

SEQ ID NO: 177133 - DNA, 755 bp, Homo Sapiens
  misc_feature (629)..(642): n is a, c, g, or t
gcggccgcagggcagcccaccccgtttacgtcgccggagccgccgcgcagcagccccaggcagacccccgcgcccggccccgcccgggagaagagcgccggcaagaggggcccggaccgcggcagccccgagtaccggcagcggcgcgagcgcaacaacatcgccgtgccaagagccgcgacaaggccaagcggcgcaaccaggagatgcagcagaagttggtggagctgtcggctgagaacgagaagctgcaccagcgcgtggagcagctcacgcgggacctggccggcctccggcagttcttcaagcagctgcccagcccgccattcctgccggccgctgggacagcagactgccggtaacgcgcggccggggcgggagagactcagcaacgacccatacctcagacccgacggcccggagcggagcgcgccctgccctgcgcagccagagccgccgggtgcccgctgcagtttcttgggacataggagcgcaaagaagctacagcctggacttaccaccactaaactgcgagagaagctaaacgtgtttattttccctaaattatttttgtaatggtagctttttctacatcttactcctgttgatgcagctaaggtacatttgtnnnnnnnnnnnnnnccagacttttcagacaaaccctttgtattgtagataagaggaaaagactgagcatgctcacttttttatattaatttttacagtatttgtaagaataaagcagcatttgaaat

SEQ ID NO: 177134 - DNA, 864 bp, Homo Sapiens
  misc_feature (152)..(160): n is a, c, g, or t
  misc_feature (249)..(345): n is a, c, g, or t
  misc_feature (389)..(415): n is a, c, g, or t
cagggttttgtggggagtgcgttcacaccaaaaaaagaacgacgatgcgagacgggggggaaaaacggtgcggggacgacgacaggcgttgggggtatccaaaaacaggcaatctagggggtaaaaaagaggtttatatcgcgccgcagctnnnnnnnnnttattcccggcggcgggacatatttctgcaccacaaagaaggctgccccccgcccagggttggcgcaagaaaaggttgtttttggcccnnnnnnnnnnnnnnnnnnnnnnnnnnnnnnnnnnnnnnnnnnnnnnnnnnnnnnnnnnnnnnnnnnnnnnnnnnnnnnnnnnnnnnnnnnnnnnnnncttttcccaaggcgcccccgatccccggcacaagggggaaaaannnnnnnnnnnnnnnnnnnnnnnnnnngttaaacccaaagggccccggaaatgaaggcgggagccaagggggttttgggggcaagcctcctcggaaacccaaattttcctgcagggggttactgaaacctcggccggaccaggcggctcccgcctttttggtgcaacccggtcgtttctcggcccgtgagcttccagggaccttgttctgcgtctcgcaggttgcgcatcttggccttgtcgcggctcttgcgcacggcgatgttgttgcgctcgcgccggatcttgtactcgtcgctgtgcttgtccacggtcttcttggccttgctcttgacctgcgagggcgccggcgcggcccccgcgtagcaggcggtcgggggcgccttggcgtcagcggggctcggcgtgccgggcgggctggacgaggaggacgtggagaggctcccgaaactgccgctcggcaccgccctcgtgagt

SEQ ID NO: 177135 - DNA, 487 bp, Homo Sapiens
gacgcactgagcagggctcgggagcgaaggctgctaaagggctatgagatctatgtgacccctggagtccagccaccaccacctcagatggcagagattattagctgctgtggaggcacatacctacccagcatgcctcggtcctataagcctcagagagttgtgatcacatgccctcaggacttccctcattgctccattccactacgggttgggctgcccctcctctcgcctgagttcctgctgactggagtgctgaagcaggaagccaagccagaggcctttgtcctctcccctttggagatgtcatccacctgagaactccactacccttttccctcccagaccacgaattagaagatatgtggaagaaagaactcagggcgttagaaaggattgggggtataatgatacaacttgtcctggaacatgggtgggaccagaaatctttatgaataaatgaaaaaacaagggatttggaaaaaaa

SEQ ID NO: 177136 - DNA, 475 bp, Homo Sapiens
  misc_feature (271)..(284): n is a, c, g, or t
gctttaaatggtaatcttaaaagttgcattgtgctcttcctttgttttgggatagatatatatagagagagatactataaggaagtttatttcttaggaagtgcactgaataatgtatttcttttacagtgtaatatgggggtggggatatgcgaaagaaatgtgtatttttgctagttgcctaccttctgagataaataagcacaatcttgcaatggatccaataacccagttaggtattatagattagtatttaagtttgctgtagatnnnnnnnnnnnnnnctaagtaaaagttccatgattcacaattttagtattaacccatgttgcaaaagctgttactggccaacagattgtaatgatgtgtaccatataacacaagcattaactaggcattaacgtttgtaaagccaaatataccatgcagaagtcttcatttttatagcagactgcattaaaacaagttaaatctt

SEQ ID NO: 177137 - DNA, 411 bp, Homo Sapiens
ctgtaaacctttttaatagtatatatatgtttggctttagtacaattaccaagtgtaatcagttacagtaattctgtatgtatctcagcagtattattttccagcatggctttacattttaaagaacttaataactatagaataaacagatgcatgctatacgagttggaatgtattagagctgggttcccttttgtgtgtgtttgtgtcacgtgtttagtttatccatagtcatgaatactatgttgcctagatacagtggggaacaccgggaaagtgaaatgcagttttgttttctggaaggcaaaccaagattcttggtacatatttttctgtttcaaagcataggaaaactgttgacccccaaaagaaggctttctcataaaacactcagagtgaattatgtaactg

SEQ ID NO: 177138 - DNA, 490 bp, Homo Sapiens
  misc_feature (97)..(97): n is a, c, g, or t
  misc_feature (137)..(137): n is a, c, g, or t
  misc_feature (196)..(196): n is a, c, g, or t
  misc_feature (238)..(238): n is a, c, g, or t
acaacattattttactggaatttagcagggagaagataatatcttgcaagctttcacaaaggaaaatctccacattgaactcaagaccaaataaagnaaaatccaagttcctgtttcagtctcaactggacccgggntactaaagacaatgcactcctctcttaggaggcatgtgtcaagctgtcagtgatgtggnccatcttttcatgacccttaactctctgcatcatgtctcagncaataccagggcatgaattctgaaaaacttcttccacttatatggttttcctcatccagctgagaatgctgctggttactgcaaaactgttcaccaaccatatgctctggtccatacagctttcttcttaaactctgggagaactctcaaggacagcagggtggctttcaaaagatccctggactgtgctgagagggcttctttagggctttccatgatgctgaatagccagtcaatgaacttctgggtctg

SEQ ID NO: 177139 - DNA, 968 bp, Homo Sapiens
ggggccgagggcacgtgcatgccccctggttaagagttgcaggtagcggtagcgatggacactctggatcgagtagtaaagcccaaaacgaaaagagccaagagattccttgagaagagagaaccgaaactcaatgaaaatattaaaaatgccatgctgattaaagggggaaatgcaaatgcaacagtgacaaaagtacttaaagatgtgtatgcactgaaaaaaccatacggtgtactatataaaaagaaaaatattacaagaccttttgaggatcagacatcactggaattcttttcaaagaagtcagattgttctttattcatgtttggctcccataataagaagcggccaaataatctagtaataggtcgtatgtatgactaccatgtgctggatatgattgaattaggtattgagaattttgtctctctaaaagacattaagaacagtaaatgtcctgagggaacaaaacccatgctgatatttgctggcgatgatttcgatgtaacagaagattatagaagactaaaaagtcttcttattgatttcttcagaggccccacagtatcaaatatccgcctggctggattagagtatgttctgcacttcactgcactgaatgggaagatttactttcgaagctataagttgctgttgaagaaatctggttgcagaacaccacggattgaattggaagagatgggaccctcattggatctggttctgaggaggacacacctggcatcggatgacctttataattatctatgaaaatgccaaaagctctcaagccaaagaaaaagaaaaatatttcccatgatacttttggtacaacttatggaaggattcatatgcagaaagcaagacctaagcaaactacaaaccaggaaaaatgaaggggttgaagaagcgacctgcagaaaggataacagaaggaccacgaggaaaaaagtcaaaaagaattt

SEQ ID NO: 177140 - DNA, 462 bp, Homo Sapiens
gggggtggtgggtattttttgttgatgctttagtgcaggcctgttctgaggcaataacaagttgctgtgaaaacagcatgtgctgctgcctttgtaactgcatggaaacttttcacatgggtttttctccaagttaatacagaaatatgtaaactgagagatgcaaatgtaatatttttaacagttcatgaagttgttattaaaataactaacataaaacttaattactttaatattatataattatagtagtggccttgttttacaaacctttaaattacattttagaaatcaaagttgatagtcttagttatcttttgagtaagaaaagctttcctaaagtcccatacatttggaccatggcagctaattttgtaacttaagcattcatatgaactacctatggacatctattaaagtgattgtccacaaacaaaaacccccccactacacaacccttgt

SEQ ID NO: 177141 - DNA, 454 bp, Homo Sapiens
  misc_feature (344)..(344): n is a, c, g, or t
  misc_feature (389)..(389): n is a, c, g, or t
ttactttacgcatttttaataacaatggtacccaattcattaacaaatgaatttaggcaatgtgctttgctctacaatccatcagatacattttcactgcagatagttcagaaatcattttggaaatagacacaaacatgtacatattcatttgctgaaaatgccacttacagctttaatatcaaatatagttatcatagttcacagaaaaagtataaagtgcaaaagctccacttcaaaaggccttaagtcactcccaaagcaatgaggattaaattttaccacagccagtgggcatgccacccttatgtaggagcacctacataagggtataaaacaagggnatatatctgaaaacactatattgctctggattacatattgtgggntataaaataggttttaaatctggtttaacatacagagaaagatacaattcaaacaattagtccta

SEQ ID NO: 177142 - DNA, 421 bp, Homo Sapiens
  misc_feature (279)..(279): n is a, c, g, or t
  misc_feature (284)..(284): n is a, c, g, or t
  misc_feature (329)..(329): n is a, c, g, or t
  misc_feature (374)..(374): n is a, c, g, or t
ggaagagcacaggagggtgggaggaggacaaacagccccttttatagggtcatgggggggctccactcagagtctggcaggaatctgcagggaaaacctcgttctagatagggagaagcagaactgtgtgtggggcaggccgccgtggtcctgagagacagggcccgggccttccactgctcgtttgcacacctcttcggcctatcccaaggaccttcctagcatataaaaacaggggctctcctgatttgtaaacagaacaacaaataaacataaaancaaanccaaaaattcctccatgggcagcccacccaatgaataccccaganttttagggccattgcgggtctgtaggctgggtgtagagagagttnagctttcatctccctggttacaacacttgttgataaattagttgagt

SEQ ID NO: 177143 - DNA, 451 bp, Homo Sapiens
ttctccggcacctgcggcaggaggaaaaggaagaggttactgtgggcagcttgaagacctcagcgtgcccagtacctccacgatgtcccaagagcctgagctcctcatcagtggaatggaaaagcccctccctctccgcacggatttctcttgagacccagggtcaccaagccagagcctccagtggtctccaagcctctggactgggggctctcttcagtggctgaatgtccagcagagctatttccttccacagggggccttgcagggaagggtccaggacttgacatcttaagatgcgtacttgtccccttgggccagtcatttcccctctctgagcctcggtgtcttcaacctgtgaaatgggatcataatcactgccttacccaccgcacggttgttgtgaggactgagtgtgtggaagtttttcataaactttggatgctagtgt

SEQ ID NO: 177144 - DNA, 894 bp, Homo Sapiens
  misc_feature (189)..(289): n is a, c, g, or t
  misc_feature (391)..(524): n is a, c, g, or t
  misc_feature (537)..(600): n is a, c, g, or t
  misc_feature (606)..(760): n is a, c, g, or t
  misc_feature (767)..(776): n is a, c, g, or t
cccttcatcttggaagtttattacaaatccactgagaagtctggaatgtatggaatcagagagctagatcaaaaaacatggttgaacagcaaaaattagatccagtcatcacgttcagcctcccatctaagctgtttgagacctttgagagaagaagaaaagatgagtgtactaccacactgtagactnnnnnnnnnnnnnnnnnnnnnnnnnnnnnnnnnnnnnnnnnnnnnnnnnnnnnnnnnnnnnnnnnnnnnnnnnnnnnnnnnnnnnnnnnnnnnnnnnnnnntaaagtttctataaggtatgtttattcttaaggatatctactctaacacctgtaaatgtagggtgatcaattagtaaattaataaatctgaatcaattaatnnnnnnnnnnnnnnnnnnnnnnnnnnnnnnnnnnnnnnnnnnnnnnnnnnnnnnnnnnnnnnnnnnnnnnnnnnnnnnnnnnnnnnnnnnnnnnnnnnnnnnnnnnnnnnnnnnnnnnnnnnnnnnnnnnnnnnctttgggggcccnnnnnnnnnnnnnnnnnnnnnnnnnnnnnnnnnnnnnnnnnnnnnnnnnnnnnnnnnnnnnnnnggggcnnnnnnnnnnnnnnnnnnnnnnnnnnnnnnnnnnnnnnnnnnnnnnnnnnnnnnnnnnnnnnnnnnnnnnnnnnnnnnnnnnnnnnnnnnnnnnnnnnnnnnnnnnnnnnnnnnnnnnnnnnnnnnnnnnnnnnnnnnnnnnnnnnnnnnnnnnnaatttannnnnnnnnngggcctttttgggaagtggggggaattttttaaaaatttttgccgcgggggaaccccttccaaaaggggttttggaccctaaatcccccgggggaaaaaccccctttgggccctgtgg

SEQ ID NO: 177145 - DNA, 668 bp, Homo Sapiens
  misc_feature (149)..(157): n is a, c, g, or t
aattcggcacgagggttgaagagatgagtgcggggctcatctatccctggaattgtctttcccacaatccctgacacagaatatgagccatacaggaattctgaagaaatgggtctcttgccacctcccagtaaaagattatttttttnnnnnnnnnggctctgctttgacctgaagtattttatctatcctcagtctcaggacactgttgatggaattaaggccaagcacatctgcaaaaaagacattgctggaggaggtgcaaagagctggaaaccaagtctccagtcctgggaaaagcagtggtatggaaaagcaatggaaagagcattttgaaaatgccattccactgttttctggcctttatgatttctgctgagaaatccactgttagtctgatggggtctccttcatagcaccaatgacctgaagagccttgttgaaggaagactccatctgatgactcagagcaagtattttttagtgtgttattgttattagcagaaagagggccataaaatacatggggcaagctgaatatatcttaggcaaaagaagaaaatattcaaattcttatgttattttatctaattattttatctctttttgtgtgtgacttataatgtgtgtattgtattaataaaagtatataaacaagatagtttaaa

SEQ ID NO: 177146 - DNA, 1303 bp, Homo Sapiens
  misc_feature (516)..(516): n is a, c, g, or t
  misc_feature (614)..(625): n is a, c, g, or t
  misc_feature (657)..(759): n is a, c, g, or t
cacgtttccaattgagttttattctagaacaaatggttttacaacaaagctgatcttaaatagtacattcccccgctgataacagcgccatcttccttcgacccccagaccaagggatcaaagctactgctcaattgagtttgacatcagctaccgacttttaaggaatctagaacaaagttctggagccaggccagaagtggtaaaagattcagttagccccttcctctgtgctgtgctgacagggagggagccagtgactggacaatctatgaccccaagtttgtggaacgtggggcttcagctgagggtggggtagtgtgatttcagcagtgtctccacctccctgacccctgcgctgctttgctctgttgtcacctcccgcacagtgtcgggacactgaccggaagccaaacctgtgcctggtggccacagacaagacacacggatatccgtgaaccttgctgctgtgccctcaccgaggccagcgccccacctgctggaacagccaagccnggagcagttctgtctgggccacagctgctcagcctgtggactcaggtgttatcctgaagaagttacaacaaattctcaaagaataaacaatgggcttnnnnnnnnnnnngggggataaacagaaactcacagtagctgtgnnnnnnnnnnnnnnnnnnnnnnnnnnnnnnnnnnnnnnnnnnnnnnnnnnnnnnnnnnnnnnnnnnnnnnnnnnnnnnnnnnnnnnnnnnnnnnnnnnnnnnnaaacaggctcaagagtgaagtccctcgcttgcttagtatctcaaagctaagctgcaagcaaagatggggctccaaggtctgtgtgacctgagctcttggttatccaatacttcaaaactgtcacttaggaaagaagagaacatttttagaaataggagaaaacccaacagccacagtgattgtcaaagagctgagggggcatcagaccaggttcgggggcaccagaccaggttcagggccactgcgtaactgccaatgccctgccccagccccaggagacacgcagactccactgccctagacgagtggccctgctgttaataaataaataaaggtcaggcacaatcctacacaaaggccccagaattcaaaccactgtcttgtttctcagacttttgcttaagagcccagtactgggtggactggggaaatccctgatttgggtcaaaataaatatgccagttctcgtccaaagcttacctgccttccctcctccctgagctgtgcctggggctttctgttgccaagaaatgtaaggagccaa

SEQ ID NO: 177147 - DNA, 849 bp, Homo Sapiens
  misc_feature (26)..(27): n is a, c, g, or t
  misc_feature (62)..(62): n is a, c, g, or t
  misc_feature (160)..(171): n is a, c, g, or t
  misc_feature (203)..(305): n is a, c, g, or t
ctttgctgcctgtgccctcaccgagnngccagcgcccccaccctgctggaacagccaagccnggagcagttctgtttgggccacagctgctcagcctgtggactcaggtgttatcctgaagaagttacaacaaattctcaaagaataaacaatgggcttnnnnnnnnnnnngggggataaacagaaactcacagtagctgtgnnnnnnnnnnnnnnnnnnnnnnnnnnnnnnnnnnnnnnnnnnnnnnnnnnnnnnnnnnnnnnnnnnnnnnnnnnnnnnnnnnnnnnnnnnnnnnnnnnnnnnnaaacaggctcaagagtgaagtccctcgcttgcttagtatctcaaagctaagctgcaagcaaagatggggctccaaggtctgtgtgacctgagctcttggttatccaatacttcaaaactgtcacttaggaaagaagagaacatttttagaaataggagaaaacccaacagccacagtgattgtcaaagagctgagggggcatcagaccaggttcgggggcaccagaccaggttcagggccactgcgtaactgccaatgccctgccccagccccaggagacacgcagactccactgccctagacgagtggccctgctgttaataaataaataaaggtcaggcacaatcctacacaaaggccccagaattcaaaccactgtcttgtttctcagacttttgcttaagagcccagtactgggtggactggggaaatccctgatttgggtcaaaataaatatgccagttctcgtccaaagcttacctgccttccctcctccctgagctgtgcctggggctttctgttgccaagaaatgtaaggagccaa

SEQ ID NO: 177148 - DNA, 486 bp, Homo Sapiens
  misc_feature (268)..(278): n is a, c, g, or t
ccacttaaaatactaagtggccaaatgataaaaaaaactgctccctgcacatgagtgtaaaaacatgtttgtaattttaagtaaaatggactgatacccaaataccacagactcacactatattacagaatgatgtaatacctggtaattctccagaagatagacttcagacccttaatgccatttaaatatagtttttgtggtttaatcttatgagtagattgtaatgaaatcattacctttgaaacatcaaacacttctttaagcnnnnnnnnnnnaatgtcatgaatcaggaaggatacatagtgattcgtatacaattttgtctgcagcattcttgaatatttttaacactgtgtaatccctgagcagcacaaaacttttattccgatgaccagttacacaattcctgtttttattttgtcctgttgtgctcatcttctatgaaaaataaatgattattaggccttgctttccctgcaaaaa

SEQ ID NO: 177149 - DNA, 431 bp, Homo Sapiens
agcaaatctgtgtcagcgttctttgctcagttctgctctgcagcccccatggcgacaccctctctctttggaccacctcctcccctttcgcttccttccacacagtccagtgctttgttaggtacctgcatcccagcaggactggggacctggctggatgtgggcttgggtagagttggccagatgaaatgtggttggcaagaaggtcctgagtgtgctgagacaggcaagagtcagtaataagatcagagagtagaagactagggccaggagcgtgggacaggctaaggatgccggctagcccccaatcccagagagcatgcagctgagtctaagagaggcttcactgatacccataaggaggcggaatatgcaaaccctctttgcttaggagaacctgagctcacctgccaaaatcatcctttgacatt

SEQ ID NO: 177150 - DNA, 275 bp, Homo Sapiens
cgggctctgagtgctctttcccgtccggccccagccgcggcccgggaatctacgtcacccgaaaagcgactataaacgccggcgcctccgtccccagccgcggctcgggaatccacccgaagagtggctataaacgtccgcgcctccattgcgctctcctcttcacttaggacactggtcctcccacgcctgacaccgacgtcgccaggaccgcggggttgggggaacttggctgtcccacgtctttcaaataaagctgttttgtctaactcaca

SEQ ID NO: 177151 - DNA, 586 bp, Homo Sapiens
cccccccaaaaaaatacaaccaaaaacattaaattcttttttaaaactacagaaataagtgctgagtcagcaaggaacctgggcatgctgcccacatgccgccacgtctctctgctttgatgactggctgcccagaggtcaggagggagagagctaagcactttccactgcatgctaggatatagggcttgcaacatagacccagccctacagccgtcaccccagctggggcaggcagctcctaggcgctctctcccttaatcaagggcatccacagctaaagcagcctttcaggaggtgacaggcccaagacaagcaagtctttgtcaaatgcttgcgatgacaaggccagtggtaactgtgggaggggagggagacgggtagatctcttcgcccgcagtttactgggctgctggaaggttttctctccctactctccctgccttctctcttttcccttctccccagtctccctcttccctcaaaagggttttactttagcttaatggtgggggttccgaagagggtattggcaactcctgtggcgggtctggtggctctgccatctctaaaaggacatcacgtg

SEQ ID NO: 177152 - DNA, 252 bp, Homo Sapiens
cagttctctctgaaaaggtagctgtgccaactaacctccttacaatgaggctcaagttaacaagcctacccatgtaaaccaactttctaatcacctttaaatgtaatcggagagccagagatcaccatacttttgtggaaattctccatctgtaaatctcagatctgtaagtctaaggcttcagaaaatagaatcagggacaatgccgtaaatggaactaaattcagagaattaaaatgtgtatccacagag

SEQ ID NO: 177153 - DNA, 158 bp, Homo Sapiens
  misc_feature (1)..(1): n is a, c, g, or t
nccatccttggctgttcaagtgtagaggtgatgtaaaattctcaaacaatgagatagataaaaagtacgcagccaaaaagttcaagaagaagtgttacggagatggagcaggcccttcgtaaaaacacgatgttggttttctggattttgtatgtttg

SEQ ID NO: 177154 - DNA, 719 bp, Homo Sapiens
  misc_feature (105)..(105): n is a, c, g, or t
tgaggagtgagacggtaggtcccaggaggtacgaggaggttggcagagtctggggtaagatgtagcatccgtacacaaaggcccgatttctggccagcccagccntgaagcagaaggcagtgtggcccgcttgagggtaggttaaaacagctggtgctaatgaccctgcaatgtggccaggccgcacctgcccgccctgaggaacaccacctgtggccatcaggaggtcactgaagctcagaggtgggccagttattgcgtagcttctccagacccccaacaactctgtcattctggagcatgtctctatacctcacccactgcttccctgaccccctcccatcctgccaaggctggcagtcagccctgtggaaatgcctgtttcatgtgacgttaccccaatgcagtctctgctatgaagcctttgccagcctcctatttgaaggggaggacacttttgtggcccagaaatgtcagttgtcttccacaggggtttcctccaccccagccccctttctatttgggccctttgtcttttccttttctctaaggtgggggtgacttattcatcctaggcctgcgtctcagggccttggctcagtagccccttcaggaggctcttcttattgttctctgaacagtgggatctgaggaatcaaaacccctcttgtaacaaatatatttccataggcccaccagacgcaggtgcagaagtgctc

SEQ ID NO: 177155 - DNA, 450 bp, Homo Sapiens
agagcagctaaagtccacactgggccttgtcaagggctgttcatcaatttcattgtattaaataagttaacacagttatcacagtgacttctcttttgtcagcaaaaaaagccttctttcctcctatatttccagttccaaggtggtatgtgaccgttctctgctgtcatcctgtcgctgacatttattcctctagtgtggagacggggctgtccatctgcctggtggctgctgaccccctagctagtgaggcgtgaggtgggctccgaaagagccagtgaggaggacaccaagcaggggctcctctgccagcctcttaaaaagaggaggtgctatttggttatgtcatggttccatttggttacatgagttccttctcagacccttctctgtgtgtccaccttggggtgatgtgtgtgcgtgaaccaacctgccgaaaattaaacagac

SEQ ID NO: 177156 - DNA, 833 bp, Homo Sapiens
  misc_feature (81)..(95): n is a, c, g, or t
  misc_feature (689)..(689): n is a, c, g, or t
  misc_feature (709)..(735): n is a, c, g, or t
cagacttgctggttttgttttgggttcttaagtcctatggcttaagagtcacatatgtttgtgtgtgtgttggctgagggnnnnnnnnnnnnnnncctcctttttggcttacatagcgttccagagactgaacttctcaaatcactgcttcaacagcttttaaaaatctggacctagttactcctgtcatctatgtgtaaagatttagaaaaaaaatcccaaacccaagggtgggcagccgcgaggatgtacagctcctggcagtgtgcgctcacccggagacctgaggtcaaagcccaaatgctgagcacctcctgggaggcgggagcatggtctgctcagtgccagacatctggatattgagaaaacatctgggtagctggggttttcaggtttctgcctgacatttaatatcacaaacattgagcctgctcctgtccccccaccagccacgcggcttctcctcccaaacataccccagctcccttcccctgcccttcctgacgggtaagaaacatcccattctttcccaattcccccagcgttttccccctaccggaaatctgatgggcttatgacatcatggcctggcctgctgagcgatgaagtggatgccacaaagaaatccgacatatcagatagattctgaaatcggtttccctccagctgtagtaacaggcgtgaagtcnggagaatttgagctttgttnnnnnnnnnnnnnnnnnnnnnnnnnnnccataacaaagtcttgccctgtattaaatgcaattttcttaaaaacaagcaaaccttttggacatcattttattttaatagaaatgctgagttttatg

SEQ ID NO: 177157 - DNA, 778 bp, Homo Sapiens
  misc_feature (100)..(100): n is a, c, g, or t
  misc_feature (186)..(186): n is a, c, g, or t
  misc_feature (704)..(718): n is a, c, g, or t
cattaaattaatggatgtcaaagggtgtgctggttttaagaaatgcattttatccaggcaaagacttgtaatggttatttattaattatttatttttaanccagctcaaattctcctgacttcacgctggtttacacagctggagggaaacgatttccagaatctatctgatatgtcggatttctntgtggcatccactcatccgctcagcagccagccatgatgtcataagcccatcagatttccgggtaggggggaaaacgctggggaattggaaagaatggatgtttcttacccgtcaggaaggcaggggaaggagctgggtatgtttgggaggagaagccgcgtggctggtgggggacaggagcaggctcaatgtttgtgatattaaatgtcaggcagaaacctgaaaaccccagctacccagatgttttctcaatatccagatgtctggcactgagcagaccatgctcccgcctcccaggaggtgctcagcatttgggctttgacctcaggtctccgggtgagcgcacactgccaggagctgtacatcctcgcggctgcccacccttgggtttgggattttttttctaaatctttacacatagatgacaggagtaactaggtccagatttttaaaagctgttgaagcagtgatttgagaagttcagtctctggaacgctatgtaagccaaaaaggaggnnnnnnnnnnnnnnnccctcagccaacacacacacaaacatatgtgactcttaagccataggacttaagaaccca

SEQ ID NO: 177158 - DNA, 265 bp, Homo Sapiens
cactcacagtcactctctctgagcgcgtctcgctcgctctcatacacgcccggagcccaggagcgctcaggatcccgagcgccgcgaaaaagttcccccggcttttgctggagactcatcgttttgggaagtgcatttgcttcgcggctccgccgagcctgctgaatcctgtcctcgcggctcgggaccccgggatcgctgaccgcagccgccgccgcctctgcctcccggactatcggcagcctcggcaacaatagtggcggcc

SEQ ID NO: 177159 - DNA, 536 bp, Homo Sapiens
cacatggtcactgtcagatagtcactgaggctgaagatatctgaagactcaactaggctgaatatccaaggtggctttttttgtgcccctgttggttcgttacctgggatggctgcagtagctgtggacccgctgagcatttctctctgtacacagccttttgatgtgattagatgagctgtctcacagcatggtggcctctaggcagctaaagttttggcatggtcgttgaccaccctaactgtgagcattcaagagacccagatgtggtcaactaggctccttacagcccagcctgagaaatatgcagtgacacctccaccacaatccagccagctcggattcaagagaagggcacccctgggaaggtgaccactggccagtgtgtttcatcaggctggtgtctttgaagaccaaataccacaccacagccatttgaatttgtgtcattacttggtactcttattttttccctgctgctctttttgcattgaagtccttttgggatgacatcaataaaactatttcatgttttt

SEQ ID NO: 177160 - DNA, 567 bp, Homo Sapiens
aaaggtcaaacagtacaaccagaagctcagggcattctacttggacaagtcaaattcaccaccaaactccacatccaaagctgcctatgtagataagctaatgaggcctctcaacgctttggatgaactttaccgactggtagcctcgtttatcagatccaagcgcacagctgcctgtgcaaacacagcttgcagtgcttctggggttggactgctgtcagtttcctcggagctgtgcaatcaggctgggcgcctgccacatcatcatgtgcagcagcggtgtgcatcggtgcaccctgagcgtgacgctggagcaagccatcattctggccagaagccacggactgccacctcgttacatcatgcaggctacagatgtgatgcggaagcagattttgtgtatatacttttcatacagttgttattttaattcactgcttgagtttgaaggaaagataaaagacagaagagaagggtactatgttttcatgatgttatgctaatgattgtaacaaccttgggcagcactttatgtaaccagctgatttgattaattaaaggcttgca

SEQ ID NO: 177161 - DNA, 413 bp, Homo Sapiens
  misc_feature (193)..(231): n is a, c, g, or t
tttggaagcttgttgaaaatctgtggcatcatacaaaacaaaaaagaatgcaaaactggtgccttaaatagaaatgtattaataatgagtgttagagctaagagaaggcaaaatgtctacagaacacatgatttcaattaacaacagtgagtaaacggatgagctggaaaaaaattatgatcgggcccatgannnnnnnnnnnnnnnnnnnnnnnnnnnnnnnnnnnnnnngtcatactcatattattctaaggcccattgattttagaaagaaaatctgttttataaacttagcatattaaaagcaaatgcatagctccattttcttagaaatgcgtgaatacataaacatgttttactgagagtaggacttaatttatatgtattaaactgtcagaatatacaagttaaaa

SEQ ID NO: 177162 - DNA, 390 bp, Homo Sapiens
  misc_feature (271)..(328): n is a, c, g, or t
ctgcgcccggagacgtgggagcgttctcttgttttccgagtgcgcggactcatcgggtcacagtttatgcttttatgacgcgggaaaacaacagatttgagaagcctcggattaaggaataatttatgaagctccgttgactaccgtggagagatcataatttggggttcaagattccagtctgtgtttttccagaggtgccctgaggagcagggaagcatggctattgtggatgtaaaagccatgttcaagccaggtatggtggtatgtnnnnnnnnnnnnnnnnnnnnnnnnnnnnnnnnnnnnnnnnnnnnnnnnnnnnnnnnnngtcaagtccagcctggacaactatcaagaccccatctctaaaaataaataaataacatttta

SEQ ID NO: 177163 - DNA, 222 bp, Homo Sapiens
gctatgttttaaaaagttaaacataagctcactataagacccagcaattctactcctagtaatttacccaagagaaataaagacatattttcacatcaaagacctgtcacaaatgttcatagcagctttactcataaaagctaagaactggaaacaaaccaaatgcccatcagttcatgaatggttaaacagaatgtggtatatccagaaaatagaatatta

SEQ ID NO: 177164 - DNA, 949 bp, Homo Sapiens
  misc_feature (850)..(850): n is a, c, g, or t
ccaagaatgtcggcacgaggctgagttttgtaatcagccaggtctggaaactaatattgtaaaaatgactacaccaaacaagacacctcctggtgctgaccccaagcagttggaaaggactggaacagtacgggaaattgggtcacaagctgtttggtcactctcatcttgcaaaccaggatttggagtggatcagttacgagatgacaatctagaaacttattggcaatcagatggttcccagcctcatttagtgaacatccaattcagaagaaaaacaacagtgaagacattatgtatttatgcagactacaaatctgatgaaagctatactccaagcaagatctcagtcagagtaggaaataattttcacaaccttcaagaaattcggcaacttgagttggtggaaccaagtggctggattcatgttcccttaactgacaatcataagaagccaactcgtacattcatgatacagattgctgttctagccaatcaccagaatggaagagacacccatatgagacaaattaaaatatacacaccagtagaagagagctccattggtaaatttcctagatgtacaactatagatttcatgatgtatcgttcaataaggtgactttaaaatgagacgaaaatcattaaacgtatctttgttttatcctgtatttaaataatatatcatgtacctttattgaacaaggcatccgttatatctaattttgtatatgtttaaaaatattttattgtaactttgacaaataaatttgggggcatattatcttttattttccttttaacatgtaaataaaagctccacataattttttacctttacctggaaaanaataaacccacaaagcacaaataccaactaaaaaacccttgggtcgggccccggcccttccggggccctttctgaaagaaaagccttttttcttaaaaa

SEQ ID NO: 177165 - DNA, 553 bp, Homo Sapiens
cggaatcaaaggtctcagaaagcaacctattaggatctggtggttgacagcctgcagcagggggtgaaagaggagcccagagcaccctccggtccctgtccctgccttggggcataggaggggaggaactcagtctggccacactggctcaggtgagggcgccccaggggaggccgagaggggctgttctcttgtctgctttgctatcagggactgcctcgagatgtctttggagaaagtgttcctggcttgctgggaaggatccgtgttcagctcacgcgtgcccagcagcttccatgggaaccttgccctcctggggtctggatccatcgcgacgtgaaggtgatcatcgcccacccccgggacactgtgggggtcaagagaggccccgtggtgagggaggatcatcatcctgggggtcgggggggtttcctcctcagggaggaagatttccagccccggtgaactgcctccggcagactctgtcttgcccacccgctttgtctttgtcgcatgatggaaataaatggaaatggtttccacacacgaatgc

SEQ ID NO: 177166 - DNA, 793 bp, Homo Sapiens
cttaagtttctgttgtttacagctttccctcctctgccctcatccctctagattattaagttcctgcaacttaactgggaactgatcaagatttcaagctaaagatggtggtgatgaacagcctgagggtcattcttcaagcctctccaggcaaattgctgtggagaaagttccagattccgagattcatgccagcgaggccctgcagcctctatacttgtacttacaaaacccggaaccgagcctttttcctgttgttcttgattctacccatccatggtacttctaaaggacagggaaatggaccaccccaaactgatgtacattggttctgctcatcacacttgggggtctcaacaggctgatctgtgttatcagcaagtctgctgatacttatcagggacttgctacagagacctggtgcttgactctggaagaaaatcagcatcagcaatgtcttcagtgcctgtggaggataaattatatgtgtacaccttaatagataatctccacatccctgtgacacactgcaacctccagggaccttagcaatgccgatgttctacccaggttttgcaggatggctgcctggtcctcagagtttgcttacataggaggtgaactcaactcagcacgcacagttatgtggggcgagcatcttacaggatgcagcgtacgcaagcctttttttctaccagccaaccaattaaacgctgacaatactgattcaatgtttcctttcccaaagttctcccatttccttttttgaaaataaatctgttattgaaaattg

SEQ ID NO: 177167 - DNA, 739 bp, Homo Sapiens
  misc_feature (48)..(48): n is a, c, g, or t
  misc_feature (57)..(57): n is a, c, g, or t
gtgcagtttctgcttgtgatgtgttccctgatgatctgccacatgcanaatgtctcncaagatcgggccacacatctcacaggggtgggccttcttgggagacacacctgccataggagtcctgacctgagtctctctttgtatataaatactctgcttagaaggtgccgcctcatcttccactccacaccaacaacctgaaagcaagaaaatgctggtgaagtgcatgttaactctggtgggaaggcacagaccacccacaagtgtatctgaaaaactgaggaattactccaaggaagtacttggaggaacaggatgttggcttcaggtggaagatggtgctatgtattattactggactataatggtcacagaatgtaggaggcctcataacataaaggacacaaccatgtatgtaacacagggagtagaggcagggtctacaatccctgcatctgcaaaccactcatctgcagaatttatgtcctcatgacatgcgagtgctgtagagagggatttgtccaggccaaggaaaacacaagcacaacacagcagcttctgcttgaggacagtttaacaaagtgtacacatttgctaacacaaaacctgtatgctaatactggaaaccactgcagatgaagatgtgaataaaattaagatgtgaggtccagagatgtgaagattattcaggggaataaatatcagactacaagctcatgtacaaatcagttaaaggatt

SEQ ID NO: 177168 - DNA, 454 bp, Homo Sapiens
gcctgacccagttggtgatcaacttatacactgaagcttgagaactttcatccgctgtacttttatcctattgagcctcactgttgatgatatgcatgtgaaatgtctaatcctttaaaacacaaatcttcaccattgatcttaatatcctgctgcagtgagttccccaggtcaattgtgtgtagtgggggaaaaaagtaccttcttttatccatttaaacatgcttcctttttatctcatcttgtcctcttgttcttccccaagtaaagcgatttccattctgtgggtacctacacacagagacctaagttgagacaataattttcctttgagctggtcacccagaaggcctcgtgcgcactgggacatggagcagtggattttagttggtgacttaaaggtggtggaacactccattcctaattagtcacagattatagttccaagctttaa

SEQ ID NO: 177169 - DNA, 786 bp, Homo Sapiens
  misc_feature (44)..(99): n is a, c, g, or t
tccagatcagcctggccaacatggcaaaacgctcccccgcaccnnnnnnnnnnnnnnnnnnnnnnnnnnnnnnnnnnnnnnnnnnnnnnnnnnnnnnnnaaatttaagcaaatgtttgaaaacacatacccacaggaatgctgcacattttacccagctactatgtctagggtcgtatctagcacaccagcatggctactgtggagagctgggactggatgtgagatgagagctaaaggggaagtaagcaaaccaagcaggggaaggtaagagaagacagaagacagagagagagggacctaactctatgagaggagtcagacatgtgcaattgaaaaagacttgctcctgtctctcttctgtgaatgtttgtgaatatcccaacgggacactttcacagaggagctgattgacgtggtcacagccatcagccttgggacaccagaccacagtgtgtacactaaatggcactgatggacacttcagcatccctctagctgctgtcccgtttcccctcctcggggaccacagctgttgccagtccttggtttccttcaggagggtgtctgggtagaccagcctgtgtgcacacagtccaagatacatgaacagtgaagtgccaggcaatccttgcaagcatgggcaggtggagagctgaggcctgcttgacaccctcctgctcagaagcccagtgagcagtttccctccctagggctcagtgtcatcccctataaaatggggcttatggcagagctcaccacactgggtgcatctggggatttggcg

SEQ ID NO: 177170 - DNA, 558 bp, Homo Sapiens
aaccccagggagcaggagtgaacaaaagctatctctacttgtctcctagtggaaattcatctccacccggatcacctactcttcagaaatttgactgcaccttttaattttaatgataatgatttgctgccacctacgggctaatgtggaaagagcagaacatgtcattaccaactttcttagatgctgaatataaaatctcaaggtcatcctggcagacttgaagccaactggacaacccgtcatcctcttttctgagagatttattttccttgatagcctagccgcatacttgaatagaaccagaatccccttggattctttttggaattgggcagtatacataaagcattgtgttagcagtcagatactgtatttctccccttgtttgagtagatttgcaaaacagtgtgtatcaaaaaagcatgaaagagtctttgctatttaagtaatggtttggtacctgagttttgcttgttttgttttggagatctgttgtagttggagaacctgggagttctgtacaaaacattaaaaataaaataacgtttaacaggt

SEQ ID NO: 177171 - DNA, 523 bp, Homo Sapiens
ccctgtaaacgatacgggggattattcggaatctataacactacccttgtggaccttacattgggagatcctcctggaagtcctagaaagctcagtggctgagcaccgtgccaggttccagattccattgcttggagccatggccccgacgctggtggtcatctgcacagcagtcatcgtggtggtcgcgttgactagaaagaaagccctcagaatccattctgtggaaggtgacctcaggagaaaatcagctggacaggaggaatggagccccagtgctccctcacccccaggaagctgtgtccaggcagaagctgcacctgctgggctctgtggagagcagcggggagaggactgtgccgagctgcatgactacttcaatgtcctgagttacagaagcctgggtaactgcagcttcttcacagagactggttagcaaccagaggcatcttctggaagatacacttttgtctttgcaattatagatgaatatataagcagctgtactctccatcagtgctgc

SEQ ID NO: 177172 - DNA, 358 bp, Homo Sapiens
ttttggcacataagtaatcactgttttgcacctagggaaacactttaactgtaagagggaaaataaggtcatattttatttgtgaaagtccttctctagccttgcgtgagcctttctaaaaattttctttcaccagctcactgaagttgattcatatagccttctatttgaccccccgccccgctgtctcccattctcagctcaaggagaaatgtttctctttgctcaaggccttgtttgcctgttaaccttcagaagccactctgctcccagaatccctttcttagaaaaagcccatccgttgctctgtaagactaaccaagcgcgactttctcctccaaagcaaaaggaaaccgga

SEQ ID NO: 177173 - DNA, 633 bp, Homo Sapiens
gcaactaataaaatggttacctataaggagttgacaggaaatatggtggcaggagtgggacaaagattcatctgttgcattttttgtataacattgactgtttaaaaactttttgttgtgtactttacacaaaagaagaaagaataggttaactaaccttgatacccatcacctagcctcaacaattatcaatgcatgagctatattacttcatccataattccacacccatttcccttcactaaattattttaaagtcagtgtcagacatcatattatttcatctgtatatatccgtaaatatttcactgtgtatcgctgacagataaaggctgttttttaagaaatcatatcacactaaaaattattgtaatttcttatgtctaatggaaatttaaataatatctaattagactacatttttgtgaccattaccttatatttcagctgccctgcttccttctttatttatagtgtctaagtttattgtgggtcttcttagtacaaattagcaataaattttctcttggaaataatcttaatctcagagaaaagcctcaagaatattacaaagaatttctgtatactcttcccccagatacccaaatttaccatatttgctttgtatcgtcc

SEQ ID NO: 177174 - DNA, 374 bp, Homo Sapiens
ggcgtcctcttcagcctgtttccgcaaaagactgacatcctgctggcactcctcttcttcccaatgtgtctgcagatactctttaacattgtcttcgatgcaagcaaataaaatgtccttcacgaaagcaatcggggttgtggtaccttcgatatctaacaggatcacggtgacttcggcggggaccgaaagcacgaccatttcctaccggatgctacgggactcggcctgctgttggggagggcggagggcggcccggctgcggctgcggcccccggtaccgtcttgggcttccggcggccccgcgcgatctcggagccagcgaccaagtgcagcagccgcgcgtggggagaggacacctctgcacacctgga

SEQ ID NO: 177175 - DNA, 430 bp, Homo Sapiens
tggtttattgcatatttgaggacaaggctgtgttttatcaatatatatcatctttaataggtcaaaattactattttttctacccagaggaaggttattcttttaatgctggatcttttaaaaaacagtgtcaaataagcttagtgttaggttgtctgatgagaaccaatctaatatggggagtataattaattgtctcatattcaccttcacggaatacttacagccctagggttgtctgtatcctaatgatattatgtaaagattgcctgtataatctagcagtacttatggaagagttctagcagtacttatggaagagttattttcaaatttgtgtctgacattgtagcattccctgggcagtcatatatcccataaaatcgtaaaagtatgtgaaattttttatatatattaaaagattttaaag

SEQ ID NO: 177176 - DNA, 861 bp, Homo Sapiens
gtagaagatgaatatgtgcattatataagtgatgatttggacattgaaactaaaatggaagaacaggaaaaaaaccctgcatcttctgaacttgaagaaccaagtttagtttgtgaggaagatgaaattatgaggtctaaagaaagtccagatctttctatttctcattctcaggttgagcagttagtcaataaaacatctgaacttgatatgtctgaaagcaaaacaagaagtggaaaagtctttcagaataaaatggcaaatggaaatcaaccagtaaaatcttccaaagaaaatcggaagagaagtcaacatgaatctgggagaatagtcctccatcactttgattcttctagtcaagagtcagtgccaaaaaggagaaagtttagtgaaccaaaggaacatatataaaaattatttttgttctgcaggcttgcagagttcttctcaccatttaaactgaaggaccctatattatatttccctaactctgaagatgtatatgtagtttaaagcagtttgtacactaaaactaagtttttggctgactgtcatattgtggtccttaatcttgagataaatccaatagaacttttgaataaaagcaaaagtacaaatgtcataattgattcggtaataagtaaaatttcaaaattgattttgttcattacctacttaatatttcctttaaatatatactaactgttaaggccctctaatgccatttttctaaacagtaatgtttactttggtattaaaatttggtatggattcactttttacttatgttaaaattataccatttaactggctcttttgtcattgtgctgttattaaaacaatgttcttcaatattttgaa

SEQ ID NO: 177177 - DNA, 180 bp, Homo Sapiens
tggggcaagggttgaaaaactaactgttgggtactaggcttaactacctgggtgttgggaccatttgtatcccaaaccttagtatcatacaacatacccgtgtaacaaacctgcatctttactctctgaatctaaaataaaagttgaaatttttaaaaaacccaaagtgaagtaaacaat

SEQ ID NO: 177178 - DNA, 332 bp, Homo Sapiens
gtttcttcccttgtttcgtgtggaatgtggtgacctagtcacctggaaccagctcctgacagaccccggcaacttctagatgaacccaagtgaactttcctcattaccatcctgaagtcactaccccagggggagctatagcttcatgaccgtaaaatgtgacctgtgtgctggcaggacgactcactgcggctgcgccactgggacccctcccctacatgcaccaatgcactctctcccctctccatcaccccataaaaccctcctgtcactttccttcagagacaccgctttggagagtattcccagcgctctccttgcttgtgacaagt

SEQ ID NO: 177179 - DNA, 545 bp, Homo Sapiens
attactccactggaatggaagacataaaccttgggacttccctagtgttcacaacgacttatgggaaagctggtttgttcctgaccctgcagggatatttaaactcaatcaccatagctgatataactctacccttaaaatattccctgtatagaaatgtggaattgtccctttgtagccaactataacattgttctttatgaatattacctttgatacatatgatccacaatataaaaaccaaaaactactgtgtgcaaattataccttggaccatataggcattgattaacttctttaagtacatgtgataactatggaaatcaagattatgtgactgaaaaacataaaggaagagacccatctagataacagcaatcaacctgcttaattctgaatgacaattatatccacaaatttttaaaacttctacatgtatttttcacatgaagatctccttaacaggttgccaaccttttcttttataaaactattacatttaaaatatggacgtctgaaaaataaaatattcatcatttttatga

SEQ ID NO: 177180 - DNA, 483 bp, Homo Sapiens
cgcggagggggtcgagcttggcacgcagccagtccaggttggcttccaggtactccatgcagtagagcaggccgccgttgggccccaggcgcagcgcgtccatcacgtcgcccagccccaccagctcgcccacgtccacggcacactcgtacggcagcccctcgttggccgggtccaggttcaccaccgccacgcgccggcccagcgcgcgcaggaactcactcatgcccaggcagtacgtggtcttccctgagcccggcgggccgatcaccgcctgcccgaaggccgtggtcggagcggcccctgccattggcggcccgcggcccggagcaggtcaactcacagggaaaacggggcaggtagccgcgccggagacgagactgagggcgagggtcccagtacgtatacctcgttggcggccagcgtcactcgccaaaggcgcaacagctgagaccgtgtcgcgcaaaaggaaataacaggccg

SEQ ID NO: 177181 - DNA, 331 bp, Homo Sapiens
ccaacatttgtttcttcattatctctaccggggttctgtccttttatttcgtctttcttctaattcggcttctgcttcttatttcctccctggatttgaactttacttacctaaactaccagttaggttaccttctcagaacctctaaggcagcagtttgaggttgatgatggaagatttaggattagaaaaaagaaacatgaatgaatttctgatgttttattataggggtttgtaatgcaggtagaaagacctttttcagagttaagagtttgatccgacaaatgagctattttgatatttataacgttgtctaataaaagtttcctat

SEQ ID NO: 177182 - DNA, 460 bp, Homo Sapiens
caccttgcagtggcctttccttgtcatcagagtagagaatgcacaggtgttgatgagggcgtgtggctgagcactacatgtcaagtccagagtcagtttctatcccaattctccctgcagcctgaagaacggatccttgtctccaatgtcagcacaaaggaggctttttctgtgctttgacattctagcagttcagggatgagagggagggagaatcctggatgctggatggagtatttctctgaggcccacacaaagctggacacccccaggctctactccatcccattggagtctcttctttttttgatagcgggagggaggaagtacgactaatgttggagcctgaaactatggaaatgctgctaaaatttttatattgacaaacattttcttggtacttcattgtcatttttcattaatcaaccatattaaatttataataaaaaatgcccctcag

SEQ ID NO: 177183 - DNA, 800 bp, Homo Sapiens
  misc_feature (226)..(226): n is a, c, g, or t
ggacgcgtgggtcgacgaatcgtcgactacccacgcgtcggacaggaagtcgtcagatgggaagccgtgtcgcctttaagattgtgattgtggatgaagcagataatatgacctcagctgctcaggcagcttaggacgtaccatggagaaggagtcgaaaaccacccgatctgcttatctgtaactatgtcagtcgaataatgaacccctgacctctagatgtcanaattccgcttcaagcctctgtcagataaaattcaacagcagcgattactagacattgccaagaaggaaaatgtcaaaattagtgatgagggaatagattatcttgttaaagtgtcagaaggagacttaagaaaaagccattacatttcttcaaagcactactcgattaacaggtggaaaggagatcacagagaaagtgattacagacattgccggggtaataccagctgagaaaattgatggagtatttgctgcctgtcagagtggctcttttgacaaaatagaagctgtggtcaaggaattaatagatgagggtcatgcagcaactcagctcgtcaatcaactccatgatgtggttgtagaaaataacttatctgataaacagaagtctattatcacagaaaaacttgccgaagttgacaaatgcctagcagatggtgctgatgaacatttgcaactcatcagcctttgtgcaactgtgatgcagcagttatctcagaattgttaacgtgaatatatctggatggggggttttgtaaataatgaagttgtaataaaaataaaatgaccaaaag

SEQ ID NO: 177184 - DNA, 432 bp, Homo Sapiens
ccaagcgcctcccaaacaaacagccggggccgtggtcctgcctaaactctcacatccacggcaccacgctgggcccaggcaacagagataaggagagccctggctcttgggatggggtcgcgccgattcacatgctgtgccgcggagccccggcttccatccatgatgtgcccctgtggcgggataattgggaaacaacctttttctgattcccagagaactaatgagctgcaaaaagagattagacagggaagaattgctttcggggagaagccacttactcggctcgccttggtttttgctaacaacgtctccttaaactgctgtcaaatctttttctccctgtgtaggattcatcaatcttcgtatgcaaaagaacaccactgcactgcactgctaaaaattcacacaataaaatggactttaacttgc

SEQ ID NO: 177185 - DNA, 692 bp, Homo Sapiens
aaggcaggagggaatttagtggagctcgggaaggaagaaagtggggttgggagaacctcccaacccatccctgctggcccggggaccgatcaggctctcagcaagagaagtattcccgggatgctgagcgcttcattctgtctccaggactcaggcaggtaggtcccagctccgccgcgcccccggacctacaggtcagcgtggtccgaagtttcctctgggggcttcgcgggcgcccacacgtactcggggggcacctgcgcgtcgggccccgccttgcggtagaagccgagctcctgcactagcgcattgatctcttcgcgggtcatttcactgagtgggatgcgctctagttcctcgtagcggcggcccagcagcacgagctcagggtcggccccagggaggtgtttcatcaccaggttgtgatagaatggaatgtcctgcgtgacgaaagccttcacctcctttaggcggttcagctgtcatcccccgcaggtctctacccgggcgcgggttaggccgctcagacggttccagtccggccggtaggcagtggcggctgtggctggggccacaagcgccgcgagaagcagcagcagcgccagcggaggcaacaggaggctcatcgggacccggccgcagatgatgcgcaagctggaggcgaacctccgagtcgctgcgccacgtctccc

SEQ ID NO: 177186 - DNA, 443 bp, Homo Sapiens
tttcaactcaaaaccacccaacccggtggttaacgatttaatacatataaccaaaccggcagcgtttagagttgggatatacatttaaacattttcctggttaaggttcccaagagagtgtaaaggttttagcagaaagcaaaatatcttgcatctttatggaagtttaaagcatgtttgcaaatattgcagcccactgaaagaatttgcatgtacaggaaagttgtggatggagacggtttgtggaattttaagtgctcattgtagtaaacttttgctttgtagatttgaaggtacagacttatacaggcaagttcacaaaatcatgattagttacaaacagtaaaatgaagttaaaataaattattattttctatttgatatgttttgatgtgattcctcattttgcagtggtgcctataaaataaaagccttttgcagtg

SEQ ID NO: 177187 - DNA, 622 bp, Homo Sapiens
  misc_feature (20)..(20): n is a, c, g, or t
  misc_feature (108)..(129): n is a, c, g, or t
aacagcagtcccagttaagnacagagcatgtgtcagagtgttgttccgttaacctttttgtaaatactgcttgaccgtactctcacatgtggcaaaatatggtttggnnnnnnnnnnnnnnnnnnnnnngaaagtgttttttcttcgtccttttggtttaaaaagtttcacgtcttggtgccttttgtgtgatgcgccttgctgatggcttgacatgtgcaattgtgagggacatgctcacctctagccttaaggggggcagggagtgatgatttgggggaggctttgggagcaaaataaggaagagggctgagctgagcttcggttctccagaatgtaagaaaacaaaatctaaaacaaaatctgaactctcaaaagtctatttttttaactgaaaatgtaaatttataaatatattcaggagttggaatgttgtagttacctactgagtaggcggcgatttttgtatgttatgaacatgcagttcattattttgtgggtctattttactttgtacttgtgtttgcttaaacaaagtgaccgtttggcctataaacacattgaatgcgctttattgcccatgggatatgtggggtataccctcccaaaaaattaaaacgaa

SEQ ID NO: 177188 - DNA, 468 bp, Homo Sapiens
  misc_feature (26)..(26): n is a, c, g, or t
  misc_feature (41)..(41): n is a, c, g, or t
  misc_feature (52)..(52): n is a, c, g, or t
  misc_feature (91)..(91): n is a, c, g, or t
  misc_feature (113)..(113): n is a, c, g, or t
  misc_feature (135)..(135): n is a, c, g, or t
tggggccctttgtgtgaagccccctnccgaaggcctgaacnggtgcaaatgntgagggaacagcctcaccctccaagcccttaaagggggncagggagtgaatgatttggggnaggcctttgggagccaaaatanggaaagagggctgaagctgagcctcggttcctcccagaatgtaagaaaacaaaatcctaaaacaaaatcctgaactcctcaaaagtcctatttttttaactgaaaatgtaaatttataaatatattcaggagttggaatgttgtagttacctactgagtaggcggcgatttttgtatgttatgaacatgcagttcattattttgtggttctattttactttgtacttgtgtttgcttaaacaaagtgactgtttggcttataaacacattgaatgcgctttattgcccatgggatatgtggtgtatatccttccaaaaaattaaaacgaaaat

SEQ ID NO: 177189 - DNA, 463 bp, Homo Sapiens
  misc_feature (25)..(25): n is a, c, g, or t
  misc_feature (45)..(45): n is a, c, g, or t
  misc_feature (162)..(162): n is a, c, g, or t
  misc_feature (172)..(172): n is a, c, g, or t
cctggtgcccttttgtgtgaatgcncccttgcctgatggccttgnaccatgtgccaattgtgagggacatgcctcaccctctagcccttaaggggggcagggcagtgatgatttggggggaaggctttggggagcaaaataagggaagaggggctgagctgnagcttcgggntctccagaatgtaagaaaacaaaatctaaaacaaaatctgaactctcaaaagtctatttttttaactgaaaatgtaaatttataaatatattcaggagttggaatgttgtagttacctactgagtaggcggcgatttttgtatgttatgaacatgcagttcattattttgtggttctattttactttgtacttgtgtttgcttaaacaaagtgactgtttggcttataaacacattgaatgcgctttattgcccatgggatatgtggtgtatatccttccaaaaaattaaa

SEQ ID NO: 177190 - DNA, 507 bp, Homo Sapiens
  misc_feature (24)..(24): n is a, c, g, or t
  misc_feature (29)..(29): n is a, c, g, or t
  misc_feature (33)..(33): n is a, c, g, or t
  misc_feature (49)..(49): n is a, c, g, or t
  misc_feature (65)..(86): n is a, c, g, or t
  misc_feature (151)..(151): n is a, c, g, or t
  misc_feature (153)..(153): n is a, c, g, or t
  misc_feature (385)..(385): n is a, c, g, or t
ccttgaaccttttgtaaatgacgncttgnaccntactctcacatgtggncaaaatatggtttggnnnnnnnnnnnnnnnnnnnnnngaaagtgttttttcctggtccttttggtttaaaaagtttcacgtcttggtgcctttgtgtgatgngnccttgctgatggcttgacatgtgcaattgtgagggacatgctcacctctagccttaaggggggcagggagtgatgatttgggggaggctttgggagcaaaataaggaagagggctgagctgagcttcggttctccagaatgtaagaaaacaaaatctaaaacaaaatctgaactctcaaaagtctatttttttaactgaaaatgtaaatttataaatatattcaggagttgnatgttgtagttacctactgagtaggcggcgatttttgtatgttatgaacatgcagttcattattttgtggtccatttactttgacttgtgtttctaaacaaagtactgtttggcttataaac

SEQ ID NO: 177191 - DNA, 420 bp, Homo Sapiens
  misc_feature (173)..(173): n is a, c, g, or t
  misc_feature (279)..(279): n is a, c, g, or t
  misc_feature (342)..(342): n is a, c, g, or t
gcgtgctgtcccctgaaaatttgccctccttcggacggtggtttgtgagcaccgggaaggacaacctgctcaacgccctggaggacgccgtacggggccagcattttccagtccaaggagtcgtcctcagtcctgagttgtgacatctccagaaataacaaatacatcgtganaggctcgggggacaagaaggccaccgtgtatgaggtggtctactgagacatgaccccccttcctgtacccgaagtccagactcccaggggaatcagcagccggganagacatcctagcagccgcctcccagccctgcctaggaaccgtacatcccatctgctctctggncaacggcttcacaccttcccctgctgcatgtgggggccgatgggcaggggacctcggtggaaaaaaaatgtatctatc

SEQ ID NO: 177192 - DNA, 450 bp, Homo Sapiens
cctggcagcccagcggtgctccacccagatgaaaagccctggctcccatacagcaaaccaaacttcctgtcccggggccagggcaccagcacatgttccacggccggcagcaactcttcccaggggctccagcagctctaggggctcccggggccctggccggagccggagtcggagtcagagccggagccagaaccaaaggccaggacagaaacgccgagaggaaccaagatgacccttgttggggcattgagaatatcatgagtgccacggggaaggggagtagggatgtcttttcccccccagcagtgatgagtggggctagctgaagcccattggtttccacgatttcaattggctgagaaggcagagagctagctcctccctttctttctttttccacctgagacttgtttataaaaaacaaaacaataaaaagagtctgatcag

SEQ ID NO: 177193 - DNA, 398 bp, Homo Sapiens
tgtcctgagcaccgttgctaacccccagtcctgtcacagtgaccgtgtctaccagggctgcctgacgcccgcccgcctggagccgcagcccacggaggtcggagcctgcccacccgccttgtcctccaggatcggagtcaccctgaggaagccccgcggcgacgcgaagaagtgccggaaggtgtatggcatggagcgccgggacctctggtgcacagcctgccgctggaagaaagcctgccagcggttcctggactaagtccggctcgttcaagaacataagctaccaccttctccctccccaccccctccaggcccggggctgaaacagcccgaggacagccccaggggctggccttcaccagctgcagggtctgcttttacttggggtggggggg

SEQ ID NO: 177194 - DNA, 429 bp, Homo Sapiens
ggaacctagccatgactggtggggttgagcctacagtcaacaaaaattgggctaagtcacttttccccagggaaagaatatttccctctcctgcatcaagtctgcgtggccatcctccccccaccatccaagactattaggttttgtccctgcacccttcactggcatcctcaatcattaaccttctgaaagctcacagtacacattagtatgtataactggctttaccaaattgaatgaaaaggagcttgtgcaaaaaaatttaaaaatggatgtcaagatgttatgtaaaagatgagtgtaattgtgaaatgttctatacactatcaaatatataaagctttctatattcgaatgtacattatacagatcattcatatgtgtacataaaattttaaaaataaagggaattgactgctttgttaatga

SEQ ID NO: 177195 - DNA, 427 bp, Homo Sapiens
  misc_feature (132)..(132): n is a, c, g, or t
agttgtttcccctagccatttcccgaaataccccatcattccgagtcatcatctctgtttgcctgccttccctggccaagcccaggtggaaaaaaagtttccaagctaggtctggcccgttggggatctcancagtggggcaggagggtgcctgatttcggggagtcctgacccgagcctgttgtcagagttgggaggggctctgagcagtgttgggcaggccgggtctcccatcccgaggccaacgttcctgtgcagagccccatccactggttcttgccctgagccacatatgtctgtgccatgggctgagtgccacgacaggcccgtgtgacagctgctgcccacgcatgtggaagctaggtgggactcattcctaattctgccgttgtaatgagacttgattaaaacaccgccacttttttgc

SEQ ID NO: 177196 - DNA, 321 bp, Homo Sapiens
ttctgaggaggaagtcccagagcagactttggctcaactctaagagagcagctggaatggccccacaggctacagcccgtgtcggtgtgggatgcgagggagaggagccaggatggccccacatgctttccttggctgcctgggcgggtgcagcagccacctgagagggccgtctgaggacacgaggcgcatcagcctcatgagatctgggatgtgcacgggacgtccatgaagccgtcggagatgatttggactagtttacaaaggttgacgcagggatgtgaatcatcacatgtgtgtacttgtaaatacaaatgtaag

SEQ ID NO: 177197 - DNA, 562 bp, Homo Sapiens
gtaaaataaactgtatttgcaaatccaacattgagcttctggactacgctgactccactgctgaatcctcaatggaaagggtcgactggttgcagttgaaatgtacctgaaatgtagcctctgtccttgtaagtcagttgacttgccgcacatctctttgtgtacttgtacggtactggcagaaaagtcatttttcaaaagccataggcttttccttgcccttagctgtaataatgcatctgattttgatttcctccagagctgtgtttctgtccatcacctgtgtattggccctgtgtttaccactctggcccactcctcacccccttgctcccctggtcttctggagtttgtgacattgatttgaaatggatggtgttctcttgagagcaagtgagattgttagaattaagttccaactatacagttttctaacatagctataaggtccttgttgctgtttgtgataactgatagataactcattggaaacgtgcatacatttatattcagatgaaattatggtttgcactgtctattaaatatctcgattaattttcat

SEQ ID NO: 177198 - DNA, 388 bp, Homo Sapiens
accacgcgtcgctccttcttttttgcccttggctcttgacactctaaacccctggaccatctgaatggagcagccaagttcagtcccacatttctgtactgttcctctttcacagcgtggaatatgtcacatgatgaagttgtatagaaacagaaccatggatggatggccaggattgccgtggtccctagctagatccccttcctatcaatcacctgatagcaacagggacagctgccaataccctgctctttactcaatggtacccagggagggagcatgggaagagggtgagctgagggctggaggatggcaacagccactgggtgagctgttcacggtcttatactattgtttgtttgtgattaaaagtgcttcaacccacctc

SEQ ID NO: 177199 - DNA, 453 bp, Homo Sapiens
gaggcctgagcatggctgtgtggaaagcgtgggtggcaggcatgtggctctccttgccgcccctcaacctgagatcttgttgggagacttaatggcagcaggcagccatcactgcctgcttgatgctgcactgagctggacagggggagtccgggcaggggactcttggggctcgggaccatgctgagctttttggcaccacccacagagaacgtggggtccaggttctttctgcaccttcccagcacatgcagaatgactccagtggttccatcgtcccctcctgccctgtgtacctgcttgcctttctcagctgccccacctcccctgggctggcccactcacccacagtggaagtgcccgggatctgcacttcctcccctttcacctacctgtacacctaacctggccttagactgagctttatttaagaataaaatcgtggtggtggtc

SEQ ID NO: 177200 - DNA, 318 bp, Homo Sapiens
gatcataatgatctctttcctttttccttttgtcctttcactgtatgacttgaatcagttttgattctatttgtaagtgtttcttgtcgtgagcacctgccatgtctgttgcgttttcctcggcagcgtgtagggcttcagcttcctgggttttcacccttcctgcaggcactgtggggtcctgagggccagtgggtccatttcacctcttgctgcatgatggtcagtagctgatctgttatggcattcacttccagattaattttccgtgtttgaagtatgtgcatatgtgctttacagaataaaacatctgaattt

SEQ ID NO: 177201 - DNA, 870 bp, Homo Sapiens
actgcaaatgactttaatcattaaatagcttctatgccacactctgattaagccgactgaggtccctgggatctgggtcactggaccgagctgctcgctcggtggctccactgccaggtccgggcgcgctccccacagcgctcagttctggcccagacagggcctgacatccgccgcctgcagtcccggggtggccgtcaccgttccacggccagcgcctctgcctgctcgtccgggaaggcgatgtcgaagatctcccggtagtgttccacgaagtgcacctccaggccctcggtgatgaaggctgccaggtcgtagaagtccttcttgttctcggctggcaggacgatgcacgtcacccctgcgcgcttggccgcaatggtcttctccttgatgccaccaacaggcaggatcttgcccgtgaggaagactttcgccagtcatggccagattctgccggacaggctggccatggccagggacagcagggccgtgacgatggtgcagcctgcgcttgggccgtccttgggggtggcgccctcgggcacatgcaggtggatgtgtgaggtcaccaggtagtcattggcgggggcgtgctgcatgaggaaggctctggcgaaggtgtaggctatgcgggcgctctccttcatcacctcccccagctggcctgtcacctccaggctgccatccttgtcacccttggcatccttgtcctgtggccgtctcagggatgtctccacaaacagcgtggagcctcccattgcgggtcaggccagctcggaggaagccaaggtgcaacttccttcggtcgtcccgaatcggggttcatccgacacccagccgcctcaccatgccggccgaagtcgaccc

SEQ ID NO: 177202 - DNA, 380 bp, Homo Sapiens
gggatggggacagggtgcacagcagggcggggtaggaccccagcccctcccaaaacagcctctcctactcccatagacccctttcttctccccttccccacggtaggaacatagcgtgtttatattttatggccaaactattttgaattttgttgtccggccctcagtgccctgccctctcccttaccaggaccacagctctgttccttcggcctctggtcctctctggtcccctcctgggtttcttacgtagttgatttttcctctttagtctcccccgacctgcgcccagccccgtggcccctgcccctctcctactctctgtggcagtttcatatttgctaagacgaatttgctcattaaacattttgttgtatttt

SEQ ID NO: 177203 - DNA, 485 bp, Homo Sapiens
gggtcttttctgtgaattatgactattcatttgttaaaaatacctaagagcaattatagtgggacatctaaggtcctctgtaaacagtgaattagcaaacctcagcctatgtgtttctaccctgatttttttcttttcatgggtatctgaagcctctaagttttttcaaaaatggagtatcacaaaattgagtgaaacacaatacttaatgtattgtactagattgccaaattcataaaatgttaatggaagctttttgatgtgattataatggcactattctggtcattatcctattttgattttatttaattttttaaagttgaagaattaaatattttaatggttctaatcttttgcattccatgttgcattaaacctgtttatatgagtagtcttctgttagaatcacatctgtgcttttcttgagtctgctgttgaactattagattaagtcataattcataaaattttagtttaatgtc

SEQ ID NO: 177204 - DNA, 723 bp, Homo Sapiens
agagatgatttactgctacaagaagatcgctgccgccacggagactgctgcacaggagaatgcctcggaatacctggccatcacctctgaaagcaaagagaactgcacgggcgtccaggtggccgaatagccctggccctgggccccgcctcaaggaagagccagccgtaatggggactctccaggcaccgcctgcccccagcgtgggggtggccactcctgggccccagaaagcctcagagtcctgccgacggagccactggggtgggagggggcagggggcttggctcgcacccccactttcgcctcctccagctcctgccccgccggccgcgcaccgccatgcatgatggagtaaagcagcggccccagcacccctcctccttgctgatttgcacacattggccgcttcagacacgcacttctggggccagcccctccccgactcctccctgcctggcggcaggggtcgcgatgatgggctggagcagtttggggcagggggttctgggacccactccgactccccctccccggcatcatttcccctcccgcttcctccggctggacctgggtcccccctccctgtaatgcactcctgccccggcccaacctcgccctctctcaccagccttgaactgtggccacctagaaaggggcccattcagcctcgtctctttacagaagtagttttgttcatgaaataaagactcttggacttga

SEQ ID NO: 177205 - DNA, 1477 bp, Homo Sapiens
gggggcggactgcggcgcacttccgtagaggtggacatggcgtgcggctttcgccgcgctattgcttgccagctttccagagtgttgaatcttccaccagaaaacttgatcacatcaatatctgcagttccaatttcccaaaaagaagaagtagctgattttcagctttctgtggattctttattggaaaaagacaatgaccattcaagaccagatattcaagttcaagccaagagactagcagagaagctaagatgtgatacagtggtgagtgaaatcagtactggtcaaaggactgtaaatttcaaaataaacagagagctcttaacaaagacagtgctacaacaagtaattgaagatggctcaaaatatggattaaaaagtgaacttttctctggacttccccagaagaagattgtggttgaattcagttcacctaatgttgccaaaaaatttcatgttggacatttgcgttctaccatcataggaaattttatagcaaatctcaaagaagctttaggacatcaagtaataagaataaattaccttggcgattggggcatgcagtttggtcttctgggaactggcttccagctgtttggctatgaggaaaaactgcagtccaatcctctacagcatctctttgaaagttatgtacaagttaataaagaagcagcagatgataaaagtgtagcaaaagcagcacaggagttcttccaacgattggaactgggcgatgtgcaagcactttcactgtggcaaaaatttcgggacttgagcattgaagagtacattcgggtttacaagcgtctgggagtatattttgactgaatattcaggagaatcattttactcgctgaaaaatctcaagaggtcttaaagttgctggagagtaaaggactcctactgaaaacaataaacaggaacggctgtagtagatctctctgggaatggcgacccctcctcaatttgtactgtaatgcgaagtgatgggacttctctctatgcaaccagagatcttgcagctgctatagatcgaatggacaagtataatttcgatacaatgatatatgtgacagataaaggacaaaaaaagcattttcagcaagtattccaaatgctgaagatcatgggatatgactgggcagaaaggtgctagcacgtgccctttggagtagtacagggaatgaagactcgaagaggagatgtcactttcctggaagatgttttaaatgagattcaattaaggatgctacagaacatggcttcaattaagacaactaaagaactcaagaacccacaagagactgcagagagggtcgggctcgcagcactcattattcaggacttcaaaaggtttactcttatctgactacaagttcagctgggatcgtgtttccagagtcgccggggacacaggagtcttcctacagtacacacacgcccgctccacagttggaagagactttgggatgtg

SEQ ID NO: 177206 - DNA, 329 bp, Homo Sapiens
aaatagacataccgacgagaaaggagagtccttgaaagagacccaaggaaaccctgaattcatacccacgtcaaatatgcacatatcctgagatgatgccactttgatgaatgtgcattagtctgatttatcatgtaccttaagagagccagatggggtatgtttttgtgctgtgatatggtatttatacaggtacaaatataaggccttaagtaaacaatctgcattgattacaatttggatatttcctctcctcctgtagccatactttgattttgctttaaaaagattattgaatccttttaaaaatatatattcctaaaatatga

SEQ ID NO: 177207 - DNA, 775 bp, Homo Sapiens
gggtagtggccaggggccctggacgctagccacggagctgctgcacagagcctggtgtccacaagcttccaggttggggttggagcctgggatgagccccggcagcgccttggcccttctgtggtccctgccagcctctgacctgggccggtcagtcattgctggactctggccacacactggcgttctcatccacttggaaacaagccagtcttttctgcaaggtcagttgaccaagagcatatttcccctctgttgtacatcgttgttttgtgtttgtgttgtaacagtgggtggagggagggtggggtctacatttgttgcatgagtcgatgggtcagaactttagtatacgcatgcgtcctctgagtgacagggcattttgtcgaaaataagcaccttggtaactaaacccctctaatagctataaaggctttagttctgtattgattaagttactgtaaaagcttgggtttatttttgtaggacttaatggctaagaattagaacatagcaagggggctcctctgttggagtaatgtaaattgtaattataaataaacatgcaaacctttaaaccaaaggtcgtgatgatccgaaatacacataacattgtcggcccgcctcgggcccctcaaaaaaacctttcctagaacctttccgttttgggggcgcggggcccccaggtagggtaagcggaacccgtggctaccacagctggcttcccccaaagggagaaacctcgggccccaggaacctaaccggccttgggcat

SEQ ID NO: 177208 - DNA, 405 bp, Homo Sapiens; identical to SEQ ID NO: 6913

SEQ ID NO: 177209 - DNA, 882 bp, Homo Sapiens
gggccttctgcttcggtgcgtttgcttctgaggatctccagtgtcacaacaaacacatgccagccctgttttacagggagccctggaggagttgggatagaggccacattgactgagggtagttgccagggtcctgcagttatacacaaagtccttaggataagaccatggccttgagagcatgtggcttgatcatcttccgaagatgcctcattcccaaagtggacaacaatgcaattgagtttttactgctgcaggcatcagatggcattcatcactggactcctcccaaaggccatgtggaaccaggagaggatgacttggaaacagccctgagggagacccaagaggaagcaggcatagaagcaggccagctgaccattattgaggggttcaaaagggaactcaattatgtggccaggaacaagcctaaaacagtcatttactggctggcggaggtgaaggactatgacgtggagatccgcctctcccatgagcaccaagcctaccgctggctggggctggaggaggcctgccagttggctcagttcaaggagatgaaggcagcgctccaagaaggacaccagtttctttgctccatagaggcctgagctgactggagcagagtcatttgcttcagcaggatccttgtgggccttctaagatgaagccaccctcaggtccagggaaggttgtgctggtatttggctcatgacagccaagagcagatttgtgaaatcggctcaactcccaggtgagagcaagcaaaaatcttggctgggtggaaaggaaggcaaaagagtaaaaattaaaaaggccaggcccagtaagtgtaccttgtactttataaataaacctcaagcagctcaaggttgtccttct

SEQ ID NO: 177210 - DNA, 453 bp, Homo Sapiens
gtatctgctgtgtctgcacttcatggtaaacgggatctaaaatgcctggtggcttttcacaaaaagcagattttcttcatgtactgtgatgtctgatgcaatgcatcctagaacaaactggccatttgctagtttactctaaagactaaacatagtcttggtgtgtgtggtcttactcatcttctagtacctttaaggacaaatcctaaggacttggacacttgcaataaagaaattttattttaaacccaagcctccctggattgataatatatacacatttgtcagcatttccggtcgtggtgagaggcagctgtttgagctccaatgtgtgcagctttgaactagggctggggttgtgggtgcctcttctgaaaggtctaaccattattggataactggcttttttcttcctctttggaatgtaacaataaaaataatttttgaaacagc

SEQ ID NO: 177211 - DNA, 991 bp, Homo Sapiens
gggaactcaaactaaccaacccactgggagaagatgcctgggggtccaggagtcctccaagctctgcctgccaccatcttcctcctcttcctgctgtctgctgtctacctgggccctgggtgccaggccctgtggatgcacaaggtcccagcatcattgatggtgagcctgggggaagacgcccacttccaatgcccgcacaatagcagcaacaacgccaacgtcacctggtggcgcgtcctccatggcaactacacgtggccccctgagttcttgggcccgggcgaggaccccaatgagccgccccccaggcccttcctggacatgggggagggcaccaagaaccgaatcatcacagccggggggatcatcctcctgttctgcgcggtagtgcctgggacgctgctgctgttcaggaaacgatggcagaacgagaagctcgggttggatgccggggatgaatatgaagatgaaaacctttatgaaggcctgaacctggacgactgctccatgtatgagaacatctcccggggcctccagggcacctaccaggatgtgggcagcctcaacataggagatgtccagctggagaagccgtgacacccctactcctgccaggctgcccccgcctgctgtgcacccagctccagtgtctcagctcacttccctgggacattctcctttcagcccttctgggggcttccttagtcatattaccccagtggggggtgggagggtaacctcactcttctccaggccaggcctccttggactcccctgggggtgtcccactcttcttccctctaaactgccccacctcctaacctaatccccccgccccgctgcctttcccaggctcccctcaccccagcgggtaatgagcccttaatcgctgcctctaggggagctgattgtagcagcctcgttagtgtcaccccctcctccctgatctgtcagggccacttagtgataataaattcttcccaactgc

SEQ ID NO: 177212 - DNA, 891 bp, Homo Sapiens
ggggcaactcaaactaaccaacccactgggagaagatgcctgggggtccaggagtcctccaagctctgcctgccaccatcttcctcctcttcctgctgtctgctgtctacctgggccctgggtgccaggccctgtggatgcacaaggtcccagcatcattgatggtgagcctgggggaagacgcccacttccaatgcccgcacaatagcagcaacaacgccaacgtcacctggtggcgcgtcctccatggcaactacacgtgggccccctgagttcttggggccccggcgagggaccccaaatggtacgctgatcatcccagaatgtgaacaagagccatgggggcatatacgtgtgccgggtccaggagggcaacgagtcataccagcagtcctgcggcacctacctccgcgtgcgccagccgccccccaggcccttcctggacatgggggagggcaccaagaaccgaatcatcacagccgaggggatcatcctcctgttctgcgcggtggtgcctgggacgctgctgctgttcaggaaacgatggcagaacgagaagctcgggttggatgccggggatgaatatgaagatgaaaaacctttatgaaggccctgaacctggacgactgctccatgtatgaggacatctcgcggggcctccagggcacctaacaagatgtgggcagcctcaacataggagaatgtccagcctgggagaagccgtgacaccccctacctcctggccaggcctgcccccccgcctgggttggggaaccccagcttccaagtggttctccaactttcactttccctggggacaattccttccctttttcacccccgttccttgggggggcccttcccttatagacatataattccccccccaat

SEQ ID NO: 177213 - DNA, 496 bp, Homo Sapiens
atgcaaacaggctcttgccaaaagcaggggttaatactccccaccctagaaagtgacacatcctcctccagccctacttcccatgcaatgtataagcacttgtacaaaggaacacacaggcacacacaaacttacacacatgcttttttcttggatgaagattcttacacaccaacagtgagttcttcgaaaattacaatctaactgtatatcctggaatataagtggagccacactacagaccaaactgaggtccaggacctgtactttttgtacaatagaacccagctcttctactgttctgcagccagcagatggcagatctctgagcagaactgcttttggagtgagttccttaggaatttccagccatccttacttcattcactttggcacgagtcttaggagggagctgctatgaagagctgaagggagatgctgagcctgtcttcacattaatggtcagtttttaaaccttcaaatggctacttatatg

SEQ ID NO: 177214 - DNA, 1313 bp, Homo Sapiens
  misc_feature (469)..(481): n is a, c, g, or t
  misc_feature (812)..(812): n is a, c, g, or t
gaggtgccaggcctggtgaccttgaagcatgtgtatgagattgcccgcatcaaagctcaggatgaggcatttgccctgcaggatgtacccctgtcgtctgttgtccgctccatcatcgggtctgcccgttctctgggcattcgcgtggtgaaggacctcagttcagaagagcttgcagctttccagaaggaacgagccatcttcctggctgctcagaaggaggcagatttggctgcccaagaagaagctgccaagaagtgacccttgccccaccaactcccagatttcaaaggaggtagttgcaaaagctgtgcccaaggggaggaaggaggtcacaccaatatgatgatggttttcatgactttgaatgatatatttttgtacatctagctgtatcgaggcatcaggcctgaataaacatcctttcgtaaacggaaggagaacgccgcgcttaacaagacgtgtcggnnnnnnnnnnnnntcttgagagacctgtaccgcccccactttcccttggtgagccccggctcccagtgaggggacggggtcaaccggggcccctacgtcttcgtttcccgcccggcggaacccgcggagcaccgcgacacaggggggcgtagggggagttccccagggccggaaaggccctgctcggcccgcggggcgcgccaccctcttatcgctggttttcttcacagaggagaggctcctgccccgagcgggggcacgttcctctccgcggcgaggctggcgttgtgcaccgccggggcgacacgtccgcgtatcttccaaacacccggcccgtgatctgncgccccctccacagcgcgcccccgcccttcttctcgctgctagtagttggcggaagagtgatgtgtcgtggcggggaccctgcggcagtctgacatgtggcctcccaacgatatattcttgtcccccggcgagtctgccctcgctcgtccctgtccggctccatctcttgtcacttgtgaagacatagggtcaggtgctgaccgaggctaactcggctatcggttctgggcggggagcaggcggatccgttggggtgtgggggaaggccgcgcgtccgtgtcgcgcgagcttaacaccaccctgcgcgcataatgtgacagcgcctccatagccgttttggacacttctctacagatagacgacggcgggggcaggactaaacactatatgactcccagaatagcaacggacgccgacgtctcgcgcgggcccgcgccctggcgctcggcgaacggcaaccgcaccccgggcgcgggcggagcggaggacaaggacgaata

SEQ ID NO: 177215 - DNA, 883 bp, Homo Sapiens
ggggtgaggacccttgacctctggcccaagatggtggcgcccagagcttcgctcttgctgctcccctgaggtgaactgaagccagcagccccgcatcatgtcaaagctcggccgggccgcccggggcctcaggaagcccgaggtcggcggtgtaatccgggcgatcgtgcgggcaggcctggccatgcccgggcccccactaggcccagtgctgggtcagagaggcgtttccatcaaccagttttgcaaggagttcaatgagaggacaaaggacatcaaggaaggcattcctctgcctaccaagattttagtgaagcctgacaggacatttgaaattaagattggacagcccactgtttcctacttcctgaaggcagcagctgggattgaaaagggggcccggcaaacagggaaagaggtggcaggcctggtgaccttgaagcatgtgtatgagattgcccgcatcaaagctcaggatgaggcatttgccctgcaggatgtacccctgtcgtctgttgtccgctccatcatcgggtctgcccgttctctgggcattcgcgtggtgaaggacctcagttcagaagagcttgcagctttccagaaggaacgagccatcttcctggctgctcagaaagaggcagatttggctgcccaagaagaagctgccaagaagtgacccttgccccaccaactcccagatttcaaaggaggtagttgcaaaagctgtgcccaaggggaggcaaggaggtcacaccaatatgatgatggttttcatgacctttgaactgactattcattttgtacattctagctgatatcgagggcatcagggcctgaataaacctcctttctttaaacaacaaaaaagacaaacacaaaacag

SEQ ID NO: 177216 - DNA, 248 bp, Homo Sapiens
gtgctataattttaaagtacttcaaagccaatttattctcttaattagcttcattattcttgtctttgtgtgtggattacctaaactctccttccagagctactttaatgattatattcaaccaaagcactctaaaatttagagtataaattgtcttatatttcaaattagaaaagttcaaatgaagtttaattgtgttattttataaaaccttctaaaattattaaatggaggatataatctataaa

SEQ ID NO: 177217 - DNA, 425 bp, Homo Sapiens
aagcatcacacaaagattttcttaaaagaaacaattttgcttgaaatctctttagatggggcttatttctcacggtggcacttggcctccactgggcagcaggaccagctccaagcgctagtgttctgttctctttttgtaatcttggaatcttttgttgctctaaatacaattaaaaatggcagaaacttgtttgttggactacatgtgtgactttgggtctgtctctgcctctgctttcagaaatgtcatccattgtgtaaaatattggcttactggtctgccagctaaaacttggccacatcccctgttatggctgcaggatcgagttattgttaacaaagagacccaagaaaagctgctaatgtcctcttatcattgttgttaatttgttaaaacataaagaaatctaaaatttcaaaaaa

SEQ ID NO: 177218 - DNA, 413 bp, Homo Sapiens
tcattgtctacgttgaaagcatctgccgtgtagaaacgttacccatgtccggaaagattctgtttcatctcacagattacttcattgttcagtggccggctctgaaagcaaagtatcccaaatcggtgtaccttgggcgaattgtttgacaaatggcaactgacttctctagaattttgcagttaacagtagtatgtactcaaattggggggaaaaaaaccctacatgtatctcgtaaaggcgtctgacagtcctgagaattactgatggtaaggaataaaaaatgtacagatgactcagtgaagaaactgaggcttctcttatgaaacaaacagtgataaacgtaactactaaatgtttatgcctctgtaaaccaaatttctcttctagataaaaatatgtattactacctg

SEQ ID NO: 177219 - DNA, 764 bp, Homo Sapiens
ccagagactttcgcttccggctgccgcaggcgcttcgctggtgcagacgcagtgctgagcacacagctaccggacaaagagtgacgcccggagctggagttatggcggctacggagccgatcttggcggccactgggagtcccgcggcggtgccaccggagaaactggaaggagccggttcgagctcagcccctgagcgtaactgtgtgggctcctcgctgccagaggcctcaccgcctgcccctgagccttccagtcccaacgccgcggtccctgaagccatccctacgccccgagctgcggcctccgcggccctggagctgcctctcgggcccgcacccgtgagcgtagcgcctcaggccgaagctgaagcgcgctccacaccaggccccgccggctctagactcggtcccgagacgttccgccagcgtttccggcagttccgctaccaggatgcggcgggtccccgggaggctttccggcagctgcgggagctgtcccgccagtggctgcggcctgacatccgcaccaaggagcagatcgtggagatgctggtgcaagagcagctgctcgccatcctgcccgaggcggctcgggcccgccggatccgccgccgcacggatgtgcgcatcactggctgagcggtggagctgcgggcggccagggccgggcgctctgtgcggactggcgccatgatcgggcccgggggcctgagcctggggaccccaacccgtgttcaatgaaacaatgagtttgggcagcga

SEQ ID NO: 177220 - DNA, 760 bp, Homo Sapiens
  misc_feature (351)..(351): n is a, c, g, or t
  misc_feature (384)..(384): n is a, c, g, or t
  misc_feature (396)..(396): n is a, c, g, or t
ctttcgcttccggctgccgcaggcgcttcgctggtgcagacgcagtgctgagcacacagctaccggacaaagagtgacgcccggaagctggagttatggcggctacggagccgatcttggcggccactgggagtcccgcggcggtgccaccggagaaactggaaggagccggttcgagctcagcccctgagcgtaactgtgtgggctcctcgctgccagaggcctcaccgcctgcccctgagccttccagtcccaacgccgcggtccctgaagccatccctacgccccgagctgcggcctccgcggccctggagctgcctctcgggcccgcacccgtgagcgtagcgcctncaggccgaagctgaagcgcgctccacaccaggnccccgccggctnctagactcggtcccgagacgttccgccagcgtttccggcagttccgctaccaggatgcgggcgggtccccgggaggctttccggcagctgcgggagctgtcccgccagtggctgcggcctgacatccgcaccaaggagcagatcgtggagatgctggtgcaagagcagctgctcgccatcctgcccgaggcggctcgggcccggcggatccgccgccgcacggatgtgcgcatcactggctgagcggtggagctgcgggcggcagggccgggcgctctgtgcggactggggccatgatcgcggcccgggggggcctgagcctgggaacccaaccccgtggttattcgaaaaatgagttctgggc

SEQ ID NO: 177221 - DNA, 402 bp, Homo Sapiens
ccccagccgtgtcgtctccaggaccacccgatggaaataacaggcgggcttcacggtgcggctctgtccgcccattgcccgctgggtctgcagggaactggactgtcccatggcctgtgagcaccggagcgcctggctgcctgccaaggaagtgcaattgcataaaaacagaaagaacaacgccctggagccaatcttcaagaaaggaatttccaaaggataatatttttctaataaatgcggctgcaacctcctgtgcatttaattaaataggccaaatttttgctgcttaggtcatctcaaggctgatacttgagctgtgtgcccagagatcatgcatttagatttatatttttgccagaaaatacaaggttataataaaactaagaactaccattacaa

SEQ ID NO: 177222 - DNA, 479 bp, Homo Sapiens
ggaagtctagaactaaagcaccttgtattgtctgcttctaaagtgtcctatagtttttaacttaaagtgtaaagagtaacattttatcttatgtcaattaaagttacatttttcatttgttggtgtacatgtgctacctgttttatggggaatgtttaacacgatcctccaagttggttctatgcataaccattcaccaaatactgctgctgtgattccttgaaggaaatattctgtggtctgctatgatgcattgccatcttgctgcttgacaataggtttataaataattagaattacgtgttttaatagtacctttgtatatataacaagatgtaaaattaaagatgaggaatgtgtgtaaatgatcattcactgtttttgttttaaaactggtcagtactatgaagcttctgtggtttgtatgatgttttaactttcactttaaactgcatagaataaattaaattgaaaacaac

SEQ ID NO: 177223 - DNA, 583 bp, Homo Sapiens
ccctgggaggatttacaggtgccagattcacttttataggaacagcttcagccttcagtgatgaaaaactgaattctccaacagactctaccccagctcttctctctgccactgtcactcctcagaaagctaaattaggagacacaaaagagctagaagccttcattgctgatcttgacaaaactttagcaagtatgtgaaacaagaagttctgggtcctttcatcataagggagaagcttcagaaagttccgaggacctgctaaaatcagctactagaacctgctgccagaggggacaaagacgtgcactcaaccttctaccaggccactctcaggctcaccttaaaatcagcccttgatcccatttctgggcaatttagacagtgaaactgactttgtttacctgcttgcagcatattagaacagacgatccatgctaatattgtattttctcttaaaacatagctttcctgtaatttaaagtgcttttatgaaaatatttgtaattaattatatatagttggaaatagcagtaagctttcccattataatatatttctgtatacaaataaaatttgaact

SEQ ID NO: 177224 - DNA, 157 bp, Homo Sapiens
cctgagctattttcactgagctgagctaatgaactaaaactgagttatgtttaatatttgtatcaaatacataaaaggaatactgctttttccttttgtggctcaaaggtagctgcattttaaaatatttgtgaaaataaaaacttttgttattaga

SEQ ID NO: 177225 - DNA, 476 bp, Homo Sapiens
aaccactaacaagtggatgtctaatattcctctggtgagttgaaggcaggagaagttgagaatcattagtttcaatgagtatccaggtgacctatcctggccctctactcagaaaccggcaatttgtcttcactctgagattcattaaattgctgttgtataactgatggttattatgaacactgacctgtgagacatatggaagataaagtttggtcttacaggaaatcttgaggagagtcaaaagagaaatgggagatgtctcttgagaggtgatcagagaagtttatgctcactgtctgatgcaaatgtctggtctatttgttagtaaataacagggaaatcattttcactttttgctaaaaataaggcatttaccagcataccttgtagttattgtgggttccgtttcagaccactgcaataaagtgaatatctcagtaaaacaaggcccgcaaaccacagatcccccttgt

SEQ ID NO: 177226 - DNA, 1162 bp, Homo Sapiens
  misc_feature (427)..(456): n is a, c, g, or t
  misc_feature (521)..(584): n is a, c, g, or t
gccattcttgctgtctggatccagagacaagactattaagatgtgggatgtcagtactggcatgtgccttatgaccctcgtgggtcatgataactgggtacgtggagttctgttccattctggggggaagtttattttgagttgtgctgatgacaagaccctacgcgtatgggattacaagaacaagcgatgcatgaagaccctcaatgcgcatgaacactttgttacctccttggatttccacaagacggcaccctatgtcgtcactggcagcgtagatcaaacagtaaaagtgtgggagtgccgttgattgtgtctccttcggctcctcctccctcttttcctctggatgcactctgatgataccatggttaccccattgagctctgtttaaataaatattgtcctttcatgtaaattaccaacnnnnnnnnnnnnnnnnnnnnnnnnnnnnnntatcccatccactaccccaaatatatatacccacatttacccccaccttctaccttttttacccnnnnnnnnnnnnnnnnnnnnnnnnnnnnnnnnnnnnnnnnnnnnnnnnnnnnnnnnnnnnnnnntccccctgccactcacttattattcttttttttccgccctatcccctgcttctcaccgtaaatcttcttatgtacccatttactttcccttagcgcgcttggcggtcgcccacttctcctatagttttttaataaaccggtcgcgctgcactgcccttctcctcctcactcataacacctcttccgttctcccgatgcacagcccccggccaattccttcctcaaacaacaaacattattaccccccggtgcgcggcgcacaaaccaccccctgtcacgtcgtcatccctccccttccccgtggtttgtcacttccgcgctgtcacccctcttccctactattttctgacccgcgcactttgaccactcgcttcgcccccgcgttctttatgcccaccaccttgtctcactgcgccgccctctctgctcttacttctctccattctcctgttatccgccgcgcctaacactctctctctcttaggcaccacccgacgcctctactatcacgtggcacacctctcttcttctcctcccaccgctcgtgtatttgctccccactacccctcgttgctacc

SEQ ID NO: 177227 - DNA, 326 bp, Homo Sapiens
acatttgatccccaatgttggaggtggggcgcactgggaggtgtcttcgttacgggggcagatccctcatgaatggcttggtgctgtcttcatgggattaagttctcactcctacttcctgtgagatcttattgttaaaaagaatctgataccttcctcccctctcttgctctcttcctccctgatcatgtgacacacgggttcccctttgccttccaccacgatggaggcttcctgaggccctcaacagaagcagactgtggcgccatgcttctcgtacagcctgcagaattgtgtgagccaaataaacctcttttccttatata

SEQ ID NO: 177228 - DNA, 541 bp, Homo Sapiens
  misc_feature (355)..(368): n is a, c, g, or t
cctgatggaatgagggaatcgtggcttcccggccccaaaaacatgaggtgtcccagcccaggccccccaccctcagttggggctgttccgggggtgactgtgaacgatcccaccccaaacctgagatggggtagcccgtcctgtgtcctccacagggacaagcagtgggaggagtctgaatggtcaccaggaagcccgggctccatcttgacctcctttttcagggacaggagcaacaggcccctcttccctgactctaagcccttccctgtaaggtgaggcagggtctggagagctctttattggaacagatctggtggttcaaataaacacagtcaaaaaacccgcccccacnnnnnnnnnnnnnncatggtcggccgccctcggcccctccgataagcctttcctaaacccattccgtttgggcggcgccggggccccagtaaggtaaggtgaaacatgggtcaatagcctggttttccctagcgaagatccctgggtccagtgacctaggtgcgttgtggatttcctccccccaaat

SEQ ID NO: 177229 - DNA, 998 bp, Homo Sapiens
  misc_feature (157)..(165): n is a, c, g, or t
  misc_feature (171)..(171): n is a, c, g, or t
  misc_feature (175)..(175): n is a, c, g, or t
  misc_feature (787)..(787): n is a, c, g, or t
  misc_feature (803)..(803): n is a, c, g, or t
  misc_feature (880)..(880): n is a, c, g, or t
  misc_feature (911)..(911): n is a, c, g, or t
  misc_feature (915)..(915): n is a, c, g, or t
  misc_feature (925)..(925): n is a, c, g, or t
  misc_feature (928)..(928): n is a, c, g, or t
  misc_feature (940)..(940): n is a, c, g, or t
  misc_feature (943)..(943): n is a, c, g, or t
  misc_feature (947)..(947): n is a, c, g, or t
  misc_feature (950)..(950): n is a, c, g, or t
  misc_feature (979)..(979): n is a, c, g, or t
attgggaggggaatcccaacgcccttggtcattgacccggggttttccttggggaaccagcttaggcccaattttccctttccttacgggggccgcgcgcgcacaaacgaaaggttttggaaagcttttgggggggccggagggggccgcacagggnnnnnnnnnggtttngggngtggggggtatgttcatatacatatttatatatatctcatgtacaaagttacattctgaaccccagggattccataatagaaataaatactgaaataactacattgctaaatgagctctttgctcatagaaatgaagctcagcctctaagagacagcaagtgggacattctagaacccatttttcagattatagaggcaagtaaaattctgatagaatgtcttggacaaaaaacgaatttggaacataaaatggttaagatatattcaaatagagaaatgtatgacaaaattaataaaacttaatcttttaagagaaaagacagacatttagtgttacagaatagcataaccctgttagaaaagcatttatgatttccacatttaattttctcttctacccttcccatgttacaaagtgggacccaaatgagtcccctttctgaacatgatcaattaagaagagcccctaaatcctggttgagtcctttggtaacggtcataatactcacaaggaaataaatattcagttccatggcatttgcaagacacatgttcctttaggacagttaatattatgacacatcctgttttattttgttacctaaggcagncctatgttaaagggtnctcgtactcaaatgtaggaagatcctttacaagaaatgaacaatacagtaactgaaagaattgattttaaccttttnctatgcaaacacaatctgaaaagttatgtgnctgncatattgtgnctncaaaatgttttnatnactnctnccacaagtctgtcaattgaagcagcattncatttcctatttttaaaat

SEQ ID NO: 177230 - DNA, 1099 bp, Homo Sapiens
  misc_feature (872)..(872): n is a, c, g, or t
  misc_feature (970)..(970): n is a, c, g, or t
gggtctggtggatgtgatgtgggaatataagtgggagaacacgggggatgccgagctgtatgggcccttcaccagcgcccagatgcagacctgggtgagtgaaggctacttcccggacggtgtttattgccggaagctggaccccccgggtggtcagttctacaactccaaacgcattgactttgacctctacacctgagcctgctggaggcccagtttggtgggcccttctttcctggactttgtggaggaggcaccaagtgtctcaggcaccgaggaaattggaggccatttttcagtcaatttccctttcccaataaaagcctttagttgtgtccaaaacacacatgccgaccccactcgttctcttgtcggccccgcctcgggccttccgagaatcgtcccctagaccatttcctcttgcgcgcgccggggccctacacaggtcaagtcgcaaccatggtctcatacctctgtctccccgcagggagcattccctgcgtccatcggacttaccctgccctttgggatttcctcccccccggtttaacaaaatactgtccttccgggacggcgtcacaccccggaaggtggcatccgtcgcgcacaaccaaatatttctctcaatgcaatgggcgcgcagtttttactgtcgcaacggggcgccccttcttgaaccctgggccaacatcccgccagcacccaagatatccgcgcgagctccccccttacaccccaggaacccctgtgttcgcattatttcctcaacacctgttaaccgccgcctcgccaccgcccccactgtgccccactctccccccttttgactcaaaatatacttttgaaacgcggcgtaaatgtcccagtcaaangacggatagtgtcctttgcccctgacgcataacttggcacacagctcacaattctgattactacccccggtcgtatatcgctagacgaaactctcccnatcacatcctccatcaagacgccggggtacttcccgcgtttactcccccgtgagccccccgccatctggtgtataaatacatatagatcattgtagccacttccacgcgcctccgccacacacttagtg

SEQ ID NO: 177231 - DNA, 486 bp, Homo Sapiens
tctagcagcaggaacagtaacaaaaggaagggggagacaaacaaaacaagaggaaggttgtatcccatgaaactaggcgcctttcttaatcgagttcttgtatatcgagcaaacatgactcttcgaacagcatctcgataagtctcgttggactgtcttttgctggttcttcctgaggctccaacactggggcccctcatccggccttcagcctcctctgatgaagccaatccaggatggccatatcccaggcctgtccctttcctccagccagtagcctgttggacacagcctcctttgctgctagtgtcgatctcttctttatcaacaagtttacgatcactgtcagtttccctggagtacttaatccgtttcctttctggagagtcaaaagactggagcttttccctgcgatcatttcctcttcctttaaactttccctctcgttctctcctttccagataggctagctcctgctcagactcc

SEQ ID NO: 177232 - DNA, 457 bp, Homo Sapiens
  misc_feature (308)..(308): n is a, c, g, or t
tgtagagtatattatatcttctgtcccccttatgccaacaagatggccttcccctctgaaacaaagtaaaactgcaacactgtgacttcttaaatgagggatatgtgaaaaggctatgaaaaatacaaaggctttcctaggaaatgtgttataatgcagcgggaagctaattcttgaaatatgcacattatagttactcagtctcacatactctagttactggcaaagaagttactgagaatatgtcattcaaaggcataggggcctttgaatggaacaaatgctttcacatcatttaaagtaaaaanaaacctccaacaactgtgaatttatagtttaagagtgatttacactgaatttcaaataaaaggactataaaacgtgttatttttctgtaagggctataacatacatgtcaatatcactgtttttaaataaaatatacttttatacagaa

SEQ ID NO: 177233 - DNA, 526 bp, Homo Sapiens
ggagggaggagggggctcctttcccaggatcaaggccacagggaggaagattgcacgggcactgttctgaggaggaagccccgttggcttacagaagtcatggtgttcataccagatgtgggtagccatcctgaatggtggcaattatatcacattgagacagaaattcagaaagggagccagccaccctggggcagtgaagtgccactggtttaccagacagctgagaaatccagccctgtgggaactggtgtcttataaccaagttggatacctgtgtatagcttcccaccttccatgagtgcagcacacaggtagtgctggaaaaacgcatcagtttctgattcttggccatatcctaacatgcaagggccaagcaaaggcttcaaggctctgagccccagggcagaggggaatggcaaaatgtaggtcctcgcaggagctcttcttcccactctgggggtttctatcactgtgacaacactaagataataaaccaaaacactacccgggggagggaagaagg

SEQ ID NO: 177234 - DNA, 432 bp, Homo Sapiens
acacacagcctagcacagcagcttataatgggctctccggggccatttgcaataacagctgcaattccctggatagacgagttgatttcctccctctgcccctccgggcagccatgccagctggcctttgtaagtgcaggaaaccgagtagaaaatgtgaccctccaaatggagaagctgcaggctttgccattgtgaaccatggtgaagtgcttggaacatactgttcactcactctaaaggcgctgagactgtgctgttgttctcgtttttatagtcaatggcttgttcatcatccagatgtggctactgacatatctacacttcgcaccggagtgtctggaattgtggctatcctgattataggattttaacttaactgaaatgcctgctttgaataaatgtgttgggttttttgtttggttttattat

SEQ ID NO: 177235 - DNA, 394 bp, Homo Sapiens
  misc_feature (254)..(266): n is a, c, g, or t
taagacataatttttatttttcataatgtgaaagaggttgtactatagattattttattccctctagtgaattcatggcacactattagtcataagtagattattgcttgatatttggaaagcttaatagaaatggtttttactgatgtgggacttccagtcttttttatcttgaccttaacagttcaggaaacccattttgggcaaagtatactacattgtacttcctataacattttattcatgtcttatannnnnnnnnnnnnagtaggtattttggtattcatgtattacttagaatatttttatttcaaatagatgagcatttgaatattcaaaaattactacttttgaaaattaattgtacaagtttagaacctgagatgaaaagtgg

SEQ ID NO: 177236 - DNA, 462 bp, Homo Sapiens
  misc_feature (444)..(444): n is a, c, g, or t
gcgtccgctgggctgtgcggctgcggcagaggagagggccagccacagcatggtgtccgcgccctgggcctcggagcgcaggcggtccccgaacctggcgtggaaccccggcatcgcctgcctcacacctggggtgtcggcccagccaggatgcatggaagaaaaatggatggccgggtgcccttggcgccaccgctccgtcagaaccacttgctgcctcttgttttgtgcatagaccatagttccatcaaatggtgttctttcggactggagatcattggtgttcagtttctgaaccaacattcctcctgaggagacggttatcactcgggggtcgtgttctttctccagcacagggatcaggcccgtcgtgagaatgtacacacccagagtattgggcagcaaagtttttttcaagtccatcttcttgtgagctctcttttnttgacctgcagcctgctt

SEQ ID NO: 177237 - DNA, 355 bp, Homo Sapiens
ccatcaggccagttccccgattcctgcccccagttctccagagaaccagagtgtgtctgtgagagtctctagcgggggctttactgtggccgggctgacatggggcaggcccggggtggcctgacctaccaggacagccgagtggccttctcccccccaacaccggtccaggccattgagactcggtcttgtcccaccgttcgcccggaactttcccatgcccagacctcactcagcgtgcacgcacgttggggagaagtcggcccttgggatctttctcttgagtcattttatttttatcatggactagtgcgtgctccgtgtccaccccaataaaagggtctttcctacttga

SEQ ID NO: 177238 - DNA, 384 bp, Homo Sapiens
atcccaccaagaagggtagcatcagagaagtgggcattggtcttagtggtggatcatcaggtagacaagtgatagtgtgtgtaacccatctgaaattcattttaccgtcaccactcttacaaaggacagtttattcccaaggacagtgctgacggggagggggacaggcagggagttaggagggttttcgaggatttcaaacaggtggaacccatccatccctattcccaagggccacttacaactctaagggtggttacaggattaactaccagttcattttcaaaatgctgctttgaactcagagggttgatacttttaatttgtaattttttgtaaaactttttacaaaatagtaaagtatttcaccagaataccagttcc

SEQ ID NO: 177239 - DNA, 1199 bp, Homo Sapiens
  misc_feature (904)..(1087): n is a, c, g, or t
gacatccttgggcccccgatgtatgaaatggaggtatctcagcgtttgagtcagccaggagtagcaataggtttggcttggactcccttaggtggagaaatcatgttcgtggaggcgagtcgaatggatggcgagggccagttaactctgaccggccagctcggggacgtgatgaaggagtccgcccacctcgctatcagctggctccgcagcaacgcaaagaagtaccagctgaccaatgcttttggaagttttgatcttcttgacaacacagacatccatctgcacttcccagctggagctgtcacaaaagatggaccatctgctggagttaccatagtaacctgtctcgcctcactttttagtgggcggctggtacgttcagatgtagccatgactggagaaattacactgagaggtcttgttcttccagtgggtggaattaaagacaaagtgctggcggcacacagagcgggactgaagcaagtcattattcctcggagaaatgaaaaagaccttgagggaatcccaggcaacgtacgacaggatttaagttttgtcacagcaagctgcctggatgaggttcttaatgcagcttttgatggtggctttactgtcaagaccagacctggtctgttaaatagcaaactgtaggtccaaatctcaattttttagaattttaagttatgaagtgctcaaaggtactgacacagttgattttattcacaccattaggggtatgcaagatgtccctgttttataaacataatcacaacagtaataaacctcaagtagtggctagtgtttagtatagaaatataagatgttgatttagtaaactgataaaaatcgaattcttgtctttttagtgggatccttactgtccctggaaagatatagcatnnnnnnnnnnnnnnnnnnnnnnnnnnnnnnnnnnnnnnnnnnnnnnnnnnnnnnnnnnnnnnnnnnnnnnnnnnnnnnnnnnnnnnnnnnnnnnnnnnnnnnnnnnnnnnnnnnnnnnnnnnnnnnnnnnnnnnnnnnnnnnnnnnnnnnnnnnnnnnnnnnnnnnnnnnnnnnnnnnnnnnnngtatagaccattaccttagtggatttacctgtagagtttattggatcctgaaaccaatcaattacttagaactaggcaaagatgaaagtatagccaactattcttggctata

SEQ ID NO: 177240 - DNA, 665 bp, Homo Sapiens
gcggccgctcccacttcagattggtggacagtacaatttgggtgagggtgtggaagaacagttccattctactctaagtcgtattaaaacaaaataaaccttttgaattagtttctagttcaggcactagtcaaatagtcctgaaatgggaactaggatttccacaggggttcaaaacggtgtgtactttgctagatatgtaactggcagtctcgagctcatgccagtctccgccatggaaggtaccgcctcctgggtcacgcctgcctggccgggtgcaggctcctaccattggtcagctggtacttctttgcgttgctgcggagccagctgatagcgaggtgggcggactccttcatcacgtccccgagctggccggtcagagttaactggccctcgccatccattcgactcgcctccacgaacatgatttctccacctaagggagtccaagccaaacctattgctactcctggctgactcaaacgctgagataccttgaaagaagaagaatgatcagagttgggttggcaaatgctaaaggtgactgataccacacaatcctgcaagagtcggctgactccacagaagacttcagccacttacctcaaagtccttgttacctaacatgattctgcgtcacattcagcacttactctctggct

SEQ ID NO: 177241 - DNA, 462 bp, Homo Sapiens
  misc_feature (23)..(23): n is a, c, g, or t
cttaatgcccaatttccgcccanggaaaggttaccggcctccctgggttaaagccttccctggccgggttgcaggctcctacccattggtcaactggtacttctttgcgttgctgcggagcccagctgaatagcgaggtgggcggactccttcatcacgtccccgagctggccggtcagagttaactggccctcgccatccattcgactcgcctccacgaacatgatttctccacctaagggagtccaagccaaacctattgctactccctggctgactcaaacgctgagataccttgaaagaagaagaatgatcagagttgggttggcaaatgctaaaggtgactgataccacacaatcctgcaagagtcggctgactccacagaagacttcagccacttacctcaaagtccttgttacctaacatgattctgcgtcacattcagcacttactctctggct

SEQ ID NO: 177242 - DNA, 606 bp, Homo Sapiens
ccagttaatttagtcctttatttttttcattctccatagaatattggttttgtaacaacgaatacaatccaatatataacattaaaacaatccgatacgtaccattctgctttatgaaagatcagcaaaaatacataaacaaggatataactagtacatttataaaatacatcataacaatgaaaccaaaggatcccacacaataatcttcacatttgacatgctggttacagctgaggagagccagtgtctttggcaagtgattcatatacataagcgatgacactgactaatcctaacacttctgaaatgttcattctttaccagttaaacctaaaataaatcagcaagagtactgaaatataacaagaatgaaatccaaaatttgtcgaaaggggcaatgtttaatactaggaagaacactgaatttggggactaattcttgtccccaagtacatttggattcttgtcttcgttcctggatgatcttaggcaagtaatctgtgctatgaatccttcacttttaaaatgagagagttggttggctggttctctaaggtctttctagattttaactttccatgattttaaaatctttgacacagg

SEQ ID NO: 177243 - DNA, 247 bp, Homo Sapiens
gttccctccccgatggtctacctcgaagggagggctggctcccagttagccctgggaccctccagagagggtttctactctgctccctagtcccagggtgggggtggggcaccccagctgccctgacagatgggtcccctttttctctctcagggcaccccagccccaaactcacatgtacgaagttctcaccccagctcctttgtgtggcaccctgatgagtattttaaaacccgttttgaaatgc

SEQ ID NO: 177244 - DNA, 853 bp, Homo Sapiens
ggggtggcctgactgcgcggccagacgccagcgccatggaggagtacgctcgggagccctgcccatggcgaattgtggatgattgcggtggagccttcactatgggtgtcatcggtggcggagtcttccaggccatcaagggtttccgcaatgcccctgttggaattcggcaccggttgagaggtagtgccaatgctgtgaggatccgagccccccagattggaggtagcttcgcagtgtgggggggcctgttctccaccatcgactgtggcctggtgcggcttcggggcaaggaggatccctggaactctatcaccagtggagcattgaccggggctgtgctggctgcccgcagtggcccactggccatggtgggctcagcaatgatggggggcatcctgttggccctcattgagggcgttggcatcctcctcactcgctacacagcccagcagttccgaaatgcgcccccattcctggaggaccccagccagctgccccctaaggatggcaccccggcccccaggctacccccagctatcacacagtaccacttgagggaacccactgcccaccatggggagcttacttcctcgggttcccctcccccgatggtcctaccctccaaagggaagggctgggcccccagattagcccctggggaaccctcccagaggagaggtttcctacttctgggtcccctagatccccagctggcccttgaaaagatgggggtcccccttttttctccctctcacagggccaccccccaacccccacaaacttttccctgggaacggaagagtttctgtacaccccagggctccctctttggtggtgcgggaccccccgg

SEQ ID NO: 177245 - DNA, 610 bp, Homo Sapiens
gggggtgtctgcttgtacatgcaggactgggaaggagccctgcaatatggacagaaaatcattaagccctacagtaagcactatcctttgtactccctcaacgtggcctccatgtggttgaagctagggagactctacatgggcctggaacacaaagccgcaggggagaaagccctgaagaaggccattgcaatcatggaagtagctcacggcaaagatcatccatatatttctgagatcaaacaggaaattgaaagccactgaaactatgcagcatttcagttttcatttaaacacttagttcagaaaccttaaaggatttgaatatttcaaattgcacacgtcactccagcatctctgtaaaataattggaatgaaaatacttcttgcacttaaacactgcacatgccgtactttgaggttagtctgaatcttgaactttaataccaaattaattttgaatgcttttgtttcctaagagataatggcatggtttcatatgttatactttggacagacagagttttaaaaatggaattattttttctttcatgcctcttgtaatgttctgaacaaacttgaatgatgaaagtattaaagagatatcagt

SEQ ID NO: 177246 - DNA, 504 bp, Homo Sapiens
  misc_feature (15)..(15): n is a, c, g, or t
  misc_feature (31)..(31): n is a, c, g, or t
  misc_feature (72)..(72): n is a, c, g, or t
  misc_feature (96)..(96): n is a, c, g, or t
  misc_feature (405)..(405): n is a, c, g, or t
aagctaataaaattntgcgtaacccaggaanctaagtttggtctggactgaaattggcataggcctcctaanattcaagctcccttcaccaagccnagtcttgcacgtggcacagggcaaacctgactccctttgggcctcagtttcccctccccttcatgaaatgaaaagaatactactttttcttgttggtctagcattgctggacacaaagtgtagtcattattgttgtattgggtgatgtgtgcaaaactgcagaagctcactgccctataagaggaaataagagagaaagtggaggagagggacaaaaggagtaattatttggtatagatccacccatcccaacctttctctcctcagtccctgctcctcatgtttcctggtttggtgagtcctttgtgnccaccacccataatgctttgcattgtctgcatcctgggaagggggtatatggtctcacaagttgttgtcattgtttttttgcatgctttcttaataaag

SEQ ID NO: 177247 - DNA, 392 bp, Homo Sapiens
  misc_feature (36)..(36): n is a, c, g, or t
  misc_feature (365)..(365): n is a, c, g, or t
gcaaactagtctcatgaagaattctggcgtgcagcnggggtagctgaagtttgggtctgggactggagattggccattaggctgactgagattccagctcccttccaccaagcccagtcttgctacgtgggcacagggcaaacctgactccctttgggcctcagtttcccctccccttcatgaaatgaaaagaatactactttttcttgttggtctagcattgctggacacaaagtgtagtcattattgttgtattggggtgatgtgtgcaaaactgcagaagcttcactggcctattaaggagggaaattaaggaggaggaaagtgggagggagaggggacaaaagggagttatttattttggntttaggattccaccccatcccaacctt

SEQ ID NO: 177248 - DNA, 474 bp, Homo Sapiens
  misc_feature (431)..(431): n is a, c, g, or t
  misc_feature (447)..(447): n is a, c, g, or t
  misc_feature (463)..(463): n is a, c, g, or t
aaattattaagaaagcaatcctaaaaacaatgacaacaacttgtgagaccatatacccccttcccaggatgcagcaatgcaaagcattatgggtggtggcacaaaggactcaccaaaccagaaacatgaggagcagggactgaggagagaaaggttgggatgggtggatctataccaaataattactccttttgtccctctcctccactttctctcttatttcctcttatagggcagtgagcttctgcagttttgcacacatcacccaatacaacaataatgactacactttgtgtccagcaatgctaggaccaacaaggaaaaaggtaggtattcttttcatttcatggaagggggagggggaaactgagggcccaaagggagttcaggttttgccccgtggccacgtaggcaaggactggggttgggtnggaaggggagctgggnttcttcagggggggcntaatggccaaa

SEQ ID NO: 177249 - DNA, 421 bp, Homo Sapiens
atctcctaaatggaagatgcacagagtagatttacaatgctccaattcctctcttacagcaatatggccttcacggttataaactgtatcaaaatggtaaaggccaccctctcgcttccttggctggccccagggctaccactggtattcctgagcctctcccagctccacttctaatgctagagaatgataactaagacttctgtgcatttgaaggttgttggaaagttacaggttcattttagaaagaaagctgttcttgacagcactctgagccatcatacctctttcccatataaactattttcacagatctcaactaaaaccccttacttcacaaatgattgtgttgtgctgaaatggtgctcttatagtactggcttattaaaagtaaaaaataaacctaaaaattgattgtttt

SEQ ID NO: 177250 - DNA, 1860 bp, Homo Sapiens
  misc_feature (800)..(818): n is a, c, g, or t
  misc_feature (1185)..(1196): n is a, c, g, or t
  misc_feature (1276)..(1276): n is a, c, g, or t
  misc_feature (1353)..(1361): n is a, c, g, or t
  misc_feature (1418)..(1418): n is a, c, g, or t
  misc_feature (1420)..(1420): n is a, c, g, or t
  misc_feature (1425)..(1461): n is a, c, g, or t
  misc_feature (1490)..(1514): n is a, c, g, or t
  misc_feature (1535)..(1543): n is a, c, g, or t
  misc_feature (1578)..(1687): n is a, c, g, or t
  misc_feature (1742)..(1780): n is a, c, g, or t
  misc_feature (1783)..(1792): n is a, c, g, or t
acccgggcaacaagaagtgggagcagaagcaggtgcagatcaagaccctggagggcgagttctcggtcaccatgtggtcctcagatgaaaaaaaagatattgaccatgagacagtggttgaagaacagatcattggagagaactcacctcctgattattcagaatatatgacaggagagaaacttcctcctggaggaatacctggcattgacctctcagatcccaaacaactggcagaatttgctagaatgaagccaagaaaaattaaagaagatgatgctccaagaacaatagcttgccctcataaaggctgcacaaagatgttcagggataactcggccatgagaaaacatctgcacacccacggtcccagagtccacgtctgtgcagaatgtggcaaagcttttgttgagagttcaaaactaaaacgacaccaactggttcatactggagagaagccctttcagtgcacgttcgaaggctgtgggaaacgcttctcactggacttcaatttgcgcacacatgtgcgaatccataccggagacaggccctatgtgtgccccttcgatggttgtaataagaagtttgctcagtcaactaacctgaaatctcacatcttaacacatgctaaggccaaaaacaaccagtgaaaagaagagagaagacccttctcgaccacgggaagcatcttccagaagtgtgattgggaataaatatgcctctcctttgtatattatttctaggaagaattttaaaaatgaatcctacacacctaagggacatgttttgataaagcagtnnnnnnnnnnnnnnnnnnncttgactaagatgacatggctaagatgctctatcttgctctgaaatctcgtttcaaaaacacagtgtttttgtaaagtgtggtcccaacaggaggacaattcatgaacttcgcatcaaaagacaattctttatacaacagtgctaaaaatgggacttcttttcacattcttataaatatgaagctcacctgttgcttacaatttttttaattttgcattttccaagtgtgcatattgtacactttttttggggatatgcttagtaatgctacgtgtgatttttctggaggttgataactttgcttgcagtagattttctttaaaagaatgggcagttacatgcatacttcaaaagtattttcctgtnnnnnnnnnnnngttatataggttttgtttgctatcttaattttggttgtattctttgatgttaacacattttgtataattgtatcgtatangctgtattgaatcatgtagtatcaaatattagatgtgatttaatagtgttaatcaatttaaacccattttagtcacnnnnnnnnnccaaaaaaatactgccagatgctgatgttcagtgtaatttctttgccctggtccagntnacccnnnnnnnnnnnnnnnnnnnnnnnnnnnnnnnnnnnnnggattgtgtccccctcttttacacccccnnnnnnnnnnnnnnnnnnnnnnnnntcgccgtgaaaaaaaacaaannnnnnnnncgggccgcaaacaaaaattatcttcccttttcctnnnnnnnnnnnnnnnnnnnnnnnnnnnnnnnnnnnnnnnnnnnnnnnnnnnnnnnnnnnnnnnnnnnnnnnnnnnnnnnnnnnnnnnnnnnnnnnnnnnnnnnnnnnnnngcattttccactcgccccttaaacaccatcccgcttatccactccgccatccgtnnnnnnnnnnnnnnnnnnnnnnnnnnnnnnnnnnnnnnntcnnnnnnnnnncctttccacaccccttttattccgcctttccatctcgccaactttttacccccctgtttcccaattcc

SEQ ID NO: 177251 - DNA, 602 bp, Homo Sapiens
ctgggggttctgctctgacgtgtgggtggtgatccttgtcaggatgtacagtccttgctcccaccccatccgggatggccgcctgtccctgactattgagtcctgttgttgtaagccaggcatggagggctcctgcccttctgctgagccacagcccattgcagcactgtgctggccagacttcagctgccttgggaactgaagccctgccactgttgctagtcaggggcttggttctcccacttacactgttgacatctattttctgaagtgtgtttaaattattcagtgctaatcattgttttttcctttgtaaatgttgattcagaaaaggaaagcacaggctaagcagttgaaggttccccaccattcagtgagagcagaacccccattccccagcctctgctggtagcatgtcgcagtttccatgtgtttcaggatcttcgggctgtcgttagacaggttaatgaagaacacttctcaacagtttcctttttgttttcctttataattcactaaaataaagcatctattagtgtctgatttaggaatgtaaaaatgattctgtattaatgtgaatagattatctaatgcaagggatc

SEQ ID NO: 177252 - DNA, 946 bp, Homo Sapiens
  misc_feature (223)..(223): n is a, c, g, or t
ggaagggggatctttccctgaggtcccctccccgatttttccgggatggcggaggtccttcccccaaataaaacatctttcccgccctttttttcttccagggattggtctggggccgtggcgccaggttgaaccgggacaaaactggggggaagccggaaacacaggcttcccacgtgctccttcaaaccacggcttttgtcttgggatcattggggtagcntgagccataatcagtatccaagtcctgcagtttctccacgaactgccatttcttcacggctggtccccgggccaccttgggcacagatggctggcagccactaaccacccgggtaggagggcatctgctttggccttgacccgtcacctcaatcccgggaaaactttgctgcagccgcgcctggtatgtctctggcatccctacggtgtccacgaatacctgggtgacgttcacgccctggtccaatgcatactgtataagcccagtggctgtatcatgtgacagggagttcaggttgtatttgacccgcccaagcatgctggtagagatgaggtttggagacagcacatccagcgcccagccgacaaagtccgtgtcctccattttcgcaaacagcctttcccgctcgctctccaatagggtctttgagtctgccactttcagcgcctccagatctgccaggcgaggcaggggacaataacagatggcgtagaccatggggcccagcacggggcccctgcccgcctcatcgacgcccaggacgcaaggctccttgcggcacaccgcgggcacaggcgaactcaggcgacagcggcctgtattgtctctctccagctcgctgagatccatgccgcctcagccgccaccaccagctgcaagaactaatactgcaggagcgggtctcggcgcgcgttttccgcgggcctcgaagcggcgcctccc

SEQ ID NO: 177253 - DNA, 1006 bp, Homo Sapiens
atcacgtacgcttcacgtggggcagctgggaggctcggtcctctagaatcaggttatcatgtatggcagtgtctcttagtggtagattgcgatataggagtgaggtctacaggtgtgctgcgcggccgggcacggtgggggtgtatgtatggtggggtggcttaccgctacctcgatttgatttggcgcgaggctcaggttaggaacgcagtctgtatactgatccgcggggtgacggagcggggatgggcgtgggggcaatatagtcgaggggggttaagatggcgggcaggttggctcccctggagcgggccaatttgtcccgcgtggcgtgttccatgggacctcctgggtcagacgatgtttgttggcatatatccctcgggttaggggggcttctgctttggcccttgacggtcacctcaatctccgggaaaaactttgctgcagccggcgcctggtaggtctctggcatccctgcggtgtccacgaatacctgggtgacgttcacgccctggtccaatgcatactgtataagcccagtggctgtatcatgtgaacaggaagttcaggttgtatttgacccgcccaaaacatgctggtaaaaatgaggtttggaaaaagcaacatccaacgcccagccgaaaaagtccgtgtcctcccattttcgcaaaacagcctttcccgctcgctctccaatagggtctttgagtctgccactttcagcgcctccagatctgccaggcgaggcaggggacaataacagatggcgtagaccaaggggcccagcacggggcccctgcccgcctcatcgacgcccaggacgcaaggcctccttgcggcacaccgcgggcacaggcgaactcaggcgacagcggcctgtattgtctctctccagctcgctgagatccatgccgcctcagccgccaccaccagctgcaagaactaatactgcaggagcgggtctcggcgcgcgttttccgcgggcctcgaagcggcgcctgct

SEQ ID NO: 177254 - DNA, 1183 bp, Homo Sapiens
  misc_feature (1002)..(1028): n is a, c, g, or t
  misc_feature (1054)..(1054): n is a, c, g, or t
attagttcttgcagctggtggtggcggctgaggcggcatggatctcagcgagctggagagagacaatacaggccgctgtcgcctgagttcgcctgtgcccgcggtgtgccgcaaggagccttgcgtcctgggcgtcgatgaggcgggcaggggccccgtgctgggccccatggtctacgccatctgttattgtcccctgcctcgcctggcagatctggaggcgctgaaagtggcagactcaaagaccctattggagagcgagcgggaaaggctgtttgcgaaaatggaggacacggactttgtcggctgggcgctggatgtgctgtctccaaacctcatctctaccagcatgcttgggcgggtcaaatacaacctgaactccctgtcacatgatacagccactgggcttatacagtatgcattggaccagggcgtgaacgtcacccaggtattcgtggacaccgtagggatgccagagacataccaggcgcggctgcagcaaagttttcccgggattgaggtgacggtcaaggccaaagcagatgccctctacccggtggttagtgctgccagcatctgtgccaaggtggcccgggaccaggccgtgaagaaatggcagttcgtggagaaactgcaggacttggatactgattatggctcaggctaccccaatgatcccaagacaaaagcgtggttgaaggagcacgtggagcctgtgttcggcttcccccagtttgtccggttcagctggcgcacggcccagaccatcctggagaaagaggcggaagatgttatatgggaggactcagcatccgagaatcaggagggactcaggaagatcacatcctacttcctcaatgaagggtcccaagcccgtccccgttcttcccaccgatatttcctggaacgcggcctggagtcagcaaccagcctctagcagctgcctctacgcgctctacctgcttccccaacccagacattaaaattgtttaaggagaaccnnnnnnnnnnnnnnnnnnnnnnnnnnnaacttgtcggccgcctcggcccctcngagaagcttttctagacccattcgtttgggcgcgccgggccccattagggtaaagtgaacatgggccattaacttgttttcccaagggaaaatcccggggccaattgaacaaagggcctttgggaattt

SEQ ID NO: 177255 - DNA, 411 bp, Homo Sapiens
  misc_feature (37)..(37): n is a, c, g, or t
  misc_feature (61)..(61): n is a, c, g, or t
aggcctcaggcctccccccaatccccccaaagggggnaaataccgggatttgcctaacacnggttaaaaatgccaaattccaagatttgggaagggctgttataatgaaataatgagcagtatccagcatgtgcaaatccttgtttgaaggattttattttctccccttagacctttggtacatttagaatcttgaaagtttctagatctctaacatgaaagtttctagatctctaacatgaaagtttttagatctctaacatgaaaaccaaggtggctattttcaggttctttcagctccaagtagaaataaccagaattggcttacattaaagaaactgcatctagaaataagtcctaagatactatttctatggctcaaaaataaaaggaacccagatttctttccct

SEQ ID NO: 177256 - DNA, 416 bp, Homo Sapiens
tcaagtttttcaatgttctttaataaaatgacatcaattgctgaaacattatgacctttgttatgctacataatactgatacaaaatgtgaatagtacaaagttcattatatataaggctttaatatattacatttgtttctacataaacagactataaatatatgtgccatagcatgtcttatagtcattgttcccagcatttcacactatggtaccaaacaaaaaacacattttcttttttgaaaaaaaggacagaacaaggggcaaaaatcaggtaggaaataggctctatatgttaaaaggtctaaataatacaataggatgttataatttgggctataaaataattttgaagtctggctaataatcattcagagagtgaacaaacccaatcaggtttactggagtagaggc

SEQ ID NO: 177257 - DNA, 1063 bp, Homo Sapiens
  misc_feature (456)..(507): n is a, c, g, or t
  misc_feature (702)..(711): n is a, c, g, or t
  misc_feature (1043)..(1043): n is a, c, g, or t
gcggccgcagaggggaggattacctgaaagagacacactgctacgatccaggcagcaacacttggcacacactggctgatgagcctgtgcggcgcgcctggcacggcatggcaaccctcctcaacaagctgtatgtgatcgggggcagcaacaacgatgccggatacaggagggacgtgcaccaggtgcgagaccaagtgtagcaatggcacttacggcgaggactgcgccttcgtgtgcgccgactgcggcagcggacactgcgacttccagtcggggcgctgcctgtgcagccctggcgtccacgggccccactgtaacgtgacgtgcccgcccggactccacggcgcggactgtgctcaggcctgcagctgccaggaggacacgtgcgacccggtcactggtgcctgccacctagaaaccaaccagcgcaagggcgtgatgggcgcgggcgcnnnnnnnnnnnnnnnnnnnnnnnnnnnnnnnnnnnnnnnnnnnnnnnnnnnngcttgccgcggcaaggaccctacgcgcccgacccgcccccgcagggaagcttttccacttgggaggaaagaaggcgcccgcacccgactatgccggggcgctttcaatccgccatccaccatgaaagcctggccccgggaatccccgcctcccggtagggcagaaaaccctaccccgaaagggccgttatggggnnnnnnnnnnatcgaaccttggaattaaacaagaaattccaaactggacagacttttccctggggaaacccacccctcccaggggccctggaaaaatattgactatcagacgattactgggggaacccatccttgggggagcgtcccattttcgccccgcccaggcggaaaacaccccgttgttatgtaacgcaccgccaacgggtcaagtgggggtcaacgccctcttgtgcggaaggccgacctctagcgcgtcatcacacttaggcatcaatacagtaattacacccccccaccttgatatagctatgaccgacacagagagaacctgatgataaccgnatcactactccagcgagtat

SEQ ID NO: 177258 - DNA, 1333 bp, Homo Sapiens
ggggggagccggagcgcagcgcctgcggccgcccgtgccccgccgtcctccttcccgcggccgtgagggagaccgcggctcggccgtagcggacctgcgagttacagaatgtctgaaggggacagtgtgggagaatccgtccatgggaaaccttcggtggtgtacagatttttcacaagacttggacagatttatcagtcctggctagacaagtccacaccctacacggctgtgcgatgggtcgtgacactgggcctgagctttgtctacatgattcgagtttacctgctgcagggttggtacattgtgacctatgccttggggatctaccatctaaatcttttcatagcttttctttctcccaaagtggatccttccttaatggaagactcagatgacggtccttcgctacccaccaaacagaacgaggaattccgccccttcattcgaaggctcccagagtttaaattttggcatgcggctaccaagggcatccttgtggctatggtctgtactttcttcgacgctttcaacgtcccggtgttctggccgattctggtgatgtacttcatcatgctcttctgtatcacgatgaagaggcaaatcaagcacatgattaagtaccggtacatcccgttcacacatgggaagagaaggtacagaggcaaggaggatgccggcaaggccttcgccagctagaagcgggactgaggctgcctcacgtgttgcaagaacagttttgagccattgttaacaatgccttttttcttcacataaagtagttgattacgagggagtcaaattttctttttaaaaaggagcttcaatgatttgtaactgaaatatcaggttctagaagaaactggcgcttaaaccaaatcgcatggatttctttttcagtgacgttcaagtgtttctcacggatggaattctagtcagctgcaggcgggaagccaggcgggtggagcccatgggagcaagggcgagtggccggtccccgctgtgccaggtgggcaggcaggagcaaggcctgcgagggaggaacgggccgctccccgccagccgccttccccagcagccgcaggtggtgccagccactccacagagcccgagggatgatctagcccgattcctgcgtgtccgaaagaacttaacgttttaaaggtgattgtcaagtaactgtgtggggttctaatgccagtttcctaattccatctcactggagatgtttaaagttggcctctatcctaatgactcaaaacttggttcttaactaccatgattgcttttgagggcccggaattataaatatatattatattttaattgttaa

SEQ ID NO: 177259 - DNA, 396 bp, Homo Sapiens
  misc_feature (349)..(349): n is a, c, g, or t
ttacagaatgtctgaaggggacagtgtgggagaatccgtccatgggaaaccttcggtgggtgtacagatttttcacaagacttggacagatttatcagtcctggctagacaagtccacaccctacacggctgtgcgatgggtcgtgacactgggcctgagctttgtctacatgattcgagtttacctgctgcagggttggtacattgtgacctatgccttggggatctaccatctaaatcttttcatagcttttctttctcccaaagtgggatccttccttaatgggaaggacttcaggatgacggtccttcggcttaccccaccaaacaggaacgagggaatttccgnccctttcatttcgaagggttcccaggaggtttaaatttttgggcatt

SEQ ID NO: 177260 - DNA, 721 bp, Homo Sapiens
ctctttgttttaggagtcacgtgaacacacaactctcctatattcctcacgaacctcaggattgagcaaggtctttgtaatttttttggttcactttattgacctgggagcaaggtgctaattctgtggtcagtattcaatgtttttttcagtggagctttttctttgggccatatttgccttctaatacattcctgcaatatgtagtggtgatttcccttagcttcctcctactacctcttatactcatctccccaaattatttgcctcccttaaataagttttcctagaaggtaagctggtcaggcaatttgaaaaatattagatcccaagaaatctattccgtttgcattggacttctcggattccatgtgtttgcagcaggactacatcgaactctgatgtgccggattgtggcatgtctgcatgtctcatccatctattgtttttggtaactcagtttggaatttcagtgtctgtcttccctgggttgacattggaatcagcctctcctttgagcttattttaactcttgagcaacataacatagatttaatgtgaacagtttataccaaagggcagcctgtgcctgtttatggatcctctctgcctttgtacttgaagagcgcattttacatttccagtcctttcacagacaggagctccaaccttacgatggagaattaaacttgcttgtatttccactttgtggatgaggaac

SEQ ID NO: 177261 - DNA, 794 bp, Homo Sapiens
  misc_feature (509)..(522): n is a, c, g, or t
agccacaggttcactctcggttatcaatagaagaggctctccaagtaggtattatagatgtcctcattgccacaaaactcaaagatcaaaagtcatatgtcagaaatataatatgccctcagacaaaaagaaagttgacatataaagaagccttagaaaaagctgattttgatttccacacaggacttaaactgttagaagtatctgagcccctgatgacaggaatttctagcctctactattcttcctaatgggacatgtttaaataactgtgcaaggggtgatgcaggctggttcatgccactttttcagagtatgatgatatcggctacatatgcagtctgtgaattatgtaacatactctatttcttgagggctgcaaattgctaagtgctcaaaatagagtaagttttaaattgaaaatttacataagatttaatggcccttcaaatgggtttcatttaggccttgagaattgggttttttgaaacttggccacactaaaatgnnnnnnnnnnnnnnacgtagaatgtgggataaacttgatgaactccaagttcacagtgtcatttcttcagaactccccttcattgaatagtgatcatttattaaatgataaattgcactcgctgaaagagcacgtcatgaagcaccatggaatcaaagagaaagatataaattcgttcccacagccttcaagctgcagtgttttagattgcttcaaaaaatgaaaaagttttgcctttttctgtatatagtgaccttctttgcatattaaaatgtttaccacaatg

SEQ ID NO: 177262 - DNA, 667 bp, Homo Sapiens
  misc_feature (65)..(111): n is a, c, g, or t
  misc_feature (217)..(241): n is a, c, g, or t
ccgtgggggggacactgctggtgctgctgcttctggctggggggtccttggccttcatcctgctnnnnnnnnnnnnnnnnnnnnnnnnnnnnnnnnnnnnnnnnnnnnnnnccagtggcgacgggggattctacgatccgaaagctcaggtgttgggaaatggggaccccgtcttctggacaccagtagtccctggtcccatggaaccagatggcannnnnnnnnnnnnnnnnnnnnnnnnagagaaggcagagaaaggcctcatgttgcctccacccccagcactcgaggatgacatggagtcccagctggacggctccctcatctcacggcgggcagtttatgtgtgacctggacacagacagagacagagccaggcccggccctcccgcccccgacctgaccacgccggcctagggttccagactggttggacttgttcgtctggacgacactggagtggaacactgcctcccactttcttgggacttggagggaggtggaacagcacactggacttctcccgtctctagggctgcatggggagcccggggagctgagtagtggggatccagagaggacccccgcccccagagacttggttttggctccagccttcccctggccccgtgacactcaggagttaataaatgccttggagggaaac

SEQ ID NO: 177263 - DNA, 1053 bp, Homo Sapiens
  misc_feature (928)..(928): n is a, c, g, or t
  misc_feature (981)..(991): n is a, c, g, or t
caggaggctccggccccacaggtttccccaaggcctctcaccccacttcccatctccaggaagcgtcgccccagtggcactgaagtggccctccctcagcggaggggttgggagtcaggcctgggcaggaccctgctgactcgtggcgcgggagctgggagccaggctctccgggcctttctctggcttccttggcttgcctggtgggggaaggggaggaggggaagaaggaaagggaagagtcttccaaggccagaaggagggggacaaccccccaagaccatccctgaagacgagcatccccctcctctccctgttagaaatgttagtgccccgcactgtgccccaagttctaggccccccagaaagctgccagagccggccgccttctcccctctcccagggatgctcttttgtaaatatcggatgggtgtgggagtgaggggttacctccctcgccccaaggttccagaggccctaggcgggatgggctcgctgaacctcgaggaactccaggacgaggaggacatgggacttgcgtggacagtcagggttcacttgggctctctctagctccccaattctgcctgcctcctccctcccagctgcactttaaccctagaaggtggggacctggggggagggacagggcaggcgggcccatgaagaaagcccctcgttgcccagcactgtctgcgtctgctcttctgtgcccagggtggctgccagcccactgcctcctgcctggggtggcctggccctcctggctgttgcgacgcgggcttctggagcttgtcaccattggacagtctccctgatggaccctcagtcttctcatgaataaatcccctccacgcccaaaaacacacccggctttcatatcaccccatatgtggaaagcttttccacaagcgcgtagccactattntccttgtggggcggcctcggcccttgaaaagcttttccaaaactttttgtttnnnnnnnnnnnccccggaggtttatggaacctggggcatacccgtgttcccaaaggagacccggggacttgaa

SEQ ID NO: 177264 - DNA, 627 bp, Homo Sapiens
gggggctgtgatagccagatctggttggcttttgtgggctgacccagacatttaatcaccatctcttatgttgttgccgtaagaaatgcattccaggttgggacttgggatcctgagagcacattcgccccctgtggtggccgcttgccaccttgcaagatggaagcccagtctccttactaccaaactgtagttgtaagcagagggaggggtgagatgtttataggacattccctaagctggggagtgatttttatcactattcatgtcaactgtactttggtatacactccctatcaatttaataatatgaaaagcctaaaaataaaactatgcatgctattctatgtgctattttatatcagtaaataagcttatgcttgccagctgtatacacagttatgaggtgtatagaactgactttgacagtatttttttgcactgtttcctatcttgtttttataaagccttatttagatattggaccttgttgatgttctcactgcccttgtgcttgctataaaatgtttcatatgtgcctttacaaatgtgagatctttattctaacctttttttgtaaaagatatctattgatttccatatgcaataaacctttttttcagagaa

SEQ ID NO: 177265 - DNA, 623 bp, Homo Sapiens; identical to SEQ ID NO: 47526

SEQ ID NO: 177266 - DNA, 342 bp, Homo Sapiens
ggtaattttgtctcaatttaatttgttgtaaggtggggtggggggaattgctggttgcaccatttcagatctgtgttgtctaagagtattaacgttttaattaagcaaagaaatgatttttaatctgtatgtaattgttttaaagcacccattttaagagaaaatactgtgcaatgaagaaaccagtttaggcatttgctataaactgaaatattccaaaagaatcatctataacagccctgtaaattcctttaaaatgataactaacaggacagtttgaccaattttttttaaatatacttccttttatgtgttcaataattaaatgcctttgggtccttc

SEQ ID NO: 177267 - DNA, 637 bp, Homo Sapiens
acagtggttggctttgatgaaccctcatgctgcaccttcagagccagtcctctagttggaataaaaattgcagaggtggtttttgggtctttaccacctgcggctggtggacagcagccagtgtgtctggacacccaggggcattgagactgcattgtcacatgaccacttctcttcacacatctgctttcagtgcctggtgaaaaatagaccttggcctaacagtgtgactctctccaccgcctcagtgtagggaagggtccaggccagggaaggagcaccctctagtggaggcgggggtgaattcttaggtcgagctgatgcaagaaactccggtagccagcctctgtgaccttgtacatgagtttggtgtgcctattgtgatttaaaacaggtgggttatcaagaggaacttgagatctctttattacatggacatttacttcagggggaccactgtaagaaaagccaaactccaagaccaagtaagttagaggagtcttgattttttagacttcactgcggagttctgtacaccctttgccctgatgaatttgaatgggtttgatttgcaaatttggatttacacccattgttttggaagcacatcagctgaataaagttgaggtttatttta

SEQ ID NO: 177268 - DNA, 307 bp, Homo Sapiens
  misc_feature (59)..(75): n is a, c, g, or t
  misc_feature (267)..(267): n is a, c, g, or t
gtgacttcacaataagatttctgtgcaaaaaggtaaggtgataattgatctaatagacnnnnnnnnnnnnnnnnngctgtccatgagaattagacttcatattagcttcaattaaaaagctcattccattttattaaaatgtttgtaattgcaattttgtgtttaatgtttactttgtctttcctttctttagcatttaggtgactgttcggcagtttgatatatggccattgtcggccttaaactgcactagtaacaagcatgggnatttatcttgtattgaaaataaaacaaacttttgataagg

SEQ ID NO: 177269 - DNA, 736 bp, Homo Sapiens
  misc_feature (444)..(499): n is a, c, g, or t
  misc_feature (538)..(616): n is a, c, g, or t
attactgggttaaattgtgggaaagggtccagattttaaaggtgctttaaggttgccctctgccgatactgtttgtctttctactgtttcatcccctaacttcccccaaccctcaaattaaaactagaactatagatccacatgaacgcacgcctgagatttggccactcacctatgttttgggtggattgcctaggaaagcaagtcatatggccattgatagttctcatgtaattagttttgctcaccactagtacagatgacccgtttacacgtggcttccctcggaagccctcctcaacagtagctggtgtgaaagactaaatcagtagagttggaaaagctttataacaggtgtgtcatatgcttgctatttaaagctgtgtgttggtttgtttttctgccacattcactagttttttaataaatattttccaaaaatgnnnnnnnnnnnnnnnnnnnnnnnnnnnnnnnnnnnnnnnnnnnnnnnnnnnnnnnngcacgcacagaacgacacgaaaacaaacagacagaacgnnnnnnnnnnnnnnnnnnnnnnnnnnnnnnnnnnnnnnnnnnnnnnnnnnnnnnnnnnnnnnnnnnnnnnnnnnnnnnncgcagcccaacagcacatgacccaaaaaaagaagaagaacacctcgacgacgccgccacacccacagcaagcaaaaacgaaaaccgggcaggcgaggacggaaaacgacagacgaggcag

SEQ ID NO: 177270 - DNA, 458 bp, Homo Sapiens
ctctggccgtgcatcctcactcccacccgcctccagcagccctctgtcggcctcctcccgacttgactcaccgtcacctggaagcagggcaccagctgctggggtgggacttgggtcttcagatcataaactacgtattccctcttgacactcacaatctcgttcaccacgtgggcctggaactctaactccatcgctgaggggtgggaatgagaactatgaaccaggaaggagagatcccagctgccaagtctgggggtagcagactggagcccaggggtgatggagacttttgatggcttttggcagggacagacttggacacaaaaccgatccatagaagggcttcccaaaccttgttttgcaacatcccaaattgtctccagttgaaggaaggcctttatcagattcatagatgagctttcattgtaaaaataaatgtactttgcaccacttca

SEQ ID NO: 177271 - DNA, 839 bp, Homo Sapiens
  misc_feature (736)..(736): n is a, c, g, or t
agaggccccaggtggcagcacagcccacccgttcccacgtcagaggagggcaaggctgggtactcagcagccactctgagccggggctccttccaggagctgaaatccacctgtctccatcttccttgcctgcctgggtactcatgccaagcagagactgggattaggggttctgtgctcttgcctaattaggaacattctcccatgtctcttgtgtggtcccagaaggagaagtgagtttgccaaggatatggggcaggaggctccctctgctgaccccctgcagcctggagccagcccggggactgtcctgggtggagggcaggtgaacacaagctgctgccggggactgtcctgggtggacggcaggtgaacacaagcggctgccgcatgtagccactcactcgactttttttcagctgtgaccattcctgggagctctttgagcctttctgtctcatttggaaccagggggaaccaggaaggggctcctggcctctctgtgtcctctgcagtgggggttgtggggggcgcagcatccacgccttgctgcccttctttcatgaagtctgttttttaagtgctggttcccccgaatattttatgcagaggagggaaaatttatagtggcaattattttctcacagtctggtgagcaggcaattaattaggagtaagggggcctagtagagcgtggcgtgtggcagaatcgcaacgccccggctccccagcccanccgccatgcagggctcgcgtgcgggaaaactaatatgccggcgtttaagcctgtgcccctctgctgggtgtaactgcgctgaaataaatgatctgacaatgtg

SEQ ID NO: 177272 - DNA, 549 bp, Homo Sapiens
  misc_feature (403)..(404): n is a, c, g, or t
  misc_feature (406)..(406): n is a, c, g, or t
  misc_feature (415)..(480): n is a, c, g, or t
ctccagcctggaaacccgtctgaggttggggagaggtgccacctggggcacagggagaggcccgggacacacttagctggagatgtctctaaaagccctgtatcgtattcaccttcagtttttgtgttttgggacaattactttagaaaataagtaggtcgttttaaaaacaaaaattattgattgcttttttgtagtgttcagaaaaaaggttctttgtgtatagccaaatgactgaaagcactgatatatttaaaaacaaaaggcaatttattaaggaaatttgtaccatttcagtaaacctgtctgaatgtacctgtatacgtttcaaaaacaccccttccttactgaatccctgtaacctatttattatataaagagtttgccttataaatttacatannangaagaaagnnnnnnnnnnnnnnnnnnnnnnnnnnnnnnnnnnnnnnnnnnnnnnnnnnnnnnnnnnnnnnnnnnctcacaaggggactagagaacaaaaacaaccgccataaaccatgctttcctctataacaactataataa

SEQ ID NO: 177273 - DNA, 357 bp, Homo Sapiens
aattttgcctgccattttcagaatcatcttttgaagctttctgttgatgttaactgagctactagagatattcttatttcactaaatgtaaaatttggagtaaatatatatgtcaatatttagtaaagcttttcttttttaatttccaggaaaaaataaaaagagtatgagtcttctgtaattcattgagcagttagctcatttgagataaagtcaaatgccaaacactagctctgtattaatccccatcattactggtaaagcctcatttgaatgtgtgaattcaatacaggctatgtaaaatttttactaatgtcattattttgaaaaaataaatttaaaaatacattcaaaatt

SEQ ID NO: 177274 - DNA, 409 bp, Homo Sapiens
ctcctccataggaacccagtgactggggggtgacgcctacacccccagctatttgcactctggtgtgtggtttgactctgcttttcttccggattggccctgtggtcacagcctcagggggccaggctgggggaacctcacctggcccgtactcctgggggtttccctttgccattgggccccctgagggactgtgggggctcaagggtaatgccagaagcccatggccccagcgaggggctgtggggcacctagagttctcggtgtgtctccttcattcattggcctctgctggggcctcctatgggtgtcttacgtctgtccatccatctgtccgtggtcagaagtggggtcagtgtgtgagtgagagcaggagtatttatgaaaataaaacgtcgtttttcctgga

SEQ ID NO: 177275 - DNA, 519 bp, Homo Sapiens
  misc_feature (496)..(496): n is a, c, g, or t
  misc_feature (499)..(499): n is a, c, g, or t
ggatcaagggaatgacttgggcggccttgggaaatcgatgagaaattgaacttcagggagggtggtcattgcctagaggtgctcattcatttaacagagcttccttaggttgatgctggaggcagaatcccggctgtcaaggggtgttcagttaaggggagcaacagaggacatgaaaaattgctatgactaaagcagggacaatttgctgccaaacacccatgcccagctgtatggctgggggctcctcgtatgcatggaacccccagaataaatatgctcagccaccctgtgggccgggcaatccagacagcaggcataaggcaccagttaccctgcatgttggcccagacctcaggtgctagggaaggcgggaaccttgggttgagtaatgctcgtctgtgtgttttagtttcatcacctgttatctgtgtttgctgaggagagtggaacagaaggcgtggagttttgtataaataaagtttctttgtctccnganatggaagccatcaacaacca

SEQ ID NO: 177276 - DNA, 417 bp, Homo Sapiens
  misc_feature (15)..(15): n is a, c, g, or t
aattggattaatatnggtggttcctccagcaaagagaaaggagtatgtgccccaatgcctgcccttccccatgaacctgtccccccagttatgaatcagtgggcaggataaactgaaaactccccatttaagtgtctgaatcgagtgagacaaaattttagcccaaataacaagtaccaaagttttatcaagtttgggtctgtgctgctgttactgttaaccatttaagtggggcaaaaccttgctaattttctcaaaagcatttatcattcttgttgccacagctggagctctcaaactaaaagacatttgttattttggaaagaagaaagactctattctcaaagtttcctaatcagaaatttttatcagtttccagtctcaaaaatacaaaataaaaacaaacgtttttaatac

SEQ ID NO: 177277 - DNA, 717 bp, Homo Sapiens
ggagctcgctgacctgggcctggccgagcaggccccctgcatctgcctggaggagatcactgctactgagatctagggccctcagcaaccagctctgtagggagctctgccagaggggcagcagctgcagatccacttaggccccagggtccacggatggccccaaaggctgagggccccaaagccacttgtctcctaggatccaggcctctgggcttctgccaagaactcagggtggccctatgacttggaggagcaagatcagaccgctcaaaggtccccgtgttcactgttacccagaggctcttgttactacccacttcattccccaccgctgccagtgccactgccaaccctgttcacaggcgcttccagcccactccagccaggggagcagggaagaagaaggggctccctcctcttcacattccccccgaccccaaagccagagaaagccagatggcaccagctgctccggatgtgcctgcccacattgggggacagggccgggcctgggctcggttcccaggtttgagctctgcagcctctctcctggagtgagggggctgaagtcagaccaaaggaagaactcagaaatgtcttgtttatttgtgtttgtgaccaagcagcctctcccttcacccaggtttatggcctcgttttcacttgtatatttttcacactgtaaatttcttgtacaaacccaaagaaaaaatt

SEQ ID NO: 177278 - DNA, 792 bp, Homo Sapiens
tgcccaacgacgatatcaccaaccttatccagaatttaacggcttaatcacagagggacagatctacgtgacaggacagcttcacaacagacagatctacccccccatcaacgtgctcccttccctgtcgcggctgatgaagtcagccattggggaaggcatgacaagaaaggaccatggagatgtctccaaccagctgtacgcctgctatgccatcgggaaggacgtgcaggccatgaaggcagtagttggggaggaggcgctcacctctgaggacctgctctacctggaattcctgcagaagtttgagaagaacttcatcaatcagggcccctacgagaaccgctcggtgttcgagtcgctggacctgggctggaagctgctgcgcatcttccccaaggagatgctgaagcgcattccgcaggccgtgatcgacgagttctattcccgcgagggggcgctgcaggacctcgcgcctgacactgcgctctagccccgcgcgccgtggcaccccaacaccggcagggaacctaccctcggctcccgggtctcccctccctcgccaccccaaccagcggcttctgcgccgccctccgccctccgctggctccgaggtggtgggggcgccgcacgctccatccctttccctcgctcgattccttttcccgcgctccatgcctccccctcgactcccggtgctgcggaagaactgaaggttgcgatgccttactctgacgggagcatctgtatttttatgttaaaagcccacaaaataaaaataaaaagtaactg

SEQ ID NO: 177279 - DNA, 791 bp, Homo Sapiens
ggggtcggcggttgcctgggcggcgctcgggccgttgttgtggggctgcgcgctggggctgcagggcgggatgctgtacccccaggagagcccgtcgcgggagtgcaaggagctggacggcctctggagcttccgcgccgacttctctgacaaccgacgccggggcttcgaggagcagtggtaccggcggccgctgtgcgagtcagcccccaccgtgcacatgccagttcccgccagcttcaatgacatcagccaggactggcgtctgcggcatgttgtaggctgggtgtggtacgaacggaaggtgatcctgccggagcgatggacccaggacctgcgcacaagagtggtgctgaggattggcagtgcccattcctatgccatcgtgtgggtgaatggggtcgacacgctagagcatgaggggggctacctccacttcgaggacgacatcagcaacctggtccaggtggggcccctgccctcccggctccgaatcactatcgccatcaacaacacactcacccccaccaccctgccaccagggaccatccaatacctgactgacacctccaagtatcccaagggttactttgtccagaacacatattttgactttttcaactacgctggactgcagcggtctgtacttctgtacacgacacccaccacctacatcgatgacatcaccgtcaccaccagcgtggagcaagacagtgggctggtggaattaccagatctctgtcaagggcagtaaccctgttcaaagttggaagtgccgtcttttgggatgc

SEQ ID NO: 177280 - DNA, 836 bp, Homo Sapiens
  misc_feature (408)..(427): n is a, c, g, or t
ggggatataaagcagaaagtacaagacaagtacagatactgtgagagtcgacgaagggttttgttacagcatgtgcatgaaggctatgaaaaagatctgtgggagtacattgaggactgagaatggccctgcataaaatgaactctgaaaactttaccatctagagtgctcatgcaattaaaacaaaacaaacacaaacaaggaggcactaagcctattctgacaccactggtctgtagtaccagaattgttttgttaatggagagtttaagtaaattatattgtaataaaaaggtagataaaccattgtacaacagtattctaggccgccaacaaaagtgtgacagacacactaaaagccctccaactttaacttgtaacgtagcttcattctcaaagctgactccnnnnnnnnnnnnnnnnnnnncctgagtgtagtacagttaaaatttcaaacagctccttgacactgcttttcatgttcaaaccagccattttgttgtactttggtaaaggacctcttccccttcctcccctacacatacagatacacccacacacagactgactctctttctctcataccccaaggtcatgagtgaatgatgcttagttccttgtaaagaaaatcttgggatggggaaaggggtaggcagcaagaggattcaacaaacgaaaaacataaaaactttgtatatgacttttaaaacaagaggacaacacagtatttttcaaaattgtatatagcgcatatgcatggacaaagcaagcgtggcacgtgtttgcataatgtttaattacaaaaaaatatttattctttaaaaatcttcaagatt

SEQ ID NO: 177281 - DNA, 1200 bp, Homo Sapiens
ggatggaaatccagagcaagtcctccagggttgcaccaggtttacctaaagcttgttgccttttcttgcgctgtttatccgtgtagagcactcaagaaagttctgaaactgctttgtatctgctttgtactgttggtgccttcttggtattgtaccccaaaattctgcatagattatttagtataatggtaagttaaaaaatgttaaaggaagattttattaagaatctgaatgccgatgcactatagggcgacaagctaacaggtaacattcatttgcggtacacgcgacctggggtaatctggactaaaaatcggaaggagaaagcgctactatttcatctcaacccccttcgatggccgacaacgtgactttttaacgaagagcgatcagtggaatttgtttatgcgcacccgacgggaccggcgaaggagaagaaggcgcccgcggggagggctcccgtggggaagccttcgcaggacgggaacacccgcccccgcgacgcacggcgcccagcgcgccggcgccggcctggggtgtgcaggcgccggaaacccgccgccccgaaaggatgcaccgctaccacgcgtgaggggggcgaggtgtggaatctgtctcttagtcaccaggctttaacctctcggcgcccgagtgcgggctcgccccccaccgtgcgacggtgtttgtgggccgtccgacggacgggcgcggggcgaaggtcgcacactcttcgccccccttatcccatcctccctacgccccgtccccctcgcccgagtctcctcgccgccttttttccaccgcggcccggctcctaaccgcgtggcgccccattctgacacgtacgctcgccgccgcaacgcggggactagtacggacggctaccgccgcccgcgagtccgcgcgggaaaaagcatactcggcctgtgtccgttactaggtgctcccccccctcacatgaggcacgggtgtctccgtcggaggcgcgggccgcgccactctccgccgcgtcccgcgcccatgcgaagcaggccgcaggtccccataccgtggcggctggcatacgtttgtactataggtgtcgcccgcgtggtccaccctctctcggggcgtctggagactgggtttggatacgcgcgcgctgggggccttgagcccccagacgcccggcgagttacggcaccgaaggcggggcagaga

SEQ ID NO: 177282 - DNA, 401 bp, Homo Sapiens
  misc_feature (17)..(17): n is a, c, g, or t
  misc_feature (50)..(50): n is a, c, g, or t
  misc_feature (93)..(93): n is a, c, g, or t
  misc_feature (95)..(95): n is a, c, g, or t
  misc_feature (102)..(102): n is a, c, g, or t
atggatcaataacatanccccgggcagatgagcctcaaccctagtaggtnagagtttggtttggtcacagttgccctatgagtgtgggtttcnanagaaacntaaagccttaacttagaatttcattatgttttagaatcatcactgccttaatattcaagcatcaatttaagtcctaataaaggagaaatgcatgtttatggcttttttgtaaatataaatgcagtgatctatggcttaaaaaatttgtttctgtgacaatgtttgtaaatctagccaatagagtcatttacagaagaaaaatgagcatgtaataatacaagaactgtttccccctcaaaacctgaacctgaattatttgtaaaaactgaaatttaatgattaaagagaagccagaattg

SEQ ID NO: 177283 - DNA, 443 bp, Homo Sapiens
  misc_feature (36)..(36): n is a, c, g, or t
  misc_feature (41)..(41): n is a, c, g, or t
  misc_feature (53)..(53): n is a, c, g, or t
tgtgccatgtgccccttgaaactaggcctttgtacnccctnccctttcctccnctgccccatttttcccctaatagggctggtcctgcgccctggtgatgtgattttggcccattggggagcagatggtacaaaatgctgaagatgtttatgaagctgttcgaacccaatcccagttggcagtgcagatccggcggggacgagaaacactgaccttatatgtgacccctgaggtcacagaatgaatagatcaccaagagtatgaggctcctgctctgatttcctccttgcctttctggctgaggttctgagggcaccgagacagagggttaaatgaaccagtgggggcaggtccctccaaccaccagcactgactcctgggctctgaagaatcacagaaacactttttatataaaataaaattatacctagcaacataaaaaa

SEQ ID NO: 177284 - DNA, 848 bp, Homo Sapiens
  misc_feature (546)..(546): n is a, c, g, or t
  misc_feature (754)..(754): n is a, c, g, or t
  misc_feature (822)..(822): n is a, c, g, or t
  misc_feature (838)..(838): n is a, c, g, or t
gggcaacgctgaggattcagactaaggagcctctccccacgctgcctctgggacgctcagctgatgtccggcaaggggagtttgttgttgccatgggaagtccctttgcactgcagaacacgatcacatccggcattgttagctctgctcagcgtccagccagagacctgggactcccccaaaccaatgtggaatacattcaaactgatgcagctattgattttggaaactctggaggtcccctggttaacctggatggggaggtgattggagtgaacaccatgaaggtcacagctggaatctcctttgccatcccttctgatcgtcttcgagagtttctgcatcgtggggaaaagaagaattccccctccggaatcagtgggtcccagcggcgctacattggggtgatgatgctgaccctgagtcccagcatccttgctgaactacagcttcgagaaccaagctttcccgatgttcagcatggtgtactcatccataaagtcatcctgggctcccctgcacaccggggctggtctgcggcctggntgatgtgattttggccattgggggagcagatggtacaaaatgctgaagatggttatgaagctgttcgaacccaatcccagttgggcagtgcagatccggcgggggacgagaaacactggaccttatatgtgacccctgaggtcacagaatgaatagatcaccaagagtatgaggctcctgctctgatttcctccttgcctttctggcntgagttctgagggcaccgagacagaagggttaatggaacccttggggggcagggtccctccaaaccanccagcactggactccntggggctccg

SEQ ID NO: 177285 - DNA, 389 bp, Homo Sapiens
acacttgggttttaggtatttatttacaaagttcttactaatacaattgcttttaaaatgtagcaaagagtcatttactactctcagaagtggcacatacatggcatagaaaacaatctatagtcagttaactattaaaacagaaacttgaaatttaagtgacaaacatttgtagcactccctaaagaaataggaaataaaaaatgcattttatccatatgaacttgattatactgaattactgactataaaaaggctattgtgaaagatatcacactttgaaacagcaaatgaattttcaattttacatttaattataagaccacaataaaaagttgaacatgcgcatatctatgcatttcacagaagattagtaaaactgatggccc

SEQ ID NO: 177286 - DNA, 389 bp, Homo Sapiens
catttctgttaacacaaaagtttagaaaactcacggtaactgttacttgatttaagtgtatataaaattttcagtaaggctgcttttaaaaggaaccactgtccatttaaaggtttcatagttatcttcaatgggttagtattgtttggggcaggacattaaactagaagggattctataggatgaggtgatacctagaaggtaatatattgtaaggcaaaagagattagaagaaatggggaaaggatagtaaaaggcaagacagattaaaggttgaaacatgaagatattctcaattgtatttctgcctatgtttgcttttttggctcaagcatctgttggaagagacaaaatgtgacttggttcataataaagcaagaattatttaa

SEQ ID NO: 177287 - DNA, 486 bp, Homo Sapiens
  misc_feature (469)..(469): n is a, c, g, or t
tgcggccgccagtcctgggtctcccggctcaggtagtgccaggaagctgcgggcatggcggacagctgtcctcggtctggaggcgccatcctggctttcaaatctgctccagaggttatctggggaggggctgctccctcacagagggaccctctaagcccaccaggcgggcactttcagcccaaagcctccgggccacctcctcatcctcagcctcgggggccggggccttctgtttgagtccatcgaagtactttccggaaacatccgccagttcctccgccacggccaggtatgtgctgggctgggcggccagctcggggctcttgaccagcagccagaagatgggcccctgagtacagcctgactccaggcgtcagtcccacggcctcttcctctgagacacggttttctcatccgccagcagggttttgcttgtttcccggagctttaagaggttggcaggcangtcaacagaggaaaggg

SEQ ID NO: 177288 - DNA, 785 bp, Homo Sapiens
  misc_feature (461)..(481): n is a, c, g, or t
cccagtcccctcagagcagcttcccccagccagccgctgtgtatgccatccaccaccagcagctgccccacggcttcaccaacatggcccatgttacccaggcccatgtccaaactggaatcacagcagccccgccccctcaccctggggctccccacccgccccaggtgatgctgctgcacccaccccagagtcatggggggcccccccaaggcgcggtgccccagagtggggtgcctgcactctcagcttccacaccctcaccctacccctacatcggacacccccaaggtgagcagcctggccaggcgcctggatttccaggaggagccgatgacaggattcctccccttccaccccccggggaactgaagattgtcctggccgcgacctgagacctccatgagtggagggaagagtgatctatgtctcttcccccagcagctcggaccactcccagnnnnnnnnnnnnnnnnnnnnnaggggagctggggaattcctgccaagcaccttgaatgggaggggcctcacagagggcagggccagggtccagcaggggtggggggttcctgctctgcccctgcccgtccccacccagtcttgccctcccatcctctcatctattcccccgctggagacggaagatcttttattttctattatttataacttcagacttgggccccctgttctttctttcccattaacttgagtgacctgtgtgagagacagacagatgccccacgaggatggctggacaaggacttttactttttattacataa

SEQ ID NO: 177289 - DNA, 597 bp, Homo Sapiens
ttggaggacgcgcggcaagggggcacgggaaggggcgggggcagccgagcgaggcggggcgctcactcccgcttccgtaggtggatgtagatgatgccgctgaccagggcgagggggaaggccacccaggccagggcgaagcagtatccgaagctgccccctcgcgggtgcttctccaggatctcctcggcgtgaatggcatagatcaaggcgccagtaaacaccgccacgctggtgcaaagctggcagaggccggtggcatagaagagacctcctcgtcgcatggtgtagagctggaacatgaacaggatgaaggagagacagcagagaatgagggagagcaccatgaggacctgcaccgccttcagccagccattctcgctgacattactgcaggcccatgttttggtgtcgttgttccacgtgcagtcgtaccagagattcagggactctttcccagggagagtccaccaggacttgtccaaagtggccacgaaaagcagtataagaatgaggatgtgaagggctgagaccaccagcaagaggagtgacatggctgcagtggaagccgagagccgcgaaaaaagtcagagctgg

SEQ ID NO: 177290 - DNA, 1068 bp, Homo Sapiens
  misc_feature (173)..(181): n is a, c, g, or t
  misc_feature (839)..(848): n is a, c, g, or t
  misc_feature (917)..(935): n is a, c, g, or t
  misc_feature (960)..(960): n is a, c, g, or t
  misc_feature (1028)..(1028): n is a, c, g, or t
ggagcgagcctgggtggcgaatttccacgaggctttccgtgggtgccttatgtggtggtggttgtgcccagcacagacctggcagggttcttgccgtggctcttcctcctccctcagcgaccagctctccctggaacgggagggacagggaattttttccccctctatgtacnnnnnnnnncaaagctctctttccttctctggtgatggtttggtaggattcttttgtctctggaagcagtgggactgaagttctcttcgtcctgtgcacacacagacacccccacacagttgggatcacaggctgacctgggcccatcccagctggagctttctgccagggtcctgggccttgactcccccaccctgcaggcctggcctgaatctggcttcttagacacagcccagtccttcctgcctgggctgggaataagcctctcacaggttctggtggacagatctgttccccaggtcactccagtggtctccaggcttccagagaaggctggttgcctcaagctcttctctgcctcataaacggatccagagaaggctgggttgccctttaagctctttccctgcctcgtgttccctgagaaacggattaatagcccctttatcccccctgcacccctcctgcagggggatgggcacttttgaacccctctgggagcccctccccttggctaagcccttactcctcttcaaacttttctgaatgtacagtgcccgctcggtttggggattttggggaactggaaaaggaacccaagggacacctggacccccaaagctggtcccttgccttaagcggtccaaccgtctctttctaaggagannnnnnnnnntcttgccctggtccctggggtgtggggttggggttttgggccccctgtgtttgcctgtgtaactaccannnnnnnnnnnnnnnnnnngaaaaccgaaggggaccggctgtgnccttttgtctctctggccctcacaaatggcacacctgggccccggcccaatgggttcccccttttagnaggaattcccaaaaatttttccagggaaaagggcagaggg

SEQ ID NO: 177291 - DNA, 407 bp, Homo Sapiens
  misc_feature (67)..(67): n is a, c, g, or t
  misc_feature (77)..(77): n is a, c, g, or t
  misc_feature (165)..(165): n is a, c, g, or t
aatcatcaagaaggtggtggctggcttcttaaccctctgtgccgtgctcctaaaatcttcctcctgnaagggtgcantccctctaccgaacggacaaggggccagcttccagcaggccccaggaggagttttcccccagggcatcttcagcagcagaaccttccnaaagagctgcttcatctgctgcccaaggagccttcccaggggaattagtcctcctctcttctctccccctcagcctttctctcgcctgccttctgagctgcactttccgtgggtgccttatgtggtggtggttttgcccagcacagacctggcagggttcttgccgtggctcttcctcctccctcagcgaccagctctccctggaacgggagggacaggaaattttttccccctctatgtac

SEQ ID NO: 177292 - DNA, 625 bp, Homo Sapiens
ggggtttttggatagatgattgactggtgagaatttggtcaaggtgacagcctcctgtctgatgacaggacagactggtggtgaggagtctaagtgggctcagtttgatgtcagtgtctgggctcatgacttgtaaatggaagctgatgtgaacaggtaattaatattatgacccacttctatttactttgggaaatatcttggatcttaattatcatctgcaagtttcaagaagtattctgccaaaagtatttacaagtatggactcatgagctattgttggttgctaaatgtgaatcacgcgggagtgagtgtgcccttcacactgtgacattgtgacattgtgacaagctccatgtcctttaaaatcagtcactctgcacacaagagaaatcaacttcgtggttggatggggccggaacacaaccagtctttttgtatttattgttactgagacaaaacagtactcactgagtgtttttcagtttcctactggtggttttgatattgtttgtttaagatgtatatttagaatgacatcatctaagaagctgattttgctaaactcctgttccctacaatgggaaatgtcacaagaatgtgcaaaaataaaaatctgaggaaa

SEQ ID NO: 177293 - DNA, 750 bp, Homo Sapiens
  misc_feature (276)..(316): n is a, c, g, or t
ggccctggccctactccagggccaatgcacccccgcctcacacacgcactccttctcctcaaggccagggcagagggcctcaccgcctcccgggcctgctgtcagcttgcagcccggggacagaggccagctgggatctgcctgaggacagagaacatggtctcctgcagggccctgcctcccaagccccgccctcagaaagccaagtaccttttcagctttttaactgcccccatcccaacccagggaggcctgtgtcactctggcacaagctgnnnnnnnnnnnnnnnnnnnnnnnnnnnnnnnnnnnnnnnnngggaccacagccgcgctgccgagggccaagcacaaaggttccagtgagcgcatgtcccagcccctggtggccaggctccccttgctgagccgctgccacttcaccctgtgggaagtggccccagccatctcctctagaccaaggcaggcagccccgacatctgcttcctctatcgcccaatgcaaaatcgatgaaatggggagttctctgggccaggccacattcacattcccctccccctgtggtccagtgaagcctccggaccccaggctctgctctgccctgccctgcacccccctcgtcagaagtacatgaggggcgcagagatgagcacacagctttgggcacggtccagggcaaactgaaatgtacgcctgaattttgtaaacagaagtattaacatgtctctttctacacaaaaaagacaaacaaac

SEQ ID NO: 177294 - DNA, 766 bp, Homo Sapiens
  misc_feature (740)..(740): n is a, c, g, or t
  misc_feature (754)..(754): n is a, c, g, or t
gggtgcggttatcaaagctggatattgtgtaaaacaaggagcagtgatgaaaaactggaagagaagatattttcaattggatgaaaacacaataggctacttcaaatctgaactggaaaaggaacctcttcgcgtaataccacttaaagaggttcataaagtccaggaatgtaagcaaagcgacataatgatgagggacaacctctttgaaattgtaacaacgtctcgaactttctatgtgcaggctgatagccctgaagagatgcacagttggattaaagcagtctctggcgccattgtagcacagcggggtcccggcagatctgcgtcttctgagcatccccccggtccttcagaatccaaacacgctttccgtcctaccaacgcagccaccgccacctcacattccacagcctctcgcagcaactcttttggtctcaacctttaccatggagaagcgaggattttacgagtctcttgccaaggtcaaagccagggaacttcaagggccagactgtcttctcaaagagaaccagctttccaaagtgactgaacaagctctggtaagacctcaaagtaaaaatggcccccaagaaaaaagattgggacctaataaaacttgggacgatgcgagcccttccggtcagtgacgtgtgagggcagaagcgcacgggagcctggcctgccttttgccgttcctcagttttccttttcatgagggttttttggccaaaggttgntaaagggggggaantgggtttttagg

SEQ ID NO: 177295 - DNA, 848 bp, Homo Sapiens
  misc_feature (763)..(763): n is a, c, g, or t
  misc_feature (767)..(767): n is a, c, g, or t
gggggggacggaccggaagtgcccgagggcggccgcagaacggtcaatttgagccgcgtcgagctcccctgggacctgtggccgccgcccacagaccatgctcctggggcgcctgacttcccagctgttgagggccgttccttgggcaggcggccgcccgccttggcccgtctctggagtgctgggcagccgggtctgcgggcccctttacagcacatcgccggccggcccaggtagggcggcctctctccctcgcaagggggcccagctggagctggaggagatgctggtccccaggaagatgtccgtcagccccctggagagctggctcacggcccgctgcttcctgcccagactggataccgggaccgcagggactgtggctccaccgcaatcctaccagtgtccgcccagccagataggggaaggggccgagcagggggatgaaggcgtcgcggatgcgcctcaaattcagtgcaaaaacgtgctgaagatccgccggcggaagatgaaccaccacaagtaccggaagctggtgaagaagacgcggttcctgcggaggaaggtccaggagggacgcctgagacgcaagcagatcaagttcgagaaagacctgaggcgcatctggctgaaggcggggctaaaggaagcccccgaaggctggcagacccccaagatctacctgcggggcaaatgagtctggcgccgcccttcccgcccgttgctgctgtgatccgtagtaataaattctcagaggactccnaccnaaacctccatcacctatatccccccctttttggtcggcctcgggccctcgagaaatttttcagaaccattcgtttgggggc

SEQ ID NO: 177296 - DNA, 406 bp, Homo Sapiens
  misc_feature (37)..(37): n is a, c, g, or t
accgccagggactgttggcttccaccggcaaatcctnacccattgtcccgccccagcccaaataggggaaggggccgaaacagggggatgaaggcgtcgcggatgcgcctcaaattcagtgcaaaaacgtgctgaagatccgccggcggaagatgaaccaccacaagtaccggaagctggtgaagaagacgcggttctgcggaggaaggtccaggagggacgcctgagacgcaagcagatcaagttcgagaaagacctgaggcgcatctggctgaaggcggggctaaaggaagcccccgaaggctggcagacccccaagatctacctgcggggcaaatgagtctgcgccgcccttcccgcccgttgctgctgtgatccgtagtaataaattctcagaggactcagc

SEQ ID NO: 177297 - DNA, 467 bp, Homo Sapiens
  misc_feature (15)..(15): n is a, c, g, or t
  misc_feature (30)..(30): n is a, c, g, or t
  misc_feature (38)..(38): n is a, c, g, or t
  misc_feature (47)..(47): n is a, c, g, or t
  misc_feature (55)..(55): n is a, c, g, or t
  misc_feature (68)..(68): n is a, c, g, or t
  misc_feature (106)..(106): n is a, c, g, or t
  misc_feature (139)..(139): n is a, c, g, or t
ccccccttgaaaaanttgcttaaggccccnttttcttnctttccccnaaatttgnattaccgggaccncaaggaattttggcttccaccggaaatccctaccattntccgccccagccaaattagggaaagggcccaancagggggatgaagccgtcgcggatgcgccctcaaattcagtgcaaaaacgtgctgaagaatccgccggcggaagatgaacccacccacaagtaccggaagctggtgaagaagacgcggttctgcggaggaaggtcccaggagggacgcctgagacgcaagcagatcaagttcgagaaagacctgaggcgcatctggctgaaggcggggctaaaggaagcccccgaaggctggcagacccccaagatctacctgcggggcaaatgagtctgcgccgcccttcccgcccgttgctgctgtgatccgtagtaataaattctcagaggactc

SEQ ID NO: 177298 - DNA, 291 bp, Homo Sapiens
gggagtgagctgcgtgagggcctggcccgcctggctgaggctgcgccctgagccggggctggttttctatgaacgattccggcctgggatgcgggccaggctgcaggcggcatagttgggcccattcgtcctggaaagggactggggggtcccaacttagccctgggtgggccgggccgggctgggctggggtgggccccagtcggctctggttgttggcagctttggggctgtttttgagcttctcattgtgtagaatttctagatcccccgattacatttctaagcgtg

SEQ ID NO: 177299 - DNA, 1339 bp, Homo Sapiens
  misc_feature (947)..(1097): n is a, c, g, or t
  misc_feature (1108)..(1124): n is a, c, g, or t
  misc_feature (1165)..(1228): n is a, c, g, or t
  misc_feature (1238)..(1246): n is a, c, g, or t
ggtacaaaattcaaactgtgaaggtttatgcttcattaattatgaccatactttttcattttctgacgatccctgatttccttatggactcaataagaatcttttatatcaagtaaaatgaaagttgatgatagaatatcaaatagtgaatttgatatgaaatctaagagtgtgagtcacttgcatatgtaatgctttgggtttttgcatattttcttaggtcacagtgacaggtttctgagttgtttcccttttcaagtctctgggaggccagtggcagcagcaggtctgtgtttcaccttcttcccatgtgagcttggaaaactttggcatcttaattagtcttgaatcatacacctgatccccaaacattgcctgctctcaatgaaacatgctttggaaatggaagggactcagaaagtcgaaatcccaagaactccaagccaaaagtgttaggttttagtgaaatttgtgtcaggtataagcatacctgtttgggccagaattattatcacagcctttctgacccaaactttcaaaagcaaataaacagcataataaaacgttaattatctttccattgtaattgtgatgatctactctgtatgggtaccaaaatcaccttctctcttcaagtcaaagttgaatttagaactttgaatacaggtcaaaaaatgtagaaaatatcattttatattccctaatctatatagctgaaaaagggttgtattttcttagctgaatatgaatacctcttaaacataaattagttcctctccagtgaagtatcttattttaccaatccatttcaggaaagaggttctgctgccgtaaaggcagaaattttatttttatcccttttatttgaatgagagatttgaaaatcgaattatgtaaatatttcaatgcatctgctattattttgtggagtttattaaactactttnnnnnnnnnnnnnnnnnnnnnnnnnnnnnnnnnnnnnnnnnnnnnnnnnnnnnnnnnnnnnnnnnnnnnnnnnnnnnnnnnnnnnnnnnnnnnnnnnnnnnnnnnnnnnnnnnnnnnnnnnnnnnnnnnnnnnnnnnnnnnnnnnnnnnnncttttgggcgnnnnnnnnnnnnnnnnnaaaaaattttttaaaacttttttttgggggggggggccccnnnnnnnnnnnnnnnnnnnnnnnnnnnnnnnnnnnnnnnnnnnnnnnnnnnnnnnnnnnnnnnntttctccccnnnnnnnnnccgcccgggggaccacaagggttttgaaaaaaacccgagggggtgtttggggggttttttgggctttcaaccagggggcccccgggcgccttt

SEQ ID NO: 177300 - DNA, 377 bp, Homo Sapiens
tacatatttgattatttattaccaatcaaaaataaattccatatatcgtttagcaaatatcattgttttgtgacaaaagacacaagagtcataacaacaaaactccccgagagtcaaactcataacgccaaaataaatcacaaaaatatacaaattaaaatattatgcaaaataaatacggcggctgtcacctgcctacccatttggatgccctttgcaaaggtctcccttacgtggaagacacagtgggtgggccagttccagggtatggctcatcccaggaaccagaggttgaaataggaagggaaaaattgcactgggaagaggaagtcatcagacaaacaatatttggaaataatgatgaccctctgtgagaa

SEQ ID NO: 177301 - DNA, 437 bp, Homo Sapiens
  misc_feature (91)..(100): n is a, c, g, or t
  misc_feature (273)..(273): n is a, c, g, or t
gtctccaggaaaaggagaggggttaagatgcaccgaggctgtagctgggctacttgatcttgctgaaagtgtttctaaagatagcaccacnnnnnnnnnnaaagcttttatatattaaaaaacgtatcatgcacccaactgtgaaatagctgccccttgcgcagaggacccggggaggggtcccgagaggctccccatgcaacactggaaatgactgttccagagaacgggcagaccctggcagagaacccctggcgcctgagactaccaccncactccgttcctgccagaaacgaccctctgtggccgattggccatgcgggcccctcgcagccaactcagccagtgttgggactggctcagagcccatgggggctggaggggggcagctgggactctggaatcttctttataataaaagccttacggacaaacct

SEQ ID NO: 177302 - DNA, 992 bp, Homo Sapiens
  misc_feature (302)..(334): n is a, c, g, or t
  misc_feature (885)..(893): n is a, c, g, or t
cgacctggctttccttctgagcgtggggccagctccccccgcgcgcccacccacactcactccatgctcccggaaatcgagaggaagatccattagttctttggggacgttgtgattctctgtgatgctgaaaacactcatataggattgtgggaaatcctgattctcttttttatttcgtttgatttcttgtgttttatttgccaaatgttaccaatcagtgagcaagcaagcacagccaaaatcggacctcagctttagtccgtcttcacacacaaataagaaaacggcaaacccacccnnnnnnnnnnnnnnnnnnnnnnnnnnnnnnnnngttggcaaaagaatctcaggaacggccctgggccacctactatattaatcatgctagtaacatgaaaaatgatgggctcctcctaataggaaggcgaggagaggagaaggccaggggaatgaattcaagagagatgtccacggacgaaacatacggtgaataattcacgctcacgtcgttcttccacagtatcttgtttggatcatttccactgcacatttctcctcaagaaaagcgaaaggacagactgttggctttgtgtttggaggataggagggagagagggaaggggctgaggaaatctctggggtaagagtaaaggcttccagaagacatgctgctatggtcactgaggggttagctttatctgctgttgttgatgcatccgtccaagttcactgcctttattttccctcctccctcttgttttagctgttacacacacagtaatacctgaatatccaacggtatagatcacaagggggggatgttaaatgttaatctaaaatatagctaaaaaaagattttgacataaaagagccttgattttnnnnnnnnngagagagagatgtaatttaaaaagtttattataaattaaattcagcaaaaaaagatttgctacaaagtatagagaagtataaaataaaagttattgttt

SEQ ID NO: 177303 - DNA, 576 bp, Homo Sapiens
ggatccttaagagcgttgagggacgggcttcgccgccagcaccagcgcaacgtcaaactcatgagacagatgctaatggatgccggcctccctgttgtccactgccccagccacatcatccctgtgcgggttgcagatgctgctaaaaacacagaagtctgtgatgaactaatgagcagacataacatctacgtgcaagcaatcaattaccctacggtgccccggggagaagagctcctacggattgcccccacccctcaccacacaccccagatgatgaactacttccttgagaatctgctagtcacatggaagcaagtggggctggaactgaagcctcattcctcagctgagtgcaacttctgcaggaggccactgcattttgaagtgatgagtgaaagagagaagtcctatttctcaggcttgagcaagttggtatctgctcaggcctgagcatgacctcaattatttcacttaaccccaggccattatcatatccagatggtcttcagagttgtctttatatgtgaattaagttatattaaattttaatctatagtaaaaacatagtcctgg

SEQ ID NO: 177304 - DNA, 405 bp, Homo Sapiens
  misc_feature (45)..(45): n is a, c, g, or t
  misc_feature (55)..(55): n is a, c, g, or t
catggaggagacatatttccacctatttctctccataagtataanagaccataanagaccatctagggacttcagaacccaaataatgacacaatgttaatttgcaggttctccctctgcctgccaccccacccagcaaggaggagaggaagtgttgagaagggaagagatgagtcctggccctgtcacttcttaggggtgtgcttttgaacaacctgctcaccatgtatgaacttcactcttcttgtttataaaatgaggacaatgacacctgcaagactgtgaggtttaaaaacaaaatctgtgttgagaggtaacttgcctcttttacttaccaatgatttcctcaatgcctggtgactggggctggttcatactagacgatcaataaatgctccttgaatg

SEQ ID NO: 177305 - DNA, 987 bp, Homo Sapiens
aacgaggctccctggagcccgacgcagagcagcgccctggccgggccaagcaggagccggcatcatggattccttcaaagtagtgctggaggggccagcaccttggggcttccggctgcaagggggcaaggacttcaatgtgcccctctccatttcccggctcactcctgggggcaaagcggcgcaggccggagtggccgtgggtgactgggtgctgagcatcgatggcgagaatgcgggtagcctcacacacatcgaagctcagaacaagatccgggcctgcggggagcgcctcagcctgggcctcagcagggcccagccggttcagagcaaaccgcagaaggcctccgcccccgccgcggaccctccgcggtacacctttgcacccagcgtctccctcaacaagacggcccggccctttggggcgcccccgcccgctgacagcgccccgcagcagaatggacagccgctccgaccgctggtcccagatgccagcaagcagcggctgatggagaacacagaggactggcggcccgcggcccggggacaggccaagtcgcggttccttcccgcatccttgccccaccctcacagggcaccgaattcatcgcaaaaaacccggatggggagaaaccaccctgaaaacaaaatccaggccccattacacccacagaactaccaaccatggaccgcacaggggctcaggaacacctgccccagccaacccctatgccccgcacaaaaccaccaccaaaatgaacacgtgttaacacaacagggccgcctactaaaaccaaagccgatttcaaaaacccgccccctcattttaggaaagcaacctgccccgaagggggttgcaaagcagggcgcccatcaaaccattagttaagaatctccctgaccgccaactcgcggcccaacaggccccatcccgaggggccgacaaaccgtggagagcctatgagaccccgaacaataaccaaaccg

SEQ ID NO: 177306 - DNA, 911 bp, Homo Sapiens
  misc_feature (539)..(539): n is a, c, g, or t
  misc_feature (641)..(685): n is a, c, g, or t
aacgaggctccctggagcccgacgcagagcagcgccctggccgggccaagcaggagccggcatcatggattccttcaaagtagtgctggaggggccagcaccttggggcttccggctgcaagggggcaaggacttcaatgtgcccctctccatttcccggctcactcctgggggcaaagcggcgcaggccggagtggccgtgggtgactgggtgctgagcatcgatggcgagaatgcgggtagcctcacacacatcgaagctcagaacaagatccgggcctgcggggagcgcctcagcctgggcctcagcagggcccagccggttcagagcaaaccgcagaagcctccgcccccgcgcggaccctccgcggtacacctttgcacccagcgtctccctcaacaagacggcccggccctttgggcgcccccgcccgctgacagcgccccgcagcagaatggacagccgctccgccgctggtcccagatgccagcaagcagcggctgatggagaacacagaggactggcggccgcggccggngacaggccagtcgcgttccttccgcatccttgcccacctcacaggcaccgagttcatgcaagacccggatgaggagcacctgaagaaatcaaggccctaccnnnnnnnnnnnnnnnnnnnnnnnnnnnnnnnnnnnnnnnnnnnnngcgtttgccgagcgctatgcccccggacaaaacgagcacagtgctgacccggcacagccagccggccacgcccacgccgctgcagagccgcacctccattgtgcagcaactttgccggaagggtggccaaggaggggggcagcaacaaacggcaagaactccccgtgtgtcaccaagtgccacaaaagttcatcccggggcccgcctaaacctgtggggggcgcca

SEQ ID NO: 177307 - DNA, 542 bp, Homo Sapiens
cccacctcacaggcaccgagttcatgcaagacccagatgaggagcacctgaagaaatcaagccaggtgcccaggacagaagccccagccccagcctcatctacaccccaggagccctggcctggccctaccgcccccagccctaccagccgcccgccctgggctgtggaccctgcgtttgccgagcgctatgccccggacaaaacgagcacagtgctgacccggcacagccagccagccacgcccacgccgctgcagagccgcacctccattgtgcaggcagctgccggaggggtgccaggagggggcagcaacaacggcaagactcccgtgtgtcaccagtgccacaaggtcatccggggccgctacctggtggcgctgggccacgcgtaccacccggaggagtttgtgtgtagccagtgtgggaaggtcctggaagagggtggcttctttgaggagaagggcgccatcttctgcccaccatgctatgacgtgcgctatgcacccagctgtgccaagtgcaagaagaagattacaggcgag

SEQ ID NO: 177308 - DNA, 543 bp, Homo Sapiens
ttttgtaaagcaaacagaacccaatgcctccctttgctcctggatgccccactccaggaatcatgcttgctcccctgggccatttgcagttttgtgggcttctggagggttccccgccatccaggctggtctccctcccttaaggaggttggtgcccagagtggccggtggcctgtctagaatgccgccgggagtccgggcatggtgggcacagttctccctgcccctcagcctgggggaagaagagggcctcgtggggcctccggagctgggctttgggcctctcctgcccacctctacttctctgtgaagccgctgaccccagtctgcccactgaggggctagggctggaagccagttctaggcttccaggcgaaagctgagggaaggaagaaactcccctccccgttccccttcccctctcggttccaaagaatctgttttgttgtcatttgtttctcctgtttccctgtgtggggaggggccctcaggtgtgtgtactttggacaataaatggtgctatgactgccttccgcctaaaaa

SEQ ID NO: 177309 - DNA, 437 bp, Homo Sapiens
  misc_feature (85)..(85): n is a, c, g, or t
gcatcccagaaggaagtaggacctggtttttcaggtactgggaaccgggggctcactgcttgcactgtgcttagggtagggatgntaaatatcctccctgcatggctttatcctccctctcatcccaaagcaggtatcttctggttgtcacagagtttcattgagtccagctgcagccacgtggccatctggagctggtgctataggtgaccatctggtacattgaggggacctgtttgcctcctccactctataagcagtcatcttgggagaccgggaggagaaggtggtgggctagtcctgtgtcctcctccacttcccatgcctctatgttacccatctgtgtctcctgtgcagaaggagaggaaggggcattaagagatgaaagggtgattatgtattacttatccatttctgaataaacatttgttattcct

SEQ ID NO: 177310 - DNA, 556 bp, Homo Sapiens
gccgtttcccttccaacctcttggcgagacgcatttgaggtcaagtagactcggtgtaggcaagcaactttcatgcgcaaaggaagtttagagagcctttgggttgggaagtgaacagttggtagaccagaatctcttaagattggaaagatactggggagaggagggctgcttggccccagggaactgcagtgaggtggaactgagccgctcctgaatctccaaaggagcccatgctgcccggcttccctgagtcatttttcccagcatcctgtcagatccctcaatgtactgatttcccccttgtgttaactataccgatattatttttttagcaattgaaatgcacttttttatttcaactcaatcatgattttaagtataaaaaatttatagattgttaaaactacttttttgtgtatttttaaccactcaatgtagcattgtatattttattcttgtgagactctggtacaggtgtgccgcctaatgatttttctgagatgctgggcctttggatgtgtacggtaaccaacttaatgctaatgttcaaagt

SEQ ID NO: 177311 - DNA, 553 bp, Homo Sapiens
  misc_feature (171)..(171): n is a, c, g, or t
  misc_feature (239)..(239): n is a, c, g, or t
actgagtggcaagtctgctggcaccggagcgtttccttcgtgcccaggagtgttgcttccgaagacctggcccgcccatggagcctggggttctgtccagataggaccagggtgtctcactttggccaccaattcttcggccaaaaacctctgccctccaaaacctgcaancctggaggggtgaggggaaaaccacccctctttcctcccaggttggcaggggaccctcttctcccgtnctgccctcgggttgcccgcctcctccagagaactctcccaagggcccatcaccactggcctctgggcacttgtgctgagactctgggacccaggcagctgccaccttgtcaccatgagagaatttggggagtgcttgcatgctagccagcaggctcctgtctgggtgccacggggccagcattttggagggagcttccttccttccttcctggacaggtcgtcatgatggatgcactgactgaccgtctggggctcaggctggtgtgggatgcagccggccgatgagaaaataaagccatattgaatgatcgcc

SEQ ID NO: 177312 - DNA, 710 bp, Homo Sapiens
attagcttgtcccaaaccacggcagtgaactccttcagcacttctaacccacttcgggttttcagctgttcttacatctaacgcactgacttagaactgaattatctcctacatagtaaaatcacaattgtggaattacaggaattctggtgatattaaggtgaaataacaaaacacaaaaggccctattttaacagttgatgtgacagtaagttttaatagaacctgtaacttcattttggaaatgcttctccaccaaataagggctttttcccctatttaaggagccagatggattgaaagatgtggaaataggcagctgtagatcttgatcttccaggtaccccatgtacctttattgagcttaattataatactgtcaaattgccacgatctcactaaaggatttctatttgctgtcagttaaaaataaagccctaaatacatttttattctttctactgagggcattgtctgttttctttgtaaatgccgtacaataaacaaattatttaataaccccgacaaccccccccgtcaaataataaaaacacctgtccggccgccttcggcccctccaagaagctttctaacaaccattctgtttgggcgccgcgggccccggtagggtaaagtgaaaccatggttccctaggtgtgtttccccaaggaaaaatccctggttcaatgaacctagatggcttgggaatt

SEQ ID NO: 177313 - DNA, 527 bp, Homo Sapiens
  misc_feature (205)..(205): n is a, c, g, or t
  misc_feature (221)..(221): n is a, c, g, or t
ctcttcagagggctgctctctctttccaggagaaaatcctagccatcctctcaactccaacggctggggacaatgcccacttactacctgtgcacttgccaactcggaacacctggagggttcctcttaggactttgccccacctccttctcatggcacttgctgtggaaaatgcctggctggcctcgtggggcctgtctcactnttcccaggagacatgnacccactaacgtggcaactttaacccaaaggcccctcagacatgtgacagcaaatctggagccacagacaggttccctccattggcagcccattgtgtttgaaattccatgtcgggtttacttggaatgaaagatacttgaattattgtcgcctgtgagcgcccagcttctgtttcatagtcttaacaggtggccattgtcgtgaaacgagtgatgcctgaagatctcagtgatgtttgaaccttctgtgtaactttttattaagtctttgtatctctcgactgattaataaagaagagaaacacg

SEQ ID NO: 177314 - DNA, 484 bp, Homo Sapiens
  misc_feature (16)..(16): n is a, c, g, or t
  misc_feature (51)..(51): n is a, c, g, or t
  misc_feature (176)..(176): n is a, c, g, or t
  misc_feature (283)..(283): n is a, c, g, or t
caaggctggggaaaanggcccacttaactacctgtgcaactttgccaactngggaaacccggaaggtttcccttaggactttgccccaacctcccttcctcatggcacttgcctgtggaaaaaacccccggctggccctcgtggggccctgtcctcacttttccccggagacatgnaccccctaacgtggcaactttaaccccaaaggcccctcagacatgttacagcaaatctggagcccacagacaggttccctccattggcagcccattgtgtttgaaantccatgtcgggtttacttggaatgaaagatacttgaattattgtggcctgtgagcgcccagcttctgtttcatagtcttaacaggtggccattgtcgtgaaacgagtgatgcctgaagatctcagtgatgtttgaaccttctgtgtaactttttattaagtctttgtatctctcgactgattaataaagaagagaaacacg

SEQ ID NO: 177315 - DNA, 169 bp, Homo Sapiens
aggcccctgcctgtctgcccatctgcccctcacccacccggagctctgcccaccgcctggacctgcccacccctgaaagactggcccctggctccccgcccctcggtctccacgtggtgtatggatctgtggtcattgtccctctgcagaataaagattgctcaggcct

SEQ ID NO: 177316 - DNA, 718 bp, Homo Sapiens
cccgtaagcaaaatgtccgaaccgcgataaaatttgtggaccttttttccatgcagggaaaagggccatgtagcagtcctcaaagcccggttactcagcctagtccttggttaagcagttttgataatcaatcaaggtcaattttctcactgattttatgattaatttcttggaaaatttgaaagttttcaagaagtaaaaaattaatatcttggtatcccaatatatagagaataacttcagttcaatggttggtgcattctcttctagtctttttttcaatgtataaatattaaagttatttcatagttgagatcatactgcatatatgatactgtatcttgcttttttcattttaacgtcgtgagcaattttcccatgacattacaaactgtctttgaaaaatggaaaacatttggggctgtcagcataactgaaaatgttttcttggtgtgacacatgtatctttgtaattggtttgatttagtgtgctttatttcaataaaaattcagtattataatttacagattggggtggggagtggtatgtacttcaaattactgaaatcttcctagtagaattcctttttaaatgtttgaactccccgggtacatcttaaacacgacattgacactgccaagtgcttgggatgtcctgggcacctcagaacacaactttgtggcaaaagggagtgctgtgccttctggattagtggca

SEQ ID NO: 177317 - DNA, 1191 bp, Homo Sapiens
  misc_feature (169)..(229): n is a, c, g, or t
  misc_feature (594)..(639): n is a, c, g, or t
ccgtaccctacccgccgctctacctctcgtcccgcgcgtcccgcatctcctgcgtctccgcgccatgaccagaccgacacgctcgcgtccgcacacgtgcgcgccgatccagtcccgatggcgtgtcggcgcggctgccccaccacccgcacttcgtaccgcccagcannnnnnnnnnnnnnnnnnnnnnnnnnnnnnnnnnnnnnnnnnnnnnnnnnnnnnnnnnnnncgccgcgtcgccctgcagccctccgccaccgcgtcgctctcgcgttacgcttcccctccccgcggcctctctcgccgccttcccgctcgtcggcagtcgcacctcgcccaatccccacatccgcgtccgccgcccccaccgcgcatcccggactcccacctacgccgccccccgatgctcgccctacgcgccgtccacaggcgccgctggggtagagctagccgcgcccgctggcccgaccccgccctccactccgccgatcggcgtaccctccgcgacccctgtcccccgctccgcccccgccgcgcgtgcgccaagcactagtacgccgccctccccgcacccgcccgcctcggattctcacnnnnnnnnnnnnnnnnnnnnnnnnnnnnnnnnnnnnnnnnnnnnnntacctcgacgccgccccgtgcctggtggttattacccccattcgtccgccccccgttccaccagccggcagtccacgccgccccccttcttcgagaggctccggcctcgtacccgtcccagctctgcttcgggcgacattatggcgtcaccgcccggggcttccatctcctcaagcggcccccgcgcggggggtgggcgcgaagaaaagcagcctcgcgggggtcgcggtgacgtcggggacctcggcgccaatgggcggcggccgcgcgaccctccgggagtctggcgtgagggtggacggggggcttgcgccggcgcttccgccaatcaccgcgccggcctcccctccccctatctctcgccgggccgaggcctccttctccgtagccaaaagtcgccctcccgggcgggtggcgccgccgctgccggcccccaagccggcccccccacagtagaggttgagtccgattaccgcgtttcttttgaggccaaacattgccagtcgccgccgccgcctggctgagaaaactggggaagaccccgactcctta

SEQ ID NO: 177318 - DNA, 401 bp, Homo Sapiens
cccccacctccagtaggtttgaaggccctcccattcgtaccgaacacactctcctccacgctgacagccttcctaggctcctgcagttacccttcccacccagaccctccttccccaccccataagccccgagactccccgcctttgacctgacgatctccccccttcccgccttcaggctccccctaggcgctcagaggccgctctggggggttgcctcgagtccccccacccctccccactccacccagctcccgcggcaagccagcccgtgcaaccgaagccagcccaactgcccccgcgtcttcagctgcttcgcatccaccgccaccccactgagagctgctccttcgggggaatgtctggcaacctttgtgttacagattaaaaattcagcaatt

SEQ ID NO: 177319 - DNA, 859 bp, Homo Sapiens
  misc_feature (273)..(281): n is a, c, g, or t
gtttgatgtaatgtatgtgtagacaggctggtcggtccggaatcctcgggatatcgtcgacccgacgcgctcgctcattggtttaacaatgcatcatagacgagcacttttcctgttccctggagaatgggatgtgaagcagtgagaccgcagaccacgcctgatggttcatacacgtgaaccaaaacttcacctcttcctattgagtttgcttggaatgctgacagcatcaggcaactctgaactgaacatttgctttgtcagaaaatatcnnnnnnnnnactttgaagtttggcaaccttcatgttaccccaaagcaaaaccattgtgtcaggagtcaaacaaatgtttagaaagcaaacatgacgtctctattgtacaacctcctttctcttggctgtttaaaggatgtacttcgtgtattaaagggtactttatgttgaagtaacgaaaaaaccctaatgggtgttcctaaacctaaaccttttctttattccacatttgctacggtaaaatcctgttacaaaactaccctataaagaattattttctatagttaagcattttctgaatcctagccattggtccatagaggtctcttttttttggtttgggatataatggatgatctcaaatatggattactctgatttatgtctccttagcaccttgttaacaattttttttaaaatagaaggctgtttgcattttgggccagactgccagtaagccaggcctggactcaattacaattcttaacttgtctgtcatgcacctcttttcacctcaactatacagcctctgaactctcaaattacacagtaaattcaaaaaaatatataggaatctggaagaagac

SEQ ID NO: 177320 - DNA, 606 bp, Homo Sapiens
gaatttccccctggggcaaaattccgcaccaggttgttatagccacgaatttggttccccagtcaggtaaccattgcacgcaagtcaggcttccaacccacccgtcactgccaatctcatcacctgctgaagggactggggtggtgcagatgaaaccagcgatcagcttggctgcccttgcttcctagtgccacagtagaggctaggggagcaactggctttcctccccaaaaggcgggcagggttatccacactttgcccaggtccctgaacatgcggctgagctcggggataacaggggccaagtcaccggtcccagacacctaggaactattagagacaggaaccagcatatgagacaggggcttttaagtaggaggttggagaacacacgtttttggtctaaaccgggggcccctctctttgcccactgaacccgcggcctgcgtggtgctgatgactccctctgacagcgtccgcttgggacagggcctgagcggtggctgatcccacctggatgtcctgggccggctcccacccgacgcccgccatcccgggacgtggtggggagagcgggcgctgctccttgccatgcttggcggtcgc

SEQ ID NO: 177321 - DNA, 1259 bp, Homo Sapiens
  misc_feature (228)..(228): n is a, c, g, or t
  misc_feature (1177)..(1177): n is a, c, g, or t
gccgcgcaatgggcacccgtatgtggaacagatggagcgagcgaacgagcgctatcttttttgttggcagtcgctcgacgttctgcgcgtgtgttaacacaccccgtattgcagacgtgggggcgcgggagtatccccgtcgctcatcgtgcgcgttatgtgccgccaaggaagggattcgcttttactcatctcaccgcaggggggtttgttagataacgacacacnggcgcccatcccctatccacaggtcacagttcttcggggttggtacgcgtgtagtccccacgcgggaggatataaaaacggaggtggcatattgtggtgagcgctattggttggaagcaagggagggggaagtgtttgatgtcacgagagtgcagtgggatgtatgtgagagaggcggccactaacgaggctacaatggtgagggagcgacgcttggtgctttcccctgtgtggtatgttagagggcgcctgcgggtgctcctgtcggggatgttattgttaactctaggatgtcgcccgtgaaagggcgcaaaatccccacttgtgacggggcggggccactacggggtgggtagggggggcccacgagtcctggggctttgagggtgcgggccagtcctgggcggcagggtccgggcccttccaccgcgaggcccggggggacgtgcatgtcggtgttgatgggaggggggcggggatccattggattacccttgattcaggcacacggcacatccagccctgggtacctgggggtggagggggccatccccgagacctccccagcgcacggaatgtcctcgcgcagagcagagggaaggcagcggaagacgccagctgccagggcctggggcaactgggcaagcgcctggcgaatactggttgggggcaggatcattctgccccttgtccacgcacccccaccagccctctcgcttctaacacagggcacctgctggggctcagggatgttagggacgagttccagccctgccactgccctggggcgacccctccctgtccctgcctccctgctctgccgcccctcttcctggaccctcagtggctgtcccatggctacatcctgtgggtgggggccctcgacaggacagcaggacggtttgtttttcagtggaatcccatccctgggttcccctggttcccactncttcccaagcctcccgggactgggacatgttttgcaattaaaggaaaggtttgtggcgcctgtcatggcaggcatctcatgg

SEQ ID NO: 177322 - DNA, 1076 bp, Homo Sapiens
  misc_feature (457)..(528): n is a, c, g, or t
  misc_feature (1002)..(1022): n is a, c, g, or t
gtgggtaccagacgcccgatgcgaggaggggggatcaaaggtatggcgggaacggaaaggagggagggtgtcagtggggcgttggtcgcgggctattaattagggtagtgcggaatgcgcgagtggtgggagcgggagagggataagggagagaggatggtgaatgggtactattggcgggtcgaggaatataggaggggaagggcctagggggggtcgaatagtatggcggcggctccggaaatagatgcgttcggagcttggttgctggtgggggacgtgcgaaggtagggggcggtgagtgagtgtatttcttgtccgggtcgggggtgatggtttaggaagtattcagtgatcgaataggtaatgttgggaaggtgttaccgggagggatacgcggtcgcgcagtcgggttgggggcggggcgtgatgggctgtgcgctacgtgtggtgactnnnnnnnnnnnnnnnnnnnnnnnnnnnnnnnnnnnnnnnnnnnnnnnnnnnnnnnnnnnnnnnnnnnnnnnnaaccctgctgagcaccggctccaccttgattccccaagcagaggtaaggcaggggaagacgcccgctaccagggccaggggccactgggccagctcctggcgatactggttgggggcaggatcattttgccccttgtgcacgcacccccaccagccctctcgcttgtaacacagggcacctgctggggctcagggatgttagggacgagttccagccctgccactgccctggggcgacccctccctgtccctgcctccctgctctgccgcccctcttcctggaccctcagtggctgtcccatggctacatcctgtgggtgggggccctcgacaggacagcaggacggtttgttttcagtggaatcccatccctgggttcccctggttcccactcttcccaagcctcccgggactgggacatgtttgcaataaaggaaaggtttgtggcgcctgtcatggcaggcatctcatggnnnnnnnnnnnnnnnnnnnnnctcgagactagttccctcgtgccgggatcgccacccaggctcgtacctagacct

SEQ ID NO: 177323 - DNA, 554 bp, Homo Sapiens
tgtccacaattttaccccccccttatggagaattgccccccaggccaaaaatttgcgcccgggggttaaaaagccgcctttgggggcaactggaaccgttaacctggctgaattcaaaacccccaacaaagcccccgctggcgtgaacccggccccttacattttgcgaagtgcattatagcccttgtttttctctccctcgtgggggcaacgacccctcccctggcagtagggatggggtaggtgactctcgctagatccctccaaagcagaccggtggcgatgtcagcggatgtcacgagctcgttagctgcgttcggggaaggttggggcgtcagggagctctcggatcacagcagcccccgccctctcctaggcctggcccggcagagcccccagagtggaccccccagcgactggggtcttctccccactcctccctccttctggtctgatgcggcagcgcgggggctgcggggcctgtttgggacgaacagagctctcccttggtaagacttattttgttaataaatggaatacttggctatattcac

SEQ ID NO: 177324 - DNA, 409 bp, Homo Sapiens; identical to SEQ ID NO: 127135

SEQ ID NO: 177325 - DNA, 595 bp, Homo Sapiens
  misc_feature (77)..(259): n is a, c, g, or t
gctggagcacagggcgcaatctcagctcattgaaacttttgcccccggattaagcgatctctgtgctaagcttcccnnnnnnnnnnnnnnnnnnnnnnnnnnnnnnnnnnnnnnnnnnnnnnnnnnnnnnnnnnnnnnnnnnnnnnnnnnnnnnnnnnnnnnnnnnnnnnnnnnnnnnnnnnnnnnnnnnnnnnnnnnnnnnnnnnnnnnnnnnnnnnnnnnnnnnnnnnnnnnnnnnnnnnnnnnnnnnnnnnnnnnnctttagggctcttcctacaaccttgagaagtagataggcatcagagtatggtactataggaatcagaaaaattcaaaacaaatgtggattaagtgtttaggctctatgtggtcacgcagccagaatccttaagtctgtgtgtttctgtgtctcaagactgggctcacattctggctttgtccataacaatgctctgggatttcagggagttccctcatttgtaaaatgagggggtcagagcaggtgatatccatgtttcttccctttctgatattgttgtctgtggcatattctttgtatggcgaatttaataaattatattaatgtgtctctttg

SEQ ID NO: 177326 - DNA, 703 bp, Homo Sapiens
  misc_feature (573)..(573): n is a, c, g, or t
tagtaatagctttttattcggagtcctcattttccagatagatcacattaaacacagccattaaacaatagcgttgagataaatccatacaatgtatgctgcttttgttgttgtccttgttcaccaatcacttggtgcagctaagaactttatggagtgatgggctgataatggaaatagccaacctgcaaaacactggggccaggaaagtcagactttaatcaggtctcattcaataatatttagaatcaacacatcttgatagccaaaactcctcatccgaattaagtgcccggaggaatgcggtctgtggtcaaaagaatataataagactattatgacggggcatatattatggccagacctgtctatctgttgacctcagtaacttttactctattagataacaaacagcttttaaccctggttctaaaaaagcatatgctctattactacatgacttttttatgggtgccatattttaaattgaacaatatctagatcctttaaagggaagtcatgttttacaagatttcagctaattttggaaaacaaaacaagttagtttctcanccaggaattcaattaacctatggagtagtgagccaatctttgtatattgcctgcaataaagttagaaatgtcagggttaagaaatagcatgaaagaattctttgaaattgcatgatatgtctctttaatc

SEQ ID NO: 177327 - DNA, 345 bp, Homo Sapiens
cctctttattgctggcagtaaaaatatgtcttttggagagcagaacatgccagaatgtataaggtgcaactgtttgatatgaaaaccataggataggaaactatgcctatgacactaaaactccaaaaagtagaagaccacattgatgatgtcactgcattttaaaatggaaagaacaagtgttcaagaacaggaatttgtgtgaattgcatttattcctataataatatgaactcaatgagatgatgacatagacacaataacaaaaggagaaaaacaatgtggctttttttagccttcataacctaatcaaataaatatctttgtgtgttttatgttaaaaaa

SEQ ID NO: 177328 - DNA, 574 bp, Homo Sapiens
gcttctgtcggaggtctcacgatgcctctcggcattaaagtcctcgacccggtcagatacattccagttcacagtggatttctcccacttggccaatgactccagaaacatgttatacatcacttgccacctgaaggccacccttgctgagcaggacccagatgaactcaacaaggcttgttccttcagcaagccttccaacagctggttcccagtggaaggcccggctgacatctgtcaatgctgtaacaaaggtgactgtggcactccaagccattcccaggaggcagcctcgtgtcgtgagccagtggtccacgtctgcttcccgtaaccgcaggcatgtgacagaagaagcagatgtcaccgtgggggccactgatcttcctggacaggagtggtgaccatgaagtagagcagtgggctttgccttctgaaacctcagtggtgctgctgggcgtaggcctggctgtggtggtgtccctgactctgactgctgttaacctggttctcaccaggaggtgtcgcactgcctcccaccctgtgtctgcttccgaataaaagaagaaagcaaaaa

SEQ ID NO: 177329 - DNA, 923 bp, Homo Sapiens; identical to SEQ ID NO: 3584
  misc_feature (559)..(568): n is a, c, g, or t
  misc_feature (682)..(720): n is a, c, g, or t
  misc_feature (723)..(751): n is a, c, g, or t

SEQ ID NO: 177330 - DNA, 598 bp, Homo Sapiens
gcggcgcgccgccgcagacagctggtgtcccgccggagaaggccgagatatccccgccggcggaggagcagccccagcgccaggcctcccgacgtccccgggcagcagcccaggccgcgaagtccccgtctccagttcagggcaagaagagtccgcgactcctatgcatagaaaaagtaacaactgataaagatcccaaggaagaaaaagaggaagaagacgattctgccctccctcaggaagtttccattgctgcatctagacctagccggggctggcgtagtagtaggacatctgtttctcgccatcgtgatacagagaacacccgaagctctcggtccaagaccggtttcattgcagctcatttgcaagtcagaaccaaatacagaccaacttgattatgatgttgggagaagagcatcagtctccaggtggcattagtagtgaagaggaagaggaggaggaagaagagatgttagtcaatgaagaggagataccattcggagatgatccgagagatgagaccgaccaaccccacttagagaggggagacccgaaggcaccgagaaattcagggaaggtaagagagggaagggaa

SEQ ID NO: 177331 - DNA, 430 bp, Homo Sapiens
  misc_feature (17)..(17): n is a, c, g, or t
  misc_feature (29)..(29): n is a, c, g, or t
  misc_feature (50)..(50): n is a, c, g, or t
  misc_feature (58)..(58): n is a, c, g, or t
acccaaggaccatttgnaacccaaaagcnataaaaaagggcttaaaatanggtctgtnctgagggcaaaccctggtggtggccggctctggaaaacctgtcgcctaaaggtctggaaggctgcaggcctgagcaggtgggcgtggatgtggatactgcctgccggaggctgggcttcctcctctgttcttgggggaccatccccaatgttggtgctgcctcccgcccgtgggcctagggcacaaggagtcccagccacattcgggtgagcgtcctggcctgggccctatgcccgggggaagggtgaaattggggttcaggcccacccagggggccgcttcccactcttgggccctggttttgttatgatttggatgccccgctctcagttgagagcgaaggagaaataaacctgacatgttggtgcttgg

SEQ ID NO: 177332 - DNA, 401 bp, Homo Sapiens
gtggtgagactattgttaaaataaatttgagaaagacgaaaattttgtgagtctcgataattacaagtcaacagctatcgaaagttagcacagcttgtctgtggtgctgtttttttccccactgcagtggacttatgctgttttcatgtttagaaacaaaaaggtttcatgtgattcatgtgtaagatgcacagtatttgacatcctgattatgtaatccctattccatctatccagtcttacacttatggttggcctcaaatctattgcatttatgataatgtattatatctagttgagtttaatatttttttattagcctgtaaataaagatggcatcttctacattaaaatgatattgatctcatttttttaaataaacattttgtttccttgacgtt

SEQ ID NO: 177333 - DNA, 451 bp, Homo Sapiens
  misc_feature (320)..(320): n is a, c, g, or t
  misc_feature (353)..(353): n is a, c, g, or t
  misc_feature (370)..(370): n is a, c, g, or t
  misc_feature (382)..(382): n is a, c, g, or t
  misc_feature (389)..(389): n is a, c, g, or t
  misc_feature (433)..(433): n is a, c, g, or t
atctcagaggtaaaactctttaatctcagagcacccctcccaactgccgatcccccaacccctcactctctcccccacaccagggccggagagtgagggcccctgcccccaccttgggtgaacgagggccctttaaggcacctgtggaggtggggggcgaggggcgggactgagtaccatcctgggatgcagggacgggcttcgattgggcaggctgttgtgggggatggatggaaccaatgaaagggggtgccagaggaaggggacagtttgggggccatccctgagggggttcagggaacaagttgtttcgggacgtngggcaaagacgaccccagtccccgtagtttttnaaagaacgtaaattttnaagggccccggnaaatttntttggggaagaggaaggtttttggcaaacgccccccaggggaantttgggagccattttggg

SEQ ID NO: 177334 - DNA, 738 bp, Homo Sapiens
gtgtgccttgttggaagtgtcaactgtctttatgtctgcttgtaaaagtttcaaaatatgttttccctcaaaaaggcaacgttacttcatttgcttgaatattatgataggaatgcttactgatattacttgatagtcatatatagcctaggaaatttaacatatatataactatagcagtattaataatgatagttgtacttctttaaaacattaaatttgaggaaactttaatgctgtctcgtgtacattgctttactacagtgagggggaatatcctttagattgagcctcaatttactggttagtagtatgtgaaactctggtataaaaacgtaaactagacagtagagccgatgaattaaaattgtaaatgctacattggcattttctacctccttttctgtcagagtattactttttccagcatttattcttatttgtgagtaaagaggaaatgggaacctgaggttaaaattgacatttttgtttcattgagaatttaagcagtaggtacaggagaagtgacttgtcacattaatttggtgcctaaatctgtaactacaagttgtgatcgacatgtacaaaatgtctaagaaaggtcatatgctgaatatcttacttttcctgtatagtctgcatgatttgttcataaacccagcttatttcctccaaaaagcaaaaatggtcctgtaatttgacaagtacaataacgtgccatgttgtctgcatctatag

SEQ ID NO: 177335 - DNA, 702 bp, Homo Sapiens
gggaactgtcctggattgtgaggagaaagactgggacttctcgatgaatctcaatgtgcgcagcatgtacctgatgatcaaggcattccttcctaaaatgcttgctcagaaatctggcaatattatcaacatgtcttctgtggcttccagcgtcaaaggagttgtgaacagatgtgtgtacagcacaaccaaggcagccgtgattgacctcacaaaatctgtggctgcagatttcatccagcagggcatcaggtgcaactgtgtgtgcccaggaacagttgatacgccatctctacaagaaagaatacaagccagaggaaatcctgaagaggcacggaatgatttcctgaagagacaaaagacgggaagattcgcaactgcagaagaaatagccatgctctgcgtgtatttggcttctgatgaatctgcttatgtaactggtaaccctgtcatcattgatggaggctggagcttgtgattttaggatctccatggtgggaaggaaggcaggcccttcctatccacagtgaaccttggttaccaagaaaactccaccaatcatctccttcctgttaatcacatgttaatgaaaataagctctttttaatgatgtcactgtttgcaagagtctgattctttaagtatattaatctctttgtaatctcttctgaaatcattgtaaagaaataaaaatattgaact

SEQ ID NO: 177336 - DNA, 547 bp, Homo Sapiens
gctgccatgtttgagaagctacactcccccttgagaagttgaccctctgggcgttcattgctctagggcacccactgggctgcactggggcacgacaggtcatcacgctgctcaatgagctgaaccgccgtgggaagagggcatacggagtggtgtccatgtgcatcgggactggaatgggagccgctgccgtctttgaataccctgggaactgagtgaggtcccaggctggaggcgtacgcagacagtcctgctgctctagcagcaaggcagtaacaccacaaaagcaaaaccacatgggaaaactcagcactggtggtggtggcagtggacagatcaaggcacttcaactcatttggaaaatgtgaacactgatgacatggtataggagtgggtggggtgttgagccacccatcagaccctctttagctgtgcaagataaaagcagcctgggtcacccaggccacaaggccatggttaattcttaaggcaaggcaaatccatggatgagaagtgcaatgggcatagtaaaagtgcatgaatttaa

SEQ ID NO: 177337 - DNA, 933 bp, Homo Sapiens
  misc_feature (55)..(55): n is a, c, g, or t
  misc_feature (395)..(395): n is a, c, g, or t
  misc_feature (426)..(426): n is a, c, g, or t
  misc_feature (915)..(915): n is a, c, g, or t
ggaatagaccaggcccctctgcaaagtagaagtgggagggctgggatctcctcanccccaccccgatgccttcttaccccaacagtttgcccctaggaaactctagccaggtgagtgatggggcagctgccatcctgctggcccggaggtccaaggcagaagagttgggccttcccatccttggggtcctgaggtcttatgcagtggttggggtcccacctgacatcatgggcattggacctgcctatgccatcccagtagctttgcaaaaagcagggctgacagtgagtgacgtggacatcttcgagatcaatgaggcctttgcaagccaggctgcctactgtgtggagaagctacgacttcccccctgagaaggtgaaccccctggggggtgncagttggccttaggggcacccactgggctgncactggggcacgacaggtcatcacgctgctcaatgagctgaagcgccgtgggaagagggcatacggagtggtgtccatgtgcatcgggactggaatgggagccgctgccgtctttgaataccctgggaactgagtgaggtcccaggctggaggcgctacgcagacagtcctgctgctctagcagcaaggcagtaacccccacaaagccaaaccccctggggaaaactcaccactggtgggtgggggcactggacaaaatcaggcacttccactcatttggaaaatgtgaacactgatggactggtattaggaatgggtgggggtgttgaacccccccatcaaccctcctttagctgtgcaaaataaaagcaggcttgggtcccccaggcccacagggccaagggttaattctttaaggcaaagggcaatccccggggatgaagaaatggccatggggcattagaaaaaaggggcttggatttttaaacncccaacaacacaataaat

SEQ ID NO: 177338 - DNA, 137 bp, Homo Sapiens
aatctactgacaagttgctctagtaacccaaagaagtgaaggagaaagcagctgcctcaccgcccagacattgatttgttcagatgtttcaatgcctcatgatacaataaaaccacaaaaattttccataacagtct

SEQ ID NO: 177339 - DNA, 260 bp, Homo Sapiens
  misc_feature (118)..(118): n is a, c, g, or t
  misc_feature (123)..(123): n is a, c, g, or t
ggactcctagaagaaccaaatacctcaatttttgtttttgagtactgtactatcctgtaaatatatcttaagcaggtttgttttcagcactgatggaaaataccagtgttgggttttnttttnagttgccaacagttgtatgtttgctgattatttatgacctgaaataatatatttcttcttctaagaagacattttgttacataaggatgacttttttatacaatggaataaattatggcatttctattgaaatttca

SEQ ID NO: 177340 - DNA, 918 bp, Homo Sapiens
  misc_feature (151)..(159): n is a, c, g, or t
  misc_feature (167)..(167): n is a, c, g, or t
  misc_feature (219)..(219): n is a, c, g, or t
ggcgaaccgaaatatagggggtgagggggaaggtttccaagccaaagggcccgggggaactcatcttcctggggaccgcgttgtttgtctaccggttcaacgcccccaacccaggaaagtattccccggggacggtgggaagacctgttannnnnnnnnagcctgtncagtgctggcccgtgtgggctttccaagctgtggggaggagaacccccatcnacatcagtgcccagagggagtttgcgggggcgggggcccagccctgcagctgcctcccctgagggcagccccctgcgccgcaccccgctgcccaagcattttgagattacccaggagacagcccggctactctcgaaattggacagcgaggctgtgcccagggccacctgctgcccggacgtccagcctgaggaagccgaggaccatctctgaccaccctggcaccttaaataaggaagaggcccagattgtgaacacggacccatatatccctacctcccaccacctagtggccaaacaccccgccaggagttcaatgctgggagaggtccagagggttcctataaggaaaaactatttaatacatgacctaggggaggcctaaaacccttttggggataatgtcccagagtccccccactagacacaggtcactgccaagcatcagggccactcgggctcagaggtcactcagggtcaatactcagggtcagtgcaggttatgagatccttggggtccaccctagtctctgacacctgggacaggggtgcttttgctactttggttgtggtcactcccccacacctgcctgcctccttcacggactcgaagtgaccttcctggaggaggtgggcagctcagactccacatgctggtggtgcctgaggtctgatggcctctaataaactgtgtcctat

SEQ ID NO: 177341 - DNA, 770 bp, Homo Sapiens
  misc_feature (17)..(17): n is a, c, g, or t
ctaggtagcgagcctgngtggcgaattccgcacgaggtcccagccgggttcgtgtcgccatggggcagatcgagtgggccatgtgggccaacgagcaggcgctggcgtccggcctgatcctcatcaccgggggcatcgtggccacagctgggcgcttcacccagtggtactttggtgcctactccattgtggcgggcgtgtttgtgtgcctgctggagtacccccgggggaagaggaagaagggctccaccatggagcgctggggacagaagcacatgaccgccgtggtgaagctgttcgggccctttaccaggaattactatgttcgggccgtcctgcatctcctgctctcggtgcccgccggcttcctgctggccaccatccttgggaccgcctgcctggccattgcgagcggcatctacctactggcggctgtgcgtggcgagcagtggacgcccatcgagcccaagccccgggagcggccgcagatcggaggcaccatcaagcagccgcccagcaaccccccgccgcggcccccgccgaggcccgcaagaagcccagcgaggaggaggctgccgtggcggcggggggacccccgggaggtccccaggtcaaccccatcccggtgaccgacgaggtcgtgtgacctcgccccggacctgccctcccgccaggtgcacccacctgcaataaatgcagcgaagccgggaaaacaacggaacccatggtgcgcttgggctaaaacaagaatagaaaacactgaaatagat

SEQ ID NO: 177342 - DNA, 920 bp, Homo Sapiens
  misc_feature (650)..(699): n is a, c, g, or t
cccagccgggttcgtgtcgccatggggcagatcgagtgggccatgtgggccaacgagcaggcgctggcgtccggcctgatcctcatcaccgggggcatcgtggccacagctgggcgcttcacccagtggtactttggtgcctactccattgtggcgggcgtgtttgtgtgcctgctggagtacccccgggggaagaggacgaagggctccaccatggagcgctggggacagaagcacatgaccgccgtggtgaagctgttcgggccctttaccaggaattactatgttcgggccgtcctgcatctcctgctctcggtgcccgccggcttcctgctggccaccatccttgggaccgcctgcctggccattgcgagcggcatctacctactggcggctgtgcgtggcgagcagtggacgcccatcgagcccaagccccgggagcggccgcagatcggaggcaccatcaagcagccgcccagcaaccccccgccgcggcccccggccgaggcccgcaagaagcccagcgaggaggaggctgcggtggcggcggggggacccccgggaggccccccccgccaccccagccccgccaccgacgagcgccggccgaccctgcccccggacccggccatcccaccgggggcacagannnnnnnnnnnnnnnnnnnnnnnnnnnnnnnnnnnnnnnnnnnnnnnnnngtctgcaatctcttctctcccccttccgttcagcacccacttatacgtcttcctcttttctttaccttgccccccacacgccctcatataccttttaccacctctgctcacctatgacgcccccacccttactcatccacccgtacatacctcccttccaccgccacacccactacctaccttccccctgacttgcctcccccgcccatccccccgctaat

SEQ ID NO: 177343 - DNA, 523 bp, Homo Sapiens
cggggaggggaaggacgcctccaagcccgctccctgctcaggagcagcactcttaacttacgatctcttgacatacggtttctggctgaaaagcctggcccgctaaggtgaaaaggggtgtggcaaaaggagcctactccaaaaatggaggctgtaggaatataacctcccaccctgcaaagggaatctcttgcctgctccatctcataggctaagtcagctgaatcccgatagtactaggtccccttccctccgcatcccgtcagctggaaaaagcctgtggcccagaggcttctccaaagggagggtgacatgctggcttttgtgcccaagctcaccagccctgcgccacctcactgcagtagtgcaccatctcactgcagtagcaccccctcctgggccgtctggcctgtggctaatggaggtgacggcactcccatgtgctgactccccccatcccgccgacgctgtggccctgcctggctagtccctgcctgaataaagtaatgcctccgcttcaaaa

SEQ ID NO: 177344 - DNA, 162 bp, Homo Sapiens
gtactttactggatgactgtgaagcgatgagtattgggttggggtaggtgtgttgattttgagagtgcatgttaagaactgaaggggaactacttgagatgacttaagaagcatcccatgcaaatatcttgttttgccctaataaaatattcagaaagataa

SEQ ID NO: 177345 - DNA, 535 bp, Homo Sapiens
gcggccgcacgtccagggagagccgacgctgctaggggtggctagaggacatcaccactcatcctcggggcggcgcgggcggaggcccatgggatggtccaggtgtgccgcctctcggcccggccttatcctccttcctgcacctggagcagggccaggcctgtgctgaagctgctcgcctcggggcccatcccagggagcagagggtgggcagcagcaagaacccagggccaggagtgcgccgtcttcccgggaagcggaggccggcctgtgccgcgcgtgcctcttctcgcctgcagcagtggaaaacagagtcactcgggaggccggcagcagtgggagtcgagcccgcgccacactccttagcaccggcctgctgtgagtgccaggctccgggcagggtggccggtgtggagcgggttcacagctcctctgtgctgcctgggcccctgtgtggatgcctccagggcagttggccggtcctggaaagcagagtggctgctgcagggacgcccgtgtgcgcagagctcgcctt

SEQ ID NO: 177346 - DNA, 662 bp, Homo Sapiens
ggtacctttgccctgtgctcccaagaagatattgctgataaactaggtgtggatatctctgcaacaaaggcagtccacataagtaatcctaaaacagctgaatttcaggtggcacgcactacccttcttcctggcctcctgaagaccatagcagcaaatcgtaagatgccccttccactgaaactgtttgaaatctctgacattgtaataaaagattctaatacagatgtaggtgcaaaaaactacagacatctctgtgctgtttattacaacaagaatcctgggtttgagatcattcatgggctgctggacagaattatgcagttgctcgatgtgcctcctggtgaagacaaggggggatatgtgatcaaagcatcagaagggcctgctttcttccccgggcgatgtgcagagatctttgccaggggtcaaagcgtcgggaagcttggggtccttcatcctgacgttatcaccaaatttgagctgaccatgccctgctcctccctagaaatcaatattgggaccctgtttttgtgaagattggtctctgtggtgtgattctcttcccaggtgtccctttctcctcccctagtgtccttaagtcctcctccacagggaacatctatttgggctttgatgtttaataaagtagaaagcactgt

SEQ ID NO: 177347 - DNA, 1180 bp, Homo Sapiens
  misc_feature (899)..(990): n is a, c, g, or t
  misc_feature (993)..(993): n is a, c, g, or t
  misc_feature (995)..(1024): n is a, c, g, or t
  misc_feature (1093)..(1093): n is a, c, g, or t
ggggcctaaaaggagccggcaaaagcgcctacgtggagtccagaggagcggaagtagtcagatttgactgagagccgtaaagcgcggctggctctcgttttccggataacgactacagctccgactgtcagtgccggccttcctcgtgtgaggggatctgccggacccctgcaaattcaatttctttcccattccgggcccttccctatcgtcgcccccttcaccttggatcatgttcaagaaatttgatgaaaaagaaaatgtgtccaactgcatccagttgaaaacttcagttattaagggtattaagaatcaattgatagagcaatttccaggtattgaaccatggcttaatcaaatcatgcctaagaaagatcctgtcaaaatagtccgatgccatgaacatatagaaatccttacagtaaatggagaattactcttttttagacaaagagaagggcctttttatccaaccctaagattacttcacaaatatccttttatcctgccacaccagcaggttgataaaggagccatcaaatttgtactcagtggagcaaatatcatgtgtccaggcttaacttctcctggagctaagctttaccctgctgcagtagataccattgttgctatcatggcagaaggaaaacagcatgctctatgtgttggagtcatgaagatgtctgcagaagacattgagaaagtcaacaaaggaattggcattgaaaatatccattatttaaatgatgggctgtggcatatgaagacatataaatgagcctcagaaggaatgcacttgggctaaatatggatattgtgctgtatctgtgtttgtgtctgtgtgtgacagcatgaagataatgcctgtggttatgctgaataaattcaccagatgctannnnnnnnnnnnnnnnnnnnnnnnnnnnnnnnnnnnnnnnnnnnnnnnnnnnnnnnnnnnnnnnnnnnnnnnnnnnnnnnnnnnnnnnnnnnccncnnnnnnnnnnnnnnnnnnnnnnnnnnnnnntatggtggggcgcctggggcccctaaaaaatttttttaaaaacatttcttttggccgcggggccccccntggggaaaggggaaacggggccacaaagggggtcctccaagaaaaaacacggggccaaggaaaaaggggttggggattctcccaccc

SEQ ID NO: 177348 - DNA, 552 bp, Homo Sapiens
gcgtccgccgcagcctcgtcagcctgcgcacgcccctcacaggaggcccagccagtagagcagtccagaagcacacccagcggaggcgacaccagtaaaagagcaagcttttgtaagataatcgaagaacttttctcccccgtttgtttgttggagtggtgccaggtactggttttgaagaacttgtctacaaccagggattgattttaaagatgtcttttgttattgtactaattggttaagcaccaaattgtgttgttttttgtttgctcccctccccacagatcccatctcaaatcaaactgttaaccaccaagccaacaggtcaagaagagcttagacaccttattcctctgccttgtttctcttgttattgggtatgttttcgcatcagtattaatgtgtttggcaaggttgcatctgtatgtcaaagtgtagactttctttggtcaggcatggacatgcgcattagggaagaggatggtgggtcagaatggatatcagtgaagggagagggggcacgaggggaaattgaaatggtgcagaacattg

SEQ ID NO: 177349 - DNA, 426 bp, Homo Sapiens
  misc_feature (64)..(64): n is a, c, g, or t
ctcctctccctcaccagagggagagggagagtggcatagctctgtgtccaaaagtgtccccagncttgcctgtggctcaatgccttggcgtgggcttgtgcccttgcaagggcttgccacttggcccttctggagcagacactttgtgccccccatccccacccctcaatctcagcccagtatcagcccctcccattgcgggcctgggctagggggacccaggcactcaccgcctcctccctggtacacaggcttctgtgggccaccaagcccctcctgtgccccctcccatccatagtgcatggtgtgtggtgccccagggctccaggacagatcaggccccaccttgtgtctacccccatccccgctgtgaacgtgccactgaataaagtcggggaaacgaggcactgggtgtgtgtcaaagcc

SEQ ID NO: 177350 - DNA, 391 bp, Homo Sapiens
  misc_feature (30)..(30): n is a, c, g, or t
ggaaaacaatatgctccattcttacaaagncattgattgtattttaatatatacaatgtaaatactatcatgcagtggtgtccaagggagagaatacagtcatgagttcttagtttctgttattggttgggccaataaagccccttcatcatccttcttttctgcttatcactagagacagaaactaaaaaccatggcttcaggctgctaaaagcctaaaacaaaacagaacaacaacaacaaataaggcaggttgggacaagcttgctgagtatttggggagcctttttccaaaagtctgatttgggggggaagtaaagtcacttattttaaggctaccttagtatagcacctaaagagttactttgtgaattttgtatggctgcaattg

SEQ ID NO: 177351 - DNA, 243 bp, Homo Sapiens
ctggtaagatttggacctaaatcgcatcatgccaacttgtgactttgagactattcatcaagaatgaggatatagtagccatgacatagcttgagctatagcctttaaatccttactttggctatgggtggagggtgagtttgaagaggttctgattttcttgtaacctgggaaagccatgaccttgtgcccgattctttcagattgctttgggtaataaatattggtggtggtatctgactc

SEQ ID NO: 177352 - DNA, 668 bp, Homo Sapiens
  misc_feature (56)..(69): n is a, c, g, or t
  misc_feature (115)..(123): n is a, c, g, or t
ggggccagaggtagccggagtgtgtcacagcccctcagatgcctttccttccaccnnnnnnnnnnnnnnaagaatcccaaataactcactgaagtgtctaaaaggcgaacaagtnnnnnnnnntgaatcctttttcagttaacagatcaaatggatgagttctgagcctctcaagttcctttccccagttagagtggggaactgggcaagtgttaactgtgggactcactgcagcgtcctatcctaaaggcacgagaagacggaaatgcaacctgcggagctgggcttggttcccaggtcacagtttggcccccgctacaggatgctgccctgctcagagagagatttaatagggagctgaaggaatcgttagggggccagggagatgtgactgaggctggctttccacgtgaatgagacggggtcggtggagggtttggtgctacagccagtcagaagatttgcaaatgcgaacacattcctgtgtgaggcacgttaccctttgtcagttattgtgaatatgtgtattttaagcaataagattcagctggtcagacttttctgggcagtctcagtgacgcatttcctgtgctgtgattgttctgaagacagagtggctctaaccactgtgagaagcccaaataaaaattgatcccaaaaatgctccc

SEQ ID NO: 177353 - DNA, 456 bp, Homo Sapiens
attcggcacgaggcatcagctgaaaagaggacccaaaaagaaattggagatattgctggtgttgctgatgttacaatcagacagtcctatagactgatctatcctcgagccccagatctgtttcctacagacttcaaatttgacaccccagtggacaaactaccacagctataaattgaggcagcctaacgtcaaatccttgaatacaaaactttgccctgttgtacatagccctatacaaaatgctgggttgagcctttcatgaggaaaaacaaaagacatggtacgcattcccagggctgaatactattgcttggcattctgtatgtatatactagtgaaacatatttaatgatttaaatttcttatcaaatttcttttgtagcaatctaggaaactgtattttggaagatatttgaaattatgtaattcttgaataaaacatttttcaaaact

SEQ ID NO: 177354 - DNA, 497 bp, Homo Sapiens
  misc_feature (41)..(58): n is a, c, g, or t
  misc_feature (211)..(262): n is a, c, g, or t
  misc_feature (330)..(444): n is a, c, g, or t
ggcaatcacaaacttggcggcaaagtggcgactcaaccttnnnnnnnnnnnnnnnnnnagggcgcgaggcttttggagcggctgtgggtgtcgtctggactgaggtttttaaatatttctttctctaacccatcagcacaataaaaaaaagtcactggttcaacaacagggtttaaaaaaaatgtcttcagctttaattcaaaacttcagnnnnnnnnnnnnnnnnnnnnnnnnnnnnnnnnnnnnnnnnnnnnnnnnnnnnacggtatattgtaaacttttatgttaaagaaaaaatatacatttacaaattgtgagatttttaagagnnnnnnnnnnnnnnnnnnnnnnnnnnnnnnnnnnnnnnnnnnnnnnnnnnnnnnnnnnnnnnnnnnnnnnnnnnnnnnnnnnnnnnnnnnnnnnnnnnnnnnnnnnnnnnnnnnnccacacaacatttataaaaccaacacactcccttccttctttcttgttgggcg

SEQ ID NO: 177355 - DNA, 454 bp, Homo Sapiens
  misc_feature (198)..(220): n is a, c, g, or t
ctgattggaaatatttaaatgactatagatctgattctttcttttcctttggaaactgggattaatgtatgctctagatccatttattagaaatgcaaaaatactacaattttttgatggatgaaaatactcctgtaacacaaacagagaactggaggaactgaagaataactcactcatatagctctgcctcattcnnnnnnnnnnnnnnnnnnnnnnntagcagaggtattttactcagaaaataggtttcaaagaacattaatgactttcttttcccttttatgtctgcttaatcagtgttaaactgctatgggaaaagttttatagaactatataacctgaatgttggtctctttgtacacatcttttctatgactgcaaatcttcactttatgtatcatttttactgtcatattatttttgttcaataaaaactttgtgataaaaggtg

SEQ ID NO: 177356 - DNA, 491 bp, Homo Sapiens
tatccaagatagtacttcattcacactcattctgatgtccaatcttgccatcttagaccctgctatctctacccacagaaaacctgacttccttagtgacttcagcaacagcgcacacttcctgagcacatactctgtaaggtactcttcttggtttttttgtagattagttcattagttgtctctacactctggtcagtggggtactaccattaacccatatagctgatggatatgtggcccacagatgatttgtgaattgctcaaggccatgtagtgagctggtgacctaactgggatgcctacaccagcaatctggttcagtgcctttactcctaacgttgatgcagtactctgctcagtttctaaaggacaatcatgggccaggtccatgtacttctgtggctgaggaaggccttcattctaagtccaggtaacctgaggctcagagatactgagacctagctaaagtggataagtggcagctagct

SEQ ID NO: 177357 - DNA, 523 bp, Homo Sapiens
  misc_feature (23)..(23): n is a, c, g, or t
  misc_feature (31)..(31): n is a, c, g, or t
  misc_feature (44)..(44): n is a, c, g, or t
  misc_feature (101)..(101): n is a, c, g, or t
ccctacccaaccctgtccaaccnaaccccancgttccctgggcnccccctctgggagcttcctcttggtccccaggaactgcggtggtgtctgccccctgnaactgggctctgtgccctgtgggtgttcaggaaactggactgtctctgctcctcatgcaaaccttgtgggggaagcaatgacccaggagcagcaccctggcccctccctgaggcctgtgagtgtctcggatccgccctggagaagtgagtggctgagacccgggtggggccctcctacccttggctctgggggcttcccttctgggtcttgtccgggatatggccttcctgaaggtcttacctcccccagccgccctgcacttgaccaccaaagcaatctctaagcttataaaggagaaacatgtatatatggggttttttggagtaaaggaaaattctaagatattaagactatatttttatgtagatctgatctatctgtgtttggtgaatttaatattctacattgatttttcaaacta

SEQ ID NO: 177358 - DNA, 1133 bp, Homo Sapiens
ccttctgcgagccctggttgcagagaaggctgactgccatgaagccttgctggctgcttggaagaaaaaccccaaatacctgctggctgagtactgtgagtggcttccacaggccatgcaccccgatatcgagaaagcctggccccccaccactgtccactgaccagaaacctggctgcagggccgaggactggtttggggactggagggctggcagcagcctgtcaccgtgcgaccgtgaccacctggcatgggcttcgtggcctgctctcaggaagtgggtcaagccctgggaaccctcatccatgagagctcgatcccgtatgaagggtgctgccgcccgtgccatctggcccgggggtgactttttgaactgtttattatatggtggatgatgatttcatctcacgtgctggacgctgttctgttcagtgtgctctttggactacattagtcccctgtggagcagcagggctggagatctctgcagtcccttccccgcccgccctgccagaaggccgaggaggcacgtggagggcctccttcctgcaattcttccctctccagagtcagggagggctgcccagccctggcctcacagccgtcccagatgttaggtgagccactgagctctgtgttgaccttgaggggcctggctgggggcccccaggctccatgccttcttgggagggtggccgccaacgcctttcctgtgttatggcaacagggagtgggcatctcatctgcctgtggtcagctctcagacggcagggagcggagctgacgttggctgtgcttggtcaccgctgccatgccgcagaggatgcgcctagctgggctggggccacacgactattatgttggccttgaacggggactgcagagccctcagtttgtctcccttgttcctctgtggctgaggtgggagggggagggtggggtaggtcccccagcaagaaagagggacaggagcaccccaggcaggaccaaggagtcgggaggcccctgccttctgtcctccatggtgagggcacagatgtctccccagagcccagcgctggcagaatggattctgctcctggctttgcttctgcggcttcggtggagacagttatggaataaaatgttccttg

SEQ ID NO: 177359 - DNA, 1367 bp, Homo Sapiens
gcctgggtggcgaattcggcacgagggttcatcccccacctcccatggaagatgagcccacctccaaaaaactgaagacagaggacagcctcatgccagaggaggagttcctgcgcagaaacaagggtccagtgtccatcaaagtccaggtgcccaacatgcaggataagacggaatggaaactgaatgggcaggtgctggtcttcaccctcccactcacggaccaggtctctgtcattaaggtgaagattcatgaagccacaggcatgcctgcagggaaacagaagctacagtatgagggtatcttcatcaaagattccaactcactggcttactacaacatggccaatggcgcagtcatccacctggccctcaaggagagaggcgggaggaagaagtagacaagaggaacctgctgtcaagtccctgccattttgcctctcctgtctcccaccccctgccccagacccaggagcccccctgaggctttgccttgcctgcatatttgtttcgctcttactcagtttgggaattcaaattgtcctgcagaggttcattcccctgaccctttccccacattggtaagagtagctgggttttctaagccactctctggaatctctttgtgttagggtctcgatttgaggacattcatttcttcagcagcccattagcaactgagagcccagggatgtcctacaggatagtttcatagtgacaggtggcacttggctaatagaatatggctgatattgtcattaatcattttgtaccttgacatgggttgtctaataaaactcggacccttcttgtgaaatcagttaaataagacttgtctcggtcacctgtgccctgtccagactcgaagcagtggtaacactgcacagtgctatgtggcttctctttgaagatttttgggttttgtaactaaattcttgctgcccctcatactttttatggattagaatcatattcctattggccctttttaaaacattggggatccctccaaaggcctgccccatgtatttaacagtaatacaggaagcatggcaggcaccatgcaaaccaaggatggatggtgcagtccctgtgtcagtgggcggtggtttcctgctggcctggaatcactcatcacctgattgattggctctgtggtcctgggcaagtgccctcataagtgggtggatatgatgacgtttctttaaaatggatgcactttaacaaatactttaatttttattaaggggccatgtaaccaagggattttgaataaaagggttgaaaataatttttacctcttcctacaaaaaaatgcgaaaccaaaaccattccaaccttccaaggaaaaccaaaagttcccctta

SEQ ID NO: 177360 - DNA, 976 bp, Homo Sapiens
  misc_feature (299)..(300): n is a, c, g, or t
  misc_feature (305)..(305): n is a, c, g, or t
  misc_feature (907)..(907): n is a, c, g, or t
ggcctgggtggcgaattcggcacgagggttcatcccccacctcccatggaagatgagcccacctccaaaaaactgaagacagaggacagcctcatgccagaggaggagttcctgcgcagaaacaagggtccagtgtccatcaaagtccaggtgcccaacatgcaggataagacggaatggaaactgaatgggcaggtgctggtcttcaccctcccactcacggaccaggtctctgtcattaaggtgaagattcatgaagccacaggcatgcctgcagggaaacagaagctacagtatgnnagggntattcttcatcaaagattccaactcactggcttactacaacatgggccaatggcgcagtcatccacctggccctcaagggagagaggcggggaggaagaaagtagacaagaggaaccctgctgtcaaagtcccctggccattttttgcccctcttcctgggcctcccaccccctgccccagacccaggagcccccctgaggctttgccttgcctgcatatttgtttcgctcttactcagtttgggaattcaaattgtcctgcagaggttcattcccctgaccctttccccacattggtaagagtagctgggttttctaagccactctctggaatctctttgtgttagggtctcgatttgaggacattcatttcttcagcagcccattagcaactgagagcccagggatgtcctacaggatagtttcatagtgacaggtggcacttggctaatagaatatggctgatattgtcattaatcattttgtaccttgacatgggttgtctaataaaactccgaccctttcttgtgaaatcagttaaaataagaacttgtctcgggtccacctgtgcccctggtccagaacctcgaagggcaagtggntaaaccactggcaccagttgccctattggtgggcctttcctcccttttgaaaggaaatttttttggggc

SEQ ID NO: 177361 - DNA, 719 bp, Homo Sapiens
cttcttgtgaaatcagttaaataagacttgtctcggtcacctgtgccctgtccagactcgaggcagtggtaacactgcacagtgctatgtggcttctctttgaggatttttgggtttgtaactaaattcttgctgccctcatactttttatgtattagaatcatattcgtattgcccttttaaaacattgggatcctccaaaggcctgccccatgtatttaacagtaatacaggaagcatggcaggcaccatgcaaaccaaggatggatggtgcagtccctgtgtcagtgggcggtggtttcctgctggcctggaatcactcatcacctgattgattggctctgtggtcctgggcaggtgcctcataggtgtgtggatatgatgacgtttctttaaaatgtatgtatttaacaaatacttaattgtattaaggtcatgtaccaaggatttgataaagtttaaataatttactctctacttttatccattttatccattttaactcatgtaatcctcatgtgagtattcctgtttaacacttgagtaaactgaggcacagagaacataagttgcatgccatagtcacacactgtgaaagtgaaaagagaatgtgtgcaaaacacgtcacagtcctggtttctgagtaaaggcaggctgttatctttagaatcagctatcacagggagataggcatgctggggtgtggaggaaggtgaagc

SEQ ID NO: 177362 - DNA, 570 bp, Homo Sapiens
gaagttactcatttcaaaatggatgaattgttattatgtgtgaagagactctgagtttatgatctgtgccataaaatttcagtgtaataagacttcttcaatacatcttccaataaggggtgcttctttgtgacagtatttttatttctgacattcattttatttgggtacatagtgtggttgttgataccttgcaatagtattgcttctgaaagtaataaaaaattttaggagaatttgagaagtttacagaattacttattcattgttttcttagtaagtcagtttaatgtttatttttctcattatttcatcactgcaataaagaataagggtgtttgagctcacctccatgcaaagacttcagttttaaaacattatttgcctaaaattagcattgtgatgctttctgaaagaaatattttataaatcctgtttaacagcagaatttctgaatgtgtagagactactacaaaattggaaaaagattggcaattctttgtaaagaatttgtgaattgtgtataaatttattctaacatttaataaaaatgtattttaacctaaaaaa

SEQ ID NO: 177363 - DNA, 673 bp, Homo Sapiens
ggggttgcctcgcccaaagaagactacaatctccagggaaacctggggcgtctcgcgcaaacgtccataactgaaagtagctaaggcaccccagccggaggaagtgagctctcctggggcgtggttgttcgtgatccttgcatctgttacttagggtcaaggcttgggtcttgccccgcagacccttgggacgacccggccccagcgcagctatgaacctggagcgagtgtccaatgaggagaaattgaacctgtgccggaagtactacctgggggggtttgctttcctgccttttctctggttggtcaacatcttctggttcttccgagaggccttccttgtcccagcctacacagaacagagccaaatcaaaggctatgtctggcgctcagctgtgggcttcctcttctgggtgatagtgctcacctcctggatcaccatcttccagatctaccggccccgctggggtgcccttggggactacctctccttcaccatacccctgggcaccccctgacaacttctgcacatactggggccctgcttattctcccaggacaggctccttaaagcagaggagcctgtcctgggagccccttctcaaactcctaagacttgttttcatgtcccacgttctctgctgacatcccccaataaaggaccctaactttc

SEQ ID NO: 177364 - DNA, 681 bp, Homo Sapiens
  misc_feature (109)..(122): n is a, c, g, or t
  misc_feature (131)..(250): n is a, c, g, or t
gggggaatccaaccctattccttgccccggtttttttgggaaacgggaaggcccagttccctttcctttttgggcccgggccccaaacaaagggtttaaaaaatttttnnnnnnnnnnnnnnccccccaannnnnnnnnnnnnnnnnnnnnnnnnnnnnnnnnnnnnnnnnnnnnnnnnnnnnnnnnnnnnnnnnnnnnnnnnnnnnnnnnnnnnnnnnnnnnnnnnnnnnnnnnnnnnnnnnnnnnnnngaatagcaaatagtttattggtaagtacacggtttcaacgggagtaataaattcacatgaaaaggagacaataatcaagtcaaaagaataaatgcttactaatcatcagaaaatctgtggccattagggctggcacgtaaaaatccaaaatcactcagaggccaaatctgtaaaatcaaaatgaggttgaagacaattagtgaaagtaatgttatagtatcatcatattcccttttgctatctgtcccttttctctatgccagataaacactttctccttactcatcaatcaagaataaaattttctacatcaaagtaagacttgagaaaataaacttatgtgtatatatgtttaaactccaaagtttgggacattcaaacaatgtacatgaaattatatgtgtgtggtgtgtgaataaatatgtatgaat

SEQ ID NO: 177365 - DNA, 487 bp, Homo Sapiens
agctggtcagcaaggagagggggtggggttccgtggaaggttctggaggggtcttggtaggtctgcagtgaaccgtcctgaggatggagtggggtcccatggtgcaggtctctgagcaaggcggaggtgtggaggagaggccggcttggggtgggcctcgcgccctagttgccggcgcctctaggcacgctctgcctggtgctccctgcagtgccttctccatagccccgccctccccgcgtgtgcgccaggcctggggtccccgggagagcagagcttgcgcctcgggcatagggacgtggggtgcaggcgccaacatcagtggcagcagccagggccgtggtccagtcccactcggggatggagtgggccggcggccaaaccagtcactcggggaggaatgcggaggagcgctcattccattctatttaattgcagtgtacaaaattgtgtttgtatatagaataaactgtctgttgacagcggt

SEQ ID NO: 177366 - DNA, 1193 bp, Homo Sapiens
  misc_feature (490)..(666): n is a, c, g, or t
  misc_feature (680)..(696): n is a, c, g, or t
  misc_feature (778)..(849): n is a, c, g, or t
  misc_feature (973)..(982): n is a, c, g, or t
  misc_feature (1035)..(1049): n is a, c, g, or t
gtaccgagtacacgacccaggtatgtaccaagtaggcacccttgggcgcacccactggggccaggggtcgggggagtgttgggagcctcctccccaccccacctccctcacttcactgcattccagattggacatgttccatagccttgctggggaagggcccactgccaactccctctgccccagccccacccttggccatctccctttgggaactagggggctgctggtgggaaatgggagccagggcagatgtatgcattcctttatgtccctgtaaatgtgggactacaagaagaggagctgcctgagtggtactttctcttcctggtaatcctctggcccagccttatggcagaatagaggtatttttaggctatttttgtaatatggcttctggtcaaaatccctgtgtagctgaattcccaagccctgcattgtacagccccccactcccctcaccacctaataaaggaatagttaacactcnnnnnnnnnnnnnnnnnnnnnnnnnnnnnnnnnnnnnnnnnnnnnnnnnnnnnnnnnnnnnnnnnnnnnnnnnnnnnnnnnnnnnnnnnnnnnnnnnnnnnnnnnnnnnnnnnnnnnnnnnnnnnnnnnnnnnnnnnnnnnnnnnnnnnnnnnnnnnnnnnnnnnnnnnnnnnnnnngccgggtggtgggnnnnnnnnnnnnnnnnnaaaacgtcttcccacccccctcttttggggcggggcgcccccccaagggaggaaaggacaaaggtggccaattgggttttcnnnnnnnnnnnnnnnnnnnnnnnnnnnnnnnnnnnnnnnnnnnnnnnnnnnnnnnnnnnnnnnnnnnnnnnnacaccaccagggcgtttaataaacaaccccccagaaggggggttcccccggggggcccctttttgggcccctctcacacaggcgggtttccccccgcggcactcataacccacaaaaacttttnnnnnnnnnntcgcggtcatatatttttcagaaacaaggggtgggagaaattttctctataannnnnnnnnnnnnnngccttggtgggcacacctccacaaaaagcgcgggccttgtggacaaccctatatgttcctccgccgcagacacatcccacacttttggtggcgcccgtgggtaataaaatattttttcccccgcggggaaaaacacgcgggggg

SEQ ID NO: 177367 - DNA, 330 bp, Homo Sapiens
  misc_feature (46)..(46): n is a, c, g, or t
gcggccgcgttcccggtgctccagcacctggccgcctccgccgacnttctgcagcctcgatacaaagctctctacgtcgtcgaacacgtggttcaggatgtccacttcccgctccgcctgcagaaccgccagatcaggaccccggggacccaggtccggggaggccgagtcagcgttgctcgaggtccccaccggctcaggcctctgcgcctcctctgcctcgggaatgggcttcgctaggggtcgtccgcggcccggccccgctctacggtgctgatcactgcgcggactgacgggcggcgctgcaggggcggggtctcagcggcgggc

SEQ ID NO: 177368 - DNA, 518 bp, Homo Sapiens
cccaggcatggtgctctatatcttggccaaataaattactttccttgaatatccaggaatcttttagtctaaagcaatgaggagttatcacctcatcctcaaactccaacaagatctatgccttagtgttgtttttgttgtctgctttgatgtaaaagcaagagtatttggagcaagaagctgcaatgcgcccaattccacattgggccttttctttatcattcatacgacatttctggtttaggtgtatgtagttgggccatgttacttgtccagaggaagagactaaagatataagaataattttttagtcctaaatgctgttttgtttactttctgtcaagatatttacccgtgtcaaattcaaactacagtactgtgtaattatgtataaagtttttttatttatttgaagttagactagatatacgtttttaaatttaacatctggctggacagtgttctattaactcattgaatgtgtttcctttgtcttgtgttaataaatattgatgcct

SEQ ID NO: 177369 - DNA, 940 bp, Homo Sapiens
  misc_feature (722)..(722): n is a, c, g, or t
ccttcctctgggccatgactccgccgccgccgccgccccctctccccgggcccttgtatctggccgaccccgtccgcggatccccttgcccctggccccggatcactggtcgtcctcttcggggctacggcgggtgcgctgggacgggacctgggctcggacgagaccgacttaatcctcctagtttggcaagtggttgagccgcggagccgccaggtggggacgctgcacaaatcgctggttcgtgccgaggcggccgcactgagtacgcagtgccgcgaggcgagcggcctgagcgccgacagcctggcgcgggcagagccgctggacaaggtgctgcagcagttctcacagctggtgaacggggatgtggctttgctgggcgggggcccctacatgctctgcactgatgggcagcagctattgcgacaggtcctgcaccccgaggcctccaggaagaacctggtgctccccgacatgttcttctccttctatgacctccgaagagaattccatatgcagcatccaagcacctgccctgccagggacctcactgtggccaccatggcacagggtttaggactggagacagatgccacagaggatgactttggggtctgggaagtcaagacaatggtagcttatcctccatctactcaaagagcccagcagtcaattgttttcgaagcccgaggtgataaagcagaaatacgagacggggnccttggtgagtgtgggagcaggcgctgggggtgacaacagctgaatagctctgacagcactgtgccctgcccctacagcagcaaggctgatgtgggggaccagtgagactgtggtaccgggctccgtgggtttgccgtggcagttcatccagacccaggacgtgggctcgccttccttccaaaggggctccaacgtgggccaggggtgtataaaaggc

SEQ ID NO: 177370 - DNA, 432 bp, Homo Sapiens
agacacggaacttcaccttttctgggaccttctttgggggagaatggtggacagtgggattctggaaacttgtttgggacccccaagggttaaagccacccagcattcacgaagagcacctgaagtatggaagctgagaagagttattggaatcacccccaccgttgacagaggaaggcagggggtgagaattaactgcttgagggtaggagagtctgagatgtgggggccctattccgctccccgccctgggacagttttcctttctagttttctttcccctgcttcagaggagcatctctgagggttctagctcttttaacaccccttttccccctgctggcccagagggagacccaggactgaactctccaggcctcctcccctgagccctgcagctggctggagtcttgcttccaataaaacaagcac

SEQ ID NO: 177371 - DNA, 696 bp, Homo Sapiens
gggccgctcacgctgcattaccgccagaatggtgcccagaagtcctgggacttcatgaagacgcatgacagcgtgaccgttctcttattcaactcttctcggaggagcctggtgttggtgaagcagttccggccagctgtgtatgcgggtgaggtggagcgccgcttcccagggtccctagcagctgtagaccaggacgggcctcgggagctacagccagccctgcccggctcagcgggggtgacagttgagctgtgtgccggcctcgtggaccagcctgggctctcgctggaggaagtggcttgcaaggaggcttgggaggagtgtggctaccacttggccccctctgatctgcgccgggtcgccacatactggtctggagtgggactgactggctccagacagaccatgttctacacagaggtgacagatgcccagcgtagcggtccaggtgggggcctggtggaggagggtgagctcattgaggtggtgcacctgcccctggaaggcgcccaggcctttgcagacgacccggacatccccaagaccctcggcgtcatctttggtgtctcatggttcctcagccaggtggcccccaacctggatctccagtgagactccagggttctagacagaggccagtcttggccactcaccccacaccccgcggaccccaataaaggcttgcatagctcc

SEQ ID NO: 177372 - DNA, 343 bp, Homo Sapiens
gtattgtcaaaattgtattcccatattgaagcagcttgagtttctactgaaaatgagcccgaattatttcactattactgtaaagggttcatcttactctggcattctgagaattagactgaaagtttaatttctgcagttccctcatattcagattctttctttgatgttataacacaaagtcattcctactcaaatgtaataaaattgaggctccacggaggcccgtgtccacatcagctgcagctcccactcagacagacggcctgccccacagcctgccctttgctgaagataccctcgctttatacttgcatttcgcttttcagtaaaaacagtcaag

SEQ ID NO: 177373 - DNA, 454 bp, Homo Sapiens; identical to SEQ ID NO: 94839

SEQ ID NO: 177374 - DNA, 629 bp, Homo Sapiens
ttgggaaagatcttacaagagcctgaatttagtgctaggaaagaggggaaggttctttttaataatactcggagtttcatagtgattggggcataactatcaatcacaaaagtatattcaaaaattatattttgaacaactcgaatcactcatttatttccatattaaaatcacaaactcatccattaatgtagataaagcactgtttggatatgagatgtagcaaattccaatacattattggacttccatttggaatcatatgggatactgctggtcttatcctgtccctccggcaggtagagagaccacaagcaggctcaacataacataagctagaaaaattagatgactgaatttctatggcatattgataataaaattcattccatttgctgattgtctgaaattttctagaatactaataaaatacatactatagattctttattagtgaagtatgcactaatcaatactttgaacacaaagcctgtgttactgatttggccgttttgtgaagaaacatttatctttgtacgttcttctattgtgctttctatctaatttttattaatttgtaagagtaagcacctttagaatattaaaaattaattctttatcacatgttg

SEQ ID NO: 177375 - DNA, 713 bp, Homo Sapiens
  misc_feature (531)..(544): n is a, c, g, or t
  misc_feature (558)..(558): n is a, c, g, or t
  misc_feature (563)..(653): n is a, c, g, or t
  misc_feature (656)..(658): n is a, c, g, or t
gaaacagctacggggatgggaccctgggagctgctgtggagcctcatccaccgcttctctgaccccacccaggctgcttcccaggcctcagggtcttagtgtggactccgggccgtgattaatgcaggttaagtactgcacgactactcgcttctgaaactgatagacactgcctcagctccgtgcagggcagacgcacaagagcagaatctcgtggggacatctctctggagcatcaatattactgcagtatttggaagaaacaaatttaaataagttctaaggtgaagaatggaacatttaagacaagtctggaaagtcatctgcctttaataactgtcgtttgtccttaacgtcagactttctccaagaccaaaactctaagaacttatttccattcttacaaatagtaaaaatgataaatcatatcaagtcaattgaaagtcctgcctgctgctttcctaaattgcaatatggccttggtatggttttatttgtacttttgtgggggattcgtggatctttagattnnnnnnnnnnnnnntaggtttttgaacnattannnnnnnnnnnnnnnnnnnnnnnnnnnnnnnnnnnnnnnnnnnnnnnnnnnnnnnnnnnnnnnnnnnnnnnnnnnnnnnnnnnnnnnnnnnaannnatttgtggggccgcctgggcccctcaaaaaagtttttctaaaaaccttttctttt

SEQ ID NO: 177376 - DNA, 1672 bp, Homo Sapiens
  misc_feature (25)..(25): n is a, c, g, or t
  misc_feature (1445)..(1445): n is a, c, g, or t
  misc_feature (1637)..(1637): n is a, c, g, or t
ctgcacgacatcttcgagaacaagnacgacgtgttcctcatcctggagctggtctctggcggggagctctttgacttctggcggaggaaggagtcgctgacggaggacgaggccacccagttcctcaagcagatcctggacggcgttcactacctgcactctaagcgcatcgcacactttgacctgaagccggaaaacatcatgctgctggacaagaacgtgcccaacccacgaatcaagctcatcgacttcggcatcgcgcacaagatcgaggcggggaacgagttcaagaacatcttcggcaccccggagtttgtggccccagagattgtgaactatgagccgctgggcctggaggcggacatgtggagcatcggtgtcatcacctatatcctcctgagcggtgcatccccgttcctgggcgagaccaagcaggagacgctcaccaacatctcagccgtgaactacgacttcgacgaggagtacttcagcaacaccagcgagctggccaaggacttcattcgccggctgctcgtcaaagatcccaagcggagaatgaccattgcccagagcctggaacattcctggattaaggcgatccggcggcggaacgtgcgtggtgaggacagcggccgcaagcccgagcggcggcgcctgaagaccacgcgtctgaaggagtacaccatcaagtcgcactccagcttgccgcccaacaacagctacgccgacttcgagcgcttctccaacgtgctggaggaggcggcggccgcccaggagggcctgcgcgagctgcagcgcagccggcggctctgccacgatgacgtggaggcgctggccgtcatctacgaggagaaatgacgtctggtaccgcgaggagagcgacagccctggcccacgacctgtcggaggctaccgaaaggacctgctcccagacccgacggcgcttcaagccggcaggctcacggatgaatgcccaaggcgcgcgtctgcttgggggacccatttgggactcaacgccgccccttttcaccccgcccttgttactaaaccaccttcccatgtgtcgtttggcaccaaacccaaaatctatcccttctcccaaaaatggcctcttgtcaactggcaggcggaacattccgtaggcgccaccccccctggtagacataaggaacaaagccttctctcctgcggctattgggcagtttgtcctcggctcactactctactataaagtcgacccatgcgcggggagactgagggtccccaatgatcccaccctaagttcaaagatgtcagagaaagcacatgctagcgcatttggatcccttaagagacgatccacccaccacctcccaggttgtggcttacagcacttccgcacacctgtttcctgctattcaccacgctctcgcgagctcggtcacagtgagctctcttatgtatcnctcatatgcggcttcccaccactatctaattcttatgcctctatacttcccacgagcatatctagatcgtcgatacggcatatatatctgtctgcgataccatccctctccagagtatactgccgctatagacaccgactcgtcatctactcatatacatatcgacatgaagctctaaaacacatagagtantgttgtctgcgcacacctattgcttcccgctccag

SEQ ID NO: 177377 - DNA, 426 bp, Homo Sapiens
aatccctcatttcccgacccctgtactctgcgctggttttgcccacagccgcttgcgaatggcaggccttttttcctcccaatcccttgcggaaccatagaagagtttgtcctcagttcctccttagaattgatgttacctaactgaagtcaaagcccaaaagcatgaataattcaggaacgagcactttccttgccccaccccactgtgctcacccaatgcccaaaagcttcttcatttttaaacgggtgtgtacgttttgctactaggctatgtggtggagactggaggggaccaggaactagatggactgttacattccgaaatttatatcaagtacaccatgctttattgagtgttatcacacctgtattgaaaatagcattaatatttaaaatcttttttaataaaagaaatgttccgaac

SEQ ID NO: 177378 - DNA, 460 bp, Homo Sapiens
  misc_feature (15)..(15): n is a, c, g, or t
  misc_feature (34)..(34): n is a, c, g, or t
  misc_feature (50)..(50): n is a, c, g, or t
  misc_feature (363)..(372): n is a, c, g, or t
aacccaataaagccngggtgtacctgaaaataanttcggaatgtaaacantccccacctagtccccctggtcccctccagtctcccacccacatagccctagtagcaaaacgtacacaccccgtttaaaaatgaagaagcttttgggcattgggtgagccacagtggggtggggcaaggaaagtgcctcgttccctgaattattcatgcttttggctttgacttcagttagtaacatcaattctaagagaactgagacaaactcttctatgttccgcaaaggaatggagaaaaaagcctgccattcgcaagcagctgtgggcaaaaccagcgcagagtacaggggtcgggaaatgagggattnnnnnnnnnngtcggagtaaagtgcacagttactgtcaaaaatatattattttgatcctaagaaaattaaaagattttatctaatggactagattgcc

SEQ ID NO: 177379 - DNA, 522 bp, Homo Sapiens; identical to SEQ ID NO: 5587
  misc_feature (249)..(372): n is a, c, g, or t

SEQ ID NO: 177380 - DNA, 737 bp, Homo Sapiens
  misc_feature (93)..(93): n is a, c, g, or t
cggacgcgtgggtccggacgcgtgggtcgacggacgcgtggggtgctgcatctacttttctccttttagcacatttgatattgatacttcagnagaaacttttttaactacccttaaaatcttgtcaatgaccattaactgccaatcatcacctcatttgctttttttgacaacatactactagaaacctaggctgtgagtgtaaaaccataactgttagaatcatttttttggcaatagctcacattctgttaagagtcatttgctttaatcaaagatcatgatttattatatattttttataagtagggatggggccaagattattcctttggcacagcagtaagtgtgctcaagatctttgcctgtaagcttgaatatttggcttaaattttgtgcatatgaatactgttaaaggtatatttgactacattttgaaaggaaaaaggtagtcctgctaaaattgacatttagggatattttaatctatgtatttggtaaagtaattagtgaagtattagttataaaaattttaaggaaaacatttaaaagcaaaatagtcgtatcagataaatagagtagaatacactaaagataaaacaagtctctgttacaaatgaagttgtctgtacagacgactgagatattttaattttatttacataaaaatgctgttcaatatctaatgatttctgttgtttgtatggtgtactttagagtaagaaaagaagtttgag

SEQ ID NO: 177381 - DNA, 461 bp, Homo Sapiens
  misc_feature (31)..(31): n is a, c, g, or t
  misc_feature (48)..(48): n is a, c, g, or t
  misc_feature (53)..(53): n is a, c, g, or t
  misc_feature (65)..(65): n is a, c, g, or t
  misc_feature (78)..(78): n is a, c, g, or t
  misc_feature (100)..(100): n is a, c, g, or t
  misc_feature (177)..(177): n is a, c, g, or t
  misc_feature (190)..(202): n is a, c, g, or t
aatttcccccccggttggggaccccaaaatnaggggccctgagggaanagccngaccaccatggnaaaaccaaggganggcccggaaaaggcttttaccngaccccccactgaccttcagagttatacccctgtttgcctacaccataatgctggttttgcctgactttttgttttnttatatatttatnnnnnnnnnnnnngttggtgattgcattgggaaattcccagggtattactggacctatgtggtgtattgttaaaccagtgtccttgtgatactgttgctcttgatgttcctgatacaggtaaggaaacagttggtcaactctgatacaaagtatatatacagttcagtattgtctctgttcattttgtttttatttcattgacaaaatcaaaccagcattccccattctgtaaataaatgattttgctgaataaagtaaagtcttaaattca

SEQ ID NO: 177382 - DNA, 611 bp, Homo Sapiens
  misc_feature (444)..(459): n is a, c, g, or t
gtgtataaatactatgctttaatgagccccttaaatagaaattccactacaaaaatacagaggagatagggtgtttcctgtatccgcctcattcccatagaaaactataagggaagaaatagaacttggaattaaagcagcagcaaggcgacggtgagaatgcgatttctaggccatcttgttgggactgatgaacagcatctctgatctcatgatttaacatctggttatccagaagggatgggattggcctaaaaaaaccgatcaatttctggattgtttttgtttcttaatccttcaaatgacaagaagcaaaaatatttgtagaaactaagcaagacaagagtcggagcagttaacaccactatctgcagcagaaactcagaccttcttagtgaacttaagggctgaagtgtgaaagctgaggctgcaagtgcagatacnnnnnnnnnnnnnnnngattagacagaaccctcctctaccccagatccccctctgccctgcctttgagaatgccagcaatttcagtgggattgagaatggtatgtggatctcttttcttggagtgatcctcaggagatattcttggtgtccatttccgtaataactcc

SEQ ID NO: 177383 - DNA, 488 bp, Homo Sapiens
ccctggtcattttagaagtttttgttttaaaaaacaactggaaagatgcagagctactgagcctttgccctgaatgggaggtagggatgtcattctccaccaataatggtccctcttcgcggacgttgctgaaaggacccaaggctctcccatgcctttctacctaagtgtttgtattttattttaaattatttattctggagccacagcccccttgcttatgaggttcttatggagagtgagaaagggaagggaaatagggcaccatggtccggtggtttgtagttccttcaaagtcaggcactgggagctagaggagtctcaagctccccttaggaagaactggtgccccctccagtcctaatttttcttgcctgccccgccttggggaatgcctcacccacccaggtcctgacctgtgcaataaggattgttccctgcgaagttttgttggatgtaaatatagtaaaagctgcttctgtcttttt

SEQ ID NO: 177384 - DNA, 953 bp, Homo Sapiens
  misc_feature (876)..(876): n is a, c, g, or t
  misc_feature (925)..(925): n is a, c, g, or t
aagctggcctaggacgatgggcaggtaggagctgaggcaccaggtgggcgcagatgcccgactcccaaggccattgactgccgaaacatgttttgggagtcacctccagatatgctagagatccttaagcttccctctccagcctagtggtgcgcgagcaagtgaggaacgaagggattctagtagttaaactgcttccctgttgccttcatgtgcagtagggaacaggctgggacaggatgcccagtcaataggctccaagacgaggacaacaggaagagggatccactgttaccaaaagtcctgattcccccatcaccaacctacccagtttgttcgtgctgatgttgggggagatctggggggagttggtacagctctgttcttcccttgtcctataccgggaactcccctccagggtacccacagatctgcattgccctggtcattttagaagtttttgttttaaaaaacaactggaaagatgcagagctactgagcctttgccctgaatgggaggtagggatgtcattctccaccaataatggtccctcttccctgacgttgctgaaggagcccaaggctctccatgcctttctacctaagtgtttgtattttattttaaacttatttattctggagccacagcccccttgcttatgaggttcttatggacgagtgagaaagggaagggaaatagggcaccatggtcccggtggtaagtagttccttcaaagtcaggcactgggagctagaggagtctcaagctccccttaggaagaactggtgccccctccagtcctaatttttcttgcctgccccgccttggggaattgcctcacccacccaggtcctggacctgtggcaattaagggnttgttccctggcgaagtttttgttgggatgttaaatatagtaaaaggtngcttctgtctttttcaaaataaaaaatt

SEQ ID NO: 177385 - DNA, 431 bp, Homo Sapiens
  misc_feature (106)..(106): n is a, c, g, or t
aagtaactctgccatctttccaagttgtttttttaaaaacaaaaaacttctaaaaatgacccagggcaatgcaagatctgtgggtaaccctggaagggaagttccnggtataggacaagggaagaacagagctgtaccaactccccccagatctcccccaacatcagcacgaacaaactgggtaggttggtgatgggggaatcaggacttttggtaacagtggatccctcttcctgttgtcctcgcttggagcctttgactgggcatccttcccagcctgttccccaactccatgaaggcaacaggggaagcagtttaactctagaatcccttcttcctcacttccccaccctaggctggagagggaagcttaaggtctctagcattctggaggtgctccaaaacattttcggcagtccctagtgccgaat

SEQ ID NO: 177386 - DNA, 475 bp, Homo Sapiens
caagttatagatttgcttaaagtgaggttttttggtgtgtgcttttttgttgtcttttgacccttccagtttccagacaaacttgtcttaaaaagtgcatcattggattgaccatggtttttcatgaaattttatgagatttcggccttaacaaaatgcatatattccttatcttaaagcctgtcattacttaggatgcacttataggatctgaaaagctcactttaaactcatactacattcgttacgagtattttacgttaacataattgaaaagtacaaggtccaagctggctttcaaattatgtctaaacagaaatgggacaaatagacttgaaaatagaagggatttattccacccctgcaagggtagagtcaggtgagagtcccttggtgagtcatttgtacatcagtgtcatttcttcttaacctctgaagaagatgggcatcagaaataaagacaaagcactatcaa

SEQ ID NO: 177387 - DNA, 493 bp, Homo Sapiens
  misc_feature (107)..(107): n is a, c, g, or t
  misc_feature (109)..(109): n is a, c, g, or t
tcgcccacactgaccccgggggagcggcagcagaaccggccctccgtgatcacctgtgcctccgtggcgcccgcaactgcaacctctcgcactgccccatcgcgcantncagctgtgccgcgcccgggcctgccagctaccggaggccaccgagcgctgccaccacctgtgaccccgtggtggaggagcatttccgcaggagcctgggcaagaattacaaggagcccgagccggcacccaactccgtgtccatcacgggctccgtggacgaccactttgccaaagctctgggtgacacgtggctccagatcaaagcggccaaggacggagcatccagcagccctgagtccgcctctcgcagggccagcccgccagcccctctgcccacatggtcagccacagtcactccccctctgtggtctcctgaagggagcgcctcctccaacaacacgtggatctgcatggtttgcctgagctttgaacagtcagtact

SEQ ID NO: 177388 - DNA, 529 bp, Homo Sapiens
gaaagcaagtttcacatgaataatgctgtgttggaaggctttttgatttaaaatcttttcggatttataacatcctgttaagttttaggagaacccgttttcccagagcagattcaagcttctaaaaataaatgctttcagtagcaggaatggcattgtttaaaaagctgatggcagggtaagcatttgggttagtgttttattaacctatttgtaagtacttgttcattggggaaaggtgtccttgactaaaaccatacgtggctatggaaaccatgtttgtagttctgaatacacaggttttgtgtgtatttactctatgtattaaattattattgcccttagtttaaagtaaggattacaattggatttaagtagatcactgaatgttattgtttatgaaacttaactttttgtatgctgcttataaacatgatctataaatcagtgcttgggaaaattttactttcttaatctactgatacaggaataaaatatgaacaattaaacaggttgatccttgaaaaaa

SEQ ID NO: 177389 - DNA, 1413 bp, Homo Sapiens
  misc_feature (721)..(730): n is a, c, g, or t
  misc_feature (1132)..(1220): n is a, c, g, or t
ttttataaaaactcaacacacattggattttaatgagaaaataactgtatacttgcattgaatgcctcacaatcactctaaaaccaaagcaggataataacatttaagtggttaacatacacaggaaaaccagatacagagtataatttccaaacacagtattgctgcttttttcccctcctcccacttcacatcaggacttctaatctaacacggatctcattttcctgagaattttagtctccatgccaacctccctcactataaaatgaatttcttgcaacagggatcttacttgttttgcgtccccagtggctagcacattttgttgagaattcattcaaaatattcaggagactcaaccatataaagatggtgccaattgcccatgtgctatttgggctgccatctgtaggatgtggcttcaagttagagctcccttggcagttttaaaggatccttgttagtagatggttccattttttactttgtgcctacttctcatttgtgaataaatgtccccccccaaagtcaacactagtctaataaaagaagcaaaggaaatgtgcgttaacatctacatacaaattttgtgaaattgctacttgttagaataacataatagagcttatgacataacaatataaaaacaaaaatgatttttagtgaggtctgagttaattattgcttttttaaaaaaccacagttttaaaacaaaggnnnnnnnnnngaaggctgtttatttttttttctttctcatggccagaattgaaaattttctcatccagaaatttagggcacccaattattgaatacccttatcatattgctttaaatgacagaaagattaaagctggcatcctctatagtatactaagcatgaatgtaaagtatgagaataaataggagactttcctaaatgtcaaattacacaaccgctcaaaactttgtaattgtgactcatgcaaataccttgttaggtcaacttaatattacaaatactgcatcagctcggtgcctttatatcccttttcataaaaaagaaattctcactccactcctgaagccagcaaacagctctggaggaattacctgtacacccaagtgccacggtcactctggaattttaatnnnnnnnnnnnnnnnnnnnnnnnnnnnnnnnnnnnnnnnnnnnnnnnnnnnnnnnnnnnnnnnnnnnnnnnnnnnnnnnnnnnnnnnnncccatctttaggatttgtagctgattccaagcctgcacttatttctattctatatttttctttgtatcatcctgaaacacactggttgctcagcaaaaatagtatctcttacctccttacgacgcgtgggtcacatatcccgggattccggccgtaccagcctgctttttaacaactggtttatagtcataat

SEQ ID NO: 177390 - DNA, 529 bp, Homo Sapiens
  misc_feature (145)..(145): n is a, c, g, or t
  misc_feature (149)..(149): n is a, c, g, or t
cccaaatcctgtttggttaattgtagcctccatacagtggggtcttctctgtggctggtagacaccaagctgctgtgactgaccacggtaccacgggctgccacagcccctgctctgtcttagattatggtgctttacaaagagnaggngtccatgaccacagcttagtgagaaggagccacaagttgtggctggagagttccctgtgaacttgagtagttcatagagtgctaaggtgacactccaccaaccagagtgagagggcagataggcaggattctatgagtggttatacttaagggggacaaaactgcccaagaagaatcttgagaatacactctttcaaggtgggggagatactctttagagggtacactgagctaatactaccagttctttatgagcactggaatgtgtttgtaaaaggagtcctaagtttagcaaggtagtctacagaaccatgctcccacattatagataaagctgcttaaacttaaaagtccacaaacgacgccgaccagaaaaaaaa

SEQ ID NO: 177391 - DNA, 810 bp, Homo Sapiens
  misc_feature (409)..(418): n is a, c, g, or t
  misc_feature (690)..(733): n is a, c, g, or t
atcagcatctcactttcttctccattcagccccaaccccctccctgccatgctttccaccccaaggacccaccagcagggagcagacggcagctaattttggtaccacttaagggtccccccattctggcccccatcctctccctcaccccaattctttctcgctggagctgttatttcccaagaagccgcatcgcccaaggttggcacctctcctaacctgccacacgacagctctcacctctctaggaattgggggctgtcaggtcacaggggggatctggcatttttttatgacagtccatttctagatggtttgcctattaaagaagtgggggggaaatactgttttctccttaacctcaagctaccagtctctcctcttccgcgtagaggaagaggggagcagnnnnnnnnnngctgaagtataaaaaccctcctcctcccgttattatttaagctactgccatcaaccccaccccctataaagctgtgaagccctttgcctcgcttttgacagcgtggggggccccgtgggcagggacttcggatttgcatttctgggttgtttttccttccactctggggtctcgttcaggcattggggtctcctcaccccagccacatgtttctttaagaatcctttggtcaaccaggaccttgatttttcaggcattttggtctggggtannnnnnnnnnnnnnnnnnnnnnnnnnnnnnnnnnnnnnnnnnnncatcgtggttctggaagcttctagcgtgtggcatctgaccaattttgaattggtcctttctataaaatcaatattta

SEQ ID NO: 177392 - DNA, 382 bp, Homo Sapiens
  misc_feature (38)..(38): n is a, c, g, or t
  misc_feature (68)..(68): n is a, c, g, or t
  misc_feature (70)..(70): n is a, c, g, or t
  misc_feature (72)..(72): n is a, c, g, or t
tgttttgccctcccacgtcctaggaaaggccctgtganaggagcagtcaggacttccggacaaacttnananctgcctacttgggcccaagtttcagaatagtgttcccctatcaaggctgtgactagatcaggcagggatccattccctgtcccctgcccactaccttcaggccatttagagttgtaaatttacaaagatccacggtgggctccagctgccaagccacccaagggagtctggccctaggcctagccccatccctccccatgaggggccaagacactgcctaaggtgtgggagggactggctgagattgcagcccatggtaggagctggaccaactgtatatagttttcaataaactttttccttttctgtt

SEQ ID NO: 177393 - DNA, 840 bp, Homo Sapiens
  misc_feature (534)..(534): n is a, c, g, or t
gagaaagaggctggggatatttcaggctgtttggctgtccctgtaccccagtcctgaagcccctgcagtggcgggactcaagctcctgacctttgcccggcctggctgggcctctcttgcagtcagcgagatgatccgccacccgtatgagacccagtctgacagcttctacttcgtggatgaccggctggtgatgcacaataaagcagactattcctacagcgggacaccctgaccccacggctgccctgaccccaggaggctccagttctgggctgggagctgtgacctccccaacgctcacccctcaaccccaagtcctctgcttggggagttctccaggagctccggaccctgagtcaatgttgggaggaagggtacctgggtgtccccagtcaagcccatgaagcccatgcggcctgctacatggggtggggtcgtagggaggctgtttgcctccacgtctaggaaggcctgtgagaggagcagtcaggacttccggacaacttagctgggccctacttgggccaaagnttttcagaatagtgttcccctattcaaggctgtgactagattcaggcagggattccatttccctgttcccctgcccactaccttcaggccatttagagttgtaaatttacaaagatccacgggggggctccagctggccaaggccaccccaaggggaggtctggggcccctagggccttagcccccattcccctccccccatggaagggggccccaggaacaactgtcccttaaaagggggttgggggaaggggtaccttgggctccggaactattgtgccacgtcccccccgtgggggttacggc

SEQ ID NO: 177394 - DNA, 444 bp, Homo Sapiens
  misc_feature (387)..(387): n is a, c, g, or t
actttttatttatgtaggatgtgtgctgtctaatgatgggatgaccacacttttccatgttctaaaagtgctcctctcctgcagggtcccagggctggtggttgctttgggtctacagctacgtcttacccgcctcctgcctcaacagcctgtgtggtggcaaagccggtgtggggctggggaacgcagcgttctccaggagggggacccggcttctccttctgcagtgcaggcgaaggcctagatgccagtgtgacctcccacaaggcgtggcttccagactccccggccggaagtgatgcttttttgccgtgggccctgggtttgaagcagcctggctttctcttggtaagtggctggtgtcttagcagctgcaaatctgagctncagccacctacacaccaccgtgggccgacactttcatttaaaaagtttcctgagaaa

SEQ ID NO: 177395 - DNA, 532 bp, Homo Sapiens
gttcagaaggaaacggtgtctctcggctgtggctctgagtgcaaatgcatgggcggaaaggcgggggtggctgctcttcctggcaggcctgggccatcagcgaactgggccccgtgaggagggcgggagtgtggaggagggtgggcctctcacccaggctttctcggcccctctcctcagcttgcagagctggccagccccctccttagggggtgggcgaggagcctctgggcagacccaagaaccatggggactggggtgggttggtggcaccaatggcagccctccccgcccctctccttaaaggagggttcccgcagctggggggtgttgcggaggcgcatggcctcccgccacggggccgtgctgtgtttatggctggcagaggcagccagcgggtgggggattctgctgctcgctcacctgcctggctcgctggtctctcgaattttcttccctctgaaatcctatttaagaacttttggaagcttagccatttttacttattaaaataaaagaagcctttttacac

SEQ ID NO: 177396 - DNA, 250 bp, Homo Sapiens
cagcgtgggcacaggactgacccttcttcagagataatgacattttatcttctccttttgatgaaaactgtcactttagcatgtaatccattacagaatcccatgcagtgattccaggatttgaaattgtatgatgtgttacataagaatttatttgctatcgacattcccgtataaagagagagacatatcacgctgctgtcatgattttgtgtcaagatgatccaataaagttgtaaaacaggcaaaa

SEQ ID NO: 177397 - DNA, 330 bp, Homo Sapiens
gggggaaccatttgtgaatgaatatttggaacttaccaagtcctaagagacttttggaagaggatatatatagcatagtaccataccacttataaagtggaaactcttggaccaagatttggattaatttgtttttgaagttttttgtatataaatatgtaaatacatgctttaatttgcaatttaaaatgaaggggttaaataagttagacatttaaaagaaatgattgttaccataaattagtgctaatgctgaggagaactacagtttttcttttgaatttagtatttgagatgagttgttgggacatgcaaataaaatgaagaatg

SEQ ID NO: 177398 - DNA, 496 bp, Homo Sapiens
  misc_feature (486)..(486): n is a, c, g, or t
gcgaccgcgttcggaccataggtaacctctgccaaagtggctgtgaatggcgttcactgcattaccagcagactggagagggagatcacgcagtcctgctacttcctgggatgttaggaagtggagagactgattttggacctcagctcaagaacctcaataagaagctcttcacggtggtcgcctgggatcctcgaggctatggacattccaggcccccagatcgcgatttcccagcagacttttttgaaagggatgcaaaagatgctgttgatttgatgaaggcgctgaagtttaagaaggtttctctgctggggtggagtgatgggggcataaccgcactcattgctgctgcaaaatatccatcttacatccacaagatgggtgatctggggcgccaacgcttacgtcacttgacgaagacagcatgatatattgagggcttccgagatgttttccaaatgggagtgagagaacaaggaagcntttagaagtt

SEQ ID NO: 177399 - DNA, 399 bp, Homo Sapiens
gcgaccccggagtacagggttcctgggagcgcgcagtggcgcgggggagcggacgctgcgggacgagaaccagagggcccggggcagcccttctcccccgcgcgaaccccaatcttttactaaaagcgcacggttgtccggaaccgccgcgccggaagccgctgtctttcccgtccctcgccggaagtggtcctcttcttacccatccctctcaggaagtgggcacaaactctcgcccgacaccacgaaagttccgggtcagggagctgcgttggcagaggccaggaggggcccgggattggggtctgcgggccgccctgtgcgttgccattgcgctgcggtgctgtgcttgtgtgattggtttatttatttatttatttaaacggagtctcgctctgt

SEQ ID NO: 177400 - DNA, 744 bp, Homo Sapiens
ggtaacctggttctctgttatgttaaggctttctgggaagccagccactctgcgcaggagtgaaacatgaagttgttttctgaggacctgttttggtgggattgtttgggcagaggactgtgtttatgcagggcaaatcccagaaagataagaggaagctagagaaacttaatgtacctgaattcttcatggtcgatttgcaaactaacttaacatagattcttttgactatggtaagtttgaatctctccttgccaaacaacattataagtttagttttcttcttcctcttgcagccggtacagaaaggtgtaagtggtggctgaaaattgaggaagcttcatctgaccaatgtgggtgctggtttcttgtgaaatgtgtccctaagcctccttctccttgcaggcagccacccacccaggtgtctaagataggacatgctcctttctttctctaatcccatcctgaggttgccggcaaagccaatatgaccactactgagaaatagtaatgacttctacaaatgcaagggtcttaccctcctctttcccttaaacaccctcccttttccttagaccccgtttttgccatcccccaaatgtgtggtatggtgaaactaatcccctgaatgtgaattgctatccttattgccctattaaagaagagccagctggtatattgtcaggaagcactatttaaaatgtgaactgttatagagtaaataaataaatactctacaggaaa

SEQ ID NO: 177401 - DNA, 429 bp, Homo Sapiens
  misc_feature (12)..(12): n is a, c, g, or t
  misc_feature (23)..(23): n is a, c, g, or t
  misc_feature (36)..(36): n is a, c, g, or t
gcctaccctccncgccttgtaanactgcctgcctgntgggggtcccgacgccgcccggtgaaaaagcctgccagatgcccgagaagcccagcaaacacagggccccactggaaaaaaatagttttttcattagtatttcctcgggaggaccccaaaagttaaggtcagccttgttcactgtaatttctggaagaagttcactcagaccttcctgaattcagatcatctcagaagtctggagggaaatctggcgaaaccttcgtttgagggactgatgtgagtgtatgtccacctcactggtggcaccgagaaacttacttccttgtattaagtgcacttcttgtatttctaataagatgactttccagaaagtgagatttgttatgttctggcttttaaaaggtaaaatataaataaatttcataactt

SEQ ID NO: 177402 - DNA, 420 bp, Homo Sapiens
tataaagaaacacgtttattcctggatggagaggaagaaaaagaatgggcatttgaggaaagcaaaatagatgagcaccattttgttgcagttgctcttaggaaacccgatggatctagacatcaggatgttccatctcaggatgattccaaaccaacccagaggcaatttactattctcaactttaatgatttaatgtcatctgccgttcccatgacacctgaagatccttcattttgggactgtttttgcttcacagaagaaattccaatacgaaatggtacaaagtcatgatgattccctgagtaacaaagggaaatgaaaactgtttgtgatcttccgtattcactgaaaaataaatgcttgtttagtatcaaattttatttcacgaaagtttttttaaagaacagaaacttttcc

SEQ ID NO: 177403 - DNA, 254 bp, Homo Sapiens
tggcccttgcccaagataaaatgtgtgtgcccccatgatcacaccccaggggcacaggccacatacgtttccctgaaaccttgggctccagcctccatcccgtccatgtgggagggaacttgggtcccagcagtgtgtctttcagcaccaagtcatgtttaaaagaccagagagacaagcattttgccaagatcttccagggaagatgcatgtgtgacacattaacattcaaatcaggccagcgcggtgctcat

SEQ ID NO: 177404 - DNA, 521 bp, Homo Sapiens
tgcagacaagaatgtctgctctgggggcacaggccaactatatggagggagggtcccaaattagcaaacccttcatttaaagcaaacccttgtcaagcctaccagagcagctgatacgtgtgcataacagtgaggcattgtgtcctggatcgtctgggagcccagtgtcaagtctgctggaatgcaggaagtagaacagaatcgcccacaggactgttctggggccagcttcccttaactctgtagccctggcagtctgacccaaagttgaccctcacccaaaggttctggctcttccctccctcacttttactttcccttcccccataagttggaggataaaatgggtatcaatgctaatatttccagggagaacatgaaaccagaggtttctttctttctctgtaatctgctatgaaagaaaataacaaatgaaaataaatgtgtactacactttgaaatattttaactaaagcctttattctatacaactgtgaaatacagatttccacccttttggc

SEQ ID NO: 177405 - DNA, 955 bp, Homo Sapiens
  misc_feature (433)..(539): n is a, c, g, or t
  misc_feature (658)..(681): n is a, c, g, or t
  misc_feature (931)..(931): n is a, c, g, or t
gcttctcctggaaataaacaagctaattcctctatgccaccagctccagacagtaactaagacttctttgcagaataaagtatttctaaaggttgacaagtgtattacgaagacaagatccatgatggctctcttagtccaacttctttcactttgttataaactgctgaagaagcttcagatggaaaataacggatgggtctcagttacaaataaggacactatggatagtaaaacttgagaagcttttggggtcagatctctggaacatcatgtgatgaagctgacatttttaaaaatcaaatgatcctttatcttttcagaaattcatcaattttataaagaaaacaatattgaaattttgctctattttctgatcatgaaactgattgtaaagctttttgacaactaataaatgtcttggtaattgctnnnnnnnnnnnnnnnnnnnnnnnnnnnnnnnnnnnnnnnnnnnnnnnnnnnnnnnnnnnnnnnnnnnnnnnnnnnnnnnnnnnnnnnnnnnnnnnnnnnnnnnnnnngcgaagagcgagcggacccctgtcctagccgccgggccgcgcccggccaggagccccggcccccccttgtcggcgtaccggggcctttcgccccgcgaaacaccgaggccgttacacgnnnnnnnnnnnnnnnnnnnnnnnngacagacacactgggagtcgtgctgcgcaccccccctattattttcgcgcacccaatttaaagaggtgggccggccgcgcccacccgtccatcacctcgatatgcacactacctccgccgtcggggccctcgcggcccgccatgctgttcgcaaacactcaccgcccggccgcgggtccgcgatgctgcgcgtgtgtgagaagtatggtgagcgcgatatggcggcaacaccactgtcgacttgtctcgnacagcgagaaagcaacacccgccc

SEQ ID NO: 177406 - DNA, 965 bp, Homo Sapiens
tccattatgatttattctctacaatacttcgttaaagtgttcaatgatttgcactcagaagttatatagccaagaggcaaccaagtgtaatacaaagaattggtctgaagtctttgcactgaaggccatatagtctcttgcttcagggaagtaagaacgaaatgaacaaaaagaacacatagctccctaggctccagaatctcaatagaaaataacgtcaacagttagtgaaattgtagatggtcaacacatcatggaaaacagatcttgtgcaaaatattaacacccaggacttcttttgtatagatgattgtttatgataaacaataaaatatatgtaatgtctcaactacaaacctttcatgttgaaagggtctctaacatgagttgttttattattatgaagcaaaaaagttttaagaatctcacagtggaaataatccaacaccgacagactctagtgatcaaagacattctcttttaatgtaaaacaaggacaattcataattacagagagaatgtcctagctgtgggtattatgagacaagccaactttccagaccaaaaggcactcacagctagggatgaaacgaactccgaaccaagccagagaaattgggctggtccttgaaaacagtggttacctactgtccagctcgagcagcccaaggacaaaggaaacactcagcagaaaacattcccttttctttaaacctaccacgcacaccgcaggtactggccgccctcatcactgctttggtcaagcgtgcagagaaggcagttcagttccagttcggagctatcctctccctatgcaaagctgccacatggatgatccagacttggtatttttcctgagagccacctgctacacactttcatgaggcgaccgtgaccgtacacttctagaccgcttcctgactaggccccgttcaggacggatactgacaatgcccattcctcac

SEQ ID NO: 177407 - DNA, 771 bp, Homo Sapiens
gctgggtttcatcaactgggatgccataaacaagaaccaggtcccgccccccagcacccgagccctcctctacttcagccgactctgggaggatttcaaacagaacactcctttcctcaactggaaagcaattattgagggtgcggacgcgtcatcactgcagaaacgtgcaggcagagccgatcagaactacaattacaaccagcatgcgtatcccactgcctatggtgggaagtactcagtcaagacccctgcaaaggggggagtctcaccttcttcctcggcttcccggctgcaacctggccagctgcagtgggggaagttttggtaggtgagtgtcagagtgagccgacccaggccacatcctggcagtggaggcacagtcacccggggcagggccaggatcttggtatatcctcagatctcagtgggcagcgacatgaagtcaggcaatttcttgcaaccaccaccgaggccccgaaaagcactggtcgtcagggagctcctccccttggcccccagcctgtgccagccctggcccggctgccacacctctgtttcctaggctggggacccagcttgtctctccttgtttcttcccactgcactgtggtgcttcagtggccaccagcctcgtcacatacaccagcatctttctgtacctcctccctttggtgacctgaagtcactgtgacagttctccaggaaggaggagcttcctacttttgagtttctctgtggaaataaaacatgaatcttgtttcccaaaaa

SEQ ID NO: 177408 - DNA, 646 bp, Homo Sapiens
  misc_feature (42)..(42): n is a, c, g, or t
aaggtgcaatgatgctcccatggatcccaaagacattgatcnaaagtgcaatgatacactacttgtgcagctcacaaacaactctgcatattacatgtacctcctcctgctcctcaagagtgtggtctatttgccatcatcaccctgctgtctgccttagaagaaacgctttccgctgcaatgggagagaaatcataacagacgggggcacagagaggcccatcttttcctcatcggttattgtccctagaagcgtcttctgaggatctagtggggctttctttcggggtttgggccattttcagttctcatgggtgtactattctatcattattgtataacggttttcaaaccagtgggcacacagagaacctcactctgtaataacaatgaggaatagccacggcgatctccagcaccaatctctccatgttttccacagctcctccagccaacccaaatagcgcctgctatagtgtagacacctgcggcttctagccttgtccctctcttagtgttctttaatcagataactgcctggaagcctttcattttacacgccctgaagcagtcttctttgctagttgaattatgtggtgtgtttttccgtaataagcaaaataaatttaaaaaaatgaaaagttga

SEQ ID NO: 177409 - DNA, 1218 bp, Homo Sapiens
  misc_feature (1079)..(1088): n is a, c, g, or t
agaatattcaagcacatatcacgtaacagtttaatatggaacaaacatcctggaggatgttcgtactaccacagtattcatcttatctgggagattttccttactactatgctaatttaggtttaaagcccccttccaaattcactgcagtcatccatgcggtgacccccctggtctctcagtcccagccagtgttgaagcttctcgtggctgcagccaagtcccagtactgtgcccagatcatagttctatggaattgtgacaagcccctaccagccaaacaccgctggcctgccactgctgtgcctgtcgtcgtcattgaaggagagagcaaggttatgagcagccgttttctgccctacgacaacatcatcacagacgccgtgctcagccttgacgaggacacggtgctttcaacaacagaggtggatttcgccttcacagtgtggcagagcttccctgaaaggactgtggggtaccccgcgcgcagccacttctgggataactctaaggagcggtggggatacacatcaaagtggacgaacgactactccatggtgttgacaggagctgctatttaccacaaatattatcactacctatactcccatttacctgccagccagcctgaagaacatggtggaccaattggccaattgtgaggacattctcatgaacttcctggtgtctgctgtgacaaaattgcctccaatcaaagtgacccagaagaagcagtataaggagacaatgatgggacagacttctcgggcttcccgttgggctgaccctgaccactttgcccagcgacagagctgcatgaatacgtttgccagctggtttggctacatgccgctgatccactctcagatgaggctcgaccccgtcctctttaaagaccaggtctctattttgaggaagaaataccgagacattgagcgactttgaggaatccggctgagtgggggaggggaagcaagaagggatgggggtcaagctgctctctcttcccagtgcagatccactcatcagcagagccagattgtgccaactatccaaaaacttagatgagcagaatgacnnnnnnnnnnggccaatgagaactcaactcctggctcctgggactgcaccagactgctccaaactcacctcactggcttctgtgtcccaagactaggttgtgtacagtttaattatggaacattaaataattatttttga

SEQ ID NO: 177410 - DNA, 377 bp, Homo Sapiens
ggacttgaaccttctcccaggtaggggcaggaggagccacatgagagagggagaaggaccgcgtttacctttagagttttgttttgttttttccttctgagtttgctgttggtgcaggaataagggaaaggcccaaggtatccaagcctggggaagggcaggccagccagcacctctgccttctcagggacaagagtagtcctttaccaccctcactccgcctgtcccctctcctactctacagcattaaagactgtgggaccaggaccctaagtctcctttccttctgggtggggagttctggggttcttggtgtgtgggagaagttttataattgcttccaaacagctgggtttaaatataaaatagacacactc

SEQ ID NO: 177411 - DNA, 1080 bp, Homo Sapiens
ggacagcaccatcacttcctgggtatcacctgattttgatacagcagcaggaagcttgttcccagcctaccagaaacaccaaaaccgggcgagacactcaagtcgaaaacctaccacctccaagtttccacatctaacttttgagagtccgcaatcttccagttcagagacattggggatccccttaatccgagagtgccccagtgaatcagaaaaggatgtttccagaagacccttagttccagtgctcagtccccaaagctgtgggaacatgtcagtgcaggcacttcagagcttaccttatgtggtcattccacctgatatccagaccccagagtcatcgtctgtgaaggaagaactcattccccaagatcagaaggaaaacagccttctaagctgcactcttcacactggcactcctaatagcccagagcctggacctgttctggttaaagacacccccgaggacaagtatggaataaaggtcacatggaggagacgacagcacctggcttgcttacctcagggagagaggggaagctgagcagaagccaattcccttggtgaaaagctgactgccatcagtaattctcaatagaaaagagatatgtttttctggagtcataaaggaattcaattcctaggggctttggctttggctttgagatgcaatattgctccggttgcccaagcctggagtggaaggggcattatctccccttacgtggaaccaccactttcctggggtcaaggggatttctccctgggtccgcctccccccagtaggctggggatttacagggcacccagccccccctgggcgggggtacatttgttttttggaagtcttcaagaggaagatgggggggtgcctcccctggggcggccgaggctgggggcctccaaaatccctgaccctccaaggcgcttgtggtggggccctgtgaccttcacaagaggggggctggggccacaccccgaaaatttggttttcggcacaaatcacttttgggtgtgccctaaaaagggctccagcgtttaagggcggcagtgggaaacatttgtgacctttcctatagt

SEQ ID NO: 177412 - DNA, 455 bp, Homo Sapiens
  misc_feature (58)..(58): n is a, c, g, or t
  misc_feature (94)..(94): n is a, c, g, or t
tgaactgcccccccctgaatttagggtgggggtactagtcactgcccaaagtgtgtangggacttgctggaaaacggggatgcttgccccctcncccaggactattgagcccagagagagctgtcctctcattgggtgaactgattgaggaagggtctattgtctttttaaatggcacaattttaagggtttgagggtacagtcccttaacctgccacgggaggggggccccaaactttcttccccccacacttctggttttctgtgtggagggggagcagggatatctaagctgtggtgtgaaagggtaggagagatgctggaggtgggggtgctgtgttctagaccccccatgttatcccagtgtcccctgcccccctggggcgggtccccatgcccccaattctgtggcgcatccagattgtgaaaatgtacaataaatgtgtaatgagtaa

SEQ ID NO: 177413 - DNA, 2063 bp, Homo Sapiens
  misc_feature (1539)..(1539): n is a, c, g, or t
  misc_feature (1562)..(1562): n is a, c, g, or t
  misc_feature (1613)..(1613): n is a, c, g, or t
  misc_feature (1702)..(1702): n is a, c, g, or t
  misc_feature (1822)..(1822): n is a, c, g, or t
  misc_feature (1825)..(1825): n is a, c, g, or t
  misc_feature (1855)..(1855): n is a, c, g, or t
  misc_feature (1957)..(1957): n is a, c, g, or t
  misc_feature (2022)..(2022): n is a, c, g, or t
gagcatcatctctctgacagagagtttgtgttcaaagaacctcagcaggtagtacgtagagctcctgagccacgagtgattgacagagagggtgtgtatgaaatcagcctgtcacccacaggtgtatctagggtctgtttgtatcctggctttgttgacgtgaaagaagctgactggatattggaacagctttgtcaagatgttccctggaaacagaggaccggcatcagagaggatataacttatcagcaaccaagacttacagcatggtatggagaacttccttacacttattcaagaatcactatggaaccaaatcctcactggcaccctgtgctgcgcacactaaagaaccgcattgaagagaacactggccacaccttcaactccttactctgcaatctttatcgcaatgagaaggacagcgtggactggcacagtgatgatgaaccctcactagggaggtgccccattattgcttcactaagttttggtgccacacgcacatttgagatgagaaagaagccaccaccagaagagaatggagactacacatatgtggaaagagtgaagatacccttggatcatggtaccttgttaatcatggaaggagcgacacaagctgactggcagcatcgagtgcccaaagaataccactctagagaaccgagagtgaacctgacctttcggacagtctatccagaccctcgaggggcaccctggtgacgtcagagctttgagagagaagcttcactgaaacggagcaaaccttccactgagaagccacttcaagaggctggtgctgctagatctcatgatgtggctgttgggaagatggtggggtttgtttgccagcttggagtcctattaaatgaaagccagcaactcatgttggtaataggtctactgtgggaacagttatccctaaccacagctcaaaatcgctatcatctttaggcaaattaaaatctatgtggcagtgctcatgacacaaccacaatccgaaacatctccaatatttccctcaccaaaacccgatcgcaaaacgactacaagcacgaaccgccgaatcgtaatggtccccgcgggaacccctatcccctctatagcctagaaatttcttcggtccggtccccccgctttcccaaaaacttttccaaaacaccccccgtttggccgcggcggtctcccttatggcacaataacccttttgtcccatcttgtttttccccccacaaaacccccgggccctacgccccatagggtcctcgcggcttttcttcccaccgataaaaaaaacccccccgcgggtgttaaccacacacaccgcggctctgtaaacaacaaatttccctaaggcagggcggggtccctggggaggagggcctcaactcacctgcgggatcttcctatcccacaaacagagggcgcggcgcctcttgcgcgccggcgcccctccgcccgttcgtctcacaaatttttctccgccctctcacgccctgtccttctaccgcccgcgtgtctgtgttttcgcctgancgccgccgctaccgcgtggttcnttgccaccgcggcctgttctctatttaacgagtgtggccccgtcctcgccnaccactatcacttctgtggaagagagccttatacttattgcgaccccgccgctcttgtctttgcgtcacgccacacttccttgtatttnatttccgccgccgcccgtggctgttctaccccacgacacatcacctttgtgtggtgtccaccccttctcgcgctggtgcacgcgactattattgtctctgacgcgcagcgggagggaganaanacgccgcgcgcggggacgcaccacacaaanataagtgtgcactcataattgccgtgcggcggccgtctcacgagaagattctatgtctgttgggtgcccaccaactcctctccgctcgataattattgtgtnctcccgacccattaccacaataaacacgcgcccctccagtctataacactcttttccaccgccantatatacgccccgcgtctcttctccccgcccctcaaccccg

SEQ ID NO: 177414 - DNA, 499 bp, Homo Sapiens
ggaggtgaattacaaaagtccagccattatcatcctcctgagttatttgaaatgattttttttgtacattttggctgcagtattggtggtagaatatactataatatggatcatctctacttctgtatttatttatttattactagacctcaaccacagtcttctttttccccttccacctctctttgcctgtaggatgtactgtatgtagtcatgcactttgtattaatatattagaaatctacagatctgttttgtactttttatactgttggatacttataatcaaaacttttactagggtattgaataaatctagtcttactagaaaataaaaggagctgtttgtggctttgtttgacaggtcttcagtaagaataatgttttggctttcacatatactcagtttaagtgcttagtattaataacaagccatgaagggaataaattcctcttcactgagacatagacttggaataaaagacattttaagctgaag

SEQ ID NO: 177415 - DNA, 676 bp, Homo Sapiens
  misc_feature (276)..(312): n is a, c, g, or t
  misc_feature (501)..(512): n is a, c, g, or t
  misc_feature (541)..(551): n is a, c, g, or t
  misc_feature (616)..(624): n is a, c, g, or t
gggggccttcagcgcgggtcctggtgctgcggccacaccaccctggggtgctcattgacagagctgccataatgaacttgaaaggacgggaatcacgagggaagctggggctcccctgcccacaggagaggatccccgttcttcaagcttctctgctcagtgtctactaacgaccgacatttgctaatgtaaataatagtaaattattgagaattctaattcttttacacagtctgtttttaatctattttaattaaataaaatctatgactctannnnnnnnnnnnnnnnnnnnnnnnnnnnnnnnnnnnngaaccaacgagacgcggactagtccatcacagacccaaacacacagaaccactctatcagaagcgtggattaaagggtccattcctcgggggtggcctgtggcaggatcccggaatgggtagctggctgtgtggggcggccgcctcccggcccccctgaaaaaaattttttgtaaaaacccattttgtnnnnnnnnnnnncggcgcccccctaggggggaacaacgcannnnnnnnnnnaaaaactcgtgtctccccagagggaaacaccgcgcgcgcaaagagacaaaggggcgctgcggagnnnnnnnnnacccaacataaaaaaccgccccgcggggcgacaacccccgattcgttttctt

SEQ ID NO: 177416 - DNA, 595 bp, Homo Sapiens
ctggtgacttcagggctccttttggggccagatttgggttccctttaaccaatgccatcaggatgcacttgctgcaagtagccctctgttctgaacacagcacggggcccaggatgccccgtccccctttggctcaagctggccggagcctgatcacctgccctgctgagtccccgcgctgagcctaagtctccctccccttggggcctatgcagaggtcccacaacacacagatttgagctcaaccctggtgggcagagaggtagggatggggctgtggggatagtgaggcatcgcaatgtaagactcgggattagtacacacttgttgattaatggaaatgtttacagatccccaagcctggcaagggaatttcttcaactccctgccccccagccctccttatcaaaggacaccattttggcaagctctatcaccaaggagccaaacatcctacaagacacagtgaccatactaattataccccctgcaaagcccagcttgaaaccttcacttaggaacgtaatcgtgtcccctatcctacttccccttcctaattccacagctgctcaataaagtacaagagcttaacagt

SEQ ID NO: 177417 - DNA, 428 bp, Homo Sapiens
tgacaaagaaacaactttaatacagtgaggatactggggaacagaccagatgtgagcagacagggaagtctttagcaaaactgtggagtgcccaaagcttggcttctgatgcgtggagcctttccgttttgtgttcttcctcctcactccacatcccacccaagaaacctggtattttaatattctcctctttgctccattaaagcatcaaacatattcacacaaggtttacgtgaccaaggagtgcaagatagggattaaaaaatagacttgaaataccagctctgccatctgctaactttctgaccattttgggcctcaagttcctcaccaacaaagtgagaataatgatactacccagcaggttgttaccgctatgtttattagtgttcatcctattggagcaagctgactgctaacaactttaa

SEQ ID NO: 177418 - DNA, 408 bp, Homo Sapiens
gcgaccgcggtcgggcagcgtgtccacgatctgctcaatggtcaccacgcccttggcagtcggtggcggggctcgcatggttgggggcgcattggggatccaggagcaccagtcgtactggccgaagttgaccgcggcgtgctgggcggaggcggtgaagatcaccacggtcaggtactccgacagctgctcccggctcttgaccgacttggggaagcctgaggactttgcggccccgcatgccggtacacgtagacaatcgttcacggaagccctgcaagctccgggttcctcctccaccacctggttcgccctcgtagtagatgtctaccacctcggccgtgaacgtcctgatggcttcccacaccaggagcccgtcgtcccggtagaagtagtaggggatgtctt

SEQ ID NO: 177419 - DNA, 674 bp, Homo Sapiens
ggggaccaacagcctggaagagaagagtcgccttgtgagtgccttcaaggagaggcaatcctccaagaacctgctttcctgtgaaaacagcgaccgggatgcccgcttccggcgcacagagactgacttctctaatctgtttgctagagatctgcttccggctaagaacggtgaggagcaaaccgtgcaattcctcctggaagtggtggacatactcctcaactatgtccgcaagacatttgatcgctccaccaaggtgctggactttcatcacccacaccagttgctggaaggcatggagggcttcaacttggagctctctgaccaccccgagtccctggagcagatcctggttgactgcagagacaccttgaagtatggggttcgcacaggtcatcctcgatttttcaaccagctctccactggattggatattattggcctagctggagaatgcctgacatcaacggccaataccaacatgccatcaaacatgagggagtggtggttgctacggtgatggggctcagagcagaaccaaagcatgattgtgacctccagaggtgatggtaactgcacacatggtttccaagggtcttcagcgttcgccacagctacctcccaaggaaaatggacatattctttttggaaataaaatacttctaccaacataa

SEQ ID NO: 177420 - DNA, 729 bp, Homo Sapiens
  misc_feature (354)..(380): n is a, c, g, or t
  misc_feature (392)..(501): n is a, c, g, or t
  misc_feature (505)..(505): n is a, c, g, or t
  misc_feature (507)..(534): n is a, c, g, or t
  misc_feature (536)..(536): n is a, c, g, or t
  misc_feature (592)..(646): n is a, c, g, or t
gtaccaaagtcaactgcacgtgttttatatttttaagagatcgtaggcaattacagatcgaagcctcctatctccacatctctgaagaagctgaggggtgggggagagaatgacttctgccttcatctgcagtaacggggggacctatactgacctcttccccagccatttagaaacaagttctagggtgggttggaaaatctccaagagccctgacctcatcttccacctcagcaaccatgacctgaaacctcagcgtgaatttgggggatttttcagtggaacccttgcccccaaatgtcgaccagcccccaaatgtcgaagaattttcttcttgccaattttgttgtttannnnnnnnnnnnnnnnnnnnnnnnnnncctggaactccnnnnnnnnnnnnnnnnnnnnnnnnnnnnnnnnnnnnnnnnnnnnnnnnnnnnnnnnnnnnnnnnnnnnnnnnnnnnnnnnnnnnnnnnnnnnnnnnnnnnnnnnnnnnnngaanannnnnnnnnnnnnnnnnnnnnnnnnnnncnttgggggggccgcccctcggccccctccaaaaaagttttttttagaaaaccttttnnnnnnnnnnnnnnnnnnnnnnnnnnnnnnnnnnnnnnnnnnnnnnnnnnnnnnnccaaaaagcgttggtttccccaaagagaaaacccccggggcacaagaaaaaaagagggggtgtggtgggatttcccccacacc

SEQ ID NO: 177421 - DNA, 574 bp, Homo Sapiens
  misc_feature (72)..(72): n is a, c, g, or t
ccagagtcctgcccttgatgcccagctcagtgccacaaagctcatacgagggatgttccagtggatgaggcncaccaggaagcacaggtccaaggctggtcccacacttatcagcagcaacaactgtcagttcatcctgcatgggaaaaaagttggaatgggagtctgaaatggggctactgtttcagtcctaacgtgctgtgtgacattgggacaacactttccctctctggacctcagtttccctctgtatacaaggatcagattcttgctgtgacccaagaactcctgaaatcatatagaaaggctggggtgggccctgtcattcgtggttgatttcaatacactcaagtgccattcatcctttaagaaaaacatctggatatcaaggtggaaatggcccatttaatgattgattatatcattttgtggatatagttataatctgatgggcctggctgggagtggaagaagggaagccttttgcaaatagtagagtatcagttgcaggtgccaatgactaactttttgaattctatgttggcattaacaataaagcattttgcaaacactg

SEQ ID NO: 177422 - DNA, 705 bp, Homo Sapiens
  misc_feature (124)..(139): n is a, c, g, or t
  misc_feature (150)..(150): n is a, c, g, or t
  misc_feature (153)..(270): n is a, c, g, or t
  misc_feature (276)..(291): n is a, c, g, or t
ggggaggaaacccagccgcggggggtgtggcccgagttttgtttttggagaggtcattggggcggtgggcttttggcttgggggccgccgcggcgaaaaagggagtttttaaaaaggttttttnnnnnnnnnnnnnnnncgtttgaaagngtnnnnnnnnnnnnnnnnnnnnnnnnnnnnnnnnnnnnnnnnnnnnnnnnnnnnnnnnnnnnnnnnnnnnnnnnnnnnnnnnnnnnnnnnnnnnnnnnnnnnnnnnnnnnnnnnnnnnnntgttgnnnnnnnnnnnnnnnngaaagttcaaaaaaaatatttatttataaaaaatacaatgggataagtttatgctgagaaatgcagcaataaatacagttgaagaaaacagagcaactctacattgatacattggcacaaacaggaagagcaaatgcatcacccaggcctaaatgtccacaggccacttttgtacatgctcttttagaaacaccactctgaaaagatcttgttcgctaggtaagagaatgagtacacatataatcacaaatgcacactgatcatgactttatttaaaaattagcaaacaatactgtagaaacattgatatgtaaatttctaaaatgctgcatcttaaatttagttggcaaagaccacatttagcaataagcatgagtttagtcttccatgtagaaaccagatacactaaactgt

SEQ ID NO: 177423 - DNA, 285 bp, Homo Sapiens
tgtatgatactataattataaatacctgtcattgtacatatgtccaaccccctaaaatgtacaacaccaagagtgaaccctaatgtaaactgtggactttgagtgataatgatgtgtcagtgtaggttcatcaattactgcaaatgtacctctttggtgggagatgttgaaaatggtggagactatgcatgtgtggggacaacaactatataggaaatctctgtaccctctcaattttgctgtaaacctaaaattgctctaaaatataaagtctattaaaaccac

SEQ ID NO: 177424 - DNA, 321 bp, Homo Sapiens
tgccaagatagttacagtgctgtggggtttaaagactttgttgacatcaagaaaagactaaatctataattaattgggccaacttttaaaatgaagatgctttttaaaactaatgaactaagatgtataaatcttagtttttttgtattttaaagataggcatatggcatattgattaacgagtcaaatttcctacactttgctgtgcaaaggttgagagctattgctgattagttaccacagttctgatgatcgtcccatcacagtgttgttaatgtttgctgtatttattaattttcttaaagtgaaatctgaaaaatg

SEQ ID NO: 177425 - DNA, 500 bp, Homo Sapiens
  misc_feature (94)..(94): n is a, c, g, or t
  misc_feature (125)..(164): n is a, c, g, or t
tgccagcgaggtcggggtagagctgatgtttctgaggacacccagtcctctagggcccgctcatcatctgatgagtcctggtcacggttcgtcntcgttgcgctgtaccacggcgccgaggctgnnnnnnnnnnnnnnnnnnnnnnnnnnnnnnnnnnnnnnnngagcggtcatggactcgattttcatcattaatggagtaatgaccagtgtcctccatgctgtcagagtccttatcttcacctgagctctctgtgtctgtgcctcgactttctgtgctggtgcggttggggccaccatcatccccagtcaagctcaaactcaggtctgaggcctccacttcaatgcctgaggatgtctccctcccctcttcagctccagacatctcctctggactgctagacaggcttccattagctaagtctgttctgccatctgtgctgctccctttgctggacatcttgaatgatgtttctgtagccagcatctgcagcggacgc

SEQ ID NO: 177426 - DNA, 295 bp, Homo Sapiens
gtcaactggaaaaaagtgtttaaaactgtttttttcttaagcaaatttggtgatgtcatcaatatctatgatatcgattggtaaaaggtctttctttgttgaggatttgagctctctttttaagagtttattttattttaaaggaacatatgctttgaataacaattctctgggcatgtttaactaacctaggtgggaaaaccatggtgctgtttaattgtaaatagattgatataagattggaccagtacttgatgtgtataattttagtatgtagggtttatgtgcttttttt

SEQ ID NO: 177427 - DNA, 333 bp, Homo Sapiens
agaaagtggaataattccactgattgtgataatggtttcaatttctacacaatataaatatccagtataaaggaaagcgttaagtcggtaagctagaggattgtaaatatcttttatgtcctctagataaaacacccgattaacagatgttaaaccttttaatgttttgatttgctttaaaaatggccttcctacacattagctccagctaaaaagacacattggagagcttagaggataagtctctggagcagaatttatcacacacaaaagttacaccaacagaataccaagcagaatgatgaggacctgtaaaataccttgtgccctatt

SEQ ID NO: 177428 - DNA, 438 bp, Homo Sapiens
  misc_feature (20)..(20): n is a, c, g, or t
  misc_feature (31)..(31): n is a, c, g, or t
  misc_feature (37)..(37): n is a, c, g, or t
  misc_feature (57)..(57): n is a, c, g, or t
  misc_feature (103)..(103): n is a, c, g, or t
acccaagggaaaaaacgccnaacctgtgaancccttnaaaaagggaaaaaggcgccnaaaaaaaccgggtctccttggctgtctgtgggccgccccctggccnaccttgtccccggctcgcagggtgcaggagcgcctcgttctctgggtggccggcttgctgctccggtttgggctgtcttaccataacaccgtcccagggctctgcaggccactgtgagcgctggctccctgggcagtgctcctccgtgtggactgtgcctcaggccagggctcaccagctggggtcctgtccggaaggatgggatctttctgggagctgcgccggacagagtggggagctcctagtttgtggggggaagctttgatatccatgccacgtccatccaccccaccccttttcgtcacgagcacaatggtcttacattggatttttgt

SEQ ID NO: 177429 - DNA, 374 bp, Homo Sapiens
gcaaaggaggacgaggacgactgggaatccgtagggggctcccatgacaccttccccccccagaccccagacttgggccgttgctctgacatggacacagcccaggacaagctgcctcagacctgcttccctgggagggggtgacggaaccagcagtgtgtggagaccagcttcaaggagcggaaggctggcttgaggccacacagctggggcggggacttgtctgcctgtacttcatggggggacggctccacccagcctgcgccactgtgttcttaagaggcttccagagaaaacggcacaccaatcaataaagaactgagcagaaaccaacagtgtgcttttaataaaggatctctagctgtgcaggatcc

SEQ ID NO: 177430 - DNA, 383 bp, Homo Sapiens
  misc_feature (184)..(207): n is a, c, g, or t
tttttccattaagttgtaggaatttattttaaataacctacagttgattaaaagggaattcatgataaaaatagaagatacttgaggaaagatgtgggaaatggactctgcacacacactaaactaacaatgcctctaaaactaatgattatagcaaaaaatgtcttcacattaaaattctgcnnnnnnnnnnnnnnnnnnnnnnnnacacaattacaaaagaaaaaataaaagccctaaaatcttgattatttttcctttttttggaccaaatactcattttcctctaagtttattgacctgtgaaactttttatacaataaaatctttcaagtgaaagattagggttaaaaagaaaaagatggatatcttaaagggtaccc

SEQ ID NO: 177431 - DNA, 346 bp, Homo Sapiens
gtttcatattgatgtgtgtctaggcaggacctgtggccaagttcttagttgctgtatgtctcgtggtaggactgtagaaaagggaactgaacattccagagcgtgtagtgaatcacgtaaagctagaaatgatccccagctgtttatgcatagataatctctccattcccgtggaacgtttttcctgttcttaagacgtgattttgctgtagaagatggcacttataaccaaagcccaaagtggtatagaaatgctggtttttcagttttcaggagtgggttgatttcagcacctacagtgtacagtcttgtattaagttgttaataaaagtacatgttaaactta

SEQ ID NO: 177432 - DNA, 902 bp, Homo Sapiens
  misc_feature (404)..(422): n is a, c, g, or t
  misc_feature (424)..(634): n is a, c, g, or t
  misc_feature (636)..(641): n is a, c, g, or t
  misc_feature (643)..(654): n is a, c, g, or t
  misc_feature (656)..(657): n is a, c, g, or t
  misc_feature (659)..(659): n is a, c, g, or t
  misc_feature (661)..(680): n is a, c, g, or t
  misc_feature (682)..(685): n is a, c, g, or t
  misc_feature (687)..(691): n is a, c, g, or t
  misc_feature (694)..(699): n is a, c, g, or t
  misc_feature (701)..(703): n is a, c, g, or t
  misc_feature (705)..(710): n is a, c, g, or t
  misc_feature (712)..(716): n is a, c, g, or t
  misc_feature (718)..(720): n is a, c, g, or t
  misc_feature (722)..(725): n is a, c, g, or t
  misc_feature (728)..(733): n is a, c, g, or t
  misc_feature (735)..(749): n is a, c, g, or t
  misc_feature (751)..(753): n is a, c, g, or t
  misc_feature (756)..(757): n is a, c, g, or t
  misc_feature (774)..(776): n is a, c, g, or t
  misc_feature (779)..(779): n is a, c, g, or t
  misc_feature (781)..(784): n is a, c, g, or t
  misc_feature (787)..(788): n is a, c, g, or t
  misc_feature (793)..(794): n is a, c, g, or t
tttatcccctttcctgtagaaatttagggtttctgctgtcttttataacgaacaatgctagcttgactattgcttgtacaaaccgttttttgcccaagtcggactattttcttaggttaaattccttggtgcagaagtgcgagggctgtatttaggcccctaaaggggtggtaccaaatcgccctcccccaccagcataagagggggccggcgacacccttgcccaagctggattttgcagacctggtaggcgtgagatagtatttcactgtagcttgtgtttcctgtaagtatagtcgaacgtcgtgatgttcctgttacatctatgttacgttgatcattgttaccactgacagtcgtttcgagattggaaaatatgtttattataaacgtttgactattcnnnnnnnnnnnnnnnnnnncnnnnnnnnnnnnnnnnnnnnnnnnnnnnnnnnnnnnnnnnnnnnnnnnnnnnnnnnnnnnnnnnnnnnnnnnnnnnnnnnnnnnnnnnnnnnnnnnnnnnnnnnnnnnnnnnnnnnnnnnnnnnnnnnnnnnnnnnnnnnnnnnnnnnnnnnnnnnnnnnnnnnnnnnnnnnnnnnnnnnnnnnnnnnnnnnnnnnnnnnnnnnnnnnnnncnnnnnnannnnnnnnnnnntnntntnnnnnnnnnnnnnnnnnnnngnnnngnnnnnagnnnnnngnnntnnnnnnannnnncnnncnnnnagnnnnnncnnnnnnnnnnnnnnntnnncgnncctccccccgcccttcnnnccncnnnnagnnttgcnnaaaatatgtctgaaagcacccaagcccccaacaccacagaacggtgaacaagccgcagacaaatagtcggtgtctaccctcctacaccaagaagtgtctcccccccca

SEQ ID NO: 177433 - DNA, 793 bp, Homo Sapiens; identical to SEQ ID NO: 910
  misc_feature (634)..(634): n is a, c, g, or t

SEQ ID NO: 177434 - DNA, 448 bp, Homo Sapiens
  misc_feature (22)..(22): n is a, c, g, or t
  misc_feature (49)..(49): n is a, c, g, or t
  misc_feature (346)..(346): n is a, c, g, or t
  misc_feature (352)..(352): n is a, c, g, or t
aggcacctgctgtgaaaacatntgaggagcctgagtgccaacgacatcnactgcccaggctgcaatatgtcaaggtgggaaactgtaaatctgaagtagaggtggatatccactaactgccagggcaaatgtgccagcaaagccatgtactccattgacatcaacgatgtgcaggaccagtgctcctgctgctctccgacacggacggagcccaagcaggtggccctgcactgcaccaatggctctgttgtgtaccatgaggttctcaatgccatggagtgcaaatgctcccccaggaagtgcagcaagtgaggctgctgcagctgcatgggtgcctgctgctgcnctgccnttgcctgatggccaggccagagtgctgccagtcctctgcatgttctgctcttgtgcccttctgagcccacaataaaggctgagctcttatcttgca

SEQ ID NO: 177435 - DNA, 653 bp, Homo Sapiens
  misc_feature (18)..(18): n is a, c, g, or t
  misc_feature (26)..(26): n is a, c, g, or t
attgcagaacgacccgcngtggttangaaagcaggctggtaccgggtccggaattcccgggatatcgtcgaccacgcgtccgcccactgctcctccactgacatccttcttagcagaaacttcatgaaaaagtttttgctgacacagaacaaacctgaaagtagtatctactttctaaatactactttgcttttcagtagtggatttgatatttataatgttctctaaagcttgcaactttttcagcaacgtttaaaaatagattaacctggaataacttacttgtttgctgctaaaatactcaagattttgccatttttaaacaaccagtccctgtgatacaactttgaaaaaacttttaaaaatctctgatgtatgggctctttttttcccataagaattatgtacatctgtgatgttttacagggggatccgcttttaaacagtgtacatattggaccacactgaaatgtcatatatcctttctctacttaaaattggttatttactgtgagttcatttccgatgtgttcttggttgttgctgttttctgcctgaagacgtgtatcataaagagctacatggtatggactatttatttgtaatttgacataaagtttgaagaataaagatctataaaagttgaagtttct

SEQ ID NO: 177436 - DNA, 604 bp, Homo Sapiens
ctcagtgctaccccagttccgtcaactctgccaggactgtgatgctgttcaaccttggcagcgcttactgcctgaggagcgaatatgacaaagcccgaaagtgtctccaccaggcggcttcaatgatccatcctaaagaggtgccccctgaggccatcttgctggcagtctaccttgaactgcagaatggtaatactcagctggccttacagatcatcaaaaggaatcagctgctccctgcagtgaaaacacactctgaagtgagaaagaagccagtgtttcagcctgtccacccgatccagcccatccaaatgccggctttcaccactgtgcagagaaagtgatacttcacttttggaaaactgttacctgagacccaggggagaatttactggccattttagttgtatcacagcagaatgaataaaagatggtgaaggctgttaattttgagtcaattctaccccttacttttggccaaaagcttacttaaaattaaggatttactaagtcatcatcagctgtttttcttaatttcagccagactattaattttgagccattatgtaatatatccataggcaattaaaacataattttatca

SEQ ID NO: 177437 - DNA, 410 bp, Homo Sapiens
cctggcccggctaccagagatgaagcccagagccgggacagagatccgcttctcagagctgcccacgcagatgttcctagagggtgccacgccagccgagataaccaagcacagcatggacctgagctatgccctggagactgtgctcaacaagcagttccccagcagcccccaggatgtgcttggtgagaaggaacaaggctctttgggagtgggccaaggggaggatattagcagaggtgttttagaatagggagtacatcttgtgttagtccagcagcaactaaacctggctaggaggctgaagatacaggtgtgtctttacccttagccctggagatttcgatttgagagatctggagtggggttccgcagtttctatctgtctaataaacaaacatcctaggtga

SEQ ID NO: 177438 - DNA, 1513 bp, Homo Sapiens
  misc_feature (322)..(322): n is a, c, g, or t
gaaaatttcaagcccagggttaggccaccaaaggccctggggttgatggggggaacccaaccaaaagggtccccttcaggatggggtacagcctcttttggccaatgaaaaaaatatatttatccagtgaaaaaagggaatttctggctccaatctttgcaggcacctgagagagattgctgccccgggcaggtccccaggatgggaagaagtaaatggagagactcaggactgcagccctgtggggaaggggcccctcgcagctgagagcgctccccgagttagcccatctcgatgccctcagggagctccaccaccaccnggggcacagtcctcaggttccgcagcaaagtcccaccggaacttcttggtcaggtgagcttggaacttttcagctttctttctcagggtggcatccacggcaatgctgcaggcagaggaaaagaaaacctgtaaggtgctggtgaggaagttgtctcgggagacaatgtctacgaagaagtcagcggggatctcaccaagctggtggtacaggatggagatgaggttgatgtagagggtgtggtgcttcatcatggctgcttctgaccggcacaggaggttcaggagccgcttccaatgctcaaatgcctcgtacacattccccagcaggaagcacacaaaagcaaactggagttcaccaagcacatcctgggggctgctggggaactgcttgttgagcacagtctccagggcatagctcaggtccatgctgtgcttggttatctcagctggcgtggcaccctctgggaacatctgcgtgggcagctctgagaagcggatctctgtcccggctctgggcttcatctctggtagccgggccaggccctcttggtagcttttgcactcaatgccacagcggggtagattctgccccacgcggtccttggtgtgcttcatggagagcacaggtagcacatcggaaaaggcacagatctgtcgattctcgggctgtagcttctccactgtggcttcgctgatgaagttggtgagtgagatccacttcttcagggtggcatatgggtaaggccccaggaactggtccagctcctggaggttggccctcatggcctccacctcagactctggggctggggacaggtctacctcttccctgagtgtgctccagcgcagcactgtcagcccccgctggtgcaggctaaggaagaaacccatacgagggcctacttccttcggattagccttgtccacagagctgtagtggaggaagtggatgcctggagggatcatcttcacgccccggaacttgggcccgacctcccaggagttatagtcaatcccaaactctgttcccttgggcatgttcaggatgaccacagtggccccttcaaagaagaggcgcttggctagctcaggatccatctgcacggcagccatggggccagtggtgggtgacacaaaagaaccctttttctttgatgaacagcgcctcgccccacggacccacgcgtcc

SEQ ID NO: 177439 - DNA, 834 bp, Homo Sapiens
  misc_feature (744)..(744): n is a, c, g, or t
  misc_feature (746)..(746): n is a, c, g, or t
ggggacgctcgaagggcggggagcagagggagatacagaaaccgacaggggccaggcgcccggtggctccgaagcggggaagtgggacaagatggtttacatctcgaacggacaagtgttggacagccggagtcagtctccatggagattatctttgataacagatttcttctggggaatagctgagtttgtggttttgtttttcaaaactctgcttcagcaagatgtgaaaaaaagaagaagctatggaaactcatctgattccagatatgatgatggaagagggccaccaggaaaccctccccgaagaatgggtagaatcaatcatctgcgtggccctagtccccctccaatggctggtggatgaggaaggtaaatgtctgctctaagaagcagacaaccggacatgcgcattcatagcagaaggaaaccatcaagaagtggaaggctgaccatgatgagcagtagatgaatgtgtatgtctaaacaaggactgctctgtgtcctcacagatgaatgaggtcatgctgggaattccctctgcagggaactggcctgactgacatgcagttccataaatgcagatgtttgtctcattacctttttgtatagtttattaaagtattaatatagttttaataagtaaatatttttaggttgaagaagggactcctccatctttatattcacgaaaaaagcaatctggaagaaaaccaatttaaaggcctgggggatttaggcccncngtggggaagtcaccgctcaacaaattaaaattgttcgggcgccctccgggcccttcagaaaagtgttttttagaaccattcccgtttt

SEQ ID NO: 177440 - DNA, 1827 bp, Homo Sapiens
  misc_feature (549)..(561): n is a, c, g, or t
  misc_feature (839)..(878): n is a, c, g, or t
  misc_feature (1802)..(1802): n is a, c, g, or t
  misc_feature (1816)..(1816): n is a, c, g, or t
gagggaggatatgtacgggttagggaacctggctgctgctacttcacctaagagaagtgtgatgtgtgtaaggaaaagcacgatttattttctcctcagccaccgcagatagccgcgtagaatggagtagatacaccccggggcgttgcgttttacagtgaagaggcgatatatatggaggcaaattatttgttgtggtggcgctgaacattctaaataccggcgcgggacgggatgatatttctcattatctccgagttttaagaggttggtcggagagaaacaacagcggcgaggaattacaagtgtggctcgcacgggtcctttgttgccgtggggggcgaggggttatgtgttggggggcagaaaagcgggccttagagggaggcattatgctcccaccgctgtgtgcggaagtaggaagtgtgttctcacttcaaagggcgcggagtaatataatatgggatattccccgaatccccggactggagaggggcctgtgaatggaaagtgtcgcggcagagtaatttgcggctggtgacggccccnnnnnnnnnnnnntggtaaaagggaaaatccgatgttgtcgcttggagatccctattttgtattggggggcgagtagagggccccaaggggtggggctagggagtttcggtcgaaaaccgaatggattcccacccgggccgttttttatttggggaggggtccaggaccaaaaagtttgtacaagggttttctaagggagcaggtatgtctcaaggtagattgctttttttggtccgggtttccaaacggatggtttagaaatttttttggtggtgtgatgcgggtgtcannnnnnnnnnnnnnnnnnnnnnnnnnnnnnnnnnnnnnnncctatttagaaaattttattgaatatcatacttatcaaaagaaaaagttaattttccccaaaggcacccttcatttcacatgatctatactctaatgttcttttgtattaaaaatatggttaaatatggaattagtaaaatgcagcatataaaacttcatgctgagcaaaaacaagtccaaaacaactttaccatataaccatagaatagttcccacagtacatttcctatgtaaattatgtttgaatgcaatttttagaaccattttaagatacattttgcaatctgttaactgtaggcatccgcatttttcttccattacataatctgtttatctgattaagttggcaatatctgctaggatccagcagaatgcaggaaaaaaagcagttatttctcaaggtttgagaaatctggtccacctttagtgtagtttcctgagatttctgctccactgaagtcaaaaccaggattttctttttggaatctctctaatgtaagctttctctgcatttggtcttgcacccaaggatccgctgcatattcagattctagtagagaagtccaacaatttgctgcatctctctttgtctttgtaagaacaatacgaaccatttttctgtcctccaaagtccatgttccctcatcagctattgtagaatcaaagagtttgccctcttcaccacctgcttgaccactccacaaacatgcaggattttcaagcttttagatgagaaaactaatcacctgacatcatctctaaattctctgcccgttattctatccctattttctttgttgtcctttcctatatttatctatttatgaattacgcttccgtacaggagcttaacctctccactgcaggtacgttatctgttgtcttcctgcctgtctttcagtgcacgggaagaaatatttgtntcctttagcaactnagttaaatctg

SEQ ID NO: 177441 - DNA, 400 bp, Homo Sapiens
ggggaaaaatgccctctgtccccaattcctgaagtaacagctctggttcttgcccactacccagagttctcctagcaaatctgagcatctgacagggtgaaaaattctgaatggcttcctgatgccctgactttatgggatcaaattcaagttgcacccctgcactcagtgcccttctggtatcatctgccaagacccagggcctgcttcaccacagccacaataaagtcctttcaagccctgataatgccatgttttgtcctaaccttttgctgcagttaattactcttcctattatcttccatgaacttaagactgggcaaaaatgtttccttatctgtgagccactctgaacacaaacaggtcatgaagatagtgttgaaaacaataaatgacaacc

SEQ ID NO: 177442 - DNA, 1047 bp, Homo Sapiens
ggacgctgggagggcagaggacagacagccccggggctgcgacttggttctgtgtctactgttagaagttgagtgggaagctgcaggcccgccaggaccactgggtccctacagagcaaaggcctgcgtgttcccaaacagccgttgcccccgtggccgtggtaggtaatccatattggatgtcataaggaccagggggatatttaaagagagaaacagaaaatatatagagatataaaattatattcacagtttatctacagatttttcgtaacaatctttcttttccagtttgatactgtaaatctatcagagcagagccgggggcacgggcacaggtgggagttgggagcaaagcggaggcccgggctgcccgccgtcccccttcatctccccacggactgtaccaggcagctgggccccgcaggacaggccgcagcgggtggccggttctgtcccgtcttggggttcttggtgtccacgtcttgtgggccgtgggcttctacctgcccttggcctgcagtgctttgctggagaagggactccctggtccccagggtggacggagccgctgtcaccgcccagagctgggccggggaagcacggtgtgttctgcttttcttttcagattgttgaaatttcattgtcatgatttaatatatggatttttttatttaagaaaaagacgagggactctttgtcacgtgggtttgttttctgtctccgtgcctccggcttcccaaagagatccaggtctttgcgtttccagggcgtggggaccccggccccctatgccgccacgccgccacaccgcctcaccctggcttctgtgctacttggcagttccatttcattatttattttttgtgctgctttttatcatgatataaattattgaaaacagatcacatgtggggccccgtgtctggccgccgccgcccctgccccgtccctgcggccaccacctaatttattgccgtgcgtcctggctgctgtggaactgcttttgtacctttgcaataaaagaaattttcctgggtttcagaa

SEQ ID NO: 177443 - DNA, 819 bp, Homo Sapiens
  misc_feature (797)..(797): n is a, c, g, or t
ggggggagggagagccatcaccttgataatgggatgaatggaaggaggcttaggactttccactcctggctgagagaggaagagctgcaacggaattaggaagaccaagacacagatcacccggggcttacttagcctacagatgtcctacgggaacgtgggctggcccagcatagggctagcaaatttgagttggatgattgtttttgctcaaggcaaccagaggaaacttgcatacagagacagatatactgggagaaatgactttgaaaacctggctctaaggtgggatcactaagggatggggcagtctctgcccaaacataaagagaactctggggagcctgagccacaaaaatgttcctttattttatgtaaacccctcaagggttatagactgccatgctagacaagcttgtccatgtaatattcccatgtttttaccctgcccctgccttgattagactcctagcacctggctagtttctaacatggtttgggcagcacagtttttaataaatgcttgttacattccccgaaaccacaaagcacgaaaatatatccttggcgggccgccctcggcccctcgaaaagtcttttcagaaccattttctttgggcgcgcggggcccccgtagggtaacgggaacatgggccattagcgttggttcctaaagggaaattccggggaccaggaaccaaggagcttggggaacttccctccacccatataacaaaacgccccccggggcgggcaccgccccagagcgggtttctgtgagaaccaaaattccccanaagggggtgggttctccgggta

SEQ ID NO: 177444 - DNA, 435 bp, Homo Sapiens
cgggtagggcttctcgccggtgtggatgcgccggtgcgaagtcagatagggcttattggtaaagcgcttcccgcactcggggcactggtggggccgctcgcccgtgtgcacgcggcggtgagcgatcaagttgggcttgtgccggaagcgcttgccacaacaggcacactggaaggggcggtcgacggcatctccaccgggccggggggcggtcaccgcggggcgcccctgggcgaggcccccagagccttggctgcggcctcctccagggcctcggctacgtgcacccgcttgtgggcaactagctggtcccactgggcaaagctccggccacagttgccgcatatgaagggccgggcctccggggcgggagggtggcaccgcgcagatgagctcgaagctgctttcgtcgccagaagcgtctctcgcatttgg

SEQ ID NO: 177445 - DNA, 538 bp, Homo Sapiens
ggtttcaagataaaattgataccaggagttccaattactgaaaattacttggaaatagaaggaatggctaattgtctcccattctatggagtagcagatttaaaagaaattcttaatgctatattaaacagaaatgcaaaggaagtttatgaatgtagacctcgcaaagtgataagttatttagagggagaagcagtgcgtctatccagacaattacccatgtacttatcaaaagaggacatccaagacattatctacagaatgaagcaccagtttggaaatgaaattaaagagtgtgttcatggtcgcccattttttcatcatttaacctatcttccagaaactacatgattaaatatgtttaagaagattagttaccattgaaattggttctgtcataaaacagcatgagtctggttttaaattatctttgtattatgtgtcacatggttattttttaaatgaggattcactgacttgtttttatattgaaaaaagttccacgtattgtagaaaacgtaaataaactaatatagac

SEQ ID NO: 177446 - DNA, 462 bp, Homo Sapiens
cgcgcttaagaacattgcctctgggtgtcatgtggaccagacttctgaatagagaatatttataacttttgtatgagagagaattcacactcaacaagacactaccagcaccacgtttacagaggatgaaaacacttcacagtctcccagagccgatcgtcctctcccgccccccaccccgtgcttcagccttgcagggagagtgatgctccaggcaacacggttctgagtcaccttctgacacgagctccctctgcttgctttccaggtcttgaaaatctgaattcacttcagtttagtttatgaattttaggtttcatgataagcctcaagtgtagttggacttttattgaatccttcctaagttattgaaaaaatgtcttttcatggtgaatgacaatatttatgttgcctttagcttcttgaagatttagaagttatataaaaaattaatttaaaagc

SEQ ID NO: 177447 - DNA, 298 bp, Homo Sapiens
gtgttatgtgtgtctacttgtgtagtagtgtgtgagccctcaggggcagggcttgtggctctggtgttaggttcaggggcttcagacccttctacgagctccaagctatcaatggcgcttttctctccctcttcccaaaaccagggcatggagcatgtggctgtcctgaggttcttttactgatgtgccgcccttccacctcctcaagtggtgactttgtgtgccctccccctcctttgtgtattccttctcaatgctttccttggtgttaaccttaataaaaaggcgtcatctcccc

SEQ ID NO: 177448 - DNA, 762 bp, Homo Sapiens
ggcatgattgctttgtgaaatgtgcaaatgatatcacctatgcagccttgtttgatttattttctctggtttgtactgttattaaaagcatattgtattatagagctattcagatattttaaatataaagatgtattgtttccgtaatatagacgtatggaatatatttaggtaatagatgtattacttggaaagttctgctttgacaaactgacaaagtctaaatgagcacatgtatcccagtgagcagtaaatcaatggaacatcccaagaagaggataaggatgcttaaaatggaaatcattctccaacgatatacaaattggacttgttcaactgctggatatatgctaccaataaccccagccccaacttaaaattcttacattcaagctcctaagagttcttaatttataactaattttaaaagagaagtttcttttctggttttagtttgggaataatcattcattaaaaaaaatgtattgtggtttatgcgaacagaccaacctggcattacagttggcctctccttgaggtggcacagcctggcagtgtggccaggggtggccatgtaagtcccatcaggacgtagtcatgcctcctgcatttcgctacccgagtttagtaacagtgcagattccacgttcttgttccgatactctgagaagtgcctgatgttgatgtacttacagacacaagaacaatctttgctataattgtataaagccataaatgtacataaattatgtttaaaaaaaa

SEQ ID NO: 177449 - DNA, 149 bp, Homo Sapiens
gcccccacctcttcctcctcgccttcgggaggaggcagaagagcaggagagcacctgccccatctgtctgggggagatccagaatgccaagacattggagaagtgccggcattcattctgcgagggctgcatcacccgggtctgcaggt

SEQ ID NO: 177450 - DNA, 518 bp, Homo Sapiens
gggggcttcctgtttgtacaaggggccatttggcatacctttcacagcttttatcaggccaagttaaaggctgactacattttttcatcatgaggaaagcagttgaaatgaggcatgagttactgtgcattgggattttagaacaattttctcgtgacagctcttctcgtgaagttaggttcttaaaagtgcccatgatggtcacttaaaatgtgcagtaatagcactgccaggatcaagcatgcaaaggcttttaaattagatcatcccacagacaatacgtttgataatagttttttcttttaacctctttaagtattgattctgcttgagaatattgaagtacttgccagaagttgtggatttcagttttaacaaatgctattaaagtggagaagcacactctggtcttggaattccatttgaggatttagaagtgtcatgtttataactattcagttgtgtttgttgctggcttgttgtaaagcaataaaatttttttggtctttttgtaaaaa

SEQ ID NO: 177451 - DNA, 330 bp, Homo Sapiens
ttggcctgagctccccagagtcctgaggaggagcgccagttgcccctcgctcacagacacacacaccccagccctcctgggccaacccaaagggcccttcagacccaagctgtctgcgcgtctgactcttgtggcctcagcaggacaggccccgggcactgcctcacagccaaggctggactgggttggatgcagtgtggtgtttagtggataccacatcggaagtgattttctaaattggatttgaattcggctcctgttttctatttgtcatgaaacagtgtatttggggaaatgctgtgggaggatgtaaaaatcttgtttctcctc

SEQ ID NO: 177452 - DNA, 885 bp, Homo Sapiens
  misc_feature (461)..(469): n is a, c, g, or t
gggaggtagaactgagagatcctctaccgcagtcgtttgaggaggcggaactgaagttttttcttaattatcatgtgacgggttctggatttaatggggggaaaagggcggaaaaggacaaggatccaaactggcgaatttgctgatcttcgcgtccctctccgctttccggccggcagcgctgccagggtatatttccttttttccgatcctgcaacagcctctttaaactgtttaaatgagaatgtccttggctcagagagtactactcacctggcttttcacactactcttcttgatcatgttggtgttgaaactggatgagaaagcaccttggaactggttcctcatattcattccagtctggatatttgatactatccttcttgtcctgctgattgtgaaaatggctgggcggtgtaagtctggctttgaccctcgacatggatcacacaatattnnnnnnnnngcctggtacctcattgcaatgttacttaaattagccttctgcctcgcactctgtgctaaactgggaacagtttactaccatgaatctatcctatgtcttcattcccttatgggcctttgctggctggggctttaacagaactcggatataatggctcttttgggagagactgacttctaagtacatcatctcctttctattgctgttcaacaagttaccattaaagtgttctgaatctgtcaagcttcaagaataccagagaactgagggaaaataccaaatgtagttttatactacttccataaaacaggattggtgaatcacggacttctagtcaacctacagcttaattattcagcatttgagttattgagatccttattatctctatgtaaataaagtttgttttggacctc

SEQ ID NO: 177453 - DNA, 730 bp, Homo Sapiens
  misc_feature (457)..(466): n is a, c, g, or t
ggtgttgatgatgaaagtttacaggtggatcagagtatgctggaactcagtgtgcataaaatttcagtcagtgaatatcactgaacgtcatatactacttggtatgtgactttggtttgtgttaagaaagcttgtatataatattttttgccatagtaagtgagaaattgtccttaatcatgcctgtttgatggtactaggaaagaaaggggtagagattaattcttgcacagtataagcaacagtgcaacaaactatgccatttaccttttacctcttacttgaaggcagaatcgcaaaacgtttgaaatggcttttctaaactactctactctggtgagagctcatttaccacaagaagccttataaaaaagtatattttgtaataaccccgtagatactgtacctaacaaaacatgactcgtattagctctataaaatatttgtggcttaggannnnnnnnnnacatatatctttttataactttccaggaactaagcacattatctgataattgttgtaaatttttttgtcagtgctttagttcaggatgggcaataaattatttctaaaggaggtctaaaagtggaaagaatggtttgattttataaaatgagttgctagttcattacagctttttacttttgtacatattttgcaaaacatttgcctcttgctattaatatttggctttgtaaaaattactgacatttaataaacatttgtaaa

SEQ ID NO: 177454 - DNA, 1008 bp, Homo Sapiens
gcgaccgcagaagctgcgtgtgaagccgtggcgcagatgtcaggcactgccggtgccgtcgtgccgtggtacagcacctgctccaccgggcgccgctcgcatcgctgcagcaggcgctcccggtacagctcatactgctgctgcacagcgggtgcgacacgcgctccacacgaaagtatacgcggaagagaaagccagcacggccaaggtcgcgtagaaaggggcccgcaccaccatccgggaaatccccgggggtctcatgcccagacgctcccaggttgttccggggcccctgcagggttttgccccgccaaggtagggccggaagctgccaagggaaaggccaaactctgatcccaggggccagccagaagtgccaccaagtggcgggcagcacgggcagggtggccccgaagccacggaggatggtgcagtcaccacgcagggcaacactcacaccatggcaccgctccaggcgagcacgcagctctgcaggcagtgtgcggcgccagggccccaccgtctcctcctggacgtggacctccaaggcagccctgagcgcccggtccagctcctccacatcctgctcaaaggccgagtgcaccaccagctgggccttgccatcagtccccccatctgggggctcttctgcctccaacgggggctgctccagcagggagagggttagggcttgccgcagggcagcagcctcctcctgctcagccacctgaccttgaggctccagtgaccggtggagggccagctgcagagcggcctcctcctccagccacctgggtgccacagtgctgggggccacaggctcctcctcctcatgccctggggtcacctcctcctctggctgctcctgaggcccttcctcctccagctcccgaggcagccagtcctccccgtctaggtctaggccctccagggtggccagcagttctcggacctcctccaggctcacgtcctcctggtcaccacctgtactgtctggggtccacaggg

SEQ ID NO: 177455 - DNA, 419 bp, Homo Sapiens
  misc_feature (46)..(114): n is a, c, g, or t
acagagctagaggatatgtgcacgtacttccatctctctctctgtnnnnnnnnnnnnnnnnnnnnnnnnnnnnnnnnnnnnnnnnnnnnnnnnnnnnnnnnnnnnnnnnnnnnntctgggaatggttctcattctccttaatctattattgggtcagttttcctgcatgtccccagcctcccatcactgccacccactccccacagagatgccctgctcatccgactggggctttgactcccacactgtgtacccctcttgtgtggacgccctgctgccaaaaccttcagcaaacagctttccaaatggaagttgtcactgtcagggcctttacaatcagcaacagcaaaatctacatgctgctgagggtcctgcctcattaagatgcaataaatatgtaagtacataaaaacagcaaa

SEQ ID NO: 177456 - DNA, 460 bp, Homo Sapiens
  misc_feature (322)..(335): n is a, c, g, or t
ttttttgttgccattttggaattagtcttttatcaaaagttatccaagtctatttttcatgagaattaccagggtattatctgcaaattaaaatgccaagcctccaaatcctcataggtatcaattaattatattttccattcctgtctcaacaatttcaacttcctgttttgagcaaactcatcagcttagatttatcaacatcttgttttaaacccttcaaagaacattatgaataaagagaatttaaaacgtttctcagctgagacatcctcattctcaaatgagaatattggcttaatttagagtttctacatggctnnnnnnnnnnnnnntgtttaaatacgtgatactgagttttccagtcatggtaaagggtttgtgctaactgacctcttctttccttgcagggctaactgcagctacctagcaaaattactagctggagttactggtgccc

SEQ ID NO: 177457 - DNA, 384 bp, Homo Sapiens
ggaattgccacaagcagtctgtgagatccttgggcttcaaggcagtgaagttacaacaccagattcagacgttggtgaagacgaaaatgttgtcatgactccttgtcctacatctgcatttcaaagtaatgccttgcctacactctctgccagtggagccagaaatgacagcccaacacagataccagtgtcctcagatgtctgcagattaacacctgcatgatcactgttcttgcttttttgggaagagacactttgttgcaaccctttttcaagtacttgaaagttgaaaatttgaaatcttggtattgatcatgctttaaggtttatgtaaagaaagtgtactgatgttcttacattaaagctttacaaagatttaaacta

SEQ ID NO: 177458 - DNA, 1504 bp, Homo Sapiens
  misc_feature (457)..(513): n is a, c, g, or t
  misc_feature (528)..(623): n is a, c, g, or t
  misc_feature (1218)..(1218): n is a, c, g, or t
  misc_feature (1332)..(1332): n is a, c, g, or t
  misc_feature (1374)..(1374): n is a, c, g, or t
  misc_feature (1385)..(1385): n is a, c, g, or t
  misc_feature (1447)..(1447): n is a, c, g, or t
  misc_feature (1450)..(1450): n is a, c, g, or t
agggcacagggggtttcgcgctgctcctgaccgcggtgaggccgcgccgaccatctctgcactgaagggccctctggtggccggcacgggcattgggaaacagcctcctcctttcccaaccttgcttcttaggggcccccgtgtcccgtctgctctcagcctcctcctcctgcaggataaaatcatccccaaggctccagctactctaaattatgtctccttataagttattgctgctccaggagattgtccttcatcgtccaggggcctggctcccacgtggttgcagatacctcagacctggtgctctaggctgtgctgagcccactctcccgagggcgcatccaagcgggggccacttgagaagtgaataaatggggcggtttcggaagcgtcagtgtttccatgttatggatctctctgcgtttgaataaagactatctctgttgctcacaannnnnnnnnnnnnnnnnnnnnnnnnnnnnnnnnnnnnnnnnnnnnnnnnnnnnnnnntatagaacagacacnnnnnnnnnnnnnnnnnnnnnnnnnnnnnnnnnnnnnnnnnnnnnnnnnnnnnnnnnnnnnnnnnnnnnnnnnnnnnnnnnnnnnnnnnnnnnnnnttgactgtgggtggaagggcccctacccccacaacaaaattcttataaaaaacatttttttgtggggcgcgagagggccaataagagaaaaaagtagcaaacggggtcttcaattcttcaaacaaaaagagagcacagtgggcaccaaacagagggtgttgtgatatcctccacacaaataaaaataaaagcacctcgcggggtgaaaaaccaaagtcggtgttacgtaaaatatacatcataaacgaagtctgtcgaggggctgtatatacggagaacatcaccacacaagcagcaaacaacacaatatggtagtcatcataattcataaagataaattgaccacacgcccggccagcagaacagaaaccatgaagacagacataagtcgggaggataacatatatcaaaaacacacacaatatactcgaccaaggacacgtaaggaaaacgtcccaatgacacaaactgtctcggcgctagcgaagaatacatagttaatataccatcgcagcagacggaagatagagactatgcgcacgcgactaacatagctacgaggcctctacgatatatataaatataagtatttctnacaccataagagcacacaacgaaactaatcccggcacaaataaaatacacaatcattgtagtcccaacactttgtagggctcaccaccatcataatatataactacaacaaatngatgcgcagcagcaatagcgactcaccacgcacacgatgaancgtacgccgtngtgagaatacacgcaacacaatatataataatctcctcttcgccgtcaagaacacatctacnttntctcgagaatcgacacatagaccacgatcgccgtcgtctacatcatcgccccac

SEQ ID NO: 177459 - DNA, 622 bp, Homo Sapiens
cacaccaaggagtgatttttaaaacttactctgttttctctttcccaacaagattatcatttcctttaaaaaaaatagttatcctggggcatacagccataccattctgaaggtgtcttatctcctctgatctagagagcaccatgaagcttctcacgggcctggttttctgctccttggtcctgggtgtcagcagccgaagcttcttttcgttccttggcgaggcttttgatggggctcgggacatgtggagagcctactctgacatgagagaagccaattacatcggctcagacaaatacttccatgctcgggggaactatgatgctgccaaaaggggacctgggggtgcctgggctgcagaagtgatcagcgatgccagagagaatatccagagattctttggccatggtgcggaggactcgctggctgatcaggttgccaatgaatggggcaggagtggcaaagaccccaatcacttccgacctgctggcctgcctgagaaatactgagcttcctcttcactctgctctcaggagatctggctgtgaggccctcagggcagggatacaaagcggggagagggtacacaatgggtatctaataaatacttaagaggtgg

SEQ ID NO: 177460 - DNA, 310 bp, Homo Sapiens
cagcccctcagcaggaagatgggcactggggcccttgggcagggctgacttgacacttttgtgtgacttgagccactgtgcccagcctgaacaccctttcctggtaaaacactccacaaaccaggaagagaaggaatatactgcaacaaaataaaggccagtcatgcaaggcccatggctgaaagtctttcagtcattttagatgaaagactgaaatctttgcctccaagatcaggaacaagagaaggatgcccgctctcactacttctattcaacacaggatttgaagtcaggccgggcacaggtgtca

SEQ ID NO: 177461 - DNA, 322 bp, Homo Sapiens
gattggcattttaaaatcggtatttaaactgaagacattgtcatgttttattaatttaacaaagttgaaagtgactgctctgtacatcatgaccttaacaatgttaatgctgtaagtgaaagttcactgtcgtctgtatactaaatttattggtgtttctaacttaaaagtaagactgcagattatcccccaccagccttagtccaggggtgtggctctgtccgggtgcagtatgcagtcatgtggaaccttgctttctagtcctgggaaaaaaagatgtctctaattactggcttcaataaacacgaatccagactgctta

SEQ ID NO: 177462 - DNA, 879 bp, Homo Sapiens
  misc_feature (355)..(398): n is a, c, g, or t
  misc_feature (400)..(412): n is a, c, g, or t
  misc_feature (415)..(415): n is a, c, g, or t
  misc_feature (427)..(510): n is a, c, g, or t
  misc_feature (515)..(524): n is a, c, g, or t
gggttaagagacagtgatggctagggctcaacaattttgtattcccatgtttgtgtgagacagagtttgttttcccttgaacttggttagaattgtgctactgtgaacgctgatcctgcatatggaagtcccactttggtgacatttcctggccattcttgtttccattgtgtggatggtgggttgtgcccacttcctggagtgagacagctcctggtgtgtagaattcccggagcgtccgtggttcagagtaaacttgaagcagatctgtgcatgcttttcctctgcaacaattggctcgtttctcttttttgttctcttttgataggatcctgtttcctatgtgtgcaaaatnnnnnnnnnnnnnnnnnnnnnnnnnnnnnnnnnnnnnnnnnnnnannnnnnnnnnnnnaanaaacaaaacacnnnnnnnnnnnnnnnnnnnnnnnnnnnnnnnnnnnnnnnnnnnnnnnnnnnnnnnnnnnnnnnnnnnnnnnnnnnnnnnnnnnngcaannnnnnnnnntcacaaatcgggggccggggtctcccatcctcgtatataagaaaaatgggcggtaaaacagagttgctccgcttcggagaccccagccccccgacgataagtccgttggtgtttcattcccctgtggtttgagtccgccgcggggctcacccacagaggaagctatacctgtagacttggactgccccggccgatccctgccaagagtcctcctgccggtgatctcttgttcgtccgctgtgtggtctgttccccgatcacaagacacagatttcgcgccgtgcgacggcacaataagccggtacagtgaagtttcgcccaaccgaccgtaagtacgcgagactgatgcgataca

SEQ ID NO: 177463 - DNA, 522 bp, Homo Sapiens
agcagtcaaagtccttaaaagttgcaggcctagactccctgtcctacctcaggtaccaccatatcccacctcctcatgcagctcctggcaccttggcctcagtgctcctcaaagcatcaagtatgcacttgccttggacagtctgtacttggtattccctctgccttgaatgttgttctcccagaaaaatgcatagttcactcttacatccttcaggtgtcactccactgttacctgagcaggtcgtccttgaatatatacatcagcattccctttcccccctgctttatgtatgtccatagcactcaccacgatctgactttactaagtatttattcatttactgtttgttttcccataccgaaatataaactttctaaggacagaaatttttgtgctttattgttgaatctccaatttgtagaaaaatgcctaccttatattaaacactcagtaaatgtttattgaacattaaaagtattactaatagaactttggtttttgaaagaaataataacttta

SEQ ID NO: 177464 - DNA, 398 bp, Homo Sapiens; identical to SEQ ID NO: 5586

SEQ ID NO: 177465 - DNA, 407 bp, Homo Sapiens
gaggcactgtcagggtctgtccacagtgggtctgtgccaggtctcccgccggtggaaactgttggcttccatggcagcaggaagcggagtcgagaccacttccggaacaagagcagcagccccgaggacccaggtgctgaggtctgagagggagatggcccagcctgaccccactggccactgccatcctgctgccttcccagtggggctggtcagggggcagcctggccactgcctagctggaatgggaggaagcctgcaggtggcaccggtggccctggctgcagttctgggcagcatcctcccaagcagagaccttgctgaagctcctggggtgtggggtgtgggctggaagcactggctccctggtagggacaataaaggttttgggtctttctgaaaaaaaa

SEQ ID NO: 177466 - DNA, 427 bp, Homo Sapiens
caaagaattcttgctggtgagaaacctaacaaatgtaatgaatgtggcaaggtcttctggcacaattctcacattgtacaatattgcaaaaattcatgcttgagagaaacaaaaacactgagagtgggaaaccattatgacttcaaacattcatcaacatcagagaatccatactaaagagcatttataataattatatgtgatagagattttccgcaggccaaagtctcactaggcatcaaaaacttttttgatgaaaccatacaaatgtaacgtgcatgcttaagcttttacccaggcatcaaaaccggaacatcacagggtttatactggagagtaactacacaaagataatgtaataagcctttcagtgtaatattcatgattttgtcgtgagagatccactcaataaaaaccaggcaaatgt

SEQ ID NO: 177467 - DNA, 607 bp, Homo Sapiens
gggcttccaaggcttttttgccgctggtgtcaggagtattttcatattccaataccgataaatctttgaggtttctgggtgtctctggggagcccctgggccagattttcctctagactccagcccatctcttcagagcagctctgcttgagttcacagatgactgccaagcttcagacaccctacagaaaaagggttgagacccagtgtggccatgccagctaattggacctcacctcagaaatcctcagccctggctccagaggatcatggcagctcctatgagtgttaaccttgatgcctgaaagaactggaaattatgaagatagattcagaagtcaaatatgttaactaactgcattgaagagtagaagaaaacaatagcctagtaggtttttactgggattagtgaaacaactgctatgttctcagcaacccactccaaagccaaagtcaaaactaaaattgtaaaatatctcaaaaacaataaaaatggtatatatatatcagaagctctggtatatagcaaaactgtactaaaaataatttagaaccaataatttatctcatgcaacatgaataacaaaatctaaatgaccaaccacca

SEQ ID NO: 177468 - DNA, 533 bp, Homo Sapiens
ccttgcgtgcattttcttaccgccacgccagacccatccaggtctgtgttcaaacctttcatcttcggggtgggggggcccaggccccccaggtgctgtcccccacttttggagcacaagaccctgttcggaccctgccccgattccagactcaggtagatcgtcggcataccctctaccgtggacaccatggcagccctggggctgatggagagagatcaggatcgggggcagcagctccagcagaaacagcaggatctggagcaggaatgcctcgaggccacacaggggctgctggccggcgagtgggccccacccctctgggagctgggcagcctcttccaggccttcgtgaagagggagagccaggcttatgcgtaagcttcatagcttctgctggcctggggtggacccaggacccctggggcctgggtgccctgagtggtggtaaagtggagcaatcccttcacgctccttggccatgttctgaagcgccagcttggcctttgccttaataaatgtgctttattttc

SEQ ID NO: 177469 - DNA, 683 bp, Homo Sapiens
aatcgctgcatggagagttctcagcctcggacagctccctcactgacatccaggagacccgcaggcagcctatgcccgaccctggcctgatgcccctgcctgacactgctgcagacttggattggtccaacctggtagatgctgccaaagcctatgaggtccagagagcctcattttttgctgctagtgatgaaaaccatcgccccttgagtgctgcatccaacagtgatcagctggaggaccaggctctggcccagatgaagccttacagcagcagtaaagactcctctcccactctggcttctaaagtggaccagctggaaggtatgctgaagatgcttcgggaagatttgaagaaggaaaaagaagacaaagctcaccttcaggcggaggtgcagcacctgcgagaggacaacctgaggctacaggaggagtcccagaacgcctcggacaagctgaagaagttcacagaatgggtcttcaacaccatagacatgagctagggaaggctgaggaggacaggagaagggcccagacactccctccagtgagtgtcctgcagcccttattccctccatagaaagcatcctcagagcaccttccctggcttcctactctgccccccctcggggagtgcacaacacaatagttgcagatcaacaatcatcacctgccttttgtag

SEQ ID NO: 177470 - DNA, 441 bp, Homo Sapiens
aaaaaaaattctgtataaaactgtaatcctttgtattcatgtttacagtgctattactataattcaaaattatgtatgtgacttagagttatataatcataatttatgtttatttcaaatatctaagtttattgcttggatttctagtgagagctgttgaatttggtgatgtcaaatgtttctagggtttttttagtttgtttttattgaaaaatttaattatttatgctataggtgatattctctttgaataaacctataatagaaaatagcagacaacataaacatctttgtaaatatcaaacctaatacatttcttgtccagtgataaaacaactggtagaattatttaaacactttagatttttaaataatatacatggctttaatttttactgtgtgtatagctacatgatgaaattaattaaatattaagaggta

SEQ ID NO: 177471 - DNA, 612 bp, Homo Sapiens
gggggctttctcccaccgctttccgagcccgcttgcacctcggcgatccccgactcccttctttatggcgtcgctcctgtgctgtgggccgaagctggccgcctgcggcatcgtcctcagcgcctggggagtgatcatgttgataatgctcggaatatttttcaatgtccattccgctgtgttgattgaggacgttcccttcacggagaaagattttgagaatggcccccagaacatatacaacctttacgagcaagtcagctacaactgtttcatcgctgcaggcctttacctcctcctcggaggcttctctttctgccaagttcggctcaataagcgcaaggaatacatggtgcgctagggccccggcgcgtttccccgctccagcccctcctctatttaaagactccctgcaccgtgtcacccaggtcgcgtcccacccttgccggcgccctctgtgggactgggtttcccgggcgagagactgaatcccttctcccatctctggcatccggcccccgtggagagggctgaggctggggggctgttccgtctctccacccttcgctgtgtcccgtatctcaataaagagaatctgctctcttcaaaaaa

SEQ ID NO: 177472 - DNA, 460 bp, Homo Sapiens
  misc_feature (11)..(11): n is a, c, g, or t
  misc_feature (29)..(29): n is a, c, g, or t
  misc_feature (50)..(50): n is a, c, g, or t
  misc_feature (89)..(89): n is a, c, g, or t
  misc_feature (107)..(107): n is a, c, g, or t
aaaaaacaaantctccttttattgaaatnagggaacacaccgaaagttgnaaaaaaggaaacaaccccccccagcctcaaccctctccnagggggccggatgcccanaaatgggagaagggattcaatctctcgccccgggaaaccccagtccccacagagggcgcccggccaagggtgggacgcgaccctgggtgacacggtgcagggagtctttaaatagaggaggggctggagcggggaaacgcgccggggccctagcgcaccatgtattccttgcgcttattgagccgaacttggcagaaagagaagcctccgaggaggaggtaaaggcctgcagcgatgaaacagttgtagctgacttgctcgtaaaggttgtatatgttctgggggccattctcaaaatctttctccgtgaagggaacgtcctcaatcaacacagcggaatggacattgaaaaa

SEQ ID NO: 177473 - DNA, 714 bp, Homo Sapiens
gggggtccaaggccacgcttggtgcacaggcaagacttgcttcagccccaggtgtggtgacttagacctaggaaaccaattatgagtggaaagtgaccctctagttcaactgtgccagaggaaacagccctccagtgcccacctgcctcactcctccctatcatgtaccgggaaaaccccctctgatggcctcaaggcagtgcctgcaggccgaggcccttctgggggtttctatctttcttccaccagactccaagcccactctcctccaagactgtgttgtcttttctcaccaagagtattaacactactaagtctttcaccttaacttatgactcaggatttattcacgtcctgcccactctaggctcacaggaataaaatcaagtgctagacacactggctgctactaaggcactagcctctgtagctggtggtggcagcgtggggtgccgcccagcgtgctgggtcctggcagtgcctctgctgtgctgcacattgagccctttctcagtcagtggagtatcaagttgggccatctgtctactgacctggccttcatgtaaacagctgtgggctgcaggcacacaggagctcacacatgcagcatgaggcgcttagaaaaacctggccatttgctgcctctaattcccttttgctttgccatattgagctatgtattacctccttgaaataataaaagaataacatttt

SEQ ID NO: 177474 - DNA, 579 bp, Homo Sapiens
  misc_feature (111)..(111): n is a, c, g, or t
  misc_feature (173)..(173): n is a, c, g, or t
gtttattaaaaaaagaaaccttccaatgtccaatactgctaaccctcgacgtggccgccaagttagtcgctccttgctaaccggtgagtgaccgcggccccgagcctgggntggacgcaggtcccaggacatgctgctcccttgtgtgagtgaccacggccccgagcctgggntggacgcaggtcccagggacgtgctgctcccttgtgtgagtgaccacggccccaagcccagggctggaggcaggtcccaggaccgccgctccctcatgctgcccgggcccttcctccaagaccctacagagcctgaggggcacccttgcttccgcctgtgctagctttgccatgtcatctggaataatacttgaaattttgatttttggaaaaaaaagttttttatcttttgttgaaatcacctgttatccttgtttgtaaactgataacttttttgcttcttctcaggaatacagttttcaactgttgtcttgctcttgatagaaactgagaagcagcaatctgtatttgtggaggaaagtcctctcttttgcatattctaataaatgagccgcgtttgctcctc

SEQ ID NO: 177475 - DNA, 544 bp, Homo Sapiens
ctgtatccagcaggccttattggctttttagggggagctgtgccgaggctggggggctggggccaggggattaactctttccctggggcagcgctcctggctctgaacccatcaggggattttcttgggcaggggattaatgatcccactctcgatgtattcaaagactgtgtatgggtcctggtccccattgagggtgatggccgacccatacaactgctccaagtcagctgagttcctgtagaacaggtccattttcagcttgacctgctcttcagcatcctttgggttctgcaggaggcgagcctggatctccatggtgggaggtggcttgtacatgaggtggtacctttccccagtgactggatcaattcttctcagagtcagccgctccatgatggaatcaaatggcacattcaggaaaaacaccctggggctcactgttggttgaattcatttcttctcacattttccacggcccccatctttgagccaccaatgctgtgtcatgcttagaaatctctctgacttcctcttctgcccc

SEQ ID NO: 177476 - DNA, 272 bp, Homo Sapiens
gttgcaagggtgatgacatgactgtccccaggcctgtctccctgaagcgtctgtgctgtcaggacagccctgggcagagatgaggcaggggtgaggcgtgcgtgtgcttttcctccttgttggatgtcttccatatcatctgtttccatagctacaatccatcccttggccttaactttggaatttggagattatatgcaaacatgtgtaaaggctcatgaatatggatgacactggaattttataaattctaaaataaaacccgaaaccgg

SEQ ID NO: 177477 - DNA, 334 bp, Homo Sapiens
gaagtgccatcttcccgggcatctctgctcagtgttaaggtctagccacagacactgtgggacctgcctcttcctatggaatgggggcctgcatgggttgtgtcctggggcaggagtgagggatggctgggaagaatctccaggtctgtggcccttgtgttgagtgattattttgtgacactctcattcctggaccacctgccaggtttatctgttatacctgtggcattcttattatgtcagacaagttattatagttcattcaactctaacaaatgaacaaaagaacaataaataggaggccattaaaggtcttttgtggcagaggaaaaaa

SEQ ID NO: 177478 - DNA, 920 bp, Homo Sapiens
  misc_feature (602)..(602): n is a, c, g, or t
ccgaccccgctgccctcctgggccgctctgaatagcagcacgtgggggtccctgaagcaggctctgaaaggcctgtctgtggaattcgcgctgctcgccgacaaggctgcacaacagggtaagcaggaagagaacgacgtggtggagaagctgaacctcttcttggatctgctgcaatcctataaggacctgtgcgaacggcatgagaagggcgtgttgcacaagcaccagcgggccctgcacaagtacagcctgatgaagaggcagatgaatgaagcgccaccgcgcagaaccgcgagccggagtccgtggagcagctggagtcccgcatcgtggagcaggagaacgcgattcagacgatggagctgcggaactacttctccctgtactgcctgcaccaggagacgcagctcatccacgtctacctgcccctcacctcccacatcctccgcgccttcgtcaactctcagatccaagggcacaaggagatgagcaaggtgtggaacgacctgaggcccaagctcagctgcctctttgcgggaccacacagcaccctgaccccaccgtgctccccgccggaggacggcctgtgtcctcactancgcctgacggctgaagtgggggctccctgcgggccgcactaaaaccctctttcccttaaagaaattccgcgcggcgcgactggccgacccgctatcctctatacatacacacacccgaccgcgttcggaggggcgacctcacccgccgcggccaatcttttgtgccgggggcggacaaacaaggggccctgacaagggaccgtgggccaaaaagtgggatttccgcgacaccacctttctcgttggacacagaggggagaaataagccgcgcggcacccccaaaagggggcggcgccgctctatattcaggcaccaac

SEQ ID NO: 177479 - DNA, 679 bp, Homo Sapiens
  misc_feature (254)..(254): n is a, c, g, or t
  misc_feature (363)..(363): n is a, c, g, or t
  misc_feature (388)..(388): n is a, c, g, or t
  misc_feature (400)..(400): n is a, c, g, or t
  misc_feature (440)..(440): n is a, c, g, or t
ggtggctctcccgctgaatggggcctcagcaggtgcccaagctgctacaaccttggccactctgtttctccaccccagcactgggcatggtaattagcctttccccatgttaatttattcagttttttcaagggtcaactgaattccccacttcctgggtaagaagcatgatctccttttaatttcacgtctaagatcctgggcagcttcccctagctggttcctctgtagtcctgctgggactgtcagcctcnatttaaatgtgggtctgcagaaggctttaggtctccccccaacccccttacctttcacagaggaacctttcatcaggataaatgattattgcctgccctgtgggtcttngctcaatactgtttcatacccggangagagaaggtanttgaaacatctcctttatgtgtgactttcccaaatttttnaaaattgtttatggtttaggccccttaaatactgtgtagcaggatgaagtctaccattaccagctgggtcaccttggatgggtctgtcaacatctaagcctcagttccctcacctgtaaaaatgagggtagtccctacctcataagggatattgtgaggatggaaagcgaaagtgtgagaaaatacctcccaagtgcctggtacatagtgggtgctaaataaacgactttttgtctgca

SEQ ID NO: 177480 - DNA, 411 bp, Homo Sapiens
ctgtttgaagggacgagtaccaagccacaagaacacttcttttggccacagcataagctgatggtatgtaaggaaccgatgggccattaaacatgaactgaacggttaaaagcacagtctatggaacgctaatggagtcagcccctaaagctgtttgctttttcaggctttggattacatgcttttaatttgattttagaatctggacactttctatgaatgtaattcggctgagaaacatgttgctgagatgcaatcctcagtgttctctgtatgtaaatctgtgtatacaccacacgttacaactgcatgagcttcctctcgcacaagaccagctggaactgagcatgagacgctgtcaaatacagacaaaggatttgagatgttctcaataaaaagaaaatgtttcac

SEQ ID NO: 177481 - DNA, 1351 bp, Homo Sapiens
  misc_feature (38)..(38): n is a, c, g, or t
  misc_feature (145)..(145): n is a, c, g, or t
  misc_feature (162)..(162): n is a, c, g, or t
  misc_feature (180)..(180): n is a, c, g, or t
  misc_feature (226)..(226): n is a, c, g, or t
  misc_feature (240)..(240): n is a, c, g, or t
  misc_feature (656)..(656): n is a, c, g, or t
gaaggtccccggccccccgattggaccgggccattggngcgaatgggtggattcttgaaaccccaacatggcgggttcggcgggatgctcccaggtgcacgaagtcttgggcaagctgacatgaaccccggacggacggccgctncatgttcactgcttcanccgtgcaggcggcggctncttccagcttggttagcaggggcagggctcctgttcagtgccggcngtgtggggacagcnagggcggcggggtcgatgggccgcaccgggtcagccccgtgggacggtgaagtagcttcggggcgttgggtcccagcacttggccacagtgaggctgatgggccccgtctgggaaacgatctcccgcagcacccgcacggcatcgtcattgctcatgttctcaaagttcacgtcattcacctgcagcaacatgtcgccgggctcgatgcggccgtcagcggccacagccccgcccttcatgatggagccaatgtagatgccgccgtctccacggtcgttgctctgccccacgatgctgatgcccagaaagtgatgtctttccatggtgaggcgtgacagtgaacgatggtgaaggggacatggtgggagtcgggttatgctggctgaaggagggaggccccgtccgccctgccganaggcgctgcttcctcccgccggcgtttgtgcttccggatgagtctggatgaggtgctctgctccgtggagctgctgagcctgctcgtgctgccatcctcgtccgagtccacaaagctgctggactcaagctcgctgctgagggcggtggacgcgctgtctggggggcagcccccacatccccgccgtcggtctccccttgggtgcccattggtccgggcggcctcctcgcggttccggcgtcgggcacgctcccgccggtgactgaccatggactccgtgcctgtctcgttgtccatcccgtcacggctgctggccacattcgggtggaaggaggggggccgggagtccccgatgccgcctgtccgctcaagaggcgggggcaggtctgtgtggctgtccgtgccctgggaccccgcatccgagtgagcaccctcagccaggaccagccaggagaccacgcggccgttgaagcagggaagcttggcattgtcatcaaagatctcctccttcaccaccccgaagtcctggtccatggacttaaagaagaatttgtaggcgtgcacgggccggttgctgagcacgttcttgaagtcggccagcgtgacgcgctcgggggccacgggcagcttgaccaggtacggcgtctcctcctcgtccagtggtcctcgtgccgaatcgccacccaggcctcgct

SEQ ID NO: 177482 - DNA, 549 bp, Homo Sapiens
  misc_feature (67)..(67): n is a, c, g, or t
  misc_feature (235)..(235): n is a, c, g, or t
ctccctgtgccgctcccacaacgagcgcgtggtggcggtggccgacgacttctgcaaagtgcatctnttccagtacccgtgcgctcgtgccaaggcgccgagccgcaatgtacgggggccacggcagccacgtgaccagcgtccgattcacgcacgacgactcgcacctcgtctcgctgggcggcaaggacgccagcatcttccagtggcgagtgctgggcgctgggggcgcggnggccggcgcccgccacgccctctcgaaccccctccctgtcccccgcctcctccctcgacgtttgatcgctgcctggcgggaccgactggccccggcgggtggccccgccccgccctgcccttccctggcccaatcccccacgactaggggccgactctttcctggactgacttcgagacattcccggtcgcgcatttccctgtgatggcgaacggcgcccctgcacacactgtttagacccgctggctgagccgggcagccccagcctaggccttgactcaccgctgcctgctgaggggcaataaaccagaacc

SEQ ID NO: 177483 - DNA, 369 bp, Homo Sapiens
gctagatggaacctggaatctctcatctacctcttagtctgtcagtttctacgtgtgagaagcaagcttgtgggccagtgtccttgtacatgctgtagcacttaaaaaataatatacagggttccctggaaaaccagtcccagggttcctatgatctgtagtttctacctggattataactggttttgggtacctgaattttgattggttagccttaattatagtctggcgtgatcatgtagaatcttttctggtgaacagatcataaagttctatcaaggagttctatcaaggcatccatgtcagtggtgctatgctggttacaacttgagatttttgaaataaaaaatttgtcatattcatgcctct

SEQ ID NO: 177484 - DNA, 862 bp, Homo Sapiens
  misc_feature (252)..(330): n is a, c, g, or t
  misc_feature (332)..(333): n is a, c, g, or t
  misc_feature (336)..(336): n is a, c, g, or t
  misc_feature (462)..(470): n is a, c, g, or t
cagagcccctgctgtgattggtgctccctgggcctcccgggtggatgaagccatgcgtcgcccctccgggagccctggggtgagccgccggggcccccctgctgccagcctcccccgtccccaacatgcatctcactctgggtgtcttggtcttttatttttttgtaagtgtcatttgtataactctaaacgcccatgatagtagcttcaaactggaaatagcgaaataaaataactcagtctgcagccccnnnnnnnnnnnnnnnnnnnnnnnnnnnnnnnnnnnnnnnnnnnnnnnnnnnnnnnnnnnnnnnnnnnnnnnnnnnnnnngnnggngagaaacggcccacaaaaaacctttcaaaacaattcttttggccccgggccccggtgggaaagggaaaatgggcattgtggttccccaggaaatcctggcaataaaaaggggtgggattctaaccnnnnnnnnncccccgggggaaacgggacgttcggaccaatcccgaatggatttctgaggtcttaattgggtcttttaaaaggggacccaacggagctgaatataaaataacgcctggccctgcacctcatcggatgagggggggaaggaaataaaacaattaggccgaaagggaacccaacaccaccggtataaataacctgaaaccccagcggataaaccccgggcccgcctggacataaaattttgccccggggaaaaagggcgggggaaaaagtggcactatgggcaccgctaaaaataaaaagggggaaaccccccaccggggagccccgcgagacctaatagcaaaattcgccaacaaaccctctttagggaaaatagccccatgtttttcacagc

SEQ ID NO: 177485 - DNA, 468 bp, Homo Sapiens
gtaagagtaaacccaaaaagccccccaaaaggcccttgtttcccctgaaaacaaaacatatttaataaggacataaaccctgtgggttccttgggtgtgtttgcccacatcaagattttagggaaggggggtatatgtgtagtagggatgccgtttgaaaacaggcactcttcccctgaggatgggaaaggagctcttcagttggagatctaggcagtgggttaagccagacccctaaagtgaccctttcctcttctgccctattcttctcagaccctcagaaagacatccaatttttttaaatccctgtagctccaagcctggtctcatttgcttccctgccaggctcatcgtgtgtataccacatttgtgccccactgacctgaaggttccatgtaactgtatacacatgaatacttaaatgccaacatttaaaataatttgataaagtctttgtagccactcaac

SEQ ID NO: 177486 - DNA, 988 bp, Homo Sapiens
  misc_feature (817)..(817): n is a, c, g, or t
gacccagagccctttaagatgataaaggacccaatgcaggtaatcctgttttgggactcacgtaatgtagaatgcaaagtttagtgattatttaatctgggcctaagctagtgagagtatggaacaatggcccataaggactcctaagcgccgaagccaaggagcctcctcccttcctggttcaccccgcccaagggacctgcccccattcctgtggccctggggccagcttccaatagtgtcagaagcaacttgtggctttgcttggttgtgagatgggtacattccaaaggagcagcctgggggagggggcaggctcagccagcccttggaggctcagagcagctggcccaggctccagctcgcctccagtggaagcccgagcgccctcagaaacgaccctggccaatgtcaacgcagagccgaggcggtgttgtcacggctaatgtgaaatctcttcccgtgggcgcccatcctctgactctgcagtgccagcttggacagattgaggtctctgtggcttggtgaccctgcttaaagcattcccaccgtgtcccagctctgctctaggactgcctcccactgcggcccctcacctgacttcagggtatggggagggagggagccagtgctccaaggccagggggctttgctcatgagagatgtcaggcttcctggcaggcatcaggctttgagccctgctggggtccaactgcacctgggacaagctgtcgcgcagagatgtgcctcattctgtgcctccttctgtgcctcctaccatgttccctttaactgtgcctcagtgtgggttagggancaattttgttattgtattaagtttattcagttaattcacttgaggaactaaccagtttttactttctgtctagaatgatgtacatgtagtaggagtaagccataaatggctccccaaagtggccttgtttttctctggataacaaacatattttattaagggacatatttc

SEQ ID NO: 177487 - DNA, 784 bp, Homo Sapiens
  misc_feature (91)..(91): n is a, c, g, or t
  misc_feature (148)..(148): n is a, c, g, or t
  misc_feature (152)..(152): n is a, c, g, or t
  misc_feature (213)..(213): n is a, c, g, or t
ccagctctgctctaggactgcctcccactgcggcccctcacctgacttcagggtatggggagggagggagccagtgctcaaggccaggggnctttgctcatgagagatgtcaggcttcctggaggcatcaggctttgagccctgctcncgtncaactcacctgggaccaggtgtcgcgcagagatgtgcctcattctgtgcctccttctgtgnctcctaccatgttccctttaactgtgcctcagtgtgggttagggaacaattttgttattgtattaagtttattcagttaattcacttgaggaactaaccagtttttactttctgtctagaatgatgtacatgtagtagagtaagccataatgctcccaaagtgccttgttttctctgatacaaacatatttattaaggacatattcctgtgggttcttgggtgtgtttgccacatcaagattttagggaaggggggtatatgtgtagtagggatgccgtttgaaaacaggcactcttcccctgaggatgggaaaggagctcttcagttggagatctaggcagtgggttaagccagacccctaaagtgaccctttcctcttctgccctattcttctcagaccctcagaaagacatccaatttttttaaatccctgtagctccaagcctggtctcatttgcttccctgccaggctcatcgtgtgtataccacatttgtgccccactgacctgaaggttccatgtaactgtatacacatgaatacttaaatgccaacatttaaaataatttgat

SEQ ID NO: 177488 - DNA, 380 bp, Homo Sapiens
  misc_feature (72)..(72): n is a, c, g, or t
tgcgttttattggtaacagatatcattacatttaccagttttaacacaggtggatacagaacttccattctntagtcattccaggtggatctgagttttatattcaaacttttaatacagtttttgagttttgtgtgacttgaatttttaatctttctgtaaaatacgtaacttaaatgaacatattaaatgtgtatcttttcttcagataccagatttgatataatgttgtaacataggtgtgtagatagtggatcctggatggaactggcttctttatcgagaagaatataaatctgcatgaggacttaatgaatccaaacctgtgtcatgcctgtgtgcatacccaattaaacactggaaataaaaattgttttggt

SEQ ID NO: 177489 - DNA, 679 bp, Homo Sapiens
ataattagaaacactttaattcctagccacttggcagcacttaaatatcagagccatccaagcatgccagcctttgaacttgctcagcaagagtagatgatcacacaactcttaaggtaaatcaaaattagatgaaggttatttattggtgtgacttttttcctttagtgagcttcctttacacagcatggtgtaaatagcatcagattgaatgaaaagtttgttaaatgcaaccataaataattataataaatatacatcaagtaactttacagcacacattttttagggccaaggtttggatctgtctggacctcaatgtgctctcggagaagcagccacgttagcagcagataccttacagcttgtcatctactcaagtgatggccaacagaagcttctgaactcctccaggggaggtagctgacaagtccattcaagggatgaggactaaagagaaccaagaatttaaagatgtagggaggaaaaaccacttctaataaatcgaaaggctctttcattatgcagaaatgaaaataaaaggatccttattgtcaggaatacatcctggctgtgaccccccacactcaaaggagctgtggccgctggggaggcagcgggctgaccatcttctttcaaagcaggggaactgcttgcgggcactcacctccagagttcc

SEQ ID NO: 177490 - DNA, 461 bp, Homo Sapiens
gccccaaggacagttgtcagaggcctggtgaatcatgtccctcttgaacagatgcaaaatcggatggtgattttactttgtaacctgaaacctgcaaagatgaggggagtattatctcaagcaatggtcatgtgtgctagttcaccagagaaaattgaaatcttggctcctcccaatgggtctgttcctggagacagaattacttttgatgctttcccaggagagcctgacaaggagctgaatcctaagaagaagatttgggagcagatccagcctgatcttcacactaatgatgagtgtgtggctacatacaaaggagttccctttgaggtgaaagggaagggagtatgtagggctcaaaccatgagcaacagtggaatcaaataaaatgcttccactaccaaaagacattagagaaaaccttaaaagtaataaagagaaatatatttgtcacttaaaaa

SEQ ID NO: 177491 - DNA, 782 bp, Homo Sapiens
  misc_feature (450)..(640): n is a, c, g, or t
  misc_feature (644)..(645): n is a, c, g, or t
  misc_feature (654)..(655): n is a, c, g, or t
  misc_feature (663)..(679): n is a, c, g, or t
aggtatattttaaaactcttcgtaattctaatgtgtactgctggtatagctgaactactgacctggatcttagtcctagcctttttgcttttgcaatttcagtatcttcatctctaaactagggaaacactgggattctttcttagctgtgggggaaggtatttggttagatgactttgaatgaatagactgctgtgctgaaagagctttatcacactgtctcaaagtatgtaaagatacataggtggatgctcttactgcagcagtcatgaatacatttttagccatttacctaaggaaaaagacagtttttctaggtaccatgaaggaagattgaccctgttggtatgcctgtgggggtgggatgtgagtgggactgataaactgatacttttggttcgtatgtacatactggaagaatcttttcataataaatgagactacacaacnnnnnnnnnnnnnnnnnnnnnnnnnnnnnnnnnnnnnnnnnnnnnnnnnnnnnnnnnnnnnnnnnnnnnnnnnnnnnnnnnnnnnnnnnnnnnnnnnnnnnnnnnnnnnnnnnnnnnnnnnnnnnnnnnnnnnnnnnnnnnnnnnnnnnnnnnnnnnnnnnnnnnnnnnnnnnnnnnnnnnnnnnnnnnnngggnnggaggccanncccccccnnnnnnnnnnnnnnnnnccacccggggggggccgggcggccccgaaaaaaacagaaaaaggggcctcttttgttttccaaaggaaccacccgacacgaaaacccgcggtttctccccccc

SEQ ID NO: 177492 - DNA, 127 bp, Homo Sapiens; identical to SEQ ID NO: 8154

SEQ ID NO: 177493 - DNA, 849 bp, Homo Sapiens; identical to SEQ ID NO: 10450
  misc_feature (564)..(564): n is a, c, g, or t
  misc_feature (566)..(566): n is a, c, g, or t
  misc_feature (568)..(568): n is a, c, g, or t
  misc_feature (572)..(575): n is a, c, g, or t
  misc_feature (577)..(577): n is a, c, g, or t
  misc_feature (579)..(580): n is a, c, g, or t
  misc_feature (584)..(584): n is a, c, g, or t
  misc_feature (596)..(596): n is a, c, g, or t
  misc_feature (605)..(605): n is a, c, g, or t
  misc_feature (702)..(719): n is a, c, g, or t

SEQ ID NO: 177494 - DNA, 886 bp, Homo Sapiens
cggctgctggaccgcgacgcctgcgacacggtgcgcgtcaaggccctcttcgccatctcctgtctggtccgagagcaggaggctgggctgctgcagttcctccgcctggacggcttctctgtgttgatgagggccatgcagcagcaggtgcagaagctcaaggtcaaatcagcattcctgctgcagaacctgctggtgggccaccctgaacacaaagggaccctgtgctccatggggatggtccagcagctggtggccctggtgcggacagagcacagccccttccacgagcacgtgcttggagccctgtgcagcctggtgacagactttccgcagggtgtgcgcgagtgtcgggagccggaactgggcctggaggagctcctccgccaccgctgtcagctgctgcagcagcatgaggagtaccaggaggagctggagttctgtgaaaagctgctacagacctgtttctccagcccagcggacgacagcatggatcggtgaaaccaggtggcttcttgcccccttctccgtgggaaccccaggcctcttgcctccctccccacctacaaagccctctcccaagggatcgcagggcctaggtgcctggacccagggtgtgccagcccgtctctgtgcagtccctggaaggggcgctgagaaaggcaccagctcctttggaccccacctcccattgctctcactctcatcccccgttctcttgtccacaccagctcttccaataaaggtgtttctctttcctccttctcctccttcactgccgcctttgtcatctcctttggagggtgcatgggggacggggaggaaggggcacgggtttaaagggacttggggagccactggaagaataataaaagtgttgctcttt

SEQ ID NO: 177495 - DNA, 385 bp, Homo Sapiens
tttaggatcagaatactttaataagataccagtgtcaaaatacatttccttataaagttaagctcccatacagttataatgttgtcagtaggaattcgacaatataataacgttcatgaaatcgttacgttgacaggtagggttaatatgaagcttggaatatttttcagtgttttagtaaaactgcaagggtaaaatgcccttaatgccagggcaacacacacaggaaatcaaataccagcatttacacgtcagtaacccttcaagttctgccaccctgtgtggggtaatgccgtgcagctaaaatatgatttacgcaacaccatgactaaggaatttctcatagaacttaaatttcttttgaaagctattttttgtttttggc

SEQ ID NO: 177496 - DNA, 876 bp, Homo Sapiens; identical to SEQ ID NO: 8336

SEQ ID NO: 177497 - DNA, 825 bp, Homo Sapiens; identical to SEQ ID NO: 68888
  misc_feature (47)..(94): n is a, c, g, or t
  misc_feature (560)..(560): n is a, c, g, or t
  misc_feature (562)..(563): n is a, c, g, or t
  misc_feature (569)..(569): n is a, c, g, or t
  misc_feature (572)..(578): n is a, c, g, or t
  misc_feature (581)..(584): n is a, c, g, or t
  misc_feature (590)..(591): n is a, c, g, or t
  misc_feature (594)..(677): n is a, c, g, or t
  misc_feature (689)..(689): n is a, c, g, or t

SEQ ID NO: 177498 - DNA, 960 bp, Homo Sapiens
gggattcctcgcgagtgtatggcgtgggctcccttccccctctgtgggtcccgcgaggagactctcgggctttgaggtgtgcctgcacaggagacagcaccagccaagctgattgtgtatctacagcgtttccggcctcaagactatcagcgcctgctagaagtgaacagctccagagagaggccacaggagactgaagatcctgaccactgcctgggctaggggtgtcacttcctagaaggggaagggaactctgggtctaacggagtccactcctgggcccactgtgcctctcccctcagtgtcccttctgacagtgactcctctctctccagcgctgcctgtttcttccccctcctctaagctactcttccttgagccctccctggctgcttcctctcgctcatccgtcagatgcaatctgtgggccgcccctctcccctggccgctaagcagcctccattgatttccgctcgtgtttataggatttccacttagccgtgatcagtagttaagcacaggaaaatcccttgccaccccccctcccttggtcgatgccattgattctgccagcggctcctaaaccgccttacagctgagttagaagatgaggagaggcagcagggatttccctgccttgggatgtgggaaacagaagaaaagttgaggaaatggttgggaatcgctgttagaactctagaaattctaatctgactttgccactgtgcccagctctggcccagagggtagagtgcctcctgtggaagtttaggggcaaatttgttccctgacctggagagggttagaaagaaccaacagctgccccctcccagcccccgtgttgagacaggttctcaaggctcaggggaagatgcatacctcctatgtaagaatgctcttcccttgctgttattcatacacactttccacttcaaatatacccaaatatggctttcctca

SEQ ID NO: 177499 - DNA, 417 bp, Homo Sapiens
ggtatgttaaagtgactgcacaagtaaaagtccaatgttgtgtgcatgaaaaggattccttggttatgtgcagggaatcatctcacatgctgtttttcctatttggtttgagaaacaggctgacactattctctttgattagaaaataaactcataaaactcataatgttgatataatcaagatgtaaccactataaatatgtagaagaggaagttttaaaagaccttaagctggcattgtgaaggaacaccatggtagactctttttgtaaatgtattttgtatttaatgaaatgcagtataaaggttggtgaagtgtaatataattgtgtaaacaaatcctgttaatagagagatgtacagaatcgttttgtactgtatcttgaaacttgtgaaataaagattccacctctggtt

SEQ ID NO: 177500 - DNA, 907 bp, Homo Sapiens
  misc_feature (695)..(711): n is a, c, g, or t
ggggatcagtcaaaggcagcaagcagatagactcaaggtgtgtgaaagatgttatacaccaggagctgccactgcatgtcccaaccagactgtgtctgtctgtgtctgcatgtaagagtgagggagggaaggaaggaactacaagagagtcggagatgatgcagcacacacacaattccccagcccagtgatgcttgtgttgaccagatgttcctgagtctggagcaagcacccaggccagaataacagagctttcttagttggtgaagacttaaacatctgcctgaggtcaggaggcaatttgcctgccttgtacaaaagctcaggtgaaagactgagatgaatgtctttcctctccctgcctcccaccagacttcctcctgggaaaacgctttggtagatttggccaggagctttcttttatgtaaattggataaatacacacaccatacactatccacagatatagccaagtagatttgggtagaggatactatttccagaatagtgtttagctcacctagggggatatgtttgtatacacatttgcatatacccacatggggacataagctaatttttttacaggacacagaattctgttcaatgctgttaaatattgccaatagtttaatctcttctattttgttggcgttgcttgtttgaagaaaaatcatgacattccaagttgacannnnnnnnnnnnnnnnnatttaaaattggaaattctgaaaaaccaatgaaacagaagaaataatgattctatggcgggcgcctcggcccctcaaaaccttttcaaaacatttcgtttggggccgcgggccccggtaggtaaatggacattggccatagcttggttccaaggaaaatcctgggcaataaactaatgctttggattccccccact

SEQ ID NO: 177501 - DNA, 408 bp, Homo Sapiens
tggatcttgctctagtgtgagcactcctgaacttcacatattctccttgtcccaaatgcaagggtttactctcaagagactctaggctcactgcccataaacctttgagttggaccaaatcttaacatcctctgtggatttgctcatactgccctgggaagaaatctttccttctttggaagtctgaattacttcatatttgacatctattttgaaattctgttttacagggtttaggatgggggtaggtaggcacaggaaagagagtagagcattctctcttttctagcaatttccattatcatgccccttctagcttttagaccagcagttctgagacagggattatttgcttttgtttgataggtcaggttgtctgggatggtttgccaatagaaattctataga

SEQ ID NO: 177502 - DNA, 235 bp, Homo Sapiens
ctttcttagggcatctgtaggcctcaaaggacctttcctttaggtcatattcctcagaaagtcttcaatcttcccttgtttttgtttgtttgtttttcttaaagaatattttcaaagcttaaatttgtatattaatttaggactatttagaagtataggctgtcgttggcggcagcagtatattctgaaatgtctcatagatatatatttttgaataaagatggtgttgttgagc

SEQ ID NO: 177503 - DNA, 440 bp, Homo Sapiens
cactagttcagtatatcttattctcactgacaaaacttggggggagatgtgaatatgacctggtttagagagggtttgttaaggtttatactatttttggattgtgactatccgtcgagagtgatggtttttatctgtcttttgtacattgttttcccatttctacattttgctaattatcctgtatataagtttaatatatcactttttaaaagaaaaaattctaccattttaaattcatgtttcaactcctacaaccaaatgagaaaaatcagggatgagcagctttatcccatttggggtatttttgtaagtgatttacatgtgtcaattttagtaatacttttacttttttgtaacttcatccttcatatatgcttgctatacaggtatgttcatctttgtgtacagaggtttaataaattagttttcatataaaa

SEQ ID NO: 177504 - DNA, 578 bp, Homo Sapiens
aacgagagcgttggccacgcggtcccgcctggcagtgagactcacttccgcgtggctgtggtgagctctcgtttcgagggactgagccccctacaacgacaccggctggtccacgcagcgctggccgaggagctgggaggtccggtccatgcgctggccatccaggcacggacccccgcccagtggagagagaactctcagctggacactagccccccatgcctgggtgggaacaagaaaactctaggaaccccctgaaccccaagagagggaggaccaggatccgaatgggctgggtgagcacgaattaccgaggccttccctttgatacagtccaggatttgtaagggatgaagacccctgggccccattctgttggggtccatacatactctccgaagatagcaacttgcttcaggtcaaagtgaacccgagaaaagagaagaatcactcactactgctcttgccctggactattcaggaagggcagcccggatgttccatgttaaatcgtgacagaattgcaccagacctgatgagttggaaacaatcctatacattaaaagaaattacactat

SEQ ID NO: 177505 - DNA, 652 bp, Homo Sapiens
gcaaaatgcagtgtaccttaaaagtgtctcacctagaaggcctctacctgtaatcacattaatttttctaaagacaatttggtgttttgaagataaatgtcattagtctatgataatagcatcataggacaattagccattttagacttgaccatattttctctttttagcatatagccatcttgatatttaggtgggagactactccaatggagcaacagtttcattttacatgattggatttagaaatttacaaattttaaactcataagaattctaaataatttgaaaatggaaacatttgacccacagtctagcagcataaatacatttataaaatacttcattgttgatcttaggtcattgatttaaaacagaatttggtgactatgggcaggtcgagggggccagtgaggaaggtataaaagagaaatctttatgaattgtgttcagattgattttgtataaacataatatattcatggttgtatctcttatttataatacccaactaacatgaaggtggtccaagggaaggatcaatattttaaataacatatttgcttaaaatatcatacagtggctgcttcataaaaatcttataaacttttattaaccaagttcagaaataattagaggggtgatctccccc

SEQ ID NO: 177506 - DNA, 513 bp, Homo Sapiens
cggacaggagatgggtgcaactccctcccatcctactctcacagaagggcctggatgcaaggttacccttgagctgtgtgccacagtctggtgcccagtctggcatgcagctacccaggcccacccatcacgtgtgattgacatgtaggtaccctgccacggcctatgccccacctgccctgcttcctggctccttatcagtgccatgagggcagaggtgctacctggccttcctgccaggagctctccacccactcacattccgtccccgccgcctcactgcagccagcgtggccctaggacaggaggagcttcgggcccagcttcacctgcggtggggctgaggggtggccatctcctgccctggggccactggcttcacattctgggctgactcataggggagtaggggtggagtcaccaaaaccagtgctgggacaaagatggggaaggtgtgtgaactttttaaaataaacacaaaaacacaaacccaaaacaacaacaccaacatgt

SEQ ID NO: 177507 - DNA, 947 bp, Homo Sapiens
aatataaaaagatcaatgaaaaatttatttataaatttttcacgctgggctacaggtcaatatcgtacactcaggaatgtgctgcacaaactttatccagttagcagtgatcaccccgtgacccacacacagcttcgatataagcctagaaagtcttaacattaattaacataattaaaaaggtatttgcatctagaaaaaatatacagaagaactccttgtggagtaatctgtgcctccatttcaatgtctgcttgtttcactgacattatcaatatattcttctcacacaaagttttataaaaagcgacggagggctgcccgaatacgaccagccacgcacaaagggcctccacccacctgtgtcctcaagtgctccccatttctgcacgaagggtcagcagcacttccatgaaggggaaacctcatttaaatttgaataattcagcctcccttttatttctcaggatcaaaacaacaaggggtgtggggctgcatagaaaattggagccacagaaaccaggaagggcgcctttcaggacagaaagtgaccgcaggagaacctccccgggcccaggtctcgacgcaacccctcccccacggcaggatttcgggttcgaattgagtcctcgaagctctgggaggctaaaaaggggcaaaacgatccttcaattaactcagccattagcacaagagattcacagtcttataggtattttataaaaatataaatatgggtacactctgttgccttcacaacgctggatacatcgccctttaaaattgggtttataaccaagattcaaaaaatacacctaaaacttggcttaaaatatgttaatattttatattctgtcataaatgttatgacatttaattgtggcaaatccatttactttttttaaaaaagtgtgcaaccgttaactatgatagaacgcactagaaaa

SEQ ID NO: 177508 - DNA, 620 bp, Homo Sapiens
gagcaggcaggagagccttcatgcccagattcccacaggacaattggggagctgctggcattgtctttctgggaagattctgctttcttggaccaaatggcagcctgattaccacgtgtcgggcctgcatgctgcccccgacacacgcacgcacgcgacacacgtgtgcacatggccatagccacaagccagctctcctccagggtcctttcaacctcgctgtccagggaccctgtccttcttccgcgtggggcttccatctggcagagaacgttcagggcttgttgaacttgaaagctcattagacttaagctgtcacctgtgcttggtgccccaggaacagccagagaggacagtgcccactcacttcttgttggcagcctcctgtgcaggaagctgccagccgggcctcgacgcaccagctggctgtgggtcctgaggaggggcgggaggcggccgctcagtgcagatggggactcctctcctctgccctgaccttaccctccattacctccttcactggagtggggctggggggtgggtggaatcagtgttttaatcggatttttaaaaaacattttatttctttgtacaattaccatcctatgtaaagatgaaat

SEQ ID NO: 177509 - DNA, 350 bp, Homo Sapiens
accatcttccctaggaatattcctagaaagcatctgcttaattttgctgctaacagctaaccttatcccacgttgagggtggtattaaaactgttcacacagagtgagcctgggtcagtcaaaaacagaatttgggcatttgagtgataacagacaacctaaggacaatgagcactttgcagatctctacaattaaaacgttcctctttgaggcaggaggggagaagcacagtccctgccaggttgcctgaactaaagatgccatggagcaggagtgtcttggtgcattgttccccgcttaggagtacctttaaaaagggggtgaaataaatttggcttaataattgtaa

SEQ ID NO: 177510 - DNA, 643 bp, Homo Sapiens
  misc_feature (371)..(466): n is a, c, g, or t
gaatatagaccgcattgggaaacagcagcctcacctccacctgaagcctgggtgtggctgtcagtggacatggggagctggatggaaatgcctctcacttcaaaatgcccagcctgccccaaatgcctctaagcccctccctgtcccctcccttgtagtcctacttcttccaactttccattccccatcatgctgggggtcttggtcacaaggctcagcttctctccactgtccatccctcctatcatctgtagagcagagcacaggcagttgtgtgccttgggcccagggaaccctccatcaacctgagacaggactcagtatatggttcttgggtatgccctaccaggtggaataaaggacacagattnnnnnnnnnnnnnnnnnnnnnnnnnnnnnnnnnnnnnnnnnnnnnnnnnnnnnnnnnnnnnnnnnnnnnnnnnnnnnnnnnnnnnnnnnnnnnnnngccttggtcgggccgccttgggccccttcaaaaaaactttttctaaaacccttttcgtttgtggccccgggcggcccccctgaagggaaaacgggaaacagtgggtccaataccctgtggttctccaaaagaaagaatccccgtggaccaatgaaatatatgggctctggggatatt

SEQ ID NO: 177511 - DNA, 575 bp, Homo Sapiens
  misc_feature (500)..(500): n is a, c, g, or t
  misc_feature (558)..(558): n is a, c, g, or t
cccacggggacatcagtaaccttctgcagccaccatccaatgccattactgtcaagtgagacttggccactgtagcctgggcctgctgcaggagctcttcagaaaggcacatgaggaccacggtttgcctcagtttctggtaaaacacaaggtctggagtgcccctgcaaagggtattgatggacttcctgccagtgacagagcatgtctattgcaaacaattctctcagttacgttcagcacttaagaacggctaatggcaataggatctttagcaactttttcacatcatagaaggtgcaatcgctcacttgggaacactactgagagtgacttctcttttaaaattgagtagcagatgaaaaattaaaatttgaacttgattattaatatcaattaaaatgttttatttattttattaaaagctcaatattttctatgaattcaaaaatacttcagagccaaagccaacttcaaataccgtgaccaaatttacatgnttcatattcattatgcattacttgggtatacagacttattttccttaatggcaatttnattaaatggacactttt

SEQ ID NO: 177512 - DNA, 437 bp, Homo Sapiens
  misc_feature (25)..(25): n is a, c, g, or t
  misc_feature (30)..(30): n is a, c, g, or t
  misc_feature (173)..(173): n is a, c, g, or t
  misc_feature (222)..(222): n is a, c, g, or t
  misc_feature (238)..(238): n is a, c, g, or t
  misc_feature (259)..(259): n is a, c, g, or t
  misc_feature (287)..(287): n is a, c, g, or t
  misc_feature (306)..(306): n is a, c, g, or t
  misc_feature (338)..(338): n is a, c, g, or t
tggagatggtcagcacaaaccgatnctgtncctctttaaagtgtatattagccacttagcaatctctatattctttcaagtaaccaagctgttgactttcttactacttgcagtagcctgtcccccaacttttcccatccagtgccttaacctaaaaaactccttaactctgnccttgaccctgaggaagaccatgcctaactggtgttattttgtatgtanccctgtgccttaattnctataacagtaaaccccatancacaggtgggagggaggaacaccggtgncctcggtcactctgggggncagtttagatgtctgtgaaattaaacctgttnctaagtgtacttgtttgaattaattgtattgtaatattatttgttgaatgtagtaattaggtatttatgaatatattgctgtaatttctgacaacatcc

SEQ ID NO: 177513 - DNA, 422 bp, Homo Sapiens
agagagactactgcgcggaagaccagactatcgagagctggagagaagaaggtttcccagtgggcttgaagcttgctgtgcttggtattttcatcattgtggtgtttgtctacctgactgtggaaaataagtcgctgtttggttaagtaatttaggagcaaagcaatgctccaagcgaggcctcctgcttcaggaaagaaccaaaacactaccctgaagggccagcctagcctgcagcccctccgtgcagggagccttcccttgcactgtgctgctctcacagatcggtgtctgggctcagccaggtggaaggaacctgcctaaccaggcacctgtgttaagagcatgatggttaggaaatcccccaagtcatgtcaactctcattaaaggtgcttccatatttgagcaggcgtcaaacaag

SEQ ID NO: 177514 - DNA, 678 bp, Homo Sapiens
gtatgttttaataaatactgcgggaaacattgaccaaacaaacatacacagtgacttcaacagtttaaaaaatgcaacaaaagttctgctttataacagttataacttattttctttttacaatatttaaatacagaaagcactcgccagctattttgtaatactgcccaaagcataatgctgcatcaatcaaagcatattatgttggtaaaatgtctgtattttatgggaaatgactggaatcgaattttcttgcagagacaagacaaagtgcttgtaagacatagaactgagtgttgtaattaccttaatctctcctgccacgatttacaggggagcacagcttcaacacttcaaaaacgaagcactatcatgggaaagaaagctcgttttcaacaagcgccaacaataaacaggtcagatctggtttcttctctgaaagaatctctaaaaggaactggtcaaaaatatctgtaaactattttaaatgcttattattttacgtaacaacagagaccaagtgctgaacacagaccttggctgcgtctgttcagtgaggttttagcaatgacactctagaaatgccctagtgttatgtcaggactgaaagtttatcatataatcttccactagggattctctaaagcttgggtaagtggcatcttctctcatcaatcc

SEQ ID NO: 177515 - DNA, 367 bp, Homo Sapiens
  misc_feature (54)..(54): n is a, c, g, or t
acaaaaaaaaccttttttaaaccgttgtaaataattgtataaaaaaaatcgccnctgtatagttacaacttgtaagcatgtcccgtgtataaataccctaaaagcaaaactaaacaaagaaagtaagaaaaagaaataaaaccagtcctcctcagccctccgtaagtcgcttctgtggcaccactgattcgctgtgaggtttgtttgtccggttgattttggggggtggagtttcagtgagaataaacgtgtctgcctttgtgtgtgtgtatatatacagagaaatgtacatatgtgtgaaccaaattgtacgagaaagtatctatttttggctaaataaatgagctgctgccactttgactataat

SEQ ID NO: 177516 - DNA, 310 bp, Homo Sapiens
  misc_feature (127)..(127): n is a, c, g, or t
  misc_feature (154)..(154): n is a, c, g, or t
ttagttgtttttgtttttaatttgtctccaataagcaatgtcttctgcccatccagcatgggaagtgggtcccacgtgaagggggcccaccacccactttgggagctgaaggcagagactcgggagnccctcccggctcagactccccctacgnctgggtgtgggttagagtcagaggcccacacccacactggggtaggttaggtatggtttacttaggccacaggcccccgggggcaaggagacagagtgggggcccgaagctccctgtcctgggaagagttaaaagttctggggtagccctggcccc

SEQ ID NO: 177517 - DNA, 540 bp, Homo Sapiens
gtctcattatcacctcatcaggaaatctgtacagatagaatccttacccctgcatttgttgcctccgtctgcctctttggtcagtttcaggtccctgtagttcacactgtgtccccagggatgaaatgggtcccggcaacggtgggcattctgtcaatgaatgaaatggtccccttgtgtaatgcaagggtttcgcgctgcagctaggcaagcatctccgcaggtcccaggtagtgtaagccctcacctccacgtcccctgggacctcggcatggctgcctttctggccagatccaatcaccctcccgcgaaggtggcttttcgcatgcgcttctgctccccagcgatctgaggagtgaacaggaccccacggacgaggaatcctgccggggtgtgggccctgctctggtcacccaccactggcgctcccccaggggccggagccggggccgccccagcactgggggcggggtggttaggggcggccgttgcgatgtatgtggcaaggtgttcagccaacgcagcaacctgctgaggcac

SEQ ID NO: 177518 - DNA, 392 bp, Homo Sapiens
aaaacccaaccttcacggaaagggtgattggaatctgccaagaaaggcccagccatgccgaggtcccaaggggacgtgaaggtgagggcttacactacctggacctgcggagatgctgcctagctgcagcgcgaaccctgcatacacaaggggaccattcattcatgacagaatgcccaccgtgccgggacccacttcatccctggggacacagtgtgaactacagggacctgaaactgaccaaagaggcagacggaggcgacaaatgcaggggtagggattctatctgtacagacttccctgatgaggtgataatgagacagaacccagcacaaggaggaagactgggctatgtgaaaaagctttctaggtctgatttaggttggaaaaaa

SEQ ID NO: 177519 - DNA, 615 bp, Homo Sapiens
tgaacctctaacattggttccaattcagaccaaaatgatagatgtggattctcttacagacaaagagtgcgactggctcaacaattaccacctgacctgcagggatgtgattgggaaggaattgcagaaacagggccgccaggaagctctcgagtggctcatcagagagacgcaacccatctccaaacagcattaataaatacctccccggttttgtttttgtaaaatgctctggaggaaggaagaaacgtggcagatccctgacatctttcccctttcctttccttcttccctacctcccctttttactttagactttaagaagaacagaaaatcttcttatcctctttgatattttattgcaaacactcagtcttttatgattttttaattgttgagaacaagccaagaataaaattgctgcaccagaaggagggtccctccaaagttgaacacttggtgaaaggaagatgccccgacttctttggccagtgatggggaatcagtgagtgctccatgatggtcatgttccaggtgctagtacatcattcatgatcaccttaatgctcatgagactatatttatgatcagtgaataaaaatgtcagaactgtaa

SEQ ID NO: 177520 - DNA, 398 bp, Homo Sapiens
  misc_feature (216)..(216): n is a, c, g, or t
catctcattttgccacttcatgcccctgccctaactgggtttttgttcattttttaaaaacagaccacccatcccatccgttttggcttcttgtcccctgtaaatagaccatgacttcgatcagtatttcttgtccccaccccttcctatccccagatgtgcccccatcccctgaaggagctggctgtctcagtccgtggctcgcgcacttcaccnccggcagatggagggggcggaaccgggtgggcggggccgcttcgggctgcttggccagcggccacccctgcccagccgtcgggagggccgcatctctgtatataatatatatatgtatgtattgttcccggttttgtacggaccatgccctctgtcaggtcgtccccataaaagcaactcag

SEQ ID NO: 177521 - DNA, 689 bp, Homo Sapiens
  misc_feature (444)..(541): n is a, c, g, or t
  misc_feature (543)..(548): n is a, c, g, or t
  misc_feature (550)..(554): n is a, c, g, or t
  misc_feature (556)..(558): n is a, c, g, or t
  misc_feature (560)..(560): n is a, c, g, or t
  misc_feature (563)..(563): n is a, c, g, or t
  misc_feature (566)..(567): n is a, c, g, or t
  misc_feature (569)..(570): n is a, c, g, or t
  misc_feature (574)..(576): n is a, c, g, or t
  misc_feature (579)..(581): n is a, c, g, or t
  misc_feature (621)..(622): n is a, c, g, or t
cagcggaaggggcctttcggaacgatttggaatgaaaggaagtggaagaaacgcggaaccatggccgctgtggttgctgtttgcggtggtctagggaggaagaagttgacacacttggtaacggctgctgtcagccttacacatcccgggactcacacggtgctttggagaagaggttgttcacaacaggtatccagcaatgaggacctgcttttgtcccagtttgtttctccatttactggatgcatttatggaaggcacattacaggtctttgtgggaagaaacagaaagaaatcacaaaagcaattaagagagctcaaataatggggtttatgccagttacatacaaggatcctgcatatctcaaggaccctaaagtttgtaacatcagatatcgggaataaattctatcacgttaccactaataaacttattttacagtnnnnnnnnnnnnnnnnnnnnnnnnnnnnnnnnnnnnnnnnnnnnnnnnnnnnnnnnnnnnnnnnnnnnnnnnnnnnnnnnnnnnnnnnnnnnnnnnnnannnnnngnnnnncnnncncgnccnncnnaaannnttnnncaaaccattccatatgggggcgcgggccccaaaagggaanntggatatggcgcccccccctgcctcccaaaaaaatatccttgacaccctcttttgtggggggggccg

SEQ ID NO: 177522 - DNA, 901 bp, Homo Sapiens
  misc_feature (730)..(790): n is a, c, g, or t
ggggagtggaagaaacgcggaaccatggccgctgtggttgctgtttgcggtggtctagggaggaagaagttgacacacttggtaacggctgctgtcagccttacacatcccgggactcacacggtgctttggagaagaggttgttcacaacaggtatccagcaatgaggacctgcccatttcaatggaaaatccttataaagaacctcttaagaaatgtatcttgtgtggaaagcatgtagattataagaatgtacagcttttgtcccagtttgtttctccatttactggatgcatttatggaaggcacattacaggtctttgtgggaagaaacagaaagaaatcacaaaagcaattaagagagctcaaataatggggtttatgccagttacatacaaggatcctgcatatctcaaggaccctaaagtttgtaacatcagatatcgggaataaattctatcacgttaccactaataaacttattttacagtaagtggtcgcatgatgccaatactgactcaaaccaacctttgcatacaaaagtgttttgaggcccgaggtcaataatgccactctccccttcataccaatggatactcacgctcatcccttacccacaacgcaacccctcctcaaattggcatctatgttcgaatacccgtgcgtcccgtcgtgctcgccccccctttccctttttccctattctacccccaatttttcgtcgggctcnnnnnnnnnnnnnnnnnnnnnnnnnnnnnnnnnnnnnnnnnnnnnnnnnnnnnnnnnnnnntggcacactgcaaactggtcttttccctgttttcttaccgcacaccctgggcccagcacatcctgccttcgcatcccccccctatttacaaaattttccgaccgcgccact

SEQ ID NO: 177523 - DNA, 684 bp, Homo Sapiens
ggtggacagaggtcgaactgtgaatgagatactgaaatgcactaaattgtattacattaaactggagttacttgatacaatgaagaaatgcatctgatctacttgtatttattgtctcagaattgtacgttgtgacaatcaaatgttacttgcctaaatgccaggaaattcaactggccttttaatcagcaagatcgccagcaagtactgtaactgtaaaggaaaatctctctctctggagaacccacacaaaccattgacctgagtgcgcatgacagccactggcttctttttctatgattgaaaatctgccatcgctgactgttggccagtttcaaagggacccattgtatacagggtgcaaatgtattatacggatgtttccttttgtacacttcatttttacaagttttgctactcacaagctttatgtactggaggatacaggcatttttggtctttacaaacttgtccgggtgagggctgctaacttaccacttcagaggcctgtgtcccaaaggcctggctgcgtttgccgtgcctggccgaagacctgtgtaaacaggcaggtgtgccgcctggcccgagcgcgaataactcctgggcaaaggtgaaatgctgcaagcatctggttataaaaatgcctgctgcgaaagacagggataaaatatccacaatataaga

SEQ ID NO: 177524 - DNA, 753 bp, Homo Sapiens
ggtagactacgagcgccagctctttgggaagtcgacagttaaaatggtacagacaccttatggcatagttcccgacgtctatgagaaggagtcccgacacctgatgccttactgggggatttagtgccactgaagcctgcgtcagcagcccgagcggggccggcatctgctccccgccgtctgctccctctccactctcttctcaaatggctgacttctggttctccctcaagtgttttttacactgggtgttcaaatttattttaagagatagggagggaggggacataaagggaatgcatacattgctagtcacatttttaaaattaacattttggaatagtgtttatggaaatctttagcttttaatcattttttaccaatttgaacagtttaataaactgggtctgctctcttctgaatctcatgcctttggcaccttggtaggtgcaggaggagctcagtgcaaaaatcactttggggcctcattaaccctttagagacaagctttgccccaggctgcggaccagacagatgcttagggaaggttgataaccagcttcagtctctactggattagccctactctttcctttcccctccattatttagtgactctgtaagtaagttaaatacacccttattatttagctgttaagtaactataatgaaatctgctgcaaaatctctcttggaatccatgtgcccaggattatattagcattatttttaataaatctatatgcttaacat

SEQ ID NO: 177525 - DNA, 284 bp, Homo Sapiens
tgagatctgagattcctttaatcagaagcacgtgcgtcccacagtgtgctcttcaagccccaaaggcacgcctctaggactgcgtcccttagagcgaggctcgggctcttggtaaaaaagcatttgcttgattttatttaaacaatggtgaatcttcaaggtgccagtctacatgcccaacagtcctccagggcttcaaggccacagtcaccgtcactcagagactgcctcatttggcaagagagaaaaacagtgaccaccacagagggcagggagtgacaaag

SEQ ID NO: 177526 - DNA, 986 bp, Homo Sapiens
gtctctgtacttgtttccctttttgaaacaagtgtcttggttaactaattctgttttatggttgtgctaaattcatagcaggtgccttattctttgcttttagtcaaccattccatatcagaattttccttggtttactatagatatttggctttaagttgttgtttgtgttttttaatgtacaatgttctgataaatttgactgttaaattgctatagctagcaatcattttacatatgtaaaattgcattccctgtgtatttcatgtgtaattcaccaattaagtgcagtttatattcaggttggattatgcatgtttaggtaaacgaaagctgtgtcttacttgatttattctttaaaaataaagttccctgaatatttgatgcttttcttctaaacggaaatgattttacagttatctgagtgtaccttttatagttagtaggaaaatgattttaaaggaatgtttagtattgtacttaaatgggtatgccagagggcacagatgtaaggtttataactggaaataggtggtaagaaaaatatatagaaagcacaatgatttgaatatttttccacttaggatttcctaatctccttgtcatccaattcaagctcaagatgaagcacaattctttgatctccctttgccagttgaattttatagatcatctaatgttgagcacagtatgagaataaatattggggttgtcaacattactcagttactctttgtggtttagctctaacatttcaacaagttgtcaattaattgtatctgtgggttgtatataatgttgctcaaaataattaagtggacttccaaaaatagatttccattgtaacaggatgcattgtgatgggctttgacttacattaaagaagatggtggatagctccaaaacaaaaccaacacccagcggcacactactggaacagaacgcaagctcataggtcgctccacacacacccagaaacaaagaga

SEQ ID NO: 177527 - DNA, 597 bp, Homo Sapiens
  misc_feature (17)..(17): n is a, c, g, or t
  misc_feature (515)..(524): n is a, c, g, or t
attcggcacaggtcatnttgtccccaaatacgcttagctgtgtgccgcttagaacgatgcgaaaccatccctctgtgtaagcccgtgccgtgtgactcgaagcctagcgccctccctgcgaagcatcagacgccacccagccctggggggaggcccacgcctgctggaccaacgcgggttctggggtgcacagcgccaggttaacgctgaagcctgccccgctgagcccaggagccgggaggcttgcgggctgacccagaatccgatcatgcacctgtcctcatgccagcggctttggctggggttggtctgaagcctgcacgcggcagttctttgttaaagatctgagggactcctcagtcctgcgggtcgccgcctgcagcctcttccaagccctgcgtccagcgagcgtcacagcacaacctgcaaaaacggagctgggctgcagctggggctggcatggactttcatttcagagattcggtttttaagaagatgcatgcctaatgtgttcnnnnnnnnnnccaatgatttgtaatatacattttatgactggaaacttttttgtacaacactccaataaacattttgatttta

SEQ ID NO: 177528 - DNA, 414 bp, Homo Sapiens
  misc_feature (22)..(22): n is a, c, g, or t
  misc_feature (404)..(404): n is a, c, g, or t
gacctggattccgaatttaatncgacctcacctatagggaatttggcccctcgaggcccaagaattcggcacgaggaagactgaaacaagcttgtgctaagatggaaagggctgcttctaacagatgtggtttgttgctttagttgttgaagcaaaaatactgagttgttatgtttatgttatcaccccaccactacctccatggttgttcatttaggatgcttctaattcagccactgtgaaccattataaaggttttattgccatgttgaaaatgtttataatatggcaaaaaggggcatcaaatagaagatttactattattccagccatgtaaaaatatgtgcacatatggatgtatgttgaaagtggatgatggagaaataaaatgtggttttcttttnggggactggg

SEQ ID NO: 177529 - DNA, 1154 bp, Homo Sapiens
  misc_feature (841)..(841): n is a, c, g, or t
  misc_feature (1060)..(1060): n is a, c, g, or t
  misc_feature (1105)..(1105): n is a, c, g, or t
aagtataagttatacttatgtaagtataaattcatgctgcctacttctaagagaaatttcattcttcataaccacataacattataatgccactgattcatacgggatttacattaattctatgggggaggacactagaaattattagggttcattttcatctaagatctttattctctaacgttcttggtcctattgaaacattgcagtatgcaaaactactgcaatgttaaacccaagagaaaagccattatcatgtgtatgctggtcatcatgatcagtgtggtacaatttttaaaaataaactatcatgcccttcatgccattatttgtctttatttctatgatttataatcctgatatgtgatgtgtttgtaacacagggtgtgcacttgagcctggttctactgtttttattagacagactcgctcatacgcttgtactgtacctctcactaacttttctctacagccctccgctcgtcttcctgctctccctccctccctgctttctccccttttcacccctcttccttccccttattcagccctgccattctgtattccacctcctcctcccccccaccctcgcgctcccacactaccttccctgcttcctcgctctcctgtacttatccacaccccctcgcccgacgcagaacctcaccgcctccctatcctctgctcacaccttcccccctcatatccatatacaacctttcacgatgctgcctcagctcctctcccctctgcacttctacactttctccagtacatgcccttcaccctcacgcgctatacacttctccctcctcctccccttcatcacctacccttctcncctttttcctctgacctgactcttaccccggattactgaatcgaccaccatgtcaccctccctatattcacaatccaacacaacccacgctgcatccgtaactcccagtcctctcatccttctccacctgccctttgcccagcgtcctacccttattttgaaccagcacgcgctctccagacgacccacgcggttatattaacactccccctccttccntccctcgcagcattcacatacttatatctatctcacccatgtatntccagcgctcctgagaagattacatcatacgcccgctagatagtaacta

SEQ ID NO: 177530 - DNA, 541 bp, Homo Sapiens
ggacgcgtgggtcgacccaccgtccgatcatcatagtttaaggaatacccagagattgctgctgttctatttattttacagaaagggtagctagattgaaagctcttcagtggaccttgagctaatagatcttttaccactaaaagagcattattctcatgtcataatgagaataataatttacatacttggcataataaatgcctaaaagacattttattttctgaatctatttttttcttgctataatggggatattgtaaattatgcatttgtattaatggtatttcttaaagcaatctatgtaactgtaaattaaaccaatctacaaactattgtaggcatctgtaaattctgttgtaggtattataaactttgttgaagtcttaatcagcagattatgtcgtgaatatattgtgtacatttgttaaaatagtttgtaagattatttgtttaattgaataagtgtcttattggagtgatagctttgaaggtgcaaaactttatatttgtataaaattctactatttacaagggcaaa

SEQ ID NO: 177531 - DNA, 479 bp, Homo Sapiens
ctaggaagatggcgcacccggcaatgttccctcgaaggggcagcggtagtgggcagcgcatctgcctctcaatgcagcaggtaccggcgtcggtagtaatgccacatcttccgaggattttccgcctccgtcgctgcttcagccgccgccccctgcagcatcttctacgtcgggaccacagcctccgcctccacaaagcctgaacctcctttcgcaggctcagctgcaggcacagctcattgcgccaggcggaaactcaaatgaaaaagaaaagtggcttccagataactagcgttaattcctgctcagatctccgctagtatcagctctaacaacagtatagcagaggacactgagagctatgatgatctggatgaatctcacacggaagatctctcttcttcggagatccttgatgtgtcactttccagggctactgacttaggggagcccgaacgcagctcctcagaagagaccta

SEQ ID NO: 177532 - DNA, 826 bp, Homo Sapiens
  misc_feature (584)..(584): n is a, c, g, or t
  misc_feature (679)..(679): n is a, c, g, or t
atcgtctctggccaacatggcatcggccaccgtgagggtaagccgcctgctcagcctgccacccgaagcctttaagatgccactgactgccgaccccacgctcacggtcaccatctcacccccactggcccacacaggccctgggcccatcctcgtaaggctcatctcctatgacctgcgtgaaggacaggacagtgaggagctcagcagcctgataaagtccaacggccaacggagcctggagctgtggccgcgcccccagcaggcaccccgctcgcggtcccctgatagtgcacttccacggcggtggctttgtggcccagacctccagatcccacgagcccttacctcaagagctgggcccaggagctgggcgcccccatcatctccatcgactactccctggcccctgaggcccccttcccccgtgcgctggaggagtgcttcttcgcctactgctgggccatcaagcactgcgccctccttgtgctcaacaggggaacgaatctgccttgcgggggacagtgcaggcgggaacctctgcttcaccgtggctcttcgggcagcagcctacggggtgcggngtgcccagatggcatcatggcagcctacccggccacaatgctgcagcctgccgcctctccctcccgcctgctgagcctcatggaccccttgctgnccctcagtgtgctctccaagtgtgtcagcgcctatgctggtgcaaagacggaggaccactccaactcagaccagaaagccctcggcatgatggggctggtgcggcgggacacagccctgctcctccgagacttccgcctgggtgcct

SEQ ID NO: 177533 - DNA, 514 bp, Homo Sapiens
gcggccgccggacaccacacggaaggaggcgaagcgccgcggtcgcgaaaggcagcccctgcatgcaccagggcctggtggatggcgcgctcgcattcagcaccactatggggcagctgccaggcggatctggaaaacgtcgccgtagcgccgcgccaggcgagcgaacgagaggtgagccgcctgcccaccgccgccgcgtttccgatcagtggccacgcaaacgggcccggggcgcggaccggagctgccgcctccgttgcctcagcagccgctggcccacatgcacagtggccagcaccgacaggagtagcaggagcgtggtctgctggatggacagcgggtttagcagccaagggtcgttcgggctgaggctggtgccatgctgcggggaggtgcggtttccagtggcgcgggacagccggctccgagaaggaactgggacctttgcctagggacagacgtcaacaggaacccgcaggcccggccttggacacctgctgccctcactgga

SEQ ID NO: 177534 - DNA, 473 bp, Homo Sapiens
  misc_feature (31)..(31): n is a, c, g, or t
  misc_feature (335)..(335): n is a, c, g, or t
agagaagacagttggagatggaagatggttntgtatatatttgggaactttagttcctctgtgagacgaaagaggagagctatgttttgtgtcacattgtctgatatatattgtgtaacctgtcaggtgagttgatttagacaacatagctgaccttttatgacaaggcagtttgaatagggactattgtaataccctcacacattataggggcatcagagaatggcatggaagagacagtctacagagagctttaagaggccggagaaaggaaaagacattatcagggcctggaaagtctcttccagttcatcagggtagtagacctgtcagantggaggtcaaagtcaaaagtataataagtgttaatttgccttgaaaaacaaagacctaaaaagccttttttaagaaataaattttttgttcacatgaccaaagcccctcctgtgtgtgttaataaaagaatcataaac

SEQ ID NO: 177535 - DNA, 455 bp, Homo Sapiens
aaaccttagcgtcaggaatgtatgtggtccagcgccctgaactccctcaatctgtcgttcgctgggctggaacaggtgcctaaaggactgccagccaagctcagagtgctcgatctcagctgcaacagactgaacagggcgccgcagcctgacgagctgcccgaggtggataacctgacactggacgggaatcccttcctggtccctggaactgccctcccccacgagggctcaatgaactccggcgtggtcccagcctgtgcacgttcgacctgtcggtgggggtgtcgggaaccctggtgctgctccaaggggcccgggctttgcctaagatccaagacagaataatgaatggactcaaactgccttggcttcaggggagtcccgtcaggacgttgaggacttttcgaccaattcaaccctttgccccacctttattaaaatcttaaacaacg

SEQ ID NO: 177536 - DNA, 430 bp, Homo Sapiens
gacttgccactttctccaaacgctcggttcctttgaagatttcttctgaacatgtgtgcgcacgctgggcgggttcgtgcatacatgcggggaccccagactgtcagcacagggaagaaggatcccatcctaatttttatcacctgaaggttggaaccagtgagggactgggagagagtgatttataagcaccaatatcaacttcatgtggatttttgacaaggaggggtagtttgtaatttcatttaaattcttttcagcagctggaaatattgcactatctgaaacactgaatctcaatttgtaactggtgttcactgacaccttgatggctcttgatggctctaaaaagttgtaggattatttgtttttgtagctaacatatggattgagatgtgatcaaaggcatttattaaatttgtacttcagc

SEQ ID NO: 177537 - DNA, 1265 bp, Homo Sapiens
  misc_feature (612)..(688): n is a, c, g, or t
  misc_feature (736)..(754): n is a, c, g, or t
  misc_feature (756)..(759): n is a, c, g, or t
  misc_feature (761)..(764): n is a, c, g, or t
  misc_feature (766)..(766): n is a, c, g, or t
  misc_feature (771)..(908): n is a, c, g, or t
  misc_feature (915)..(961): n is a, c, g, or t
  misc_feature (996)..(996): n is a, c, g, or t
  misc_feature (1005)..(1005): n is a, c, g, or t
  misc_feature (1217)..(1217): n is a, c, g, or t
ggagagcaagaggtcccgagtcccctcctagtctttcatcctgaatttgcacagaggaaagcgggtgcccggcatggccatcctgatgttgctggcgggatccccatgcaccttgtccttctccactgatactggcagctcggctcctggacccaagatcccttgagtggaattctgcagtgcaagagcccttcgtgggagctgtcccatgtttccatggcccccagtctcccctccacttggtggggtcaccaactactcaccagaagggggcttaccaagaaagccctaaaaagctgttgacttatctgcgcttgttccaactcttatgcccccaacctgccctaccaccaccacgcgctcagcctgatgtgtttacatggtactgtatgtatgggagagcagactgcaccctccagcaacaacagatgaaagccagtgagcctactaaccgtgccatcttgcaaactacactttaaaaaaaactcattgctttgtattgtagtaaccaatatgtgcagtatacgttgaatgtatatgaacatactttcctatttctgttctttgaaaatgtcagaaatatttttttctttctcattttatgttgaactnnnnnnnnnnnnnnnnnnnnnnnnnnnnnnnnnnnnnnnnnnnnnnnnnnnnnnnnnnnnnnnnnnnnnnnnnnnnncttgtcgccgcctcgctcaaacttcaacatctgcgcagaatgagtaannnnnnnnnnnnnnnnnnncnnnncnnnncnccccnnnnnnnnnnnnnnnnnnnnnnnnnnnnnnnnnnnnnnnnnnnnnnnnnnnnnnnnnnnnnnnnnnnnnnnnnnnnnnnnnnnnnnnnnnnnnnnnnnnnnnnnnnnnnnnnnnnnnnnnnnnnnnnnnnnnnnnnnnccgaatnnnnnnnnnnnnnnnnnnnnnnnnnnnnnnnnnnnnnnnnnnnnnnngcgcacgaaacaccgatagagacgccgggggcaancaccccaangccccacccacattctccccccttacttacttatctccaccccgcgccccattgttgataccacgcccatggtaaatcgaccattagcgagcccccccttgtgatacccccacaaacgatattccccacccgtatactaaccgcgctatctgtcacccgcatacgataatactcccaagcaccgcaatccccactgcgacatcactcatganctctcacccaatatattatccatccttcggcctctttgtcacactcat

SEQ ID NO: 177538 - DNA, 440 bp, Homo Sapiens
tgtgctgtcctgtctcccagatcctgagaccctggctgagaacttggcccagcctgctgcttaaaggcaccatggggacctgggttgccctcagacccaagccattgttagcagctagccagccacaccaaccacgccagggggaggaaagggaaggactgggagagacacaaagaccagagccagcctcagggacaagagattccagttttaggcctttctccttctaagtgccccccacccccatagcctgcatgtccactcccagacgatggccaagaacagaaacacaagctggagccagtgtcctggtttgacagcatgttcaacgagggaaccccaagacggacccacacaggtccacccacgctgggggctgtaatcacggagggaagtggctgcccccttaacacacctttaataaacagtctacagacccg

SEQ ID NO: 177539 - DNA, 490 bp, Homo Sapiens
atgagcagatgctgcaggagggcatccaggcctcgcttcttgacggccagcccaggaaccccagagcgcaccatggctgtccaagtcctctgtctcctctctgcggctgcagcagctggagcgcatgggcttccctacggagcaggcggtggtggcactggcagccacaggccgtgtggagggtgccgtgtcactgttggttggaggacaagtgggcactgagaccctggtgacccatggaaagggtgggcctgcccactccgagggtcctgggcctccctagcccaggcagagagtggggcacaggcaggcccttgggtgctaagggctgggctgcatgtgggtagcccgagctcctactctgtctaaagagggccacagtggggagcaggggcacctctggaggcaggagaggccccccagcatgctgccctagtacgtgtttagaataaaaaccagtttgtttttcaacctggacctccttggaggc

SEQ ID NO: 177540 - DNA, 875 bp, Homo Sapiens
  misc_feature (293)..(315): n is a, c, g, or t
ggtgggggcgggcagcggtcggagccaaacagacacacgcagcgagcggcgggacaagcgtggcgcagcgacggggcggggggagaggaggtcaccaccgatgggggtcctcacgagggcagcacacgaaaggacagcgggggggcaaggatgggtgtcggttcgcttgcagagaagcggcgagcttacgaggcaggtaggagctggggcgccgacggggcatccacctctggggtggggaggggggtcgggcgcaccatacaaaactgcagaggggtggtagaggggtggcnnnnnnnnnnnnnnnnnnnnnnncgaaggcaacgtacggggaacaggggccgcaaagagtggggcaagcatatctatgaagggggggaatggcgggcgtgccgaaaggggaaggctgaggacgggaaagtcggggaccaggctggtttattgggacgaacctaattaaaagggcaccaagcatagggccatgtttacagggacattatggcaaggcatatacattaagagtgtaggaatgtgttgccttcctgctaaacagaaagttcgtaagctcttatatatacaaaagttgtacaatttaatgtcctaaagtacaaaagatacatgtataaaattattttacactaagtactatgtattttatttttttactatgtagttcaaccccctagaactgttttgtataatgacacacagatacctgtccctgatgtaggaagtctgtctcagatgcaaggtattttgatgcttgaactgacacagtagggtataaatggaaataatccagtttgatagtcagtcctgcaaacattctgcaagattaacacaactaatttccatttctcttaactgcaatgatt

SEQ ID NO: 177541 - DNA, 917 bp, Homo Sapiens
gggccctacaacgcagaccagtactggagttcgtggtgctggaagaccgccgcccgactctgggccccgggtaggaaacaacaatttcggacctcctggggtctatgctaggtatgaggtgtatctttgccctccatcaagtagcaaagatggacatgtaaacaaatttcgacactgtgatgactgccacaaaaagcagcattatgaggttgaatgtaaaaggataaccttagcggcggcgggggccggaggatgaaggaaggcttcctgaggtaggcgctggttgaaactgaagttggagagagcaagtggcatttgctgaagtgcatttccggtagaaaactccagtggtcccctcacctgactgagtggcgcagtcagagataaatggaacagagtctacaaataaacattttataaagatgatccttcaatacatattctacagcccagttaaaatgtgagaggccatgatctacagacagccatttataaaggtggatcaggacccggacacggtgggctcaacgtcctgtaatcccggcacctgtggggaggcccaaagcggggaaggattcgtttgagccccagggaggttcgaagacccaacccttggccaaaaatgggtggagaacccccatccttttacccaaaaaattttatttttttcccaggccataatcgggtggtgcccccttgtgggctccctgcgggatccccccgcctactccccgcgacaaccttaaaggccacgttggagaggcctcccaacggaaaccccaccgtgttcttgggacccctttacaactctccccagacccccggcgggcctatctcaaatgggctggcccagagaactccccgcgcacgaacctcagagatacacgtctacccctccgctatatcgcatgatctcc

SEQ ID NO: 177542 - DNA, 480 bp, Homo Sapiens
gatggttggcctgctaaaataggaacaaggagtaaaagagctgtttataaaactgcatatcagttatatctgtgatcaggaatggtgtggattgagaacttgttacttgaagaaaaagaattttgatattggaatagcctgctaagaggtacatgtgggtattttggagttactgaaaaattatttttgggataagagaatttcagcaaagatgttttaaatatatatagtaagtataatgaataataagtacaatgaaaaatacaattatattgtaaaattataactgggcaagcatggatgacatattaatatttgtcagaattaagtgactcaaagtgctatcgagaggtttttcaagcatctttgagtttcatggccaaagtgttaactagttttactacaatgtttggtgtttgtgtggaaattatctgcctggtgtgtgcacacaagtcttacttggaataaatttactggtac

SEQ ID NO: 177543 - DNA, 641 bp, Homo Sapiens
  misc_feature (378)..(378): n is a, c, g, or t
  misc_feature (421)..(421): n is a, c, g, or t
ggagaaggagagcctgcagacagaggcctccagcttggtctgtctccccacctctaccagcatctgctgagctatgagccaaaccagggatttacagggaggaaaagctttcggactgctgaaggcccagcaggaagagaggctggatgagatcaacaagcaattcctagacgatcccaaatatagcagtgatgaggatctgccctccaaactggaaggcttcaaagagaaatacatggagtttgaccttaatggaaatggcgatattgatatcatgtccctgaaacgaatgctggagaaacttgggagtccccaagactcacctagagctgaaagaaattaattggagaggtgtccagtggctccggggagacgttncagctaccctgactttcttcaggatgatgctgggcaagagatnctgccatccttaaaaatgatcctgatgtatgaggaaaaagcgagagaaaaggaaaagccaacaggccccccagccaagaaagctatctctgagttgccctgatttgaagggaaaagggatgatgggattgaaggggcttctcatgacccagatatggaaacagaagacaaaattgtaagccagagtcaacaaattaaataaattaccccctcctccagat

SEQ ID NO: 177544 - DNA, 336 bp, Homo Sapiens
ggctgcttgatgtatgttatgcagagacactctgcctctggtggctgcagagcaatacccaagcctcatttggaaggctcaacatttggaattgcactttaattgattaatcctcaattcatgtggccttacgggatcgtgggtctgggaccccaattcattcttatctgccaaagaattatctagaagcacatcaaataccagcaccccacctgcacaatgggggtggaaaacttttgtatccctaagcatattattttatagtgtctgccatgccatgtggaaatactttatttttaacctcaggatttaaataaagtaaacactatgacattt

SEQ ID NO: 177545 - DNA, 821 bp, Homo Sapiens
  misc_feature (228)..(241): n is a, c, g, or t
  misc_feature (263)..(276): n is a, c, g, or t
  misc_feature (735)..(735): n is a, c, g, or t
  misc_feature (737)..(737): n is a, c, g, or t
gggtgaagagagtgtgggctttaggagaaaagtgtgaggcatgacccaaattgtaagcatagggacctcagggatggggaagaaacccgagtacgagggtgcagggccccccttcatacacaggagagaacagaactatttagggtgtttgtgtttatggacagtgagggcactgctcttggattcaccagctgttatttttgcttttacttttctcccaccttcagnnnnnnnnnnnnnnccacctccactttttaaaagcnnnnnnnnnnnnnngtatgatggtggtgaataaagaccaaagggtcctctctacctttgaaaactctcctggggtggaggagaccagggcaggatagacagacctctgcagtaagagagtggttgggaaacccagggtgttccttggatctcaggatctgagccatcgagggaagagtggggctgctaggcaagtggattagggggtctggatagggccccacaggtgacagggagcctgcagggcggatctggtgatcatgggagccagagggagtggggacagtgcaggcagtattggcaggagggccagtgcaaaagggctggtagctcaggcagtgtggggggaagcactgaaagcctgtaatcccccacttggggggctagggggttttggtcccctcacccaataaataactgtggtcaccatccaaatccctaaattattcccacctaccaaagggggaaaaaaananccaaaatcccaccagacaaacaaaaaccccttggttcggggcccgcccctcgggccccctccgagaaaagcttttcccaagaac

SEQ ID NO: 177546 - DNA, 761 bp, Homo Sapiens; identical to SEQ ID NO: 15839

SEQ ID NO: 177547 - DNA, 603 bp, Homo Sapiens; identical to SEQ ID NO: 15840
  misc_feature (540)..(540): n is a, c, g, or t
  misc_feature (543)..(544): n is a, c, g, or t
  misc_feature (549)..(549): n is a, c, g, or t
  misc_feature (551)..(552): n is a, c, g, or t
  misc_feature (556)..(556): n is a, c, g, or t
  misc_feature (558)..(558): n is a, c, g, or t
  misc_feature (589)..(589): n is a, c, g, or t

SEQ ID NO: 177548 - DNA, 458 bp, Homo Sapiens
gtgctggtcctcatcggctcccaccccgacctctccatctcctgcctggggcaggggctgactttgcagtggatcctgaccgagccgtgagcgccaagaggaaccccattgacgtggaccacttcacctaccagagcacccgccaggagggcctgtacgccactgggccgctggccggggacaacttcgtgaggtttgtgcaggggggcgccttggctgtggccagctccctgctaaggaaggagaccaggaagccaccctaacactcggccagacccgctggctcccaggccctgagaggacagagatgaccacatccctgctggatgcaggacccgtccaaagatgccccggggaggggtgtcagcccacgttgctggcctttggggtcaagaggagtagggatcccaggctgccctggacttagaccagtgtctgaggtggtaacagcggccgca

SEQ ID NO: 177549 - DNA, 464 bp, Homo Sapiens
  misc_feature (345)..(345): n is a, c, g, or t
tgaaagttcagttcagtttattacagtgtcaagtagatttacaactattgcacttatcattctgctgacagaaggccaaaactgaagattgagattttcctctaataaagataggttttcagaatcttcaatataagatgttaaaattataaaggcaaagatatatacctcatgttccattccatatccttcctgctgttgtacagtttgctgcaaatgataatttaatttggataatgctttaaatcattgatttctcatgaaattacttttgagtgaaatttgacaaggaatttcctttatactctcttctttaccaaaacgtattaggaagtccccataggnccaaaataaaatgtaaccatagaatggggagataactttagtcaaagaccaagtaaatattaccttctttgcagaactccaggttgtagtcacgtaaaagtgtggccacttgttgctta

SEQ ID NO: 177550 - DNA, 408 bp, Homo Sapiens
cttgaccccgaggcggccgagcagatttcggaggcgccgcccccacccttgccacccatcgtgctgaccagtgacccagtcatcacccagagactgctgaagaccggatccccaacccacatctcaagtccactttggcaatgtctccacggcaacggacgaagatgacaaggatcacacccacaatgaaagagctccagatgatggttgaacatcacctggggcaacagcagcaaggagaggaacctgagggggccgctgagaacacaggaacccaggagtcccgcccacctgggatcccagacacagaagtggagtcaaggctgggcacctctgggacagcaaaaaaaactgcagaatgcatccctaaaactcacgagagaggcagtaaggaacccagcacaaaag

SEQ ID NO: 177551 - DNA, 395 bp, Homo Sapiens
  misc_feature (27)..(27): n is a, c, g, or t
  misc_feature (133)..(133): n is a, c, g, or t
  misc_feature (325)..(325): n is a, c, g, or t
  misc_feature (373)..(373): n is a, c, g, or t
cgccgcttccctcccgccgcagcggcncgcaccggccgccgccccagccatggagcaagacaacagcccccgaaagatccagttcacggtcccgctgctggagccgcaccttgaccccgaggcggcggacagnattcggaggcgccgtcccacccctgccaccctcgtgctgaccagtgaccagtcatccccagagatagatgaagaccggatccccaacccacatctcaagtccactttgggcaatgtctccacggcaacggaagaagatgacaaggatcacacccacaatgaaagagctccagatgatggttgaacattcacntgggggcaacagcaggcaagggagagggaacttgagggggggccgttngagagcacaaggaacccaggga

SEQ ID NO: 177552 - DNA, 579 bp, Homo Sapiens
ttccagcctatgccctcaatcacaataagaccaccagatgaccaacatcttcctactgcaaatacttgcatttctcgactttacgtcccactctaattcctctaaacagatttcaaaccgaaatgttactcgccattaagaccaagaattttggttttgtgtagagtataaaaagtgtgtattgctgtgtaatattactagcaaattttgtagatttttttccatttgtctataaaagtttatggaagttaatgctgtcatacccccctggtggtaccttaaagagataaaatgcagacattccttgctgagtttatagcttaaaggcctaaggagcactagcaacatttggctatattggtttgctagtcaccaacttctgggtctaaccccagccaaagatgacagcagaacaacataatttacactgtgatttatctttttgctgagggggaaaaaatgtaaatgttctgaaaattcactgctgcctttgtggaaactgtttcagcaaaggttcttgtatagagggaatagggaatttcaaaataaaaaattaagtatgttctgtgttttcatttt

SEQ ID NO: 177553 - DNA, 726 bp, Homo Sapiens
  misc_feature (695)..(695): n is a, c, g, or t
atctctatccgctttttccgggacccctaaaactacatggctggacaccatgtaaagatatttcatgtctgactgggacccagctcgagtagtagttgtggatcccaagaaggaagcctttcccctgcagccctataacggcgttgcttgcggccctgggacggcaactctgatgaccgggtcttgttggatctgtctgccttcctcaagaccattgcactgaatggtgtggaggacgtgcgaaccgtgctggagcactatgccctggaggatgacccgctggcggctttcaaacagcggcaaagccggctagagcaggaggagcagcagcgcctggccgagctctccaagtccaacaagcagaacctcttccttggctccctcaccagccgcttgtggcctcgctccaaacagccctgaactctgggcctcctcaaactcagtgcctgggtccagggccccagtgcttccagaccaagacttgggccaccacttgtccaataaagtacatcccagacgccacacctgctgtgtcccgagagtctccagatgggggcatcagggtgaggtccgggactcttgggtcatcgtcccacagtggctgatcggctgccaagcacagtgggggtgctttgttggatcagagcagatttttcaccctggtctcggaatctaaaaaccctcgctgtgtaatncccccagacgacgcacaacaaaaaaacatgt

SEQ ID NO: 177554 - DNA, 631 bp, Homo Sapiens
  misc_feature (425)..(425): n is a, c, g, or t
  misc_feature (442)..(442): n is a, c, g, or t
  misc_feature (582)..(582): n is a, c, g, or t
gcccagcctatcccaactccacagtcaggaaggcctacgtccttggtccacagacggagctgggccaggtttaaaagactcagtctaggcttgcctttgcaaaccaaaaacgaggacaggtctgaagtgggaagaaagctccgaaatagaaaacggttaggtcctattctatccccagcaaatctaagcaagaaatctctttatacaccacatggcccccctactcccataaaacagccttggtaataaagaagttatcacaccaagacataccttttagatttttattagtagttctctctgaagaatcaaaatagttagcaaattattttagattcaagactgtatatcctttgtatttagatctttaatgatgtacaacataatacaaaacaaaccagagagactgatttctatgactaggngttattcattgtgtcancctaaagcagtgggctggaggggaagctgttcaaggagaacagaggtggagttagtgctggccaactaaatcatggcctgtctgcttacccattcaatgtgctgggaaggggccaatgatttcttaaactgtttcctagnagcaggggctctaaaacccggggtagcagaggactgtgggtccaaacca

SEQ ID NO: 177555 - DNA, 537 bp, Homo Sapiens
gggaaaatgagtggggcggtgaggggaaggaggagggaagttcgagtgaaagattcttccagggttttattttttcccctcctaacaaagtctcatagtgttaacactggttctgcaatatctctgaggtgcaaagaatgcacttttccctatggggcccagagtttgccttttctgccaggcagtcaccacgcttccctaccccagcctgtttcttttggcttggtttggaccacagtcctctgctacccagggttttagagcccctgctctaggaaacagtttaagaaatcattggccccttcccagcacattgaatgggtaagcagacaggccatgatttagttggccagcactaactccacctctgttctccttgaacagcttcccctccagcccactgctttaggatgacacaatgaataacacctactcatagaaatcactctctctggtttgttttgtattatgttgtacatcattaaagatctaaatgactagtccccattttctttgagggatcaggaaagaacctgg

SEQ ID NO: 177556 - DNA, 1207 bp, Homo Sapiens
  misc_feature (507)..(523): n is a, c, g, or t
  misc_feature (642)..(721): n is a, c, g, or t
  misc_feature (723)..(725): n is a, c, g, or t
  misc_feature (876)..(899): n is a, c, g, or t
  misc_feature (1020)..(1031): n is a, c, g, or t
gatctacttatggttgatggagcacattgatttggagtttcagatcttccaaagcactatttgttgtaataacttttctaaatgtagtgcctttaaaggaaaaatgaacacagggaagtgactttgctacaaataatgttgctgtgttaagtattcatattaaatacatgccttctatatggaacatggcagaaagactgaaaaataacagtaattaattgtgtaattcagaattcataccaatcagtgttgaaactcaaacattgcaaaagtgggtgggcaatattcagtgcttaacacttttctagcgttggtacatctgaggaaatgagtgctcaggtggattttatcctcgcaagcatgttgttataagaattgtgggtgtgcctatcataacaattgttttctgtatcttgaaaaagtattctccacattttaaatgttttatattagagaattctttaatgcacacttgtcaaatatatatatatagtaccaatgttaccnnnnnnnnnnnnnnnnnagatgtaagagcatgctcatatgttaggtacttacataaattgttacattattttttcttatgtaatacctttttgtttgtttatgtggttcaaatatattctttccttaaactcttannnnnnnnnnnnnnnnnnnnnnnnnnnnnnnnnnnnnnnnnnnnnnnnnnnnnnnnnnnnnnnnnnnnnnnnnnnnnnnnannncccttgtcgggccgccctcggcccttcagaaaagtttctctaaacccattcgttggggggccggggcccccagaagggaaaggtgaacatgggccaataccgtgttccccaaggaaaatcccggggccatgaacaagggccttggaatttnnnnnnnnnnnnnnnnnnnnnnnngggggggaaaaccgaagggttttcttaaaccaaatcccaaaaggggaattcctggagggccttttactgggattctatccacaggggaagcccaaaggcgaaccctcaaatttaaaattannnnnnnnnnnnttgccaatttttttgaaaaaaaggggtggaaattccattaaaaaatttccgccccgcacttgggaaaccccttccccaaccggggtttgaaaggaaccctttaaattccgccaggggggattttaaaacccttggttccccccttggccgaaaataattttttcgccccaagtggg

SEQ ID NO: 177557 - DNA, 1064 bp, Homo Sapiens
  misc_feature (739)..(800): n is a, c, g, or t
ggtgagtcggctgttgatttcatcaggacacttttagttaagaaacctgaagatcgagccactgctgaagaatgtctaaagcacccctggttgacacagagcagtattcaagagccttctttcaggatggagaaggcactagaagaagcaaatgccctccaagaaggtcattctgtgcctgaaattaattcggataccgacaaatcagaaaccgaggaatccattgtaaccgaagagttaattgtagttacttcatatactctaggacaatgcagacagtctgaaaaagagaaaatggagcaaaaggccatttccaaacgatttaaatttgaggaacctttgctacaagaaattccaggagaatttatctactgagcaatatttccctttagaacttcaagatttctacattgaaaatgttaatattatttatggacctctggccaaatggtacatgtactggaagtggataaccagtatcacttacacaaacaaaaataactttgtcaaatttgtggagttaggtggaagccagattttaaaagctgccaaccaggagatttaacaggtacagttacccgtttcaatgttatttttaagaagggagatgttggcacctttgaattctacatcctggtttctccagaatgagaatttgtgtacaaagatatttgtattcactttctttaaaaaaatccaagtaaaagtgccaaaactatccccccctatactattccannnnnnnnnnnnnnnnnnnnnnnnnnnnnnnnnnnnnnnnnnnnnnnnnnnnnnnnnnnnnntggccacacaacctgcgccgccgaccggcgcacatgtgataagaagatactgtggggtggcccccccttgcggccccccagaaagaaatctttttaaaaccccctttttcttttttgggcggccgcgggggcgcccccccgataggggacaaggccgggatacggggggctcgaaaccgttgtggccccttccacagaggaaagatacccggtggccacccggataaataaccgcggcctgtgtgtttttcttcccccccacat

SEQ ID NO: 177558 - DNA, 566 bp, Homo Sapiens
ggggcccgatgctttctgtggctaaacacgcatgtaatggcgaagaaataaaagcctacgtgttggtaaatccaacagcaagggagatttttgaatcataataactcataaggtgctatctgttcagtgatgccctcagagctcttgctgttagctggcagctgacgctgctaggatagttagtttggaaatggtacttcataataaactacacaaggaaagtcacccaccgtgtcttatgaggaattggacctaataaattttagtgtgccttccaaacctgagaatatatgcttttggaagttaaaatttaaatggcttttgccacatacatagatcttcatgatgtgtgagtgtaattccatgtggatatcagttaccaaacattacaaaaaaattttatggcccaaaatgaccaacgaaattgttacaatagaatttatccaattttgatctttttatattcttctaccacacctggaaacagaccaatagacattttggggttttataataggaatttgtataaagcattactctttttcaataaattgtttcttgatttt

SEQ ID NO: 177559 - DNA, 845 bp, Homo Sapiens
  misc_feature (208)..(208): n is a, c, g, or t
  misc_feature (216)..(216): n is a, c, g, or t
cccgtgtgtcttccattctgctttgccccaggacctctgtaaagatgagctgtgccctctattgccttctaatctattatctctattatctggccgagccagccctttatcttggttgttttctgaaaatggggtagaccaataccccacaggttttaaaatcattatctgctgttaatgatgatgttgctactgctgttcctccctnccatcccnccctgttttgaaaggaaaagtagatggagcaggtacaggcttattcgcaaggggtacaggctgagtaacagcttgggctttgtcgatttgagtctccatactttgaacattctggtcccaattagagggctctacgggcccttccgagacttcacttttaggtggctcttgttgagagtcgcttagattctcatttgactgagccgccttgacatcctttacatctgcagcaatggaaaatgcagctgattgcattttaaaattcttctgctggttactactggtgtctgctaatggttctttgtttcctgaaagaggttctgcttgtgacttaggttgctgctggtgctgctgtccaaaagctggtttggggcctttccactgtggtccactctgtcgaggacttagggatgtactgggggtaatataaaattgagatgctggcccccggggaatcattccccacttgcttttagtgccctctgctgggtgaccttcatatctgggtcttggcccatcggggcgatttccttcaaaacgaggccctttgggtctcggtccttcacaccttgaccctaaatcctcaaatcttcgaggaccatcaaatcttgggcctcttggactttccc

SEQ ID NO: 177560 - DNA, 448 bp, Homo Sapiens
aatgtaacttcccaagatcgtaaaaaatgtgcacacactacagaccaggagacaaaacttgccagggctctgctgtttaaaaagagacatttcttgaagaaatatgctgaaattcatccatgattctgcaatacagtggctgagcctgggtctttcatctggtttggaattgataacttcccagctttcactgaggcttctccacaactgtgcacctcttgttctagacaaaaccatatcctttattatttgcataataacacgcccaagtatcatgacggaaatcaggtgatatactctccatggagtcaatgcaaggaaccagaacagcaggttggcagcgacgaagccgagcaggtccgcagcggcctcttccagctcagcagctcgtcggcgcggcagcccagccacagcaccggtccccgagcagccaggttaccgcggtcgc

SEQ ID NO: 177561 - DNA, 504 bp, Homo Sapiens
tctggtgctccttggcctcgtaccctgcaacagcacctggaggggcctggaggggtcattgatgcgggaggagagaccccagggctatctcttttccccagtgggcttgaaagatatgctgaaaaacagcatggctacagggaaggggttccctgcaggccagcacctgaggaggccccacccaggagaagcacctccccaaggaggatctatctgaggcctagaggcctggagcttggggtgaggaagagggagggatggacaagtctgaaaacctcacaactccttaccaaggctccaggttggggggatcgtaggattagaggggctaaggatagtcagcgagctggactggggtaagaaagaaaaccagatgtcctagggcctagcccttgtagtcagaaccaccagggaacagcaaagaacagagtgatgggaaagtgacatgagaaggcctggaggctgattctgatatagactcaataaagtttttggatggaaaaa

SEQ ID NO: 177562 - DNA, 521 bp, Homo Sapiens
ccagtgaggaagctctttatccccggcaacccttcccacaatcaggggtctccagtccgatggcccattggtcataagctttgccttggggaaacagagccaccctcctctgcccccacttctggctgcctcactcccctgctcaaagcttgattttgaattctgtgggctgcgtggtcacagaggcccctgaggacttgaagagtgccttcaggatggtgtcagggtccacttcggcaggggggttggaggaggaggcagagttcaccctgcgaggcagctcgctctcctttttcattgatgggctgtcactcagccgcagcaggatgggctggtctgaggtgataacattcccattcaaagaaggttgcacttcatcggctgcccgtccagacaccggttgttgtacttcttatatgcggtgatggcatcgtcctttttcacaaacaccacctccgctaccccaggatggaccagtcgagctcgcttgagggccccacacacacagaaaagctcaaccc

SEQ ID NO: 177563 - DNA, 1071 bp, Homo Sapiens
ggagactccagcccccgctgcaaaccccccagcccctactgcaaaccccacggtcctgctgcaaaccccccagccactactgcaaaccccccagcacctgccgcaacccccacgggtcctgctgcaaatcccccagcccctgccgcaagctccacaccccatggacactgtcccaatggggtaacagctgggttgggcccagtggctgaggtgaagtccagcccagtgggagggggtccccgaggactggctggccctgcccttcggagcgactggggagcaggctgggatggcggccaccactacccagagatggatgcgcggcaggagcgggtggaggtgctgccccaagcccgggcctcctgggagagcctggacgaagagtggagggcgccccaggcaggcagcaggaccccagtgcccagcacagtgcaagcaaacacctttgaatttgcggatgctgaggaggatgatgaggtcaaggtgtgaggggctggggcacggtcccagggccccacctaggtgcagagccggcccctcacctaacagctggttcctaccagaccggagaggggagaagtcatgttgcccataaacccctccccacctctgcaggacagacatgggagggacgacagggaaggccaggcttgctctgggacttttatgctcccagaggccctgccaaactgaccacctcccccgactgccactctggacctaatagctgttccttaggccccactccatgccacccccaccagctggaggacccagcctcacagtgtgtcctttgtgccagaccaagcggcccgtggggggtggggcgcagggagtgtaccacacagggccattgtctcacctcccaaagggaccgcctgcccccagctcatcccagagcgtccctgctgcaaccctgacagccgtctcccaggccgcttccccaacatccccgccccagcctccctcttaccccagaaaggtcaggtatgacctcccggggaggaatcccacctgcctgtataccccagacttgcctctggggcctgattaaataaggctgttttgata

SEQ ID NO: 177564 - DNA, 331 bp, Homo Sapiens
cggccggggcagggggcttagaagtgctaatatggttctgtgttttgcctgaaacgataccaggttcccctgaatagcaactttacaaggtccatgtgggaggaccaacccagatgccctgctgagtgtccctgaaaccatggcagctccatctgtcaagatggcaggggccggagtgagggggctgctggcttaacagcaggcatctgggcaggccagtcctcaaagcagctcctgaaggtctgtgttgcactgtcaccagtctcaagctatgcctctaatttcaccagggatattgactaagaagacaataaaatctttttctttgtgt

SEQ ID NO: 177565 - DNA, 531 bp, Homo Sapiens
  misc_feature (500)..(500): n is a, c, g, or t
tcaggagtgaacgtctatggagtcactgtgccagggcatgaaggcagggctggaatggcagccctagttctgcgtcccccccacgctttggaccttatgcagctctacacccacgtgtctgagaacttgccaccttatgcccggccccgattcctcaggctccaggagtctttggccaccacagagaccttcaaacagcagaaagttcggatggcaaatgagggcttcgaccccagcaccctgtctgacccactgtacgttctggaccaggctgtaggtgcctacctgcccctcacaactgcccggtacagcgccctcctggcaggaaaccttcgaatctgagaacttccacacctgaggcacctgagagaggaactctgtggggtgggggccgttgcaggtgtactgggctgtcagggatcttttctataccagaactgcggtcactattttgtaataaatgtggctggagctgatccagctgtctctgacagtaaaanaccccgaaaacccaacattcccccccctggt

SEQ ID NO: 177566 - DNA, 429 bp, Homo Sapiens
  misc_feature (209)..(245): n is a, c, g, or t
tagtatcagtgggcatagtcattttctgtatcttttcacctcacagttcacgaacatttcccatgtccttataacacttttgtgttataaaattgctgcattaatgttatagctgtattaatgtaataccagagttgttgtgtttgggttatatgtaaatttatttcttataaataaaactttgacagacttgtcaaaaaaagtggcannnnnnnnnnnnnnnnnnnnnnnnnnnnnnnnnnnnngaataggttttttctttcaacttgatcagtagaaaatggacatcaagtttgaacagataaatcatggacagccttattgtgattgaaatgcttgtaggttctgtgccaattttccaccactgtgtactttgttgctatttaaaactgtatcaactctaacggaagaataaattatttgtgattt

SEQ ID NO: 177567 - DNA, 541 bp, Homo Sapiens
  misc_feature (437)..(494): n is a, c, g, or t
gctgttgtctgaggaggggtagttggtctgcagttgggcacttgacctcgccttctccagtgcacggacttgctgctccagaagagcattctgccgcttgaggtcgtcaatatcttgctggtgtgtgtggtttttccttcggcatatactggatatattctggggctttgtctagggatttgggcccgggatgccttctctccttggagtgatgggactgagtcccgcaaactgtgaaagctgtctttgatgtggtccctacgttttcgttccagtgcattatgatgagcccgtttgtcagcgtcgctctccacctcgatgtcatcgttatcgctcatttcctacggcccagggagcggccactgcagcggcggcggggaggggaagtggtgaaggggagggggaagtcaccgacaacaacaagccgagtccccccnnnnnnnnnnnnnnnnnnnnnnnnnnnnnnnnnnnnnnnnnnnnnnnnnnnnnnnnnngggcaagaaccacctcctcactgcagcaccggatcaacggcggcccc

SEQ ID NO: 177568 - DNA, 271 bp, Homo Sapiens
acacacacagggaggcaagagctgccccccaccccacctgacagcagagtgtgcaggacgcaggcggccccactctgatgggcaggaccctgaccctctcccgctccagccccctccccaggccctcccccatgatttcaccctccctacccacttctgtccccggccccactggcagaatcagctttgagtaactgtacagtttttctcgctgttggagaagacttatttgttggagtttcacttgtttaatggtctgggcttattttgg

SEQ ID NO: 177569 - DNA, 334 bp, Homo Sapiens
atgaattgactgtgcagcctcacactgccttctccaaaccaaaaggacattctcagggcctctcccagtgccctgcccgccagaggctgcagcagcctgatgaggaggtcaagacgggcacttcacatccacttgtgtgctggctctggccaagacacgctttgttcattttctgggggctcactgggagtcactgtcacaagacgggctgtccagcccgaaagagcacccttgctctccactccccaaacccttcagcactgcagacccagtgttcctccattctctgctgccatagtacactggggcatgccatgcaaatgcagctggagca

SEQ ID NO: 177570 - DNA, 470 bp, Homo Sapiens
gcgcctttggttctctgaacatctcctttctcttcttgcttcaattgcatacccactgcctgcccagactttctatccagcctcactgagctgcccactactggaagggaactgggcctcggtggccggggccgcgagctgtgaccacagcaccctcaagcatacggcgctgttcctgccactgtcctgaagatgtgaatgggtggtacgatttcaacactggttaatttcacactccatctccccgctttgtaaatacccatcgggaagagactttttttccatggtgaagagcaataaactctggatgtttgtgcgcgtgtgtggacagtcttatcttccagcatgataggatttgaccattttggtgtaaacatttgtgttttataagatttaccttgtttttatttttctactttgaattgtatacatttggaaagtacccaaataaatgagaagcttctatcctt

SEQ ID NO: 177571 - DNA, 472 bp, Homo Sapiens
cactgtccgctcgggcccgggcgttgctgccgtctgcacacggtccgcgcgtcgctggaagacctgggctgggccgattgggtgctgccgcctgaagcccgacacggtgccagcgccctgctgcgtgcccgccagctacaatcccatggtgctcattcaaaagaccgacaccggggtgtcgctccagacctatgatgacttgttagccaaagactgccactgcatatgagcagtcctggtccttccactgtgcacctgcgcgggggaggcgacctcagttgtcctgccctgtggaatgggctcaaggttcctgagacacccgattcctgcccaaacagctgtatttatataagtctgttatttattattaatttattggggtgaccttcttggggactcgggggctggtctgatggaactgtgtatttatttaaaactctggtgataaaaataaagctgtctgaactgttaa

SEQ ID NO: 177572 - DNA, 374 bp, Homo Sapiens
gcttccagcctctaccatgcaggagagaacacagaaggactgatgtatgttggtggatccatgtatgtgtccagcacagcggcctgctggactctgagaactgggaaagatcagagcaagccttgcctcttatcttcgggaaaccagaatatgtttggggtggtaggagccacacagactcttctgagccccctcactcacttccttccccctgtgcctttcctttgagagtgaaggtgggtggagttgaccagagaaaggggagagaattcgggaaagacccaaagtgtttgtaattcttctttgtccttttacctacagaaatggtcacatggttctatttaaatagcctaataaacacatctggagcctga

SEQ ID NO: 177573 - DNA, 906 bp, Homo Sapiens
  misc_feature (655)..(655): n is a, c, g, or t
  misc_feature (766)..(766): n is a, c, g, or t
  misc_feature (779)..(779): n is a, c, g, or t
  misc_feature (847)..(847): n is a, c, g, or t
  misc_feature (866)..(866): n is a, c, g, or t
  misc_feature (886)..(886): n is a, c, g, or t
gtgtagggcaaagctgttagaaagattgtagcgttttactctccctgggctttcctccgccttgctgcaacagagaggaaatgcccatgtccacagcttgtacacactgccccctcactatcttgttatccagtggcatgccaaaggagaactgaattagcttctgaggcttctgctgtaaatcagaagtgtatgttagtcaagagtaaacaagatgcacccagtatggtgggagggttttgctgtcagtagctcaaagtatggtgtagaaatggcctcctccctccatcctgggaagtcccagtcccatcctggtgtgagaatcaaccaggctttcctgctccacctgagataaccaactccctcccgtaatcaggaagccaaatgtcaccttcccaaagaaattttattttcacgtagctgaagtgcaaaacatagatgaccatttttaataagcacaatcaaatttttaaccacagaatgtctacaagaattatagctttaaaaaatacaaccaatttttatatttcaaaaatatttgaactcaaataaattaatttcttaaaaagtacacttctcatactatgtgtttggcattgactctggttaactcttgtgcagcaacacctacgagatgctatcacacacgcgccantggcactcctgcaccagccgctgcaacgactgcacctcacgtggtgggcggggactcacattcacaagacgggacggggaacatgcagtaataaaatagctttttaaaaantaacacatataanttccatcacatagggttatggcttttcactggcaaccttgaaggtgggctttatccgcaatctgtggnctccagctatttagtgggnggcaatcccggtgaggcagnctgtgggcccaccttgtagg

SEQ ID NO: 177574 - DNA, 1066 bp, Homo Sapiens
  misc_feature (453)..(455): n is a, c, g, or t
  misc_feature (457)..(459): n is a, c, g, or t
  misc_feature (461)..(461): n is a, c, g, or t
  misc_feature (463)..(470): n is a, c, g, or t
  misc_feature (473)..(478): n is a, c, g, or t
  misc_feature (480)..(547): n is a, c, g, or t
  misc_feature (550)..(550): n is a, c, g, or t
  misc_feature (606)..(616): n is a, c, g, or t
cagaattctgagcttgaagtgcagctcccctactaccctttcccttcctttttcttccctaataggaggtacaatctgcctttgtttgtcgttaagtggtcactcccatttcctttatcttggccgacaacacagagaggagggggagctgggcagtagcttggggtgggggtgggtacctgtggttgtttttaatgggaaatacctctcagagatgttcatgcaggctccctagggccccatcccagtgccaggctggtttccatggagatagggcactgaggctcccgtgaggttggaatcgacttcaccatgggggtccttcagccagcatccagctccccacccccaggctggcagtagcactgctgagatgctgtatttccacccaattctgggtatatcagtgtgtcttgcagaatcttggatcattaaagataaacatatttttannngnnngngnnnnnnnncgnnnnnngnnnnnnnnnnnnnnnnnnnnnnnnnnnnnnnnnnnnnnnnnnnnnnnnnnnnnnnnnnnnnnnnnnnnggngcgccgaccccctccgtcgccccccccgcagccccgaagaaaaaatttccgaacgnnnnnnnnnnngcgcaaaagagcttattaagccccttgttctcccgggcccggggcctaccggttgaaaaaaacactggggggggagatcggccccgagagaaacccaccccaaaaggaccgtcgtgggggtcttcccccccgagaaaaaacacccgcagtgagggacgtgggcggtgtttataacaaaacccaccctcgccttggcgcggggcgtctatggggaacttttgaaagcggccggcgccgcccccccctggctccgccctgtggagtacttatgggccgcggcacgggcctccatgccaccccctcgtgatgccgtggggtcgaccacccctccctcgacaaaggtgtccgcccttccgaagtgcgggggctaagcctctctccggcacagcggcgccgccgcatcgaacagagccggggtgataatacgaccacgccgtggcgctcgatgat

SEQ ID NO: 177575 - DNA, 582 bp, Homo Sapiens
  misc_feature (233)..(461): n is a, c, g, or t
ttaacctcacataccctcactaaactttatcactgtgcatataaccgttgtgatacaataaagaatgtatctggattttgtgcctagttcctagcacacagcttcaaaaattctagagtttcctgataggagtgtcttttgtattcataacaagcccttttcacccatccctgggtttatgctaacaaggttacccatggtgggcccttagtttcaaggaaggagttgccaannnnnnnnnnnnnnnnnnnnnnnnnnnnnnnnnnnnnnnnnnnnnnnnnnnnnnnnnnnnnnnnnnnnnnnnnnnnnnnnnnnnnnnnnnnnnnnnnnnnnnnnnnnnnnnnnnnnnnnnnnnnnnnnnnnnnnnnnnnnnnnnnnnnnnnnnnnnnnnnnnnnnnnnnnnnnnnnnnnnnnnnnnnnnnnnnnnnnnnnnnnnnnnnnnnnnnnnnnnnnnnnnnnnnttccacagggacaaaggctcctgagctctgggcccttccagtgcttgccaccctacatactctttgtctggctcttcatttgtattctttataataaaatggtgattgtaagtagagcaaa

SEQ ID NO: 177576 - DNA, 481 bp, Homo Sapiens
aggtgacagagtgagactctgtctcaaaaaaacacaaaagtttctcttttcaaaacattttactttaaaaggagccaatttaaagaaaactgttaatagttcaggtaacaggcagatacaggaaaagctgctgacagtgttgtatgaggtttgaggattttgatccaagctggtcccactcagtccatagcagagaatgaaagggcccagagagggtggtgacctctgcctgaagtcacacagtgagtcgaggacagggaggtgaccccaggtttctatgtgtagggcgggaggatgttctgggacacagttcaattctcatttgtcacacactttggctattagagatcaaccccttcgctcctgtgtcttgcaatggcagccttggcaaacgctaaatgaaaatcgtgacaacacttgtgttatgaagcatttactttgtgttcaccttgtactactcgaactcatgtcttaactcact

SEQ ID NO: 177577 - DNA, 335 bp, Homo Sapiens
agaaacatttagaattgttaaggactctctcagtgatgatgttgttaaagccactcaagcaatctatctgtttgaactctccggtgaagatggtggcacgtggtttcttgatctgaaaagcaagggtgggaatgtcggatatggagagccttctgatcaggcagatgtggtgatgagtatgactactgatgactttgtaaaaatgttttcagggaaactaaaaccaacaatggcattcatgtcagggaaattgaagattaaaggtaacatggccctagcaatcaaattggagaagctaatgaatcagatgaatgccagactgtgaaggaaaatat

SEQ ID NO: 177578 - DNA, 872 bp, Homo Sapiens
  misc_feature (809)..(809): n is a, c, g, or t
ggggcttccgcggcggttggggtggtggggccccgggcggcgttgaccatgacccagcagggcgcggcgctgcagaactacaacaacgagctggtcaagtgcatagaggagctgtgccagaagcgggaggagctgtgccggcagatccaggaggaggaggacgagaagcagcggctgcagaatgaggtgaggcagctgacagagaagctggcccgcgtcaacgagaacctggcacgcaagattgcctctcgcaacgagttcgaccggaccatcgcggagacggaggccgcctacctcaagatcctggagagctcccagactttgctcagcgttctcaagagggaagctgggaacctgaccaaggctacagccccagaccagaaaagtagcggcggcagggacagctgaccagaccacggggcagggcctgcctccgtgtgcccctcagctcagccccagcaagtgtgtgctcagagcatctttgttcttcacggcagcagctacccttccctcactgtctcaggtgccgagaggggcaggtgccagcctccactggcatcagtgacaaagcccagggccacagccccacccgggggtcctcccctttcatgctcaccacaggctattggggatggtgggctccaggtcagctctgcaaggggcttgtctctgtggcacccacactcctgccctgccagggaggctctggttgtctgagcaccatgggggcccccctcaccttgtcccctcctcagccagcaaaggcccagggcaagggacagggagacaggggttcttccttcccacangaacccaaacctcaaggtctcacccctgtgggcctgggattatgaataaagattatcctttgt

SEQ ID NO: 177579 - DNA, 1238 bp, Homo Sapiens
ggtggtggggccccgggcggcgttgaccatgacccagcagggcgcggcgctgcagaactacaacaacgagctggtcaagtgtgagcggcgcagccgggacggggaggtcgggagggccgcagggccgggttcccggctcgcagcggggtgcccctggacccgcctcgctgcgggcatcgcgcggctgagcagagccctccgtgccggaggccgggtgtccgtggcccgagccctcgctggctcgcaggccccgcgccgggcgctcgggggtggtgcctgactctggcttcctcgggtggaaggaggcccgccctccgccgccgcgctcctgccctgggcccacagcgccgcccctcccggcccccaggcatagaggagctgtgccagaagcgggaggagctgtgccggcagatccaggaggaggaggacgagaagcagcggctgcagaatgaggtgaggcagctgacagagaagctggcccgcgtcaacgagaacctggcacgcaagattgcctctcgcaacgagttcgaccggaccatcgcggagacggaggccgcctacctcaagatcctggagagctcccagactttgctcagcgttctcaagagggaagctgggaacctgaccaaggctacagccccagaccagaaaagtagcggcggcagggacagctgaccagaccacggggcagggcctgcctccgtgtgcccctcagctcagcccccagcaagggtgtgctcagagcatctttgttcttcacggcagcagctacccttccctcactgtctcaggggcccgagaggggcaggtgccagccttccacttggcatcagtggacaagcccagggcacagcccacccgggggtcctcgcttcatgctcacacaggctatgggggatggggggctccaggtcagctctgcaaggggcttgtctctgtggcacccacactcctgccctgccagggagggctctggttgtctgagcaccatgggggccccctcaacttgtccctcctcagccagcagagggcccgggcaagggacaggaagggacgggggttctcctctccccaccgaacccaaacgttcagggctcccccccggggggcgcgcggtttatgcggaccgccgttccgccttggcgcccccgccgctcaccgagcggccccgccgggcagggatctccgtctgcgacacagggctctcgcggacgcgggttgcccgtgtgcgcacctgt

SEQ ID NO: 177580 - DNA, 746 bp, Homo Sapiens
gacccacgcgtccgggccccgggcggcgttgaccatgacccagcaggcgcggcgctgcagaactacaacaacgagctggtcaagtgcatagaggagctgtgccagaagcgggaggagctgtgccggcagatccaggaggaggaggacgagaagcagcggctgcagaatgagatcctggagagctcccagactttgctcagcgttctcaagagggaagctgggaacctgaccaaggctacagccccagaccagaaaagtagcggcggcagggacagctgaccagaccacgggcagggcctgcctccgtgtgcccctcagctcagccccagcaagtgtgtgctcagagcatctttgttcttcacggcagcagctaccttccctcactgtctcaggtgccgagaggggcaggtgccagcctccactggcatcagtgacaagcccagggcacagcccacccgggggtcctcgcttcatgctcacacaggctatggggatggtgggctccaggtcagctctgcaaggggcttgtctctgtggcacccacactcctgccctgccagggaggctctggttgtctgagcaccatgggggccccctcaccttgtccctcctcagccagcagaggcccagggcaagggacaggaggacaggggttctccttcaccacagaacccaaacctcaggtctcacccctgtggcctgtgattatgaataaagattatctttgtaaaacaacaaagacaaat

SEQ ID NO: 177581 - DNA, 893 bp, Homo Sapiens
  misc_feature (747)..(748): n is a, c, g, or t
  misc_feature (757)..(757): n is a, c, g, or t
  misc_feature (762)..(773): n is a, c, g, or t
gcttggacaggccgcgtggggcgaaggcggcgcttggctggtggggcccgcggcgggattttcccgggcggcgagagcggatctatcttgggatcccatggctttctttactgggctctggggccccttcacctgtgtaagcagagtgctgagccatcactgtttcagcaccactgggagtctgagtgcgattcagaagatgacgcgggtacgagtggtggacaacagtgccctggggaacagcccataccatcgggctcctcgctgcatccatgtctataagaagaatggagtgggcaaggtgggcgaccagatactactggccatcaagggacagaagaaaaaggcgctcattgtggggcactgcatgcctggcccccgaatgacccccagatttgactccaacaacgtggtcctcattgaggacaacgggaaccctgtggggacacgaattaagacacccatccccaccagcctgcgcaagcgggaaggcgagtattccaaggtgctggccattgctcagaactttgtgtgagttgagcccaggcctctggttgcaggactcgtgaatggagcagttctgagaaccacccttttgctaagggagcttgggagccacatggctgctcccttcacactgggtaacagtgtagtatcctgtgagagaataaatgtattcatttatgtggttttcccaaagctttctggggatgtgggaaaaataaaatacacctgaagcaggccaannccccacaanacaannnnnnnnnnnnccctggttgggccgccctcggcccctcgagaaacctttcttaaacccatttcttttggggcccgggggccccgtaggggaaggggaacctgggccataacctgtgtttcctaggaggaac

SEQ ID NO: 177582 - DNA, 407 bp, Homo Sapiens
  misc_feature (305)..(318): n is a, c, g, or t
ggtttggtgggccgcggccacttaaaacctcccgatctctttttgagtcctttattataagtagttgtagctgcgggagggggagggggagtgggcgggcagtggatagtaagacttactgcagtcgatttgggatttgctaagtagttttacagagctagatctgtgtgcatgtgtgtgtttgtgtatatatacatatctagggctagtacttagtttcacacccgggagctgggagaaaaaacctgtacagttgtctttctcttatttttaataaaatagaaaaatcacggcacttgcgcgtnnnnnnnnnnnnnngttttttaaacaagtgttacttgtgccgggaaaattttgctgtctttgtaattttaaaactttaaaataaattggaaaagggagaaact

SEQ ID NO: 177583 - DNA, 478 bp, Homo Sapiens
cagagttgtcacctacctaacagggctctgagagagccgggaggcccaaagtggctggaagaaggtaaaggaaaaatcctgtcttgggctcaaggtcacagagtggggcccagggggagttcctgctgagggcaggccttgccaggcttcagtctccagtgccaaaggaggaaatgccccaggctgtcagcatttccagatgagagcagaagggagaagcttaaacccaagtcacacatccagcaatggagtccgacagcccagcaccatctgggaactgagaagcacctctgcccggcccccaaaccgtgtggaaagtgaggagcacctctgcctggccgccaccccgtctggcaagtgaggagcgcctctgcccggccgctgtgcaaccttccaagtgtgaagtgacagccttgtgtgtgatgttttctgccttccccaagtttgcactttcgacattaaagtttactttttagtt

SEQ ID NO: 177584 - DNA, 365 bp, Homo Sapiens
gttaactaaaggatagcatttctaagatattttgaatattagggtcatttggcacttctcagcaagtaggatacttctcatgttttgaaattatatgaatatggaaaaaaatggcttaagaccagcgtctctgtatgacattgtatggttgaccctctgagataactgttttcatctacagaattgcatttttgcttttaaagaggtcttataatggaactaggaatcaccgttttgagagaacctgcatatataccagtcattatctgtttggtccttatacagttttaacttacttagatttattctagttaagccataagttcaacgtgtaaacttgttttcattaaagaatttttctacca

SEQ ID NO: 177585 - DNA, 671 bp, Homo Sapiens
tcacctgcatcctgccctgcactcaggtgctccccctgaagtcagggtcacatcaggtagacctgttactatatgcacctttggcctggaatgctctgaagttggactggaaatgttactaggttggcctgttacaaaaaggaccccatcctgcttaaacacattgatctcccttgccctgcatttgagtctttctagcccacggtctgaaacttgaggcagctttccagatttggaatgtaaaaggctcagtgggcactctgttcatccctgggtggggagggcccagccaacagaagtgcatgtccactgtgcgggccagtgtgtgtttacacaaatttcatctcagctttgaaaatgctgctattagtttccactgttggtgaactggattttttcctcctattgaaatgatactttcatacttataaagctgtcgtcaatatttatttcaaggtgctagatttaattttgttattaaattgaaatgcttatcttgtgttcaagcacagcactgattttaacaacctgcatttaatgtgaagtaaccgaagtaggatactgtaactgtgtaaggattttgtttgtaatcttgtaacattgaaccattgaaatgttcagttctttgcttttgagcaaaacgtcaattaaaactaaagtaaaatcctaaa

SEQ ID NO: 177586 - DNA, 535 bp, Homo Sapiens
aatttgccacgctcctaaaataaccactggttatttttggagctaattccagtataggctcgtttacaagagcatttttataacttcagacagccatcagtcggaaataacttgagaaattcatatggttatgttacaaattcatattctgttactactgtaaacgttcagagttttaaacagttaagattgtacaatttttcttcttttctatattacaagggcccccagtgttaatgcccttagattttcagtatttgaacttatttttttaaacttctgtcattgagataagaataattcaggtagcatctgaaattttaatgaatgtataataggcatatcatggaaaattaaccagaaagtatcagttcttaaaagttatgcctagaaattatgtaaagctaaactactggttagaaagtattcagtgtaatattgtattaatttgttaaattctaaacttgaattccaataaaattttaaagctaattgtagtttttgtgtaactttgtggccaactgattttgtaagt

SEQ ID NO: 177587 - DNA, 443 bp, Homo Sapiens
acgaacgtttagaatgctcaactcctctattgtgaccacaggaaggtggccctgaagatgcaccgaagacagctgggaggtgactgctgtactgtcagcctctctgtggaggcattcgtgcagtgccagctaaaagggaggtgaagggggatatcggacccagcgagggagttgctggtagaaggaaagctcttctcagtgtggctggattaagagcagcctagcagcttgggcacctccactctgtgcggtctgatggccccagcaaggtcgctgcagggacttcctgaggacttggtttggtttttttctggggttggaaatctgagccaatattgtgtctgttccatttgggtatgaagaggaagtctggatcacttaaactgactagttatttccgggtcataattttaaattaaagacatatcacttttttaaaaaaa

SEQ ID NO: 177588 - DNA, 1428 bp, Homo Sapiens
ggggaaccccaaaaagccgaaacggaagcaggatgaataaagaaagggagagcacatgaagctttgctaattataacccctcaccttgaccagagtcattgatgtcctgatgtgaaacaacccttgcccaaccccacgaagtctcctatttaatgtgatggaagcacaacccctctctcactttgctcctatttctttctgctcttgggatttctggtttaggaagagatgtggttcaggtgctaaacagtgtgtctgatgatcccttctctcccactcacatttcaacccctgcccttgtttggagctaagggaagggcaaaaggctcagatatgattctctatctcttgtgcctgaggcctggagcctaaggagctgtagggtctgaggggcaggggaggcccatatcttgtttcaggtaaaggacccagtatttcccctccttgtacttttgccttaggttctcaagggacaatagtcttcatgttggattctccaacaggctgggtgcatgtatccccctactcctaccctcatctcatccttaaggcccagaggtagcttggacaagccctcccttttcataatcatttggggaggcatgggctgtaattctttagctttctccacttctgtctcccacatatactaaaattcttaggtactaggctgtgtgtcttgggatcttaagatcaatgaacctttccccaatatctagtctttgcaaattctagtagaagatttccacagtgaaatcagtgagccagaccaactctacatctcctgcctaacctactgcctaagtcattagggctgagggctcggctgtaggggcttccttaggctgagagtgcccccaggctgacatctgtgttggcttttgttcagaaccattactctggcacatgctcaatggtatattgcagggaggagaggagtagatttagatttgagtaaatgccaatcactttacacatgaaggtgggtgggactttccttccattcatcccttgctctcttggatctgaactcttctggagcctcagctcaggatagctgctggccactcctgtcctgtggattgtgcaggtggcctttcctcccaaaagaaaaggcatcaggctccccaagccccacagctctcctttccaccaaagccaggtttcctggtaaggtcactcgaagataagggatggggatgggggctgactgacaaaaaattttagccccaggtctcagtacctggctggggagggggatatttttccttccttaagtagtttgacattgccacagtgggtatgtggtcactatataaaatggtcctctgctctttgaaagtaagagtgttgtgtctgtacaaatccttttaacatgcattcattggagtaaattctgagtatctactgtgtattggataatacaaa

SEQ ID NO: 177589 - DNA, 1702 bp, Homo Sapiens
  misc_feature (1508)..(1508): n is a, c, g, or t
  misc_feature (1536)..(1536): n is a, c, g, or t
  misc_feature (1581)..(1581): n is a, c, g, or t
  misc_feature (1595)..(1595): n is a, c, g, or t
  misc_feature (1607)..(1607): n is a, c, g, or t
ggggactctcagggattctgggcttggggtgtggggtggggtggagtcgcagaccagagctgtctgaactcacgtgtcagaagcctccaagcctgcctcccaaggtcctctcagttctctcccttcctctctccttatagacacttgctcccaacccattcactacaggtgaaggctctcacccccatccctgggggccttgggtgagtggcctgctaaggctcctccttgcccagactacagggcttaggacttggtttgttatttcagggaaaaggagtagggagttcatctggagggttctaagtgggagaaggactatcaacaccactaggaatcccagaggtgggatcctccctcatggctctggcacagtgtaatccaggggtgtagatgggggaactgtgaatacttgaactctgttcccccaccctccatgctcctcacctgtctaggtctcctcagggtggggggtgacagtgccttctctattgggcacagcctagggtcttgggggtcaggggggagaagttcttgattcagccaaatgcagggaggggaggcagatggagcccataggccaccccctatcctctgagtgtttggaaataaactgtgcaatcccctccgccaaacaaaaaacataaccccaatcactaatcccccccagttcccctcattccccttacaaaattccgagccccttgtggcccccttgggtcctaaaaaccttttccacctattccctttggtcggcccggcccccataagtacaatgaacccttgcttccccttttgccccctctaagcgaccccctgcgttaattaccctcgctggccctggcaccttcccctacaaaatcccaacactatcccgctcgcggctctcaccccataagcgctctccccaataatataacccccatatagcgcgatctccttggcccgcccttttcacccgtgtaatctccctcgttaacactgcgctccctcaaagatgccgcgctcccacatattcacaccctttaaccgctcccacgtgtcccgttggtccctctctccacgctcgatagaacgtggtggttctgtactctacacctcataattctctctctttttcccccacttggcgggacgttccttactccgagcaccaccggcgctcgtagggacactctcgtccaacttcgcgtagcggcatagctacacttatgattcacctcttggtccgcgctcctcttgatgtatattatctacattcttacgacccctagcgaacgccaccacgcgcccggccctcctacaatactaattgtgtctctcctctcttttcgctcgcccccatttcactaacaccgccacgcaccggcggcgcgaaacaatagcttcatacatcacgccggtctcactgttgtctctatgaccaacactcaacacaacatattctatgtctcgttgtcctagtatagtacccgcccgcatctctcttcgtgctatcataataacgngctcatactatgtactactcctcctcgncgcagatcatcctgcacgcgacgcgcacgttcctcctagcaccgnactaatcatcactngttggtgtaganacacacaacacctatgtctctcagatatatcggcggcgccagcggctgttaatcacgcgcctcctcagtcgatctatgcacgcacacgattcctt

SEQ ID NO: 177590 - DNA, 523 bp, Homo Sapiens
  misc_feature (61)..(61): n is a, c, g, or t
  misc_feature (481)..(481): n is a, c, g, or t
  misc_feature (497)..(497): n is a, c, g, or t
aatttaataccactcactaatagggaaatttgccctcaaggccaaaaattcggcacgaaancgcgccttccggtgccagtggtggaccacaagaatggcacatatgagctagtgtacacagcgcgcacggaaggcgagctgctcctctcggtgctgctctacggacagccagtgcgcggcagcccttccgcgtgcgtgccctgcgtccgggggacctgccaccttccccggacgatgtgaagcgccgtgtcaagtcccctggcggccccggcagccatgtgcgccagaaggcagtgcgtaggcccagctccatgtacagcacaggcggcaaacgaaaggacaacccaattgaggatgagctcgtcttccgtgttgggcagttcgtgggaagggagaaaggttgaatttcaccaattttacaaggtgttgttccgcagccagcagcggccgcaagtttatttccttttagttgagggtttanttttagtttggcattnggccttgtttttacaacgttgtgatt

SEQ ID NO: 177591 - DNA, 498 bp, Homo Sapiens
  misc_feature (361)..(371): n is a, c, g, or t
ctgaatgccacaataaggtatatttgagtggcaaagctgtacccctcacagtgcccaagagccagttctctcgttcctccaaagcccacaatcagaagatgaagctcacttggggcagtagctgatgcaacttccaccttgctctcaggtggaacagaggtattttgggtctctctagcctgaaatgtcatcctcaactgctactgagtttaggggagggggaatgtcttgacagacatcactgcattgccctggaccgcctcctttatcccagtgtttgaggtacaagtaagaaggctgaccagcacctgtaacactgactttatttttaagtctgaaaatgtcttgggaaagttttacnnnnnnnnnnntcaacagaagcaagttatgaaaatatttgaccagcttcatctttggttatttcttattgcagctctgtaaggacagactgttcccaaagctccagccatggcaggaagggaagcaaatcagtccccc

SEQ ID NO: 177592 - DNA, 379 bp, Homo Sapiens
tgcaccaccaggtcggagcgctgcccgaaacccttgccgcaagtggcgcaccatgtggccgctcgccctgatggctgcgcgatgcgaggcgctggaactctcgctgaagcagcgtccacagtcgccacatgcgtacggcttctcgcccgtgtgtgtgcgctggtggcaccagcgtgagcgctctccaggaagcccttgccgcactccgggcacttgaagggtttctcccccgagtgcgtctgcaggtgtcgcgtcagtaggatgctcttgccaaagcacttgccgcacacgccacactggtggcgtctgagacacggggtcgcgtggggctccgggacacgtggatgcgcgcgtgactccgcagcccggcgccgcttcg

SEQ ID NO: 177593 - DNA, 640 bp, Homo Sapiens
  misc_feature (406)..(414): n is a, c, g, or t
  misc_feature (587)..(587): n is a, c, g, or t
  misc_feature (621)..(621): n is a, c, g, or t
agtttaccccttggctttgtgttcttgcatggatttggggttggaggggccattccggaggctaaataaagtctcctggatttaaattatcctgggtctcttacttatggcttatgaaagtaccaaatgtataaccactagaagaaaatttaacatatgagtcgatcccttgttttatccattgaaagtagcagagtctggtgtcattaacctgacttgcttgtgagaaatttagattgtagagtcatttctgaaacatgacctaattcatcttgtgacttttaaatagtcttaaataccaagttcagtcattgtcttagagcacatgaatttcattataatagatttatcatgcccccctctcaaatatacacagttttggcaagccttaggtgttctgttccannnnnnnnncccctaaacatctttcgttagtcaatgctcatctaattacaaagggataatcccagactgtatccaattgctgtaacttttggtttcttaatgtcataatttttaaagtctgttttattttaagtgcaatattgagtatttagctgttaggctcaatccgtcggtatgaaatnaattttttaatccctaagggcaggaaagcctttncgtgggtagtgagattttg

SEQ ID NO: 177594 - DNA, 607 bp, Homo Sapiens
  misc_feature (11)..(11): n is a, c, g, or t
aattgtccctnaagaaccggatgtggaaaattgcctgaggaaagttcaggggcccttggccaattcatgtccctcgaaagttcagcaaagcccaagcttgccgtcacccatccaaagtcagcctcctcaatgaccttgtcgcacacaagcacccacctcctcctcatcccagctctgacttagtgagccgggccagcgtcagctcccaggtcctccttgcagatgaagttgtcagtgttgaagtcatagatcttgaaggcatagtttgccttgagctctcggggagccgactcgcagagcacggaaaacatgtccacaaagtcgttgaaagtgaggttcccctcaccatcctcggaaaacgccgccacgatcctttctttgaagggattctcccggagctctggcatctggatgatgaggctcatgggcacgtggacgatggggctcttcctgtagtccattgggacgaggttgggggccagctcatagaatcgcgaatgcagcttgaggatgtccttcttattgaagaaggtgcagtcctggtagttgtctagctgctcttcggtgaagatggtctgcttgttccccatggtggcgccggccgccg

SEQ ID NO: 177595 - DNA, 1055 bp, Homo Sapiens; identical to SEQ ID NO: 14473
  misc_feature (656)..(718): n is a, c, g, or t
  misc_feature (781)..(781): n is a, c, g, or t

SEQ ID NO: 177596 - DNA, 505 bp, Homo Sapiens
ggtgacattgcctctttgtcctggcctctagttttcttttgatatttcatagctctccttagtttactctgcctggatagaaagttgaccactaactgcaggtttaagtactaaactgcagccttttctgtcgccagcaattaaagaccaccaatcttgtttgtccatctacatggtttgtcggggacatttaactcatggaggtgctttagatttcaacatcagatggttgaagctggaagtttaattatatgtagagtgagaaggcagttccagttttagcacagatttgtttatgtgttcagattttaatagagattcaaaaatgactcatttttaccaataatgttaaattagttttggttgtgctagcatgaattaataaccaccattttataccagtatcatcagtgaagaattgtatttcaagattcaaacaataaccagcaattaaacttttttctacaatgtatttgtttgcgagtaggacttgggagtcattggg

SEQ ID NO: 177597 - DNA, 425 bp, Homo Sapiens
  misc_feature (180)..(204): n is a, c, g, or t
ggacctcctagttccacgtgctatcattctactaactggcaccctaaggttgaaagtgcttatctgctttccaatgtggcttccttacagtctggaactgacaatatgcaggagcagtaaactggcagaaaaccaggaatcagagaaagaaaatataatctaactttaaagatgtaaatnnnnnnnnnnnnnnnnnnnnnnnnnttttaaagctttatatgccctcaaatatcagggaaaggagcccaagtccttggtatttagtttggtgaatacttgcattgaatacatgtcaagatgtcaagtcatttttgaatgtgtctcagggatttctatgctacacattcttttaacaaatcaagtatttatgtacacatgttcagattttttgacaaaatgattaaaataaaaaagatggaaaatga

SEQ ID NO: 177598 - DNA, 1280 bp, Homo Sapiens
  misc_feature (101)..(150): n is a, c, g, or t
  misc_feature (345)..(345): n is a, c, g, or t
  misc_feature (369)..(369): n is a, c, g, or t
  misc_feature (472)..(472): n is a, c, g, or t
  misc_feature (474)..(482): n is a, c, g, or t
acgggagggggaaagaaacaagggcgggttttcccacagggcgcgcggcacacgctgacaccgctggtgcggggctacgcgggtcgacacggaaaaatacnnnnnnnnnnnnnnnnnnnnnnnnnnnnnnnnnnnnnnnnnnnnnnnnnnaaataagtgggtgggcgaaagagaagggcggcgggataagagaaccgcgaagggcgagatatacggcggcgccatgcgacgcgccaaaacgcgcgagcggccccgcgaagctaaatacagcggggcgcgggaagaataagaacaagaaccgggcgactagagtactaccgcggcggaaaacgcgaccgcgcacanaaaccgcggcgccgcgggcgacanaaacagcgcgggatacacaagcggcaagagcggcgagggggcgaaaacgcgggcgatatggagagagcggtgacggttttaatttcgccaccgcgcgaagaancnnnnnnnnnaaacatagccgccgccggaaactagggcgcgcgaccggccgaagggcgggtatataaaggaggaggggcgcctcagagggcaaattgccgcgcgaacacggaaacgtctcacggtgagggcaataacgcggtacggatcgccccggcccaaagatagcgggagggcgggggaaaaacgggcgcgatacgccgacgaccgggcgacatttgggtccgcgctggaaagcgccaccgaacccgggcaaaagcgctggggccatccggggcggggacggaactggtagcagggggatgcgggggtggagtagaaacgggcagaacggggccgcccgggaacagtctccggagaaccccgctcggcggaccgcgggatccgcggcggaggcatggctcacagaatccggcggggtcctcgcaggggcgagctccagctccgcggcatcactccccggggcattgtccagctcctccagaaggtacggtccggctccgcggttccaccagagcgtccgccatagaggcagcagccgcccggcgtcgccgcggctcagcagccgctcgaaggcagctttttcgcccggcgccagccgctcccagagtcccgataggccgccgggcgccgggccggagctgagacctgcttccccaggctcgtcctcggtctcgcgttgctgacgcagccggcgtagggcgcttgctaggcggctgggaggagcgctgcaaccgcggagctctcccagcacctggtcacggtagaagttttctgcgcaggtgccatgggaacggtagcagcgcagc

SEQ ID NO: 177599 - DNA, 840 bp, Homo Sapiens
  misc_feature (202)..(202): n is a, c, g, or t
  misc_feature (301)..(301): n is a, c, g, or t
gcggccgcgacgccgtaggctggcgtcagtcaggaagctgttaatcacctccagccggtgcaggtgcacaacctggaagttacccacatatacggcccagtgcgggtactgagcctgcgacacgaactccaccagatcgcccggcttgcacttgttgagcaggttctcgggcgtgtaggtactcagcgccgccgagcccggncgaaagctcttctggtagatgcattcgtcccggtagaacacggagcattccacctcgtgcagccgcggatcgtagggctgcggctggggcggcggcggnccgtccccaccgtcgggcaagccgcccattgctggcccctgaggcggcggcagcggctccacgtcctcatcgtcattggagaaaatgtaggagaccccaatgcggggcccgtcgtcccggtccacgccagtcgggttcggccgtgggaacttccttgtaacttaggtgggtcaatttctccacctggttgcccatcacgctgcggacacacgttcacaccgccgcaaggggagaaagcgaaaccaactccagggtcatttgcacaggtccccggacaggggctgaggctacctgttgggagaggaaggcaagaaagccatgcaggagcccctccgtgaaaagggcgttttgttccgaaaaagaatcggtgggggctcagcacctggagccattttagggggaagtctcgggtgtagcgagctttccctcgtttctccacctgtaaggtcacggtcacaggagactgggcaactcctgttctccctgtccccagcccttcgcctggccctggcaaaagcccattgcatcagcagcttcta

SEQ ID NO: 177600 - DNA, 457 bp, Homo Sapiens
  misc_feature (12)..(12): n is a, c, g, or t
  misc_feature (60)..(60): n is a, c, g, or t
tcctactgtatngaaccccgggctctgaaacggctcctggccgccctaatgcacttcacnggtaactcccccagggtaaaactagactctcttgttggttcgcaaagaaaagttaggacttaacacttttttctaaaattttataattcaatttccaaaagtctactctattttatactgtttctacaaaatattccttataaaaacaaagaacaaaaattgaatatttaatgaattgacattttataaccaacctgtttttatctacggtgggaatctttgatgccagaaatttataaagaggttctgtatcttcacaccttgaataagcataataccataaaaaatgacacttgacatgtcaatgtatttgtcatttcattttaaactcgtatttgtggtttttttcccagataaaaatgaaattaaaacaatttctttttaagaaatcaaaaaa

SEQ ID NO: 177601 - DNA, 1015 bp, Homo Sapiens
gcctggaggaggctctgtatgtcctcagagtgactgacaacatcctccagattccagccataaaccaataactaggctggacccttcccactacataatagggctcagcccaggcagccagcttgggctgagctaacaggaccaatggattaaactggcatttcagtccaaggaagctcgaagcaggtttaggaccaggtccccttgagaggtcagaggggcctctgtgggtgctgggtactccagaggtgccactggtggaagggtcagcggagccccagcaggaagggtgggccagccaggccattcttagtccctgggttggggaggcaggagccccagcaggaagggtgggccagccaggccattcttagtccctgggttggggaggcagggagctagggcagggaccaaatgaacagaaagtctcagcccaggatggggctatcttcaacagggcccctgccctcctgaagcctcagtccttcaccttgcccaggtgccgtttctcttccgtgaaggccactgcccaggtccccagtgcgccccctagtggccatagcctggttaaagttccccagtgcctccttgtgcatagaccttcttctcccacccccttctgcccctgggtccccggccatccagcggggctgcccagagaaccccagacctgcccttacagtagtgtagcgccccctccctctttcggctggtgtagaatagccagtagtgtagtgcggtgtgcttttacgtgatggcgggtgggcagcgggcggcgggtccgcgcagccgtctgtccttgattctgcccgcggcggcccgtgttgtgttttgtgctgtgtccacggctaaggcgaccccctcccccgtactgacttctcctataagcgcttctcttcgcatagtcacgtagctcccaccccaccctcctcctgtgtctcacgcaagttttatactctaatatttatatggctttttttcttcgacaaaaaaataataaaacgtttcttctgaa

SEQ ID NO: 177602 - DNA, 585 bp, Homo Sapiens
  misc_feature (34)..(34): n is a, c, g, or t
  misc_feature (258)..(258): n is a, c, g, or t
  misc_feature (317)..(317): n is a, c, g, or t
  misc_feature (489)..(489): n is a, c, g, or t
ccgccgctccgctgccccacccgcccatcacgtnaaaagcaacaccgcaactaacactaactggctattctacaccagccgaaagagggagggggcgctacactactgtaagggcaggtctggggttctctggcagccccgctggatggccggggacccaggggcagaagggggtgggagaagaaggtctatgcacaaggaggcactggggaactttaaccaggctatggccactagggggcgcactggggacctggncagtggccttcacggaagagaaacggcacctggcaaggtgaaggactgaggcttcagtnaggcaggggccctgttgaagaagccccatcctgggctgagactttctgttcatttggtccctgccctagctccctgcctccccaacccagggactaagaatgcctggctggcccacccttcctgctggggtccgctgacccttccaccagtggcacctctggagtacccagnacccacagaggcccctctgacctctcaaggggacctggtcctaaacctgcttcgagcttccttggactgaaatgccagtttaatccattggtcctg

SEQ ID NO: 177603 - DNA, 465 bp, Homo Sapiens
gcttttttataacaacgtctttttgtttgtttgttttggattctttaaatatatattattctcatttagtgccctctttagccagaatctcattactgcttcatttttgtaataacatttaatttagatattttccatatattggcactgctaaaatagaatatagcatctttcatatggtaggaaccaacaaggaaactttcctttaactccctttttacactttatggtaagtagcagggggggaaatgcatttatagatcatttctaggcaaaattgtgaagctaatgaccaacctgtttctacctatatgcagtctctttattttactagaaatgggaatcatggcctcttgaagagaaaaaagtcaccattctgcatttagctgtattcatatattgcatttctgtattttttgtttgtattgtaaaaaattcacataataaacgatgttgtgatgtacc

SEQ ID NO: 177604 - DNA, 526 bp, Homo Sapiens
tctgctgtattttcagtaatgtgatttcagatggtcatctgattctcccacttctctactccattatttctctacttttccttccagcaaacctgaaacgtgagggagatggattaatgtgagtaacaggaatgtgtctttaaaaagctagagtggttacatttaatcaggcagtaagataatttgggttcttgagttgttttggagtaatatcccacaactggggtaggaagctcaggacttttttctttaaagctagtcatttcaaaagcatattgtatttttttgaatgactacagtatggacaatttcaaaaaccaaaacccactttggattggtggaagtaaaaactggtaactcactcaagtgaatgaatggtcttgcattttaaaagcttatgggaaactcaatttgaaatgattagaaaatgtcaagtattataagctggtatttaagatgcttgtaaatactatttatgtttttaattttgtaaaataaagatttctttttaaccactggcaaaaaa

SEQ ID NO: 177605 - DNA, 682 bp, Homo Sapiens
  misc_feature (112)..(112): n is a, c, g, or t
gcggctccagctccagccccggggcgaccagacgcatcgcgccgcacagactcccggcccgtgcgcaccccgcacgaggacgcacgctaccctggaatgcaggctacgcgangattataaatgcagagaaatctgaattcaatgaggatcaagccgcctgtgggaagctgtgcatccggacatgcgagtttggggctgaagaagagtggctgaccctgtgcccacaggagttcctgacaggccattactgggcactgttcgatgggcacggcgggcctgcagcagccatcttggctcccaacaccctgcactcctgcttgcgccggcaactggaggccgtggtggaaggcttggtggccactcagccccccatgcacctcaatggccgctgcatctgccccagtgaccctcagtttgtggaggaaaagggcatcagggcagaagacttggtgatcggggcattggagagtgcctttcaggaatgtgatgaggtgatcgggcgggagctggcagcctcaggccagatgggcggctgcacagccctggtggctgtgtccctgcagggaaagctgtacatggccaatgctggggatagcagggccatcttggtgcggagagatgagatacggccactgagcttcgagttcaccccagagactgagcggcagcggatccagcaacc

SEQ ID NO: 177606 - DNA, 923 bp, Homo Sapiens
tttgtcaggaaaaaaaagagtttaatcatgaaaccaaggaagtttctaccattaagctcccaacagtaacctagagaaatatatctaacataaagagtttccacagttagaggacaaaaagctgtatcggcaactgaaaaatacagtcatcctaaagaggatctgacacatcatctattctgacaaaagatttttaaaagtggcactgctcgagtcgaaatggttaattacctagcagaaattgattttctctatctccgtagcactcaaagcagctggcaggctcttgcaatagtcattcgttttcgtggtgacaagaatggttgcaccttcctccatagctgggagtggaaagcaatggtcagagtcgaccttcggtttgctcttgatgcagtcttcacaggtgcattcttccaccgtgtactcgaggcctctcggaagaataatttcatcaccagtcctgctcttttccaggtcaatgttagccatgcccaggagacctgatcctgggtgtttaaactcgtcctctaatggttcagagcttatcttccttagcaaaaacattagcacgaaaactgccaaagaaattattaagctcagtcccaaacaggtccagagaatcgcattcgttcctttcactgaattggtcacacttgcattacaataacgctgacatgttagaggaggagtattagaagaacatcgaagttgacaaggtatgcaagcatgcaacaaactgtcaaaatattcattttgggagcactgcccagccatctgcaacatgatcacaaaaagaaaacaagggagctacagaaagaacagcctggaaggacaagtaatatctctacaagaattccggagcaaatgcagcaagagcagctagaatgttgagaacaatgaacttcgcctgcttcgtgggtccc

SEQ ID NO: 177607 - DNA, 338 bp, Homo Sapiens
cctcgccgcagaggactcccgggactcgcggaggccccgccctgcgaccgccggggctcggggccacctcccggggctgctgaccctcagcccgcactgggagtgggctcctcggggtcgggcatctcctgtcgctgcctcggccccgggcagagccgggccgccccgggggcccgtcttagtgttctgccggaggacccagccgcctccaatccctgacagctccttgggctgagttggggacgccaggtcggtgggaggctggtgaaggggagcggggaggggcagaggagttccccggaacccgtgcagattaaagtaactgtaaagtttccacc

SEQ ID NO: 177608 - DNA, 596 bp, Homo Sapiens
  misc_feature (67)..(67): n is a, c, g, or t
  misc_feature (70)..(70): n is a, c, g, or t
  misc_feature (84)..(84): n is a, c, g, or t
  misc_feature (108)..(108): n is a, c, g, or t
ttttatttatttataatatcattttgtaaacaatcacactgtgcactttttaattcaacaataagancantttttttctagggntttatagcaaaccctatataaagngaatgacttaatacacgagtgaagatgactagggtagaataattgctgaaaatgtcaaattacagcacttgatacaaagactgatgataactatctgtaccataaaaatttacatgccacgaaaacattaatttataattttaaatatacagtaaaacatagttataaaaagagtattacatttattataaaccagtgaattactcagagaaatatttattaaaacctactaaaaaccagtaaatattgcaactgaggtaaaaatttataagtaaacaaaactatcatttataaggaccaagaagtaaacaaaagggcagacattttctgatgactgtgtctactccttgatattttgaagcagcttcaacaaatgtgactcaataacctgttgaacacttctatacctagggctacagctagatccatagaattatatccagagtcagtttcaattgttggatcagccccactttctataccaaaac

SEQ ID NO: 177609 - DNA, 761 bp, Homo Sapiens
  misc_feature (119)..(119): n is a, c, g, or t
  misc_feature (590)..(613): n is a, c, g, or t
gaatgaaatgtaaatttaatacaaatagtctgactatgtacaagagaaggtaaagttttcaattctcgtattatcagaaacatcataaagaaagcctagatttataacaccacttctanttcctatgtgcatctgaagtatgtacaataaaacaccaacacagctttcatgtgtcaataggggaagtgcaagcaagaatgacttgaagtatccaataaagcaatctctatagaccccaaaatcaggctaaaaactgcaaacagctgactgcatccttgccagttctcaaagaaaaatttcatcactaaaaaataggtgtcaaattcactgaaaaactaagttgggttctttcattaaacctgggaataatgtaacatcaagtatttactatttttgcaagagaaataaaattggcagttccatttttacattacttaagaaaaatttaagagtgtttgaagaactgggacaagacattccaaacctacgacctaaaaatgaagcaagggatacatactgtccttcagcacatttccccacctgatacagagaaatttaccattagaatattagctgtgtgtggcaaggcnnnnnnnnnnnnnnnnnnnnnnnnaatcagacactgtcccagtctgttgacaaggacaaaaaggctctgaataggtcaccatcttcaattctgaataaatttcatatttaagaattctcaaatgcttaaaatggtggtcttttcagctacccatcctaagaagtcaagtacc

SEQ ID NO: 177610 - DNA, 742 bp, Homo Sapiens
  misc_feature (684)..(684): n is a, c, g, or t
tccatctccctggaaacggaacaaatggccctggaaacctctggctaatcgggccatccgtaaaacgggaaccttcctgaagtgtccttgggccacccccaagtgttgggccatctgcccaagagacagcgacccaaagccgaaggacaggtggcctggaaagatcccgcccaggtctgggagccccaggctggcctcagactgtggttttttatgtggccacctgagggcgccccaagccagttcatctcggagtaccaggcctggccctgggagacagggtgaagggagtggtttttatgaacttaacttagagtctaaaagatttctactggatcacttgtcaagatgcgccctctctggggagaagggaacgtgactggattccctcactgttgtatcttgaataaacgctgctgcttcatcctgtgggggccgtggctgttccctgtgtgggtggggcctcttccatttccctgacttagaaaccacactccacttagaacagggtttgagaggcttggtcagcactgggtagcgttttgactccattcttggctttcttctttttctttccagaaggatttttgtgcagaaatgggtcttttgttgccgtgttagtcctccttggaaggcagctcagaaggcccgtggaaatgttcggggggacagggacccccaggnaaggggaacccctaaggttacgcacttttaggggtttcgtttttcccaggggagagcc

SEQ ID NO: 177611 - DNA, 447 bp, Homo Sapiens
cattccagtgcctctcaaaggcatacaagtgtgacacccagtccaattgttgggagaaagatattacatcatttaaggaagttgttcaaagagccttaggacttgcacatgtggccataaaatgcagtaaaaacaaatccagttcccaagaagctgtacaaatgctttcttctgttcgactcaatttacggggcttgttatctaaagcaaagcaactttttacagatgtggcaactggagaaatgtccagggaattagctgatgacataacagctatggacaccttagtgacagagctccaagacctaagcaaccagtttcgaaatcagtattgattctgctggaagcagattctggaaaaggtgctttcacctgctggtaaaagatacatctgtatatctgaaatgcaagatattgatttttaaaataaatttgttttatgactta

SEQ ID NO: 177612 - DNA, 985 bp, Homo Sapiens
  misc_feature (209)..(255): n is a, c, g, or t
aagccgtggcagagtggcaaggcagggccagtggaagcggctccgccgccggggccgggcccctgtttggccggtgcccggtccttagcctgaaggtggcgggcttccgccagaagcccctggcggaagcggtgcccgcgtgcgggccagagtgtgggtgtgcaggtctctgggcggcccaaagggggtgcccctgcctggtaacctannnnnnnnnnnnnnnnnnnnnnnnnnnnnnnnnnnnnnnnnnnnnnntccgctgctcagggcaggctccgcccccaggggcgcggatttaaaaggatcgaaggcagccccggagcccagcggccgggaagcgcgcccgaacgaagccgcggcccgggcacagccatggcccggcgggcggggggcgctcggatgttcggcagcctcctgctcttcgccctgctcgctgccggcgtcgccccgctcagctgggatctcccggagccccgcagccgagccagcaagatccgagtgcactcgcgaggcaacctctgggccaccggtcacttcatgggcaagaagagtctggagccttccagcccatccccattggggacagctccccacacctccctgagggaccagcgactgcagctgagtcatgatctgctcggaatcctcctgctaaagaaggctctgggcgtgagcctcagccgccccgcaccccaaatccagtacaggaggctgctggtacaaatactgcagaaatgacaccaataatggggcagacacaacagcgtggcttagattgtgcccacccagggaaggtgctgaatgggaccctgttgatggccccatctggatgtaaatcctgagctcaaatctctgttactccattactgtgatttctggctgggtcaccagaaatatcgctgatgcagacacagattatgttcctgctgtatttcctgcttccctgttgaattggtgaataaaaccttgctctttacatacaaaa

SEQ ID NO: 177613 - DNA, 598 bp, Homo Sapiens
  misc_feature (275)..(338): n is a, c, g, or t
  misc_feature (475)..(510): n is a, c, g, or t
tcacggagctcagagagagaagaaagtcaaagcagaaacaaagacaaatacagaaaccaagagagtaagagctcacacagaaaagaaaattctgagagtgagaaaagaatgtactctaaaagtcgtgatcataatagctcaaataacagcagggaaaaaaaggctgatagagatcaaagtcccttctcaaaaataaaacaaagcagtcaggacaatgaattaaagtcctccatgttgaaaaataaggaggatgagaagatcagatcctcagtggnnnnnnnnnnnnnnnnnnnnnnnnnnnnnnnnnnnnnnnnnnnnnnnnnnnnnnnnnnnnnnnntgatcatgaatcaagccctggaacagatgaagacaaaagcggatgagtgagttatataaacttacttccattctgtttcggattttaagtttgagagacttgctaatgaatctcctttatgttgttttccttttcannnnnnnnnnnnnnnnnnnnnnnnnnnnnnnnnnnncttaatgtggatttcattgagttgattttttgataatctgcaatctggataatttgtactgctaaagttttaataaactcgacatgag

SEQ ID NO: 177614 - DNA, 433 bp, Homo Sapiens
cagactggcggtgcaccctgcaggtgacaacgtcatctgtgggagctacgatagcaagctggtgtggtttgacctggatctttccaccaagccatacaggatgctgagacaccacaagaaggctctgcgggctgtggccttccacccgcggtacccactctttgcgtcaggctcggacgacggcagtgtcatcgtctgccatggcatggtgtacaatgaccttctgcagaaccccttgctggtgcccgtcaaggtgctgaagggacacgtgctgacccgagatctgggagtgctggacgtcatcttccaccccacccagccgtgggtcttctcctcgggggcagacgggactgtccgcctcttcacctagctgttctgcctgcctggggctggggtggtcgtgctgaagtcaacagagcctttaccctgtgcc

SEQ ID NO: 177615 - DNA, 955 bp, Homo Sapiens
  misc_feature (653)..(653): n is a, c, g, or t
ctgggtggcgaattcagcaccagggtgaccttgtccggtgcctcactgtctctcctgggggccagtggctggtttcaggctctgacgacggctccctgcggctctgggaggtggccactgcccgctgtgtgaggactgttcccgtggggggcgtggtgaagagtgtggcctggaaccccagccccgctgtctgcctggtggctgcagccgtggaggactcggtgctgctgctgaacccagctctgggggaccggctggtggcgggcagcacagatcagctgttgagcgccttcgtcccgcctgaggagccccccttgcagccggcccgctggctggaggcctcagaggaggagcgccaagtgggcctgcggctgcgcatctgccacgggaagccagtgacgcaggtgacctggcacgggcgtggggactacctggccgtggtgctggccacccaagaccacacccaggtgctgattcaccagctgagccgtcgccgcagccagagtccgttccgccgcagccacggacaggtgcagcgagtggccttccaccctgcccggcccttcctgttggtggcgtcccagcgcagcgtccgcctctaccacctgctgcgccaggagctcaccaagaagctgatgcccaactgcaagtgngtgtccagcctggcggtgcaccctgcaagtgacaacgtcatctgtgggagctacgatagcaagctggtgtggtttgacctggatctttccacccagccatacacggatgcttgacaccccccaataacgcttcttcccggttttggggcctttccccccccgggggaaacccactctctcttgccgctagaggtcccgaaaggaagtgcctagtggtgcaactcatctttctcccctgtccccttgtcccgtttacttaatgtcacccctctcgctggcccatatgacacctcctctgtccc

SEQ ID NO: 177616 - DNA, 883 bp, Homo Sapiens
  misc_feature (828)..(828): n is a, c, g, or t
  misc_feature (864)..(864): n is a, c, g, or t
ccccctgaatacctgctcagcgaggaggagcgcttggcgtgggaacagcaggagccaggcgagaggaagctgagctttttgccacgcaagttcccgagcctgcgggccgtgcctgcctacggacgcttcatccaggaacgcttcgagcgctgccttgacctgtacctgtgcccacggcagcgcaagatgagggtgaatgtagaccctgaggacctcatccccaagctgcctcggccgagggacctgcagcccttccccacgtgccaggccctggtctacaggggccacagtgaccttgtccggtgcctcagtgtctctcctgggggccagtggctggtttcaggctctgacgacggctccctgcggctctgggaggtggccactgcccgctgtgtgaggactgttcccgtggggggcgtggtgaagagtgtggcctggaaccccagccccgctgtctgcctggtggctgcagccgtggaggactcggtgctgctgctgaacccagctctgggggaccggctggtggcgggcagcacagatcagctgttgagcgccttcgtcccgcctgaggagccccccttgcagccggcccgctggctggaggcctcagaggaggagcgccaagtgggcctgcggctgcgcatctgccacgggaagccagtgacgcaggtgacctggcacgggcgtggggactacctggccggggtgctggccacccaaggccacacccaggtgctgattcaccagctgagccgtcgccgcagccagagtccgttccgccgcagccacggacaggggcagcgagtgggccttccaccctgccccggnccctccctggttgggtggcgtccccagcgcaagcgntctcggcctctaccaacct

SEQ ID NO: 177617 - DNA, 1006 bp, Homo Sapiens
  misc_feature (542)..(542): n is a, c, g, or t
  misc_feature (629)..(661): n is a, c, g, or t
tgaccttgtccggtgcctcagtgtctctcctgggggccagtggctggtttcaggctctgacgacggctccctgcggctctgggaggtggccactgcccgctgtgcgaggactgttcccgtggggggcgtggtgaagagtgtggcctggaaccccagccccgctgtctgcctggtggctgcagccgtggaggactcggtgctgctgctgaacccagctctgggggaccggctggtggcgggcagcacagatcagctgttgagcgccttcgtcccgcctgaggagccccccttgcagccggcccgctggctggaggcctcagaggaggagcgccaagtgggcctgcggctgcgcatctgccacgggaagccagtgacgcaggtgacctggcacgggcgtggggactacctggccgtggtgctggccacccaagaccacacccaggtgctgattcaccagctgagccgtcgccgcagccagagtccgttccgccgcagccacggacaggtgcagcgagtggccttccaccctgcccggcccttcnctggttggtggcgtcccagcgcagcgtccgcctctaccacctgctgcgccaggagctcaccaagaagctgatgcccaactggcaagnnnnnnnnnnnnnnnnnnnnnnnnnnnnnnnnngacaacgtcatctgtgggagctacgatagcaagcttggtgtggtttgacctggatctttccaccaagccatacaggatgctgagacaccacaagaaggctctgcgggctgtggccttccacccgcgatacccactctttgcgtcaggctcggacgacgggcagtgccatcgcctgccatggccagggtgtaacaatgacctttctgcagaaaccccttgcctggtgccccgtcaagggggctgaaagggaaccctgtggcgagaccccgaaaatctggggaagtggctgggaaattcaatccttttcaacccccaacccaaaggccgcggggggctcctttcctc

SEQ ID NO: 177618 - DNA, 779 bp, Homo Sapiens
  misc_feature (424)..(450): n is a, c, g, or t
ggggagaagagcactgattggctgaggcagaaaagtgcccctgcctcggcgctttcggttttggctgggatcatccgcggcggccgggctcgtggggcgcctggagtgagggttctggttcccgccggcgaggattgttaaaatgagtcttcggaagcaaacccctagtgacttcttaaagcaaatcatcggacgaccagttgtggtaaaattaaattctggagtggattatcgaggggtcctggcttgcctggatggctacatgaatatagccctggagcagacagaagaatatgtaaatggacaactgaagaataagtatggggatgcatttatccgaggaaacaatgtgttgtacatcagtacacagaagagacggatgtgaagacaccaagagagcaacgcttttcatagttggatatannnnnnnnnnnnnnnnnnnnnnnnnnngcttcttttgtgatacaatttgtcctctttttataatagttggtgatttttcactgacatgtgagtaagataaatgtatacaattgtggatttaattgtgaaatgttctttcacttgtaagtttcagtcattttcttttacctcgttgtcagtgtacagaatgctaaaataattaaaaaaagacaaaatatacctcttcctacaagattatttaacttaagtttcgagaagggtcatttcatttgacttgcttttcttatccagctaaaatgatgcatatattttatatattggatggacatataattaaaacattttggagggaaaac

SEQ ID NO: 177619 - DNA, 716 bp, Homo Sapiens
  misc_feature (694)..(694): n is a, c, g, or t
cgacccacgcgtcgcggacgtgatagctcgggctgcgggttggtcaactggtgggcctcacgaattttgcaccagttgctggagacgtgccccagaacaatgagaaccttctgtcgacctgttgccccctaagtctggtcctctgactgtcccatcttgggaggaagccccatcaagtgccagcgtattcgcacgcgcctgtccacaaaaccaaagttcccttagctcatggcgatccagtcttttccggtgtccctgagcctccctcctcccattcacaaggcgagtggtcccagcagtggttccccagagagaggtggagatgggcttacattcccaaggcagctgatggaggtgtctcaactgttgcggactctaccaggctcggggctggggggctctgcctgctgaggatctcctgctctacctgaagaggctggaacacagcgggactgatggccgaggggataatgtccccagaaggaacacagactcccgcttgggtgagatcccccggaaagagattccctcccaggctgtccctcgccgccttgctacagcccccaagactgaaaaacctcccgcacggaagaaaagtgggcaccctgccccgagtagcatgaggagccgggggggagtctggagatgagcccccctaccctctctcctctttgttctctcattgttgttattntaataaatgctcattagtctgt

SEQ ID NO: 177620 - DNA, 624 bp, Homo Sapiens
  misc_feature (373)..(478): n is a, c, g, or t
  misc_feature (486)..(489): n is a, c, g, or t
  misc_feature (491)..(492): n is a, c, g, or t
  misc_feature (536)..(548): n is a, c, g, or t
ctttcccaccctactttgtgcaggtcatacctccccaaagtgtttacctaatcagtaggttcacaaactcttggtcattatagtatatgcctaaaatgtatgcacttaggaatgctaaaaatttaaatatggtctaaagcaaataaaagcaaagaggaaaaactttggacagcgtaaagactagaatagtcttttaaaaagaaagccagtatattggtttgaaatatagagatgtgtcccaatttcaagtattttaattgcaccttaatgaaattatctattttctatagattttagtactattgaatgtattactttactgttacctgaatttattataaagtgtttttgaataaataattctaaaagcatnnnnnnnnnnnnnnnnnnnnnnnnnnnnnnnnnnnnnnnnnnnnnnnnnnnnnnnnnnnnnnnnnnnnnnnnnnnnnnnnnnnnnnnnnnnnnnnnnnnnnnnnnngaaacacnnnncnntgggggggcccccccggcccccaaaaaatttttaaaaccctttnnnnnnnnnnnnncccccaagggaaagggaaccggggtttattggtttcctaaaggaaccgggccaaggcaaaggggttggattccccc

SEQ ID NO: 177621 - DNA, 416 bp, Homo Sapiens
ggtaaactgtcatggtttcatcctcgtattctggggcagagtggggccgcacagccagttctattcctttcaatggaccagaaaatattttgattgcttcgaggtatttttccagttgtggaggtccagaaagtacacactttggaagcccggtttcctttaaagtaagaatcattccacttaagcccccaacattagaccagtgcattcgtgtcaggaatatgttgtccagggcgagcaacctttaacttgtgctcctgcatgagtctctgaacgccttctccacagttgaagagataccggttgaactccggagaagacgtaagagcgcggcgccccgagttcccggcttaccccgtttgccaccaccttgtcaggttacaacggtgttttggggccgccggagcacccctacg

SEQ ID NO: 177622 - DNA, 1119 bp, Homo Sapiens
  misc_feature (910)..(924): n is a, c, g, or t
gggagtgcgaatcatgggaggcggctggtggtgggctcgggccgctcgccttgcccgtcctcgcttccggaggtcgctactgccgcctcagcggccccggagcgggggcgcccgggggtccttcgcccccggccacggtccccgcgccggggcttcgccgcccccagtgtccgagctggatcgtgcggacgcctggctcctccgaaaagcgcacgagacagccttcctctcctggttccgcaatggcctcctggcatcgggcatcggggtcatctccttcatgcagagtgacatgggtcgggaagcagcatatggcttcttcctgctgggcggcctgtgcgtggtgtgaggcaccgcctcgtacgccgtgagcctggcggcgctgcgaggaaccatgcagctgacgctggggggcgcggccgtgggcgcgggcgccgtgctggccgccagcctgctctgggcgtgcgccgtgggcctctacatggggcagctggacctggacgttggagctggtgcccgaagaagaccggacggcctccgcggtaaggccctgatgaaggcgggtcggccccccacccgagtgaaccgacaccccccgtgggtgcctgtttaggcgctgggacaggcgccccgacggactggggaacccttaaaacccgtgaccattccccttttgaggggcaaagaatattgttccccttttccttctgaggggcattcctaattgtctccgcgcttggcggggcaccaacaagcagggccaaacggcaacctgggccccacctcgggggcccataacaccgggtcccccccggcgccaccctgttcttcttccctggatacaaaagggggggtaaaaatctctggcccggtccattcccgaaaccgcgccagatcccctctatttaannnnnnnnnnnnnnnagtagtactctaatatttggtcacttcaaagggagattcccgacccccttatatatacgcccgcaaaatattaaccccccccttaaaacaaatccgcccctcttctattttcccgagcgatccataagaaaaccccctttaagacaataaccaatgtaataagtggaggcgaaaaaactcgccatccctgtgaaa

SEQ ID NO: 177623 - DNA, 399 bp, Homo Sapiens
cattggaacagaatcctccactttaggactcagagaagctatggagtcccacaggctaggtatagcacacaacttagagaacggtagttaaagcacgtcaaccacaattgaatttaatgatctaaaaaatatttcttaactctgagggttaaactgaagatacgttttcaaataaaagcttttaaatttcttaggaaacaaactgtgacatcgcttttaaaaatgacattcaaatgtttataatgagtgtttttgagttggcttggactagagcaagttcactgctggcaatggttatgccagtagttaagttaaaataagttgttaccttcagattgatgtcttgtataaccagacaatcatcttcaagcaaaaaaattggccaggaaatgtcttttt

SEQ ID NO: 177624 - DNA, 399 bp, Homo Sapiens
  misc_feature (235)..(235): n is a, c, g, or t
  misc_feature (295)..(295): n is a, c, g, or t
tgttaaacagctttaatctcgctcattgcggcttctcggcacagtaagaaatattgcacatgaccaacatgttttgtcctggggaagggggcaagggcagggggaatcaccttcttagaaagtacaacccaagtggggagggcagagggggtgaggagaaaaccctccccgtgcctgtggcaaagtgcaggagcccccacccccaaactaacctgagtccagcccctctgggaanaaaaaggggtgcatgaactccccctattccacaggcgcctccctgtggcccaaggcctgncaccaccctccagcttgcagccctcacaggagccattttgcataaagtgaaaagctctgaaggtcacacgctccagggttatgtacaggggcttggagggaggg

SEQ ID NO: 177625 - DNA, 322 bp, Homo Sapiens
  misc_feature (55)..(55): n is a, c, g, or t
gcagcctcaacctcccaggcccaagcagtcctcccacatggtgagctttgaatcnggcatagacagggttcccagcccaatagtcgggattggggtataggttctacatgggaaagtatccagtctcttgctttactcagtgtcctgtgaccaccagaggcatgagagggacaacacactcttttcgctctaccacaaggggtgactagaagatgagcaagtctaataaaaagatacggccttatttgttatttgtctgacaaccatccttacgatggtaatcctgtgagtgcctgatggacatctatctttgtgtttttct

SEQ ID NO: 177626 - DNA, 788 bp, Homo Sapiens
  misc_feature (697)..(748): n is a, c, g, or t
ctgcttctgttgctatctaagaactgcataccctcctccctgcttcttcccttgtgcctcatgtatgggcaggaggaaaggtgggagggggagtgggaatatgcgtgtgtgggtgggaatcggtaagaaatgcacctagcttttcatattgtgtttattctccaggctattgcttgcttcagctgcagcctgcctgtgctggctgctggggtcgataggcttttgtcgtaataggcagagatgacttgcatcccagctttccaccaaccaaattcaaacattcactgcttatttgttacagactgtaattattaaagtccctgagagctgttttctcccgttcctttttcgcatgcttggcctcctctctgtttctatgaaccacagaccacctaagcaagctgctgagtaagggctcactggaaacttgcagtcacaggatgtccaatctttggcagtccgagcttggctctaggacagagctgtccaatagaaatataatgtgagccccatatacaatttttacatttctaatatattttaaacaagtgaagttaatatgcatccaaaatatttcaacctgtaatcaacataaaattttaatgagatattttatattattttttggtactgaatcttcaaaatccagagtgtattttacacttaccgcacatctccattcagactagtcacattnnnnnnnnnnnnnnnnnnnnnnnnnnnnnnnnnnnnnnnnnnnnnnnnnnnngagtctggaagatggaagctagtgcagaaacctcttgttt

SEQ ID NO: 177627 - DNA, 1103 bp, Homo Sapiens
tagtaaacctatatgaaaacaaagggttgtcgaaaaagaggctgtacggtcggaatcccgggatatcgtcgaccacgcgtccgtttagattatgaactcaattcaaatgaactctatttaaaatggggtcctattttggacaaaggaaattaagaatgtaaaagtcagaacagtcttgaggtaaaaagtgtgctttggcttaaaagggatacagtatattaattacatcttttattattattgtttatttcttagaatcatttctggctttctcaaaacaaaataatattaatgagtacttctatttgctgcatttttcttattacagcctttgagacagctggtaattataagtcattttccattttttaaaacataattttataaagaattctcttatctcgactatgtagaataccacctactggacagaacaattttgtactcacaaacactgccattttcttagagatggcttgagaggagtaacactatggtttaaagcttgcagtaaaaatgccaaacactgtagtaccttggaacccagtttattcttgtgctaagcagaactgtaaaatagttaaaatgtcttatcaagtaattcgccgattacaaagacaccatttgttttttatttcattctttgttttaactcatgtggtagtgatatttaatactttctgatcaaacaggttcaaagtaaaacgttaaatttcacatttcttttaaagaactcttaaagtgtaacagttacgccatacttcataagtggtaaagaaaggtataaaattggaaaacattttgttgggcatagtagtgattgggtgaaaaggataaattatatcaaaatgagaatgtgctgtaattggaagtagggagctaaaggatgtttctttcagtttagtagaactggaacgttttactattaaacatggcttttataaatgcatggtccaataattttattcactgttagtatttaattcactgtcagcttattaatgttttctgtacccattaatgaattttaaattacaaaaaattgtctagcagctacagtttaaaaatgaaactagacattaaaataaatttgataatttttt

SEQ ID NO: 177628 - DNA, 184 bp, Homo Sapiens
gccacattggcagacgatgggacctaagggtcccacccctcaccccacccccacctcttctgtatgtttgaattctttcagtagctgttgatgctggttggacaggtttgagtcaaattgtactttgctccattgttaattgagaaactgtttcaataaaatattcttttctacagttaaaaaa

SEQ ID NO: 177629 - DNA, 781 bp, Homo Sapiens
  misc_feature (48)..(48): n is a, c, g, or t
actgggctcctgcaagcacccccattctaagggtgaattattgaaatnagttgctatttgatgagtcacaactggcccagcaggcagggcatttgaagtcatggtcatcaaaaagaaatgattgttttttgaaaagctaaatgcttaaaatgcttctagagggaagtcgtggggcgtgtgctcattctctttaaaatcagggttgttgagtttgtttttaaacatttttataagttcatgagaaaaaatatataaattctaagaaccaacactgtattcccagaaacatgaccctcgctggtcttgggtccacatatcattggactctgggggacacaaagatgcctgtgacactttggtgttgccgagttagtcaacaattattctgggaaaaagcagaattgaattcttctctagatgtcctaccagggttggccaagggccacaaagcaggctaataaattcccacaggatccagacaccaggcaaaattgctctaagaagccagttactgtcatccctctatggttctagaaaaaatagtacaaaaatgacaggtcatcctatgagcgtcatgccaatgaaaccccatcttctggagaagcccttgaatcagaattatcttttttcttgatgtcgtcagatgcagccagtttcttaatttttttaaaaactgtatgtttctgtggtatgtatatttgtacacctaactacctggcacttggaaatcacagcactactcagaggcaattgaataaagagaaatttaattttaaatatc

SEQ ID NO: 177630 - DNA, 501 bp, Homo Sapiens
ggggatttttaaaaaaacagataaatggtaaatatgtgcaatgaattttttggttaggaaagtaaaattttatctaatactaggtttttacttttttcactgtggtttgatatatatttttggttagaatgtactgattgtttttatgataagatgtatattttacttgcattcattcttaagaggtttctgtttttctattgagaatatctgttgaattaagtaggatttcagttagaaaaaggaattccgaaattaactggtctcaatctgattatatgtgctacatggccaaatcctattacagtgaattctaaggtgattcaaattgttttattgttatagaaatatgcagaaatcagatggcttcagagtcataaaatatttttcttgtaatagtatttaagcaatttgaccttatatgcaaacgttaagtgaatataaataagttctgtttcaattcatgtccatttaacaacattaaaataattattaggaacc

SEQ ID NO: 177631 - DNA, 682 bp, Homo Sapiens
tctggccttgctctcttggcagggccccagcccctctgaccactctgcagctcaccatgcagctgatgccaaagttgtggtgtccagtgtgcagcagccctgggagccactgccaccttcagaggggttccttgctgagacccacattgcttcacctggccccaccatggctgcttgcctggcccaacctagcgttctgtgccatgctagagcttgagctgttgctcttcttcaggggaggaaatagggtggagagcgggaagggtcttgctcctaagtgttgctgctgtggctttttttgccttctccaaagacgcactgccaggtcccaagcttcagactgctgtgcttagtaagcaagtgagaagcctggggtttggagcccacctactctctggcagcatcagcatcctactcctggcaacatcaggccaacgtccaccccagcctcacattgccagatgttggcagaagggctaatattgaccgtcttgacaggctggagccttcaaagccactgggatgtcctccaggcacctgggtcccatgaccagctccccgtctccataggggtaggcatttcactggtttatgaagctcgagtttcattaaatatgttaagaatcaaagctgtctttgttcaggctgctataacaaaaatataatagccctggggtggttt

SEQ ID NO: 177632 - DNA, 1578 bp, Homo Sapiens
  misc_feature (1344)..(1351): n is a, c, g, or t
  misc_feature (1354)..(1357): n is a, c, g, or t
  misc_feature (1361)..(1415): n is a, c, g, or t
gggagactacacccagggaatgaagagcaagcgccatgttgaagccatcattaccattcacatccctcttattcctgcagctgcccctgctgggagtggggctgaacacgacaattctgacgcccaatgggaatgaagacaccacagctgatttcttcctgaccactatgcccactgactccctcagtgtttccactctgcccctcccagaggttcagtgttttgtgttcaatgtcgagtacatgaattgcacttggaacagcagctctgagccccagcctaccaacctcactctgcattattggtacaagaactcggataatgataaagtccagaagtgcagccactatctattctctgaagaaatcacttctggctgtcagttgcaaaaaaaggagatccacctctaccaaacatttgttgttcagctccaggacccacgggaacccaggagacaggccacacagatgctaaaactgcagaatctggtgatcccctgggctccagagaacctaacacttcacaaactgagtgaatcccagctagaactgaactggaacaacagattcttgaaccactgtttggagcacttggtgcagtaccggactgactgggaccacagctggactgaacaatcagtggattatagacataagttctccttgcctagtgtggatgggcagaaacgctacacgtttcgtgttcggagccgctttaacccactctgtggaagtgctcagcattggaagtgaatggagccacccaatccactgggggagcaatacttcaaaagagaatccttttcctggttgcattggaagccgtggttatctctgttggctccatgggattgattatcagccttctctgtgtgtatttctggctggaacggacgatgccccgaattcccaccctgaagaacctagaggatcttgttactgaataccacggggacttttcggcctgggattggtgtgtctaagggactggctgagagtctgcagcctgaaacctgaaccccaatcctctgacagaagaaccccagggtcctgtagccctaagtggtactaactttccttcattcaacccacctgcgtctcatactcacctcaccccactgtggctgatttggaattttgtgcccccatgtaagcaccccttcatttggcattccccacttgagaattacccttttgccccgaacatgtttttcttctccctcagtctggcccttccttttcgcaggattcttcctccctccctctttccctcccttcctctttccatctaccctccgattgttcctgaaccgatgagaaataaagtttctgttgataatcatcnnnnnnnnaannnnaatnnnnnnnnnnnnnnnnnnnnnnnnnnnnnnnnnnnnnnnnnnnnnnnnnnnnnnnccttgtggggccgccctcggccctccaaaaaatttttcaaaaccatttctttttggggcggggggccccaataaggaaaaggggaaaatggccctaaaactgggtttcccaaggagaaaacccggggcccaggaaaaaaggggcttggggatttcccccccac

SEQ ID NO: 177633 - DNA, 513 bp, Homo Sapiens
ggcattccttccatgaaaaatgtttttccggaccactgggtaaatccttagatttggttccaattttgtgacccatatcacttaagttcagactcagcaagaaaccaaatccagtcatgaaaagaaccacaccaacagtgcttggaatgaaatatgatgctattagtgttccaggcagacatgatgaacattactaataaccgtaagtgggttgacatagatgagcctccaaggccgaactctaaaacctgctccattgcccataagagaagtgcatcgggtgggggcagagtcccaagtgcccacagaaagggtaaaaatacaaacaagatgtgtaaaatctgattcatgtgttctagagctggcatatttaccacaaacctcaagtcacccgagggaagagaagacgcgaaggcatcccagggaccgcatttttgcaggtaaactcgggctgggcgcccgccgggaggttggttagtgcccgaatgcggaggcagaaaagctgcggcggcc

SEQ ID NO: 177634 - DNA, 659 bp, Homo Sapiens
tcaaggttcaaatactttttattagacacggccaggcagagaagaccatgggagttcccgaggggccccagctttcaagggcgacgggagagacacaggataaaaggttaaaagtgcagaggcagagtctggggctcaggttgggtctagggtgtcctcaaacaggctgaggaggttccgaggctcaaaggaggggaaggagccccgaggaggctctgagttgatgtcacttaggtccagggcatccctgggaggagagagtagtgacactcaggatccaaaagctagccctgcccaccccagcccctggacctgcttacctgggtgtgcacctgctccggggggtggaggtgctccccacagtccgggccaggacaaccctcaggggagattgaaggcctgcaggagggcaggcgagacaaggagggtgtccagggctagggagtgccggatgaaaccagctctgtccctgtgcaggctccaggctcccgcctgacaaacaggcagggagccacagtcagggacaataaaaacttggtgcactctgaaagcagcacttggacagccttcaaagtccttccatctggctgcactccaaggccccctctgtccttttcagaacacatggacttggaggcagatttgaaataaacttttag

SEQ ID NO: 177635 - DNA, 1150 bp, Homo Sapiens
  misc_feature (510)..(607): n is a, c, g, or t
  misc_feature (618)..(619): n is a, c, g, or t
  misc_feature (621)..(621): n is a, c, g, or t
  misc_feature (623)..(624): n is a, c, g, or t
  misc_feature (629)..(631): n is a, c, g, or t
  misc_feature (768)..(815): n is a, c, g, or t
  misc_feature (1062)..(1071): n is a, c, g, or t
gctctgtgtttagaaggaatatttttaagagtccagctttttcatttccacaatttcctatatccagatttgttttgacaatgtagtttggaagaactaagattctaatctctgaaagaaccttattgggcctttctaaaacttaagagtttcctttgttgcttcaaatatttgaacattatgttaaagatcaagtattaattttagttgtactctagaaagctaaagtgccacattcggggctatttttatgattcagcaatcttttctaaattgtgtagcatgtgtatgagactatttatacccaaggatatgaaggaacataagtgactacaaggctctaataagccacggtggcaggaggttcaagcggttctgttcactaaatttttctcctgtaagctttgaatggaaacttctgtatcacatgatgtgtttcacttatgctgttgtgtatatacctaatatttctatttttgattttattttaatacacctcgtccaataacnnnnnnnnnnnnnnnnnnnnnnnnnnnnnnnnnnnnnnnnnnnnnnnnnnnnnnnnnnnnnnnnnnnnnnnnnnnnnnnnnnnnnnnnnnnnnnnnnnaaaaaattttnnancnnctctnnnccctccaaaaaacctttcctaaaaaccattttttttggcggccccggccccccttaaggaaaaggggaaccggggggcatagcttggttccccggggaaaaacccctgggtcctaaaacaaagggcgcgtgggaatnnnnnnnnnnnnnnnnnnnnnnnnnnnnnnnnnnnnnnnnnnnnnnnncggggttccttaaacaaaacactcccacattgggtggcttttctgggaggggcccctttgacggcgggggacctctaactccaaaaaaggagaggcccccaggcggggaaggcccccaaataaaaacaaaaatttcaccggcccccgcgcgcccttgggcacatattatatttgccgggagggaggtggggggtgaaaaatctcccttaaaaaacaaatttttcgtcgcccgcaacagggaaaaaannnnnnnnnnacaaggggggagcgtatgagaccccctgaaaatctctccgggagggaatttaccaacccccttggggcccccttggggg

SEQ ID NO: 177636 - DNA, 341 bp, Homo Sapiens
gcgtttaacatttttatttttaactccgctttggtagtacaaaagtcataaaagtacaaaccagacagttaaaaatacacttgacactcgaaatggtgaaaattttccttacaaatttttacatcaaggtagtagccaactcattgatgacaccaaaaagttgtccatcattagtgttttctagagaaagtctgttgtggattccctcatccttagaaaggaggaggagaaacacaagacctgtaaacatcagttgctttgggaacacaggaattctcatcagatagttcagtataaaccagtaaaaagcgtatgtgttgaaaatactgaacgcttaattt

SEQ ID NO: 177637 - DNA, 391 bp, Homo Sapiens
gggtcatgctgatgcctctcgagacgtacaaatccttgctttgtcagcttgccaaaggaggaaagtttaggatttaggccacgggcccagaaagtcggtacccttggttgtgcccctggggtgggggtggggtgtttcctgatgttattcccagcctcctgcctacattatatccagaagtaattgcggaggctccttcagctgcctcagcactttgattttggacagggacaaggtaggaagagaagcttcccttaaccagaggggccatttttccttttggctttcgagggcctgtaaatatctatatataattctgtgtgtattctgtgtcatgttggggtttttaatgtgattgtgtattctgtttacattaaaaagaagcagaaat

SEQ ID NO: 177638 - DNA, 419 bp, Homo Sapiens
accaacgacaggtctgcccccctcctcagctgatggccacatctgcagtgctgcccatctggtggcttcccccgcccttcccatgtagcctgttctgtcatcatctgtgcgttcctgtgtagagaacatccaggccccggctgcctggtcttgccccacttgagtctggcctggactggatcccagctgttctaggcagggccgggcagaagtgggcgcaggcccctgaagggcgagacccagtggctgggctgcccagggctgaggggccgcctcttgagggtaaacgcctctggtcacatggccatggagccttgggtacccctgagttaagggaggacatttggccagctggtggctgggaggggagcctggctgccctgctgcttctcctgcctaataaaacaggcttctcctga

SEQ ID NO: 177639 - DNA, 513 bp, Homo Sapiens
  misc_feature (36)..(36): n is a, c, g, or t
  misc_feature (69)..(69): n is a, c, g, or t
ggagtggggtttggggggccctctcccaggacactncctcttctgggcagaaggccttccaggggactnctccaacaggaaagagcccctcccccacttctaagcactgagttaggagtgctaactcctaaactgggaccccctaccctgttctcccctgaggccccgttcctgggatgggcacccctcaactgtcactttatggactgtctgtgcaattacgtccaccaaagacccgtgttgggggtactgaaggagaggccctgggggaccctgctgaagcatttctgcctcactttatgtcatcttgcttctcccctgttggggctaaggaaggagataggtggctcctaaaagaggaggccatcttctcacccaccccttcctctttggcacagctactcctggctgggggtggggccttgggggtctgggctgggcatccatggtcactgcctcagcccagccaggctgtgcctttgactttaaaataaaagtccacccagtgctgtg

SEQ ID NO: 177640 - DNA, 800 bp, Homo Sapiens
  misc_feature (58)..(58): n is a, c, g, or t
  misc_feature (74)..(74): n is a, c, g, or t
  misc_feature (89)..(89): n is a, c, g, or t
  misc_feature (195)..(195): n is a, c, g, or t
  misc_feature (611)..(623): n is a, c, g, or t
aaaggtgcctaattaacccgtacccctttcctctggagttgtggtgaaaacctaatcnccgtcctgtgaagagntcagaaagaaagagnccttagggaagtggaagagaaagggaattttggaatttattccctttaaaaataatggcaatggaaatatatcaaaacatgtaaacgctcaccttaaaccaaatgntatttggtcatgaggcaccttgctggagtctcagattccaaaagtctcttcttcagactgggtagggaatatgatattttagggacaaagctgaggactggttttaaataggctttaaaataaaagatcaatattatcataatgctatcattctgctaaacggccccaaaacagtagaatttctgctcatgtcctagcaggttcagaagactgcagccaagttcagatgtaaaaacaagaagtagcacttttccaaaggaaaacaacaaaacaaatgggaaaaagataatggaccgcatttcacctattttaatactattttaacaattttttcatctaccaatatatccccaataaataaatataaaagggggggagggtcaatctggggaatcttaattttttatgttttaagnnnnnnnnnnnnnctgcattatttttgtaaagtatttattgagtcacggattattgtgcatcaagcaattgttaatatgacctggtcctatggggtagaacttaggaaaaataaagttggttcttattcaatattttactttgcaaaattctagtaaaagagagtatataataaaatcataataaaaggt

SEQ ID NO: 177641 - DNA, 432 bp, Homo Sapiens
tataactcaggatctgaggtctcaagctaggagagactgagaattttaatcagtttgggcatatagtttggactgaatcacatctgtagtacttagccaaagacaatttggaggagaatatcagccttctggaagtagcctacttcctgaacaatgtaaagtgtcgcagatattcaataaaatggcaacctgttataatttgtgaaatttattgaaatggtgtaagatgaaaacaattgcatatcaaacccaatttatgttttctaaatatagtgtatgtattctgccatgtaagtaattgaacagtcttaaaataaccaaatggtagagggctgttccatgatgggacagctttggatttgttttcataaaatctctacattcaataaaaattggaattatgtgcctgaagtttggaggcacattttgaaa

SEQ ID NO: 177642 - DNA, 1258 bp, Homo Sapiens
  misc_feature (1141)..(1141): n is a, c, g, or t
gggttacagaaacagctatagataacattatccagtgaagagcaaaattcaagctttagaaaatattcatgcatgcaattttgacatatctaaaaataggtttttgtatatttatggtgggaggtggttgggaacttttaacaaaatggggtgttaatttttgtacagtctgtgggcatttacacatttttaatgtattaaaatttggtaattatgtgtacattaaattaataaaagttacttctagttatgatttgtgaattccctaagaccttggatttttttaagtaactttatatcagaaatgatactgcatctttatatttttaaaattgtattgctgctcaagaatggtaccctcttgtcaaaaaggcatacattcataattgtacattcagcattgtaaataatcttatgaaaccttttttgattgaagctattcaaaataaaaattttattgcatgaactaccaaacccccccacacaacacgaacactatctgtcccgccgccctggccactctagaattatttcagaccatttcttttgaccccccgcatcccccaacgtccgcggcacccggccccctagtttgacttccccaagaaaaaacattgctcaatcgatcccgggccttgtactttccccaccagataacaaaaatccgccccgcgcgggctaaaatacccacgccggttcccatacattatacccccgataatgccccacctcgcccgcatgggttctccccaccctggcgcactacctatatacacaccgcggggtacgttctcacctccatagttagaccccctatttcatatcccctcatcttgctattctcttcgctacttatcgcgtgctattctagtcgcatctttagccagtcgtaaccgtggttgcgccccagtgtgacatattgacacgactttttcttcatgtcgcatagagaatcgtcctgaaccgcccgtattcagacgagcgcgcggatgaacttattattgtatcaccccatcccaacaacccgaccctatcccgctatatatacactcagcacccgcccacggatccgtccaatctgcggtcactactacacccaaccgcgccgacttagcttagtcgccactaaacacaccccacncagccgcgctattatcacccaccccaccgcgcgcactattatactcgtcgccgcctcgccggtctcatgtaactccacgccggacccccgcgggtgaatcacctccgacccccctca

SEQ ID NO: 177643 - DNA, 504 bp, Homo Sapiens
  misc_feature (337)..(337): n is a, c, g, or t
  misc_feature (367)..(367): n is a, c, g, or t
  misc_feature (390)..(390): n is a, c, g, or t
  misc_feature (432)..(432): n is a, c, g, or t
  misc_feature (456)..(456): n is a, c, g, or t
  misc_feature (468)..(468): n is a, c, g, or t
  misc_feature (493)..(493): n is a, c, g, or t
acaacagcaaccaaagaaaacatacctcaatacactcaaaactgaagacatagaggactcagatcaaagacaaaatctgatccatatattggtgctagattctgcaggaaaccccagcagtgtgaacgcatcccaacataggttaagagcaagttgaaaacaaaggccatggcattctgccactgcatccttcagacagttatatcctccttttaaaccattgttgttgagtgtaagatgtccttcatgttttcttataaagtcagtgtttagaaatgttaccctttctaagttatattacagatccaaatgcttttttctttcacgtacatccatncatttggcaactgctgttcgtacacagganacagggactgctcaaatgatccnatttgtattttctgatgctatcaggactctaatgtttttttnccctaaaatattattggccctccnggctttaggggnttttatattttttacaccaatccanatttttaggta

SEQ ID NO: 177644 - DNA, 761 bp, Homo Sapiens
ggtagctgcgaatccatctcccttggcctctccaccttcatgatcgacctcaaccaggtggcgaaagcagtgaacaatgccactgcacagtcgctggtccttattgatgaatttggaaagggaaccaacacggtggatgggctcgcgcttctggccgctgtgctccgacactggctggcacgtggacccacatgcccccacatctttgtggccaccaactttctgagccttgttcagctacagctgctgccacaagggcccctggtgcagtatttgaccatggagacctgtgaggatggcaacgatcttgtcttcttctatcaggtttgcgaaggtgttgcgaaggccagccatgcctcccacacagctgcccaggctgggcttcctgacaagcttgtggctcgtggcaaggaggtctcagacttgatccgcagtggaaaacccatcaagcctgtcaaggatttgctaaagaagaaccaaatggaaaattgccagacattagtggataagtttatgaaactggatttggaagatcctaacctggaactgaaccgtttcatgaagccaggaagtgctgcctgctgccaccagcatcctctgagagtccttccagtgtcctccccagcctcctgagactccggtgggctgccatgcccccctttgtttccttatctccctcagacgcagagtttttagtttctccagaaaatttggttcatattaagaataaagtttattttgagggaaaaaaacacaataac

SEQ ID NO: 177645 - DNA, 473 bp, Homo Sapiens
agccgtgctccttggaacgcaaagggccgaggagcatctggttttcatggcaaagctctactccagagctcctttaacatctgctaattaagtgcaataattttttctagaaaatggcaaagatgacttccaggtggatattgctctcttacggtgttggggatgccagaacaccacttggttttatttttctaagtgcatgtgatgtgatagagtgtgtggggctctgtgtccttccctgggagctggcattccagcgggcccctctctttacctttgttgggggaaggaggcaagagagaaattccttcttcccagccagagagggcagaagcagaccgtagcccattggccttatgtgcgtgtgtgcgtgcgagtgtgtcactgctggtgggccggagtgatgtggtgggagggaagccgggaatgtatccttttcagacaaaattaaatattttgaaatgagaaaaaaa

SEQ ID NO: 177646 - DNA, 862 bp, Homo Sapiens
  misc_feature (795)..(806): n is a, c, g, or t
gcaggaaccagccacaaagacaacccagccccttcttccagtaaggaagcctgtctaaacatagcaatggcccagaggaaccaggacctgccacctgaaggctgcagcaaggacacttttaaagaagagactcctagaactcccagcaatggcccaggccatgagcacagcagccatgcttgggcagaggtgccagagggtacctctcaggacactggcaatagcggctctgtagagcacccttttgaaaccaagaagctcaatggaaaggccctgagcagtcgggctgaggagccgccttctcctcctgtccccaaggcatctggctccactctcaacagcgggtctggcaactgtcccaggacccagtctgatgacagtgaggagaggagcctcgaaaccatctgtgccaaccacaacaatggacgcttacaccctcgtccccctcaccctcacaataacgggcagaacttgggggagctggaggtggtggcctactcttccccaggacactcagacactgaccgtgataactcgtccctgacagggacactcctacacaaagattgttgcgggtctgaaatggcctgtgagacccccaatgctggaacaagagaggaccccactgacaccccagccacagatagtagcagggctgttcatggccacagtggcctcaaaaggcaacgaattgaattggaagatacacgattcagagaattcctcctcagagaagaaattaaaaacatgataaatacaaagggaaaacaaaaatgctacaaaagtagccttacnnnnnnnnnnnnttgtttagtgaatacagaggaaaggaaaaacaagtattaaaggcacatgaaaccag

SEQ ID NO: 177647 - DNA, 329 bp, Homo Sapiens
  misc_feature (271)..(271): n is a, c, g, or t
ttttacaaataattatgttatttattttgaataaaaaagtggccaaaataacaatactaatggctctgtatacaaaccacaacatattcaaggttatctcacatttacaaaactgccattatgtacagcactacatattcacagcaactctattagactctaagtaccagaatcatgtaagcaattgaggggaatcccaaatgagaaagagctaaaaccaatggtagttcatcaattggagaaatggccaaccagcgacttgggtaaaganaacagaggttcagttacccttttaacaagtaataactaaaatatgattaccccacagg

SEQ ID NO: 177648 - DNA, 430 bp, Homo Sapiens
  misc_feature (66)..(81): n is a, c, g, or t
  misc_feature (234)..(234): n is a, c, g, or t
ctgcaaatctagaaaactttttagagaaaaactatttaaaactgtcagatcctgaccagcaacctnnnnnnnnnnnnnnnnttccaagtgactccgtgccttgagtgtgtctgcgtgtttacacccgtccctctgctggccgcccccgtgcgagcggcacccctgccctgccctccacagaattgggttcaagggctgttaagacaactgccaacgtcactgagggccctgccnagcggccctggcccaggctctattaacctaaaatgtagctccctagcgctaacctaggaaccgccgctgcctgctggggggccacgaccctcatgcccttgttcccaagcccggggccttcagcgttgaacacttccttgcttttttcacatgttttatggaattgttcactggtttgaaatataaaatgtagaag

SEQ ID NO: 177649 - DNA, 646 bp, Homo Sapiens
  misc_feature (383)..(383): n is a, c, g, or t
  misc_feature (385)..(385): n is a, c, g, or t
  misc_feature (387)..(406): n is a, c, g, or t
  misc_feature (417)..(501): n is a, c, g, or t
  misc_feature (511)..(523): n is a, c, g, or t
ggtatttggcttaagtagatttagttgtatagcacttacatatttagttcttttgaaagtttagataattatttaaagaaagcataatgctaatggaaaagaaaatctgatgttctattataatatgctattgctgaatatgaatagaaatacagggcatcatttccttgtctcattataagttagtaacaatatatagattaaatgtttacaatatagggaattgtaaataaatatatcagtttttttccccttcggtcttccacagcagtattattgtctttgtggagttgactaatgataatttaaaaatcctgtaatggatttctactaaaataaggtcatagtggcatataccaaataaaatcaaatacagaaatacnanannnnnnnnnnnnnnnnnnnncaaaacaacannnnnnnnnnnnnnnnnnnnnnnnnnnnnnnnnnnnnnnnnnnnnnnnnnnnnnnnnnnnnnnnnnnnnnnnnnnnnnnnnnnnncttggggcgnnnnnnnnnnnnntcaaaaaattttttaaacacctttttttggggcggggggcccccaagaggaaagggaacgggggcaataacgtgtttcccaagaaaaccctgggccagaaaaaagggggtggatttccccccc

SEQ ID NO: 177650 - DNA, 657 bp, Homo Sapiens
  misc_feature (510)..(518): n is a, c, g, or t
taaaggctcaccccttggttgccacctaaaaacgtatagtcattttggcggcatcatattcctcttgttatttaacaaaaccaccaaaaaataataacaaatatatatacagattcctgttgtgttaataacagaactcgtggcgtggggcagcagctgcctctgagccactcgctcgtccacggtcttctgcatcactggtatacacactcgttagcgtccatctcgtatttaatcagaatggataagatgatgttaaatgccttggttcgatttctagtatctattgcgttggctttacaaataattttttgcagtcttttgctgtgctgtacattactgtacgtataaattatgaaggacctgaaacaaggtataaggatcttttgtaaatgagacacatacaaaaaaaatctttaatggttaataggatgaatgggaaagtatttttgaaagaactctatttcgctggagactatttaagtactatctttgtctaaacaaggtaannnnnnnnngtaaagtgcaatgtcctgcatgcataatgaaccgtttacagtgtattcaagaaagggaaagctgtgcctctttcagcttcatatctaattctaccacttattttacagtctctgttgtaaataaccacactgaaacctc

SEQ ID NO: 177651 - DNA, 449 bp, Homo Sapiens
  misc_feature (31)..(31): n is a, c, g, or t
  misc_feature (39)..(39): n is a, c, g, or t
  misc_feature (45)..(45): n is a, c, g, or t
acccaaaaaaaatccctgcaaaactgccccnggccccanggcaanagcaaaccccctgccgccgtggaatttcaccctcaccctttgtacccagatgttgaagtgacccagctctgtggccctgtgtcgtcagaggcttgtgattaactgtggcggcagacacagcttgtccacagcttgggccaggcttcccctgtcctcccaccggtcggctgcttggcaaggctgttcaggacgtgcacttccccaagtcggcactgagtggcccagcaccgcctagccctgccaccccaactgcctcctgggccttctgctggatgggcacctggggggttctggtttttacttttttaatgtaagtctcagtctttgtaattaattattgaattgtgagaacatttttgaacaatttacctgtcaataaagcagaagacggaagttttaaagtt

SEQ ID NO: 177652 - DNA, 574 bp, Homo Sapiens
  misc_feature (401)..(401): n is a, c, g, or t
  misc_feature (548)..(548): n is a, c, g, or t
agaaagatattttatggtaactgttgctcgtctatttaactatatatttatgtaatcaatatatgatgaacctaaccccattggcaccccccttagacttgtgtgctgtttccctatatcctcccatctgctggcagagtacccaccccacaaactgaccagatggagaggtggccccccccagccttggcagtatttccaccccaccccccaaacgagcacacaccacagaagccagctcagctgtgaactattggatttgagacaggaacagaacaaatcagagggccaggggagggttgtgggggagacagagtggtttaaataggggaggaggggaagttcggtgatgggggagggaggcaggtatttacaagaaggctcagggaaacagagctcantcttggaatattttataacaatataaataagattctggtttgcttttccttttcgtctcgtaaaggagagagaagtgcagagttcgattctgtacaagggggcagcggcagaaggccccccgggcgggtcactggggcgtccacccngaaggacagcagcttctcggaatgca

SEQ ID NO: 177653 - DNA, 486 bp, Homo Sapiens
  misc_feature (79)..(79): n is a, c, g, or t
  misc_feature (397)..(397): n is a, c, g, or t
  misc_feature (416)..(416): n is a, c, g, or t
ggactcatgcaggcgactcggaggcccctgtgtgcaagtgaatgcacctggctgcaggcgggcgtggtcagcttggggncgcagtgtgcccagcccaaccggcctggcatctacacccgtgtcaactactacttggactggatccaccactatgtccacaaaaagccgtgagtcaggccctggggtggccaccctgggtcactggagaaccaacccctcctgtccaaaacaccactgcttcctacccaggtggcgactgccccccaaaccttccctgccccgtcctgagtgccccttcctgtcctaagccccctgctctcttctgagccccttcccctgtcctgaggacccttccccatcctgagcccccttccctgtcctaaacctgacgcctgcnaactcgctccggccctccncctgcccaggcagctggtggtgggcgctaatcctcctgagtgctggacctcattaaagtgcatggaaatc

SEQ ID NO: 177654 - DNA, 144 bp, Homo Sapiens
ctacattgaaaatagaaactgcttcctttcttctttccagtcagctattggtctttccagctgttataatctaaagtattcttatgatctgtgtaagctctgaatgaacttctttactcaataaaattaattttttggcttctt

SEQ ID NO: 177655 - DNA, 472 bp, Homo Sapiens
  misc_feature (287)..(393): n is a, c, g, or t
aagtttccacatgaatgtacctaaacaagtagatgccccctttctgctgccagtcacactgcacattgagatcatgcaatccatctctgtccagcttgatgactttgccaacatcacatcaccttcgcacacttcttcgtatgttcggcagcatctaaccatcattcccacctagaattaaaatgaaattggagatccagtccatcatgtacacaggtgaaatgagccatgataagtagtattactctactcttaataaagaatttcaactgggcacggtggctcannnnnnnnnnnnnnnnnnnnnnnnnnnnnnnnnnnnnnnnnnnnnnnnnnnnnnnnnnnnnnnnnnnnnnnnnnnnnnnnnnnnnnnnnnnnnnnnnnnnnnnnnnncaaaaattagccagatgtgatggcacatgcctgtggtcccagctacttgggagacttgagttgagaggattgcttgagc

SEQ ID NO: 177656 - DNA, 460 bp, Homo Sapiens
tccctcactaaagggaataagcttgcggccgcgccacgggccgtttgggcgagaaagccaggcagggacggggcgggcggaggtcaatgcacagctccagagcccggcgaccggcgcccgtgggccgccccgcctcgggcctcgcccgagcatcccggagcctcaaccccgtggtcctgcttagcctcctcgaggattcgggatcattacctcggcggttgtgctgcgctaaccaaagcccccagaggtggaggggaggtgcccagagccgcgcgagcccctcggtgggtgcccctgtgggaggaggttgcagagctaccgtcttcagtgcactgcttcggtttgggggagggcaggtgttgaaaggaagaacagataatactgtctacctctaacagtttactatgaagaaaagggaatcagtggtctgttgggtctgaaagcatctcacacctcgtgc

SEQ ID NO: 177657 - DNA, 445 bp, Homo Sapiens
  misc_feature (68)..(68): n is a, c, g, or t
cggcaggaggggcggggctcctgcctgcagtgaggccacagcactaagcggcttcagtcacatgcttntcaggtgaatcactccacattcagtgaggagggccacgacaaggaagttcaggtagaagaggagcaggcagaagccatagactctgctgagctggaagcactgcaatgggactgagaccagggagaagacgaggctgagccccagggcgcctgccaggacccacaccagcagtccgtatggctccagcttcacttctgtgtggcttcgggagatctggagcaggcagcccagccccacacccacgaggatgttgaagatgatgccgccaaagcaggcggagaacgccatccgtgggtacccctgccgagccagtgtgaaatccgagaaggcatctccaatgctgttcccccaggccagcagcgtgagccccagcaca

SEQ ID NO: 177658 - DNA, 931 bp, Homo Sapiens
ggggccctggcccggccttgccttgcgctgcgcgctcaccatggtgggccccgcgccgcggcggcggctgcggccgctggcagcgctggccctggtcctggcgctggccccggggctgcccacagcccgggccgggcagacaccgcgccctgccgagcgggggcccccagtgcggcttttcaccgaggaggagctggcccgctatggcggggaggaggaagatcagcccatctacttggcagtgaagggagtggtgtttgatgtcacctccggaaaggagttttatggacgaggagccccctacaatgccttgacggggaaggactccactagaggggtagccaagatgtccttggatcctgcagacctcacccatgacactacgggtctcacggccaaggaactggaggccctggatgaggtcttcaccaaagtgtacaaagccaaataccccatcgtcggctacactgcccggagaattctcaatgaggatggcagccctaacctggacttcaagcctgaagaccagccccattttgacatcaaggatgagttctgatgttccccctgcaggagcaggttcttgggagcgtgaggcaggaagacactaggtgctgaatctcctgcaaaactggctgcctggaggccctgaaccacccagatctgaataaaacagatgcttaccctggaagagcaaatgcctcctgttgtccttggtcaggggttctgtctacctggggacccctgtctgcacaccagggatcaataagagccaaagtgggacacctcctagatgtcagtatcagctggctgggcagtggaattttgagcgacctttactttatacttttctgtgcttgacagattttcagccatgaccatgttcactttataatcaaaacaaaaataaaggtcccatttttacaaaagg

SEQ ID NO: 177659 - DNA, 650 bp, Homo Sapiens
  misc_feature (116)..(116): n is a, c, g, or t
  misc_feature (251)..(251): n is a, c, g, or t
  misc_feature (319)..(319): n is a, c, g, or t
  misc_feature (359)..(359): n is a, c, g, or t
gggcacctcctgggctttcgtggctggagactgtctaccaacattccttccttcaaactagacaaaccctcctctgccacccccagcaaattctcagaggtttccaagctgtaganaaaggaaggaaggaaggacggcattcacatagctttactttccgcttcaaaatgtcttaagtagcatatgttgttttactgcttttaactttggtgagttctaatttcagaacgttttgttcactgagcaaaaanacagatgaaacaaccacaggccaggacttcaagtgaggaggacgcctttgttttgccgtggttgggtngggagcacacgccggagcccggtaaacgtgcctgttgggnagtgaccaagggccacccgcccaagggaaaatgttcattcttcatcagctttgctaattctgctttgaggcagtaaaatgcaaaagaccatagaatttgtatttctttttttaaaatacaatttataacattatattttgtactctttatattagaatttgtaactagattgatgtatttaactatttctgaaaaagtaattcaatgttttagttgtgtgataaaaatatttagataaaacatattcattctattggaatttgaaataaataaaaacatcttggagttctg

SEQ ID NO: 177660 - DNA, 491 bp, Homo Sapiens
ctgggtgactgtgttcgtggggctgaggccctcgaggtgcccacttccagctttccaccaattactgcactgtctttccgtttcctgccccgctgacgcgtacacctatttcagactcagcgcagctccgcggggagaaaagtgcgggcctccctctcggctccacaccagactccggagtagttcgaactgcgctggggtcgccaagacgcgcgctgcccttctcccagcactgccctccccagcgtctttgaccactcttaatacccacaaacttgatcggacaatttctggtgtgtccagccatgtgtcacgtactgggaatacaaaatagaatgaggcaagctccctgacctcaaagatttcagagttcagttggagaaatcgacagaatctggtacttttaaaactaaacatgatgaatgaatgtggtgagaacagcggcagaaaatggcactgaattccatagaaatatctggaaaggtcatttc

SEQ ID NO: 177661 - DNA, 1310 bp, Homo Sapiens
  misc_feature (24)..(24): n is a, c, g, or t
  misc_feature (26)..(26): n is a, c, g, or t
  misc_feature (42)..(42): n is a, c, g, or t
  misc_feature (59)..(59): n is a, c, g, or t
  misc_feature (61)..(61): n is a, c, g, or t
  misc_feature (96)..(96): n is a, c, g, or t
  misc_feature (121)..(121): n is a, c, g, or t
  misc_feature (824)..(938): n is a, c, g, or t
  misc_feature (1072)..(1080): n is a, c, g, or t
  misc_feature (1181)..(1192): n is a, c, g, or t
  misc_feature (1239)..(1263): n is a, c, g, or t
ccgagctccagcaaggacaggctntntctcccaacacggagncaggaagacccctaccncncaatctatgacccccctgtaccagacttcaccatnatgaagacggaggtccctggctctntcactgaatacaaggtcttggcactggactctgccagcatcctcctgatggtacaggggacagtgatagccagcacacccacaacccagacaccaatccctctgcaacgtggtggcgtgctcttcattggggccaatgagagtgtctcactgaagcttactgagccgaaggacctgctgatattccgtgcctgctgtctgctgtaaaggctgcagcctccccagctctcctctgccagccaccctaaattccagccaacctcacctcctcgggcccagctcaaacccccttccttgctctggaccccttaggtataccctggaagagctggggtgggggaggagggagcgtgaaggtagtgactcctgaacacacccaggtggaaccatctttggggaggagaggcccgtgtgaggggtctgatactccctttgtcttccctctctactcctcgctacacctgagccaggctcttgccaactctgttccaacctatggctttaggctagctgttaaatatgtgacccagcattagctcagcatctgtcagagcaagagaccaggtaatttctaagaacagggttctagcgatgggactgcccatttcctcagctgcagaggaggaaagggaaagggtaggcctgtagactaacgctgtttacacccttgttctgtcaaagcaattaaagatcacttgtgttgnnnnnnnnnnnnnnnnnnnnnnnnnnnnnnnnnnnnnnnnnnnnnnnnnnnnnnnnnnnnnnnnnnnnnnnnnnnnnnnnnnnnnnnnnnnnnnnnnnnnnnnnnnnnnnnnnnnctttgcggcccccctcggccctcaaaaacttttcaaaccctttttttggggcgggggccccagaggtaaaggaaactgggccaacctggttccaaaggaaaccccgggcatggcatagggttggattccccccnnnnnnnnncccccggggggaaccgaagggttttaaaaaatcccaaaggggtttcgggggcctttctgggttttacccagggggtccaaggcaagctcaatttaaatttnnnnnnnnnnnntggccaattattggaaagaaggggtggaattcccttaacacattttnnnnnnnnnnnnnnnnnnnnnnnnnaaaaggggtgtgagtgacaccctaattccgcccccgggcatatacaa

SEQ ID NO: 177662 - DNA, 684 bp, Homo Sapiens
cgggattatcaggagatgattgacaactatgttcattggaatgaagacataggagaatggcagctaaaatgtgttgcttatacaggaaataacatgaggaagcaaaccccagtacctgataaaaaggagaaagatccctttgaggtggacctctctcacgtgtatcatgcctatactgaggagagtctgcgtcagtctttgatgaaactagaaagaccacgaacttcaaaggggaaagcaaggccaaagacagggagaagaaagcgttctgcaaagcctgaaactgtaattgactctttactgcagtaaatgttacagacttaaagtcacaataaaaattagtgatattctcatgcctggacaaaatctttaattaaaacagtgaagacttctctataatttcaattaatggaagttgtagatcaatgaataagactggaaataataatttgcttaagaacttttagtctacatatattaatataacattaaaattgtacaactggtgattgttcaaattgttgtactactactcttcaattgtactgtgcagggaagttgggggaacagttcatactatagagagttacagtttagatgtatgtgtaaatcgattagctatttatccaactactgtatatttaggtaaactagaatttcaaaatagaaaaaagcaaacaaaag

SEQ ID NO: 177663 - DNA, 419 bp, Homo Sapiens
tcacatcactttccgatcacttcaaagtcagaccgaggacacggttgttaccaagaccaggctgttgccttggaagagcccagagcgtgtcaagggagacagccacatcacgccagaaatacatgacagctggattagccctgggagagggaggcccagatgtgggagctcaggggaggtgcagctcaacgtggagtttggaggaggctaccttgacctttgaatgccaagtgggagccagccagatgaaaggggttaaaaactaatatttatatgacagaagaaaaagatgtcattccgtaaagtaaacatcatcatcttggtcctggctgttgctctcttcttactggttgtgcaccataacttcctcagcttgagcagtttgataaggaatgaggttacagattcaggaattgtag

SEQ ID NO: 177664 - DNA, 441 bp, Homo Sapiens
agatactagagttaaaacagaaagcaagaagtagggggctctgcatgttaagtaggttcagcaaccgtaattagtgattttctagggttgaacaggacacttcctgctttcatgggaaaatcagtttgctgctgaccaacccgtacttctagagcactgagtaaccagcctctaattcggttgtaatgaaccgtgtattaatgttgcagccttctgcccgctctggagacctcacgccatgcctggccttgcagtgagtcttgcgcttgtcagttatgggggcaggactttcttgcaaagctgcttttgttttcccactaaaaatgtgcttatttctaccttaaatagagatgaatcccacaacttgcccaagataaatatgggagacgaaaatctcatttatatttaaggtcatgtgtagttttctatttctcgctctct

SEQ ID NO: 177665 - DNA, 705 bp, Homo Sapiens
acatgtccagggggcctgcacacccatcatacccacccagagtgggggtatagtcagcctgagccgcggcccagtctctccgctcgtgcgctagcagttgcccaatgtgctgttcgcctacgcgcatactctcgccctgtatcacggcgggtgacgacgcgctgctctctgacttctgtgccacactgatcggcgtttccggagccctgggtgcccagcaagtcttcgcctctgcggaagaagccctgcaggcggcagcccacgtgctggaagcaggcgagcacccgccggggcccctgggcacacgaggggctatgcacgaggtcgcccgcatcctgctgggcgagggcccgaccaaccagaaaggctacacgctggcagcactgggggacctggcacagaccctgggccgtgcccggaaacaggccgaggctagagaagagcgagatcatcattaccgggcccggaaaaagtgccagttcctcctggcctggaccaacgaaaatgaggcggacctcacacccctgactctagactgcgccagggctcaccaagcccatgctgtggtagccgaggaggtggccgccctcactggggagctggagcggctttggggaggccccgtgccacctgccccaagaactctcattgaggagctccctagctgaacgggttaccctggtcattaataaagctgtgacggtc

SEQ ID NO: 177666 - DNA, 448 bp, Homo Sapiens
tcggcaaagcactggcctcgatctactccccggatcactcaagcaataacttctcgtccagcccttctaccaccgtgggctccccccagggcctggcaggaacgtcacagtggcctcgagcaggagcccccggtgccttatcgcccagctacgacgggggtctccacggcctgcagagtaagatagaagaccacctggacgaggccatccacgtgctccgcagccacgccgtgggcacagccggcgacatgcacacgctgctgcctggccacggggcgctggcctcaggtttcaccggccccatgtcactgggcgggcggcacgcaggcctggttggaggcagccaccccgaggacggcctcgcaggcagcaccagcctcatgcacaaccacgcggccctccccagccagccaggcaccctccctgacctgtctcggcctccaaactc

SEQ ID NO: 177667 - DNA, 827 bp, Homo Sapiens
gccgccgcgctcggtccagtcttcccggctggaagcgggcgcctgggatcagagcgtcctgtttagcaataacggctggagcacgtcctacaagttacgggagagtcggctgtgaaggagacgttcgcttatcccctgtgtccccgctcctggcccctccagaccccagccttgcctcgcgctgggaggggagatccagaatgaaaggcaagaaaggtattgttgcagcatctggcagtgagactgaggatgaggacagcatggacattcccttggacctttcttcatccgctggctcaggcaagagaaggagaaggggcaacctacccaaggagtctgtgcagattcttcgggattggctgtatgagcaccgttacaatgcctatccttcagagcaagaaaaagcgttgctgtcccagcaaacacacctgtctacgctacaggtctgtaactggttcatcaacgcccgccgcaggctcctccctgacatgctgagaaaggatggcaaagatccaaatcagttcacaatttccccgccgtggggcccaagatttctgaaacgagctctgttggatccggcgatgggcatcaaaaaacttcatggccacctctagaaggagaccccattttcatttcctggtaccgcttggggcccaaaccccaacccctaggggagggccacctggtctccctaagcccgtcatcccccgggaatcaagtcttggggttccgtccaatcagttgatcttgccactaccacttgtggaactgcccttgaaaagaaaggcccctttttctcctcccctgtccaattcgtgtcccgcggg

SEQ ID NO: 177668 - DNA, 1617 bp, Homo Sapiens
  misc_feature (511)..(627): n is a, c, g, or t
  misc_feature (650)..(677): n is a, c, g, or t
  misc_feature (689)..(701): n is a, c, g, or t
  misc_feature (790)..(798): n is a, c, g, or t
  misc_feature (841)..(852): n is a, c, g, or t
  misc_feature (855)..(917): n is a, c, g, or t
  misc_feature (993)..(993): n is a, c, g, or t
  misc_feature (1037)..(1037): n is a, c, g, or t
  misc_feature (1134)..(1134): n is a, c, g, or t
  misc_feature (1208)..(1208): n is a, c, g, or t
  misc_feature (1296)..(1304): n is a, c, g, or t
  misc_feature (1315)..(1315): n is a, c, g, or t
  misc_feature (1373)..(1373): n is a, c, g, or t
  misc_feature (1435)..(1435): n is a, c, g, or t
  misc_feature (1510)..(1522): n is a, c, g, or t
taatgagctcctatgagagaatgcgatataatgacccgcttttctagtaagttcataatcagctctggaacaagcacacttgattcgtcactgtggttcagaatgagattaagatcagatgttggaacgtgttatgctgtagcgtgtctggaaacaaagtacagaaacctggttccggtgatgagttagtttctgcttactacctgtgacaacccaagtgggtgacactagtgaaccttctccagtctgcaggctggcatacaaggctcttagattatattgggcagcttgcaatctgccgaagcagtgacttgcatttccacacttggcttgagcactcaacccagaaggcgaagatagcttttggttgtaggcggcttcctgtatgggatatccctcggtaagggtaaaggagcagaggcaaaggagaaaagcagaagttgcagctgatgcaggtatcctatgcccttgatggatgagactaaaataaaatttttgaagttaagatttnnnnnnnnnnnnnnnnnnnnnnnnnnnnnnnnnnnnnnnnnnnnnnnnnnnnnnnnnnnnnnnnnnnnnnnnnnnnnnnnnnnnnnnnnnnnnnnnnnnnnnnnnnnnnnnnnnnnngcaagaggaagagatcctctccnnnnnnnnnnnnnnnnnnnnnnnnnnnnttttgggcgggnnnnnnnnnnnnngaaaagaattttataagccactgttgtggtgggggcgggcgccccccactagggaaaggacaaacgggcccaacaacacttcgttcccnnnnnnnnnccccgccccccaaaacataaggggggggggcctcccccccacnnnnnnnnnnnnccnnnnnnnnnnnnnnnnnnnnnnnnnnnnnnnnnnnnnnnnnnnnnnnnnnnnnnnnnnnnnnnacgttgcgggcgaggagggctctctaggcagcgggactcaaccttcaacccgcggcgggcgggccgccgcccggtncggcgcaacctcccccttgcatcatcgctcgatttttccctctncccccgccacctctcactctcgccgcgcaccatattctttctatacctgacggataacggcagctcgcgggtgtgttattagaggaatctcactatntaggagggtggtcaactcattctgggtcccgcgcccacagtgcggagtgggaagacccctacgcttttccatanagcagggggtggatgtgattgtgttgatccacacaccccgctctaattcatctcgccctcctgggggcgggaactctgatactaacgnnnnnnnnntgtctctgttntcccgcacgcgcagaggggggggtgtacaatacttgttcccaccccgccgccgtgtcncgtggagggaaaaaacaagagccgggcgcgggggggagaaagaaaaaagagtagccgcgcgnccccagggttcggggcgcgcgcccgctttctgtcgataagcgcgaaaatatgtggttgtgtggaacacacacctnnnnnnnnnnnnnacagggattgtgtgcgcggcagatataacacccccgatataataaacaatgcttttttcttctcagacaatataaggcgccccctcgcggttaag

SEQ ID NO: 177669 - DNA, 469 bp, Homo Sapiens
ggtggacacaacttgctttacttgaaccatctgggtgctgaccaggccctggtgaggagacaccccagcccctagtcagccacagggtgcctgggaacaagggggccaaagtcaagggcctgagactcagtgtcagatcctaggctgggcttagagcctcagaagtggaatttggaattctgagagaacaatctagaattctaggaatagaccatagaatctcagaaatggaatttgaaagtctaccaacactcccggggtgggggtggcgggtactgagtgggaatgattagaataaaattgaggactctagcagcggacttagaatggtatcagcgggttctcatcctacaacctgactttggaagttggagataaggggtgtctagggatttggaatccccccttcccctttcctctcttgcctcttcctttttcttctggctcctcgccttctcccttcttctcc

SEQ ID NO: 177670 - DNA, 459 bp, Homo Sapiens
  misc_feature (101)..(113): n is a, c, g, or t
  misc_feature (302)..(316): n is a, c, g, or t
gggtatcaaagaacaagcaaatggacccccgcccgctgcaggcgcccatagccatcgggtctctaaagctgagtggctagcagcgtttgtttgtttgttgnnnnnnnnnnnnnctgaaggtgggacagtcacttcctcctccctccccacccctgtcgcatccacgtgcgacctggaggactggtcagaaccgttactgtgaatgagtgaagatcctggaggaccctgggccccaggccagctcccatcgctgggggacggtgaacggccatgtgttaatgttacgatgtttttaaaagacnnnnnnnnnnnnnnncctcaaaagtttttttaaagtgggggaaaaacatccaagcactttaattccaatgtaccaggtgaactgacggagctcagaagttttccataacaccaactgtcaatgccggaattttgtattctgttttgtaaagatttaat

SEQ ID NO: 177671 - DNA, 438 bp, Homo Sapiens
ctggcaagagcttaggacgagatatggagaggagactgacgggagccacaggccagctcttccaaggcaggctaaggatgttgaggtggttctacggcgctggggagcattgcaggcttgtgtgggagtaggaacaggtagaggagggggcctgcatccgcagtgccgggagcggcgcaggtatcggggcagggatgggggatggctctcgttgccggcatattattgtgcggtccttcggctaaggtgttagcagagctggtgggggccaggttggtcacactagtctcagagaaaggcctgaggggctggaaagcaagtgcagaggcgggctattgggacactgttgagtgtcacaaggacatgggttcgagttctgcctccaccctgaccagcttcaggtttctaagaagttgatctttgttaggtttaaaaaaa

SEQ ID NO: 177672 - DNA, 454 bp, Homo Sapiens
tagttttagtgtttaacaaatttaatatcatcttgtttgaacaaagctttcagaataagtgagcaattaaattcttaaagtagggacagaacaccaacaggctctagactccggaagagctgtaagccgacaaatgggcattgttttgcttaacagttttagcttcaatgtaaatatatattattacttagaatattagcatctgaactatataatgactattttatcattttacttgaattaaaaccagaatttctggaacttccaaatagtctttaaagtttttcaatataaacataaactaacccctattcctctctacatatcaaatgtgaaataactgtcacaatatatcagcattttcacagaaagatgtttaaggcttctggcacataaaatgtgtaatttctgtgtgacaatgtcataattatatacagaaaatatttaaaattct

SEQ ID NO: 177673 - DNA, 448 bp, Homo Sapiens
agtcctcatatttaaaggctagacaacgtaatgaaatttttaactatttgtatgtcattttgaaagtgtactgctttatggtaaaagtgtttttcatttgttcattgttttcattatttgtgatcatgttgtctttcaatacaggcataaaccttccactcttgaacaaagcagctgctttttaaaagcggtaattgcttctttaccttttatttcttttgtaaatgaagcttttctttaagaatgtgactttaaagtgttgtctattgcataaaacagttgacactcacttattgtaaagtgaagattgttctactgcatgtgaagtggaccatgcagatttctgtatgttctcagtatgcatcactagataataaagtcttttgtgaacaaggcatttgtagccatttttaaaagtttttgtcttcagtgctggtaagtcaggtaa

SEQ ID NO: 177674 - DNA, 843 bp, Homo Sapiens
  misc_feature (479)..(493): n is a, c, g, or t
  misc_feature (613)..(613): n is a, c, g, or t
gggataatgataaaacacctcacacctcactctttatagtgcacaaaatgaatgaggtctgggctaggtagaaaaagggtcaatgctatttttgtttttagaatcataacctttaaccagcttttaaccatctgatatctatagtagacacactataatagttaacatagttaagttcagcacttgtctcattttaatgtaaagatttgcttccattttccaacaggcagtctctctcttcctaacagtcccactgtgcaggtgctattgttactcttacgaatattttcagtaatgttattttcttctaagtgaaatttctagcctgcactttgatgtcatgtgttccctttgtctttaaaactccaaggttcccttgtggccctctccccttaccctgggaaggcctcttggagaccttacccctggctgtttggactttgtatactttaaataatttaactacccttaattacttnnnnnnnnnnnnnnngctttatggattttcataaacttatttgcctgattttaatgggattggttaaatttcccgccctggcaggttttaatttttatggtttaagaatagggggcttggggcccagggaaaatnctcaggaacgtgccccccgcagcgcagagagtacattggggcggtcccgaccctccgccccctccaagaaaagccttctcttaaaaaccatttccctttggggggcgcgcggggccccccccataccgttaaacggaaacacgtgggcccaaggccgtggttttccccagaggaaagaaccccggggcgcctggaacccagaggccgtgggggattctcccccaccacac

SEQ ID NO: 177675 - DNA, 339 bp, Homo Sapiens
cccccttttctgaacaccaactgtgtcctgtgaatgtatcgctactgtaagctgttcccgcctagccagggccatgtcttaggtgcagctgtaccacgggtcagctgagccacagtcccagaaccaagctctcggtgtctcgggccaccatccgcccacctcgggctgaccccacctcctccatggacagtgtgagccccgggccgtgcatcctgctcagtgtggcgtcagtgtcggggctgagccccttgagctgcttcagtgaatgtacagtgcccggcacgagctgaacctcatgtgttccactcccaataaaaggttgacaggggcttctcaaaa

SEQ ID NO: 177676 - DNA, 499 bp, Homo Sapiens
aattaaaaagagagactgacaacttcattttataccttttcacgggaagtgaccctcctccccatgggtcaataagttaacgccaaatcgcggcaaaacggcgaattccatctctgaggctctagaagctcaatctagaaggagagattttaattgtaacccctaaacagcaaatgctgacatttgtcttgctttcagatagtctccagactgggccagaacatgactaatttattttatcttatccatctatctaggcacaggattaaaatatttatatcagtctgttcactttaaaatgtgcagttacagacaccagcttcagggccactccttaatttttcacagttttggcttttcattgtttccagaaatgcacagtccttgaatggcgaacactcgcaaatgctgatgaaatctttaagtgaggagcctctaaactaatatgaaaatctcccctttcaggctgcgtggacgctgcccggccacggtgacggag

SEQ ID NO: 177677 - DNA, 389 bp, Homo Sapiens
gctgaagaccagctggctactttgggtatgtcaatcctatcctttcaatcttcacctaatggaagtgaagttaagatcataaagaaattctatttaggcagaattaaggactcaggagaacatccacgtagaaatcatccacgtagaaccaagagcttgccaacactgaaaaacctgacacaaagcctgttaagcagcaaatggcagacatttctttctctacattaaaactgattttcaacatgaaaagcagatttaaaagggaacatttagggtaaccacacttaatgcattcttgatccagtgactatctcaaaacaggaaaagatttttaagtaagttgaccatttggaaaccacttggtatgtcaaggtcatctcgtagaaaag

SEQ ID NO: 177678 - DNA, 523 bp, Homo Sapiens
tagtgtttaataatgcaataaaatgtagaaatattttaatttacatattacaatgaatcaataaggagtcaaaatccagtgacacactcataaaaactccatatatcatcctcagaataatcagtttctgtacaaagatttacagatgtccaagtatgtagtttttcctcagtgtgctacagaatttaaaggttctgctcgaatattccccaaatcaagcgcagaatctgtttcttcatcgatttctccaatgactgcaacgttgtcacctcttacaatgtataatcctagtaccacttgttctaccccctgtgaagagctgaatactcgttcatggctttcatccaaaatcaaattaatggtctggtcaaaacctttcagtgttcccacaatcattctcccatctgatgtaataacggcaacagttcggttgatgtagttctccaaagcggacgtcatgctgttcggcccggcggttccgggtaacgcagcggtgcggacagcaagcagaactgaaagcccc

SEQ ID NO: 177679 - DNA, 382 bp, Homo Sapiens
ttaaaggggaaaaatctttaattgatttctcaggtaatttttttccagattgtacataaagtgttcttatgttctctatttggatgtttcaggagacatacaaatgaaatacagtacatagacaaatgaaatgctaataagaagtaggatgatattaaaatatccttactttgcctgtatggaacaaaggcagtctactccatcggggaatcaaagcaaatgtgaataagaggtttccaccttgcaaaactgtgagcttcatttgccctggagagaactactaggcaaggcttcacatgacagtacctgtagggatgtccatggggctgtgaagcaggtgtattgtatcgaacatgcagctgcaatgaaggcgtggagctca

SEQ ID NO: 177680 - DNA, 488 bp, Homo Sapiens
agcacgcacgggtgcattgtcaaagtctgagaaggatgtattgtactttgaaggaagactttccatttctaagctaccatggagaagtatatgctcctcgagaccagagactgtgacttctgcatctttgattccagcgacatatgataaaatgttttgcacatagttgaatccagcgttgatacatgaaggacagcattacatcttttttctattatacttagaaatttcctctttgttctgcaccaccaacctgtatatcaagcctccttgccccacaaagcttccaaagcccgtaaatttgttaatctagagcaggggtcagcaaactaccacccatgggccaaatctggcctgctgcctatttttgtaaggcctacaaactatggtttttatattcccttttgttaatggctcaaaataatattttgtataatacgaaaattacgaaattttagtttctctaaataaagttttggaaagaacaa

SEQ ID NO: 177681 - DNA, 506 bp, Homo Sapiens
  misc_feature (76)..(76): n is a, c, g, or t
tcgaaagatagaacttggccccaaaatcatgcaatcattttaaacaatttctttcatggtaccagagacaccacanccatatgaaagttgctttgggacctgttcaagttgaattgtgctctccaataattcacatcttgaaatcttaacctccagtagctcagaatgtgactgcatttggagacagagaaataaggaaaaaatgtagatgcaggcggatacagagcaagggtgatgtaaacacacagggagaagacagacaccagtgagctgaggagagaggcctgaaacaggtcttttctttacagcacttggaaggcaccaaccctgtcgacacctcgattttggacttctggcctcagacctgtgagacagtatattcgtgttgtgtaagctgcccagttgtagtacttttccacagtagccccagcaaatcaatacagggcctacaggcatggatttctgttccagttactttgctttgcaataaatgtccctaaaacttc

SEQ ID NO: 177682 - DNA, 433 bp, Homo Sapiens
  misc_feature (13)..(13): n is a, c, g, or t
  misc_feature (30)..(30): n is a, c, g, or t
  misc_feature (36)..(36): n is a, c, g, or t
  misc_feature (43)..(43): n is a, c, g, or t
  misc_feature (68)..(68): n is a, c, g, or t
  misc_feature (153)..(153): n is a, c, g, or t
  misc_feature (159)..(159): n is a, c, g, or t
  misc_feature (238)..(238): n is a, c, g, or t
  misc_feature (272)..(272): n is a, c, g, or t
ggcccaagtcgcngggaaattgcttcttcntccggnaaggaanaggacccaagcaactgtgccttaanctgaccttgcaagggcccaggcaaaaggttggggggctgcccctggggtttgcagggtgctgcattgaaggctcccaggccccanccccangccagccatgcccctcccccaggactcccactattgcctctgtgattggccccaggaggaaaacacgaccaagctcaanacccttcccctgccctgggctgtgggggtctgantctagagcccccaaccctaggccccgtgccagaggggaagaggctgactcccaggggaagaggggaagcactgtcatcttccacgtcatcttcacaccagcccatcctgccctttagatctgggcaccaataaaggcgtcttttgtgcttggcaaaaaaaa

SEQ ID NO: 177683 - DNA, 1029 bp, Homo Sapiens
  misc_feature (488)..(603): n is a, c, g, or t
  misc_feature (606)..(763): n is a, c, g, or t
  misc_feature (846)..(855): n is a, c, g, or t
ctcgcctccatactggagggacgacgcaggggagaacagagaagtgcttggccctaggattgaggcacttgtttcctagcccgctgggttagggctggtgcaagcgaggcaatgttgaggatgctttaagcactaccagccgaatccgggaactctgttaacagttgtccaaccagcagaatgaggctaactgtataaagcatgggacccaggatgaggataaggaaaggacagcggctttccctgggcagtacaatggcttgaaggcaaaaagggataaagtgacagccgactgtgactctggtgaggaggggtgagcagggaggttgattctctgatgttaactaagtggcaaagtctcaaccatgctcagccctccccctcccagggaagagaaacaaagattcaaagtaagcatgatactagtgggtttaccagtgtttcttccaaggagacatatattttttaataaacgatagttgcaatgnnnnnnnnnnnnnnnnnnnnnnnnnnnnnnnnnnnnnnnnnnnnnnnnnnnnnnnnnnnnnnnnnnnnnnnnnnnnnnnnnnnnnnnnnnnnnnnnnnnnnnnnnnnnnnnnnnnnccnnnnnnnnnnnnnnnnnnnnnnnnnnnnnnnnnnnnnnnnnnnnnnnnnnnnnnnnnnnnnnnnnnnnnnnnnnnnnnnnnnnnnnnnnnnnnnnnnnnnnnnnnnnnnnnnnnnnnnnnnnnnnnnnnnnnnnnnnnnnnnnnnnnnnnnnnnnnnnggttttgaaaaaatccaaaggggattttgggggcatttatggattttaaaaaggggggcccagggaacttcaaaataaaatannnnnnnnnntggccattattcgaaaaatggtgaaaatcaataaacattttggccaaatggaaacccttccaaacgggatgaaaaacctaaaatcccaagggaattcaacccttgggccctttgaataaaaatttccccccggaaaaaacgggggccaaaaaatttcccaaattgggccccctt

SEQ ID NO: 177684 - DNA, 472 bp, Homo Sapiens
gttggccaggcccaccaggaagtcaccaggacagtccacccgccctgttggcacactcaagcgggagtccacccctgcctcagtggtgggccagtctcggtttgcattcttgtgcttttgggaggtgccaggggagggaagggctgggatgctgggacctgttgttgctggcaaagccagaggtccacagtggcctgatctgggccctcccaaagctgagggctgcagcccgtggggcctcagagctgaaagctgcggcgccactggtgccagagtcagatgtcacagatgtgttgtgtaaacagttggctgtttcgtgcttcaagaatgttcaggattaaaagcagacaagaaattgtgctacttgaagttgaatctttttatgagacaagctgaatctgggatctcaaattgcctctgaccttttataagacaggtttatcttcaaataaatttattttgcaataccacg

SEQ ID NO: 177685 - DNA, 484 bp, Homo Sapiens
  misc_feature (18)..(18): n is a, c, g, or t
  misc_feature (23)..(23): n is a, c, g, or t
  misc_feature (41)..(41): n is a, c, g, or t
  misc_feature (53)..(53): n is a, c, g, or t
  misc_feature (128)..(128): n is a, c, g, or t
aaaagcaacccctagaangcctncctttttgtaaaagcaancaaacctccccncccactttagcctgttttgacctatttgaaattttccaccatattgggccttacccccaaagtggagcacacccnccccgggcatgtggctgacactggggccaatgtcctgccatcctgtgcctgtgtgtgtagtgtggttggcccagtaggtgagtatcccctgtgtgtgtgagtgaagcccactcccccaggctggtgctctcctcctgtgccccagtgaaccgccccaggttggctcagctgcccttcactcccacctgctgccaaagtccctgtgctaatgggattacaaatacaaaaagtggaaaaaaattttcgtaaactttgttttatattaaaagaaaaatccataagtctgtgtgtgttaaacatgaggttctgcctctgtggctgtgtttgaaaaaataaagttttattagaataatcca

SEQ ID NO: 177686 - DNA, 777 bp, Homo Sapiens
  misc_feature (605)..(605): n is a, c, g, or t
  misc_feature (718)..(718): n is a, c, g, or t
  misc_feature (751)..(751): n is a, c, g, or t
tggaagctggcacaccaatgctacagcagagagccctgggatgaggatgtgaggcagtgattctgcctccatcctggtttccccaaagccccagggcaccatccttaggggagaaggtctacagttatcattattttaattccattactttcagtctggaaaactaagctagtcagaactgtcatcttgcttcccaatctaagaacctgtggccctggaacacttttcaagaattggttcattttgctttacacagtagatctgttccaacagttctgtgtaaaccaaatgctatttttcaatgcatttggactgctgaccatttaaaagcagcctatgattgcttctttttgtaaagcaagcaacctccctccactttaggctgttttgactatttgaattttcacatattgggcttacccagagtgggagcacacctccagggcatgtggctgacactgggtcaatgtctgcatctgtgctgtgtgtgtagtgtggttggccagtaggtgagtatccctgtgtgtgtgagtgaagccactccccaggctggtgctctcctcctgtgcccagtgactgcccagtggcagcttcagctccctttncacttcccacctggctgccaaagtccctgtggctaatggggattacaaattacaaaaagtgggaaaaaaatttttcgttaaacttttgttttatatttaaaaggaaaaatccntaagtctgtgtgtgttaaactgagggtctggcnctgtgggtgtgtttgaaaaataaagt

SEQ ID NO: 177687 - DNA, 628 bp, Homo Sapiens
tagagagctgctaaatgtgttattatcagcgatcagaaagtcttctggtctaccacacatgtccctccctactatctcttcagtatgtgtggctgaagttagcctctgtgtgagaaaacaatacaactccccttctccacacacgttactttccagcccagattaataagtatcccctaccgctaatccgcaactactatgatctaataccttatagtagagaggaaccacttctttttaatattgaaatctgctggtttacttgatgtaattctcaatgttcagtgtgactaggagctgaccacagggtgtcatcaattcagattcctaaataatccctttctctgccacaacccagtacctccagctggtgagccctgggccagattgttatgatcttcaggtattataaattttagttacatcaattaatgtacaattaatccaaatgctaattatatgtggtgcaagaagtgtcttatgtaaattcagggtatggataagctaattaagatatccatctttggtggctctaagtgtataatttgtttttaaataaagtgtacaaatataacataacatgctataggtgtatcatgaattggaatatatgtcgagaattgggata

SEQ ID NO: 177688 - DNA, 457 bp, Homo Sapiens
gggggcactaaacaaaacaaccaataaagtcaccagcagtattactatcacaccaacagccacacctcttcctcgacaatcacaaattacagtaagtaatatatataactgaccacgctcaccctcatccagtccatactgatatttttgcaaggaactcaatccttttttaatcatccctccatatcccccaagactgactgaactcgtactttgggaaggtttgtgcatgaactatacaagagtatctgaaactaactgttgcctgcatagtcatatcgagtgtgcacttactgtatatcttttcatttacatacttgtatggaaaatatttagtctgcacttgtataaatacatctttatgtatttcattttccataactcactttaatttgactgcaacttgtcttggtgaaatactttaacattataaaacagtaaataatttgttattttt

SEQ ID NO: 177689 - DNA, 480 bp, Homo Sapiens
ataattatgagtttaatgaagtgagataatttaagatgatcacacaataaaactttacagccaaaatacaaagtcttcatcttattttcctacttcattttttttcatgttcttagtaagggcatttttctactttattttttgaaaagaacattcatttttgaaaagtttatttcaccaaggaccaatcttttgttgatgttcaaatttaaattgttctttcatatctggctcataggagaaaaacatgaaaaattgcttctgtggtagtttcttctaggttttcaagtactcttatagtagcaactggttcaaaatactgctttgtttcaaagcatacagtttagatgtatcttcactgatgatgggaacattttcattttgttcctgagctgtcaggtcactttcactgtcagatagtgtacacaggagagtgtcattttcataggttggaaaataatactccagttgatcccacgt

SEQ ID NO: 177690 - DNA, 817 bp, Homo Sapiens
  misc_feature (620)..(658): n is a, c, g, or t
ctgatcaacagaaagatccctcagttatacaaggcagtattgcctgtcacctgccacagagattccttcagtcgaatgagccttcgcaaaatggatctctaaactgaatgcacttgttttattcatctgcaaagagccatgtattcaacatcgagtgtgaaaagatctattggaaaacaacatggaatggaattctggaaattattattcattgaagaatgcagtggccaagaaaatatcaaatgtagattgttaacgcttgagaatcatggctatggtttctaatgttctggtaacaagctgttatcttttaagacattttaatgactcaaaggtacactatacatttaccattatttataccatagctaaggttaaaaatttattcactttaagttcgtattttttaatttatattaccatttatagattcattttggaaccattttaaatgtagtaatgcttattttaaaggtactattaaatatgtgaatgtttacactaattttaccgagtgggacttcaaaatttttattattgaccatgccagagaaacaattaaaggggttgactcaagaaactagttcccacacctaaccgaattaaaattcctggatagnnnnnnnnnnnnnnnnnnnnnnnnnnnnnnnnnnnnnnnttccagcagattattcccaaaaacataaaaaaaccttttggggcggccctcgggccctccaaaaagcttttctaagaacctttcccttttgggcggcgcgggggccccataagggtaaagtggaacctgggccaaaagcggtgttccccaaagggaaaa

SEQ ID NO: 177691 - DNA, 527 bp, Homo Sapiens
catgaaagagctcaacaagaaaacccctctcctcaccgagggccaggccatctgcttcaccatcctgggcgtgctcaccagcctggtggtgctgggcactgtgggtatcgtcttcctcaacaagtgcgagacctgggtgtccaacctgcgctacaaccacatgctgcggaagaagaagaacctgctgcttcagtacaacagcggggaggacctggccgtcaacatcatcttccccgagaagatcgacatgaccaccttcagcaaggaggccggcgacgaggagatctaagcagcgttcccacagccccctctagattcttggagttacgcagagcttactatacgcggtctgtcctaatctttgtggtgttcgctatctcttgtgtcaaatctggtgaatcgtacgcttacatatattgtctttgtgctgctgtgtgacaaacgcaatgcaaaaacaatcctctttctctctcttaatgcatgatacagaataataataagaatttcatctttaaatgaaagaaaat

SEQ ID NO: 177692 - DNA, 589 bp, Homo Sapiens
ttcccttcagccgtgccctatggtcatcccccacaagccaacgtgactccagcatcggtgagtttctgtggacaagggcacagaagtatcatcaatctgtggcgctgcatcacaatgagaaggagtgcaccagccggatcagttcatgcctgagcgtttcttgaatccagcggggacccagctcatctcaccgtcagtaagctatttggccttcggagcaggacctcgctcctgtataggtgagatcctggcccgccaggagctcttcctcatcatggcctggctgctgcagaggttcgacctggaggtgccagatgattggcagctgccctccctggaaggcatccccaaggtggtctttctgatcgactctttcaaagtgaagatcaaggtgcgccaggcctggagggaagcccaggctgagggtagcacctaaaggctgtaactcacagcccctgtccaccctatgtggccccacaacacagatttagagatacaaccccccacccttctccgccattcttccctactcccaacccactctgccttctttttcagcttgtgcaatgccagtgatgtgcataaacag

SEQ ID NO: 177693 - DNA, 299 bp, Homo Sapiens
  misc_feature (142)..(155): n is a, c, g, or t
  misc_feature (208)..(231): n is a, c, g, or t
agagggtgcaagaatgtgggagtatgtctgccggtttcaacacacacagacaaacacagccacacgcgcacacaagtataagactttttgtattactgctccctacttaacatacttgaattctcaaatttcctttggggtnnnnnnnnnnnnnnggatttgaaaccataaagtgttctgaagaaattaagtctataaaaagcatacnnnnnnnnnnnnnnnnnnnnnnnncctccacagacaatgtcctctgttcaattcctaacgcaaactacaataaatggtgacacacgttcaga

SEQ ID NO: 177694 - DNA, 472 bp, Homo Sapiens
  misc_feature (229)..(229): n is a, c, g, or t
gcatccccacctttgagctgctgcaaccgccctggaccttctggtagaagagtttgtcccacattccagccataagtgactctgagctgggaaggggaaacccaggaattttgctacttggaatttggagatagcatctggggacaagtggagccaggtagaggaaaagggtttgggcgttgctaggctgaaagggaagccacaccactggccttcccttccccagggnccccaagggtgtctcatgctacaagaagaggcaagagacaggccccagggcttctggctagaacccgaaacaaaaggagctgaaggcaggtggcctgagagccatctgtgacctgtcacactcacctggctccagcctcccctacccagggtctctgcacagtgaccttcacagcagttgttggagtggtttaaagagctggtgtttggggactcaataaaccctcactgactttttagcaat

SEQ ID NO: 177695 - DNA, 1059 bp, Homo Sapiens
gaggggtttaatgagggtgcccaaacccaccagtcttttttaaacccattccaaaccaacttgctgtgaaaggtcactgtgcagaggaccctgggtaggggaggctggagccaggtgagtgtgacaggtcacagatggctctcaggccacctgccttcagctccttttgtttcgggttctagccagaagccctggggcctgtctcttgcctcttcttgtagcatgagacacccttgggagccctggggaagggaaggccagtggtgtggcttccctttcagcctagcaacgcccaaacccttttcctctacctggctccacttgtccccagatgctatctccaaattccaagtagcaaaattcctgggtttccccttcccagctcagagtcacttatgggctggaaggtgggacaaactcttctaccagaaggtccaggggcggttgcagcagctcaaaggtggggatgctggtgacattgactgggatggaaatgatggcccatggcagcccatgctgttccagagagcggcggatcatgtagccgtctcggccgagcaggaagagggcggggatgtcagctgtgcgctgggtactgtcctggatcatctccacgtagaagctgtcattgtcaactgcgttgtcagagatgatcaccgcccgcccgccgtgctcctggaccacccgagtcttggagaggaaggagcagccccccctctccaccagagcaatctggtcctggatgaagaaaccgttgctgagttccccgcaggcctctggaggttcagcggggacaaggtgaatctgctcataccttgtgtgaaagataccaccaaagtccttggcaggtgtggctgtgaagatgtatcgaatgtccccaggactcagcacttgaaagtacaaataatcatggatacggaagccgtgggccgcgacgcacgcggggagccagagcacgagacaacaccagcccgcggcgccggggaccatctccagggcccggcccggcgccgcgtttcctctcgccgccccgccgcgcgtcgctcgcaggacttcccc

SEQ ID NO: 177696 - DNA, 372 bp, Homo Sapiens
  misc_feature (72)..(72): n is a, c, g, or t
  misc_feature (81)..(81): n is a, c, g, or t
  misc_feature (120)..(120): n is a, c, g, or t
caccttggggaaggtttaacctttgaaaaagcagaaaactgtcccctttaaaacttggcccctcaatgtcanttgccgtanctctgagaacaatagctatgtccccaccccagtttgtanttccgttggttgttggcacttttttctcaatcccccatctcattaccttgtctgttttctggcactcactataatcagccttgcactagagctgtttgtggacttggcttcaccccctcctcctcagccctcccccacccattaaattgtgagctcttagaagacaggggtggcctttcatgtctgatcccctaccaaatctagcacactgccttgcatcaagtagatttcaataaatatatgttaaatggc

SEQ ID NO: 177697 - DNA, 414 bp, Homo Sapiens
  misc_feature (30)..(30): n is a, c, g, or t
  misc_feature (35)..(35): n is a, c, g, or t
  misc_feature (49)..(49): n is a, c, g, or t
  misc_feature (59)..(59): n is a, c, g, or t
ggggggaatgcctaaactctccccttaccncaggnacctaaaaaccggnagtcctcatngccaacacttgggatgtttacttggaaaagcagaaaactgtctctttaaacttggcccctcaatgtcatttgccgtatctctgagaacaatagctatgtccccacccccagtttgtaattccgttggttgttggcacttttttctcattcccccatctcattaccttgtctgttttctggcactcactataatcagccttgcactagagctgtttgtggacttggcttcaccccctcctcctcagccctcccccacccattaaattgtgagctcttagaagacaggggtggcctttcatgtctgatcccctaccaaatctagcacagtgccttgcatcaagtagatttcaataaa

SEQ ID NO: 177698 - DNA, 458 bp, Homo Sapiens
tgaaaagcccaccccctgtcctccctaagacctccacaattttaatgggtgggggaagggcctgaggaggagggggtgaagcccaagtcccacaaacagcctcctagtgcaaggcctgattatagtgagtgcccagaaaacagacaaggtaatgagatgggggaatgagaaaaaagtgcccaacaacccaacggaaatacaaactggggtgggacatagctattgttctcagagatacgcaaatgacattgagggccaagtttaaagagacagtttctgcttttcaaagtaaacatccaaagtgatgcaatgagaactacagaatgtaagtacatgagtaagagagaagttagcaatccccccatctgatggacatgctggaaatcgtgaaacacttcaaaaataagagaacagggtgcactgtgatttcactcattttatggcccgcatgtggtggt

SEQ ID NO: 177699 - DNA, 1221 bp, Homo Sapiens
  misc_feature (410)..(433): n is a, c, g, or t
  misc_feature (457)..(514): n is a, c, g, or t
  misc_feature (579)..(604): n is a, c, g, or t
  misc_feature (624)..(712): n is a, c, g, or t
  misc_feature (829)..(877): n is a, c, g, or t
tcgacccacgcgtccgcacaattaagttgttgtagcccttgcacttcaagagatctagtctttactttcagttgtctgttaggtccattctgtttactagacggatgttaataaaaactatgcgagcctgaatgaattctcagccaaatttagtcttgtctctcatcttgattggattaattccaaattctaaaatgattcagtccacaatagctctaggggatgaagaatttgccttactttgcccagttcctaagactgtgagttgtcaaatccctagactgtaagctcttcaaggagcaagaggcgcattttctccgtgtcatgtaatttttctaaggtgtttggcagcactctgtaccctgtggagtactcagtaccttttgtttgatgttgctgacaagacctgnnnnnnnnnnnnnnnnnnnnnnnncccattaaagtgtagcaacaccgnnnnnnnnnnnnnnnnnnnnnnnnnnnnnnnnnnnnnnnnnnnnnnnnnnnnnnnnnnccaataacacaataaaacaaaaaccccacagataaaccaacaccaccacaacaacgctacaagtnnnnnnnnnnnnnnnnnnnnnnnnnnccccgcggcggccccgtccnnnnnnnnnnnnnnnnnnnnnnnnnnnnnnnnnnnnnnnnnnnnnnnnnnnnnnnnnnnnnnnnnnnnnnnnnnnnnnnnnnnnnnnnntcggccccccacacagcgcgttgcgtttcccccccaaaaacaacccggccggggtccccccgacatttctccacaccataaaaaggggggctttcgacggccttctcggggaactannnnnnnnnnnnnnnnnnnnnnnnnnnnnnnnnnnnnnnnnnnnnnnnntctgatattattcccaaacaaggggttttattttccaaacccctttctgccgaacgggaaaccccccccttaccccgcatttgttcaaccccgccaacccccgccggcgctcccccgaactttccgcgccctcttagcaccacccttattttgcgccccgcgccaaaaacgcggcgcacgagataaactcccccctatttgggccccccctttataaacacaacaaaggggtgtacacctccctccccccgtgtatttgcccctaaacaacacaaacccctattattctcctataaacaactcttcttagcccagaaaaagcgcgcgcgcgtgtcttctcacgg

SEQ ID NO: 177700 - DNA, 1150 bp, Homo Sapiens
  misc_feature (473)..(475): n is a, c, g, or t
  misc_feature (479)..(589): n is a, c, g, or t
  misc_feature (600)..(615): n is a, c, g, or t
  misc_feature (644)..(686): n is a, c, g, or t
  misc_feature (765)..(775): n is a, c, g, or t
  misc_feature (786)..(849): n is a, c, g, or t
  misc_feature (909)..(918): n is a, c, g, or t
  misc_feature (950)..(968): n is a, c, g, or t
  misc_feature (978)..(987): n is a, c, g, or t
  misc_feature (1010)..(1024): n is a, c, g, or t
  misc_feature (1053)..(1053): n is a, c, g, or t
ggaatcccattgtggttatagaactcagggctgctaaagcaactactctagacccatagttctttttagttagatgtattgaaacagacaaaaatattaacatcagaaaaagctcttgccaattagaggatcttcttaatcctcagcaattaagtttggggtttgaggggggcaggtcattgttacaacagaagtaaatttggcatctatagaaatcaattatgatttttgaaagatttatctaaatatatcaatatagcatctctttaatgttagtcatttattagaaagatcctttatcctgatttgcttaaacctttcaataaattgcactttaaaggattataaataatccatttaaaaattcaagtacacacatcagtgttggttactatgcagagaatgtcattgtgtatagtttcatgtaatctgttatgtcagctgtattttttattaaaatcatgtcaagaaannnaaannnnnnnnnnnnnnnnnnnnnnnnnnnnnnnnnnnnnnnnnnnnnnnnnnnnnnnnnnnnnnnnnnnnnnnnnnnnnnnnnnnnnnnnnnnnnnnnnnnnnnnnnnnnnnncctggggcggnnnnnnnnnnnnnnnnaaaaaagcttttcaaaaacctttctgttnnnnnnnnnnnnnnnnnnnnnnnnnnnnnnnnnnnnnnnnnnnccataaagtggttttccccaagaaaaaaccccggggggaaaagaaacaaaggggtgtgtggattccccccccaccaatnnnnnnnnnnncgccccgccgnnnnnnnnnnnnnnnnnnnnnnnnnnnnnnnnnnnnnnnnnnnnnnnnnnnnnnnnnnnnnnnnttcttctggcgaggggggcgctctttataagcggggggggtctctctccaccaccacaannnnnnnnnntctccccacaagagggcggagggctccccacnnnnnnnnnnnnnnnnnnnttattaaagnnnnnnnnnngcgcgccccgcggtgggcccacnnnnnnnnnnnnnnnaaaaaaaaaacaacgggggtgtggggagngaattaactcttcctttataaataaaacgcatattattttctcgcgccgcggccgacactagatgttgggagagacacacacctctcctctccacac

SEQ ID NO: 177701 - DNA, 880 bp, Homo Sapiens
  misc_feature (35)..(35): n is a, c, g, or t
  misc_feature (38)..(38): n is a, c, g, or t
cagcaagattcctgcccacaggaagggccacagcnctnataggccccaaaggcaggatctagatgatgatgaacatgattatgaagaaatacttgagcaatttcagaaaaccatctaagtgctggaggaaccacgcttcctaactgctgcttctcagggaatccgacaccagccaaccattttaagcctctaaaagacctcgggcaagtctcacagaaactgagctgcagacggggagtagctttgtggaaactgatttgatggacactgcaccagcttccttcaggttctagattcttgctacttagggcgggctggtttggacctaacatctcgcacgtgactccctcagcctcagagccttgggatgcagagcagctggcagggttcctctcaatcctgcaaccccagctgtcccaccggtggatgcagaggggaatccgaggccatcaaccttggtgacagcagcgcagtgccaatgctgatcacactgcatgggagattttgttaacgtctgccacccccactctcacccccaagctctaagcccccgggaggcctggactgtcttcctcatctctgtagcaccaagcctgatagatctgtatatggtaaacaggggtttaaccacatgtggttaacatggattaatgtgggaacttgggcttcaagaacacaaccttagggaccttgggccccaaaagctggtggtgaaatgaggaggagccaatttaagaagacccttatggagacctgaggctgcagaaactggtaggtttcatcaggtggttaaagtcgtcaaagttgtaagtgactaaccaagattatttcattttaaaaccatagaataaaaatgacacctgagcttctctaaaaaaaa

SEQ ID NO: 177702 - DNA, 806 bp, Homo Sapiens
ggggggaggaggaaaaaccctccctccaatccaaacctcccccactcgttgcatagtaagggtgcttcttggccacttctcaacagtactggggtgtctggggtcggggcactgtttgtctttccaggaaaagctagcaacagggatttttatgtggaaaccttcaaccacttcagagttgattcagaaaaactaaacaaagcgctatggctcagacaccagcagacctccagaggcaggaggcaggaggcccagccctcgtgccgaattcggcacgaggctggacgtggtgcgcacctcgcgggcgctcatcggagccacgaacccggccgacgccccgcccggcaccatccgcggggatttctgcatcgaggttggcaagaacctgattcacggcagcgactcggtggagagtgcccgccgcgagatcgctctctggttccgcgcagacgagctcctctgctgggaggacagcgctgggcactggctgtatgagtagcccggcagatgcgcgtcacagaggctctcacactccagcctcctccagggcccaggtgggcgggcttctggccccaccccacagcgcttggagcatccctttggacgggctgctgaacatccacctgtctggacgttgcatggagggtggcgcaggcctctccaatccctggcgtacagggtttcctgcccgaggagctgctccaggagcctgcgcggctcgcctggaaacgtgccaggacactgtcctggtgcccagcccaacgtggtccaacgtttttttataataaagtcctcgttttcgtttc

SEQ ID NO: 177703 - DNA, 851 bp, Homo Sapiens
  misc_feature (522)..(531): n is a, c, g, or t
gcggttgcggttagtggaccgggaccggtaggggtgctgttgccatcatggctgaccccgacccccggtaccctcgctcctcgatcgaggacgacttcaactatggcagcagcgtggcctccgccaccgtgcacatccgaatggcctttctgagaaaagtctacagcattctttctctgcaggttctcttaacacagtgacttcaacagtttttttatactttgagtctgtacggacatttgtacatgagagtcctgccttaattttgctgtttgccctcggatctctgggtttgatttttgcgttgattttaaacagacataagtatccccttaacctgtacctactttttggatttacgctgttggaagctctgactgtggcagttgttgttactttctatgatgtatatattattctgcaagctttcatactgactactacagtattttttggtttgactgtgtatactctacaatctaagaaggatttcagcaaatttggagcagggattcttgaagnnnnnnnnnnatagtgagataatggagttggtcttagccgctgcaggagcccttcttttctgtggattcatcatctatgacacacactcactgatgcataaactgtcacctgaagagtacgtattagctgccatcagcctctacttggatatcatcaatctattcctgcacctgttacggtttctggaagcagttaataaaaagtaattaaaagtatctcagctcaactgaagaacaacaaaaaaaatttaacgagaaaaaaggattaaagtaattggaagcagtatatagaaactgtttcattaagtaataaagtttgaaacaatgatt

SEQ ID NO: 177704 - DNA, 868 bp, Homo Sapiens
  misc_feature (590)..(591): n is a, c, g, or t
  misc_feature (764)..(764): n is a, c, g, or t
gggctcgcggaagtggggaggaggcggttgcggttagtggaccgggaccggtaggggtgctgttgccatcatggctgaccccgacccccggtaccctcgctcctcgatcgaggacgacttcaactatggcagcagcgtggcctccgccaccgtgcacatccgaatggcctttctgagaaaagtctacagcattctttctctgcaggttctcttaactacagtgacttcaacagtttttttatactttgagtctgtacggacatttgtacatgagagtcctgccttaattttgctgtttgccctcggatctctgggtttgatttttgcgttgattttaaacagacataagtatccccttaacctgtacctactttttggatttacgctgttggaagctctgactgtggcagttgttgttactttctatgatgtatatattattctgcaagctttcatactgactactacagtattttttggtttgactgtgtatactctacaatctaagaaggatttcagcaaatttggagcagggctgtttgctcttttgtggatattgtgcctgtcaggattcttgaaggttttttttnnatagtgagataatggagttggtcttagccgctgcaggagcccttcttttctgtggattcatcatctatgacacacactcactgatgcataaactgtcacctggaagagtacgtattagctgccatcagcctctacttggatatcatcaatctattcctgcacctggttacggntttctggaagcagttaataaaaagtaattaaaagtatctccagctcaactgaaggacaaccaaaaaaattttaccgagaaaaaaggttttaaagtaattgggac

SEQ ID NO: 177705 - DNA, 312 bp, Homo Sapiens
  misc_feature (281)..(281): n is a, c, g, or t
cgaacttctggaaatgggagtgctcagtctgtgcaagtcagaatccttgaaactgggccttttctaagtctgtgtcctaatgaagattccagttttcacagtagaagttgcatcttatttaatgactctgatacattgcaagcactcagtaaatatcagcaaatagtttatgttaattgtgtcaacagatggatcactggaatgtggggattctgaaacagaaatgaaactgtccttttgacaactctcttatataataaagtatcaccggcttgtgcganaagcataaagtgaagttatttgaaagcatgt

SEQ ID NO: 177706 - DNA, 906 bp, Homo Sapiens
accttcagcgagcacccctacacaacctccgcaagcgcttcggggctctgctctcagaccagggcttcgacctcatgaacaagttcctgacctacttccccgggaggaggatcagcgctgaggacggcctcaagcatgagtatttccgcgagacccccctccccatcgacccctccatgttccccacgtggcccgccaagagcgagcagcagcgtgtgaagcggggcaccagcccgaggccccctgagggaggcctgggctacagccagctgggtgacgacgacctgaaggagacgggcttccaccttaccaccacgaaccagggggcctctgccgcgggccccggcttcagcctcaagttctgaaggtcagagtggaccccgtcatggggagaactcagccgggaccacaggcgtggctactgcggctggagctgcgatgagactcggaactcctcgtcttactttgtgctccatgttttgtttttgtattttggtttgtaaatttgtagaattaaatcattttccttgttgtggaggaaagagctgtgttttctccgtgacttgcccagggcggagagggtgggcatcttcgggtgcccacgtggggcagcacaaacctccacacaccctctcccactctcgacacgcacggggctggctgggccgtgatttggaaaggaactggtggggaccgggtgggattgtttaatctttcggaactggagaccggtttctgtggttggggatgaagcgaagcccctcttgccccaacccactcgtccagaccagccctgtccacacgtagccccggcccccaaccacccagccccacgtgtgccagcagactcgacaggtttttatacaaggttgttgagttttaaaatgtattaaaatattcttcgag

SEQ ID NO: 177707 - DNA, 281 bp, Homo Sapiens
ggaagcagtcggatcaacgcagagtggccattacgccgggattcaacttctgcatttatatttaatcagtggttcatgtcatataatacacccttaactagttaaatggaatgttggtatggtacagagtaccatattgctaagaaaactgtcttataaaagatgtatatgtgtgaacacatgaaagtttaatgtacagaatggttggagaaatgcctatggtgaattaaagcttcatatctgcaccgcgaaaaccggaaaataccaaaaacaaattttgt

SEQ ID NO: 177708 - DNA, 690 bp, Homo Sapiens
  misc_feature (467)..(582): n is a, c, g, or t
  misc_feature (591)..(605): n is a, c, g, or t
ctatattagtcaagcatattattaaagtttaaaaaactctaaaacttctgtactgtttttttcttaagtgctctcttccctatttctacattactacattcacatttctgctgtcaataagccctaatggagtgataaactttaagctagtagatactgcaccatgtcttgtggtggtgttttcttaatgaaatggaagctgtacttcctgtttgtttttaaatacttttgaaacagacagttcatgtaccccatcatttagagatgcagtttgaatttccatggaaaaaggtgccaattttggattgggaaaggagctgaagccccagtcaagactttgccatttggggtaatgcagcagattcctgtgtctgtatctttccagtgtgtgtgttaatccatagtgttctgagcaccagaagggtcatgtaaatctgaagttgttattaaaggtttttctatagtgnnnnnnnnnnnnnnnnnnnnnnnnnnnnnnnnnnnnnnnnnnnnnnnnnnnnnnnnnnnnnnnnnnnnnnnnnnnnnnnnnnnnnnnnnnnnnnnnnnnnnnnnnnnnnnnnnnnntttttgggnnnnnnnnnnnnnnnaaaaaattttttaaacaatcttttggggggcgggccccccaaggaaagaaaaaagggccaaatttttttccaaaaaaaccccggg

SEQ ID NO: 177709 - DNA, 952 bp, Homo Sapiens
gggaatttaaaaaatatgtaactgctgtttatacattggctccttactgcttattaatctgtattgtacacatgatgaaatgaagcagaagctgggagtcggcctttcctctagtaaccaccacatggctcagcatctgtgccaaacataggcgctcctagtctggtcagtgccaagaggctaccagaacatggggcaggtggctggtgttggtgtcccagcctaagagccacctgctgcagttaccatggcatgctgagttgatgcaccaggtggcagcagccatccgttattatttccaatggagacctagcccagggccaaggtaaagttagttaatagcattggggatatagtcactgtaatggtgctattaacaaacagttcaacaccattgtattttttaacttcgggttctgtatctccccagccatgtatcttaaatatattttgtcatcataatctttatggtgggggcagactttgcacttactgcagtgcaacacttgcactttaattttcctccaactgtctaaaattagagcaaatacattggcaatacagctgcttttgctctgagctacaatcatggcttttcatgttacttaccaagtggtgtttctggttaggaatcacagctgtaaaattgatttcagttcatcacacttcttcatgatgttgcccctaaattttgcacactatattcttgtatattatttcaaataaatggaaaaaaaagttgcttatctctgacgtctactgattgattgattgattgattaatcttggctgaattttatttatgagttctcagaataacaggttcaggagatgagatggaaaacataaggcaaattcctaacactgctaattaggaggctgctgataggattttaaaaattaaaaacaatcttaatagtggaacaagagccatcagaaaataaggacttag

SEQ ID NO: 177710 - DNA, 762 bp, Homo Sapiens
cccagattcaccagtctgccctgtcacgtagttgaaggagttgcatttatctttctggctcctaattcctttaaaattacatttgttgcagaacctccacaaggctaaataaaattacatttgtgaccatcagagaactgaataaaccattaactggccatcctggttttgcagagatcaggttgttgacagttcctggttgacccacagctacccatgtcagttatctccactaacatatccaagaatctttgtaggacaatttctccacctgcaaggtctttcaggtagaactcttcttttaaggcaattagcccattgccaaaaggttttactgtcttaaagctgtctttctgagatctaattccaaggacttctccacagctaagtgagatgcctcacaccattaggtgatgctttggacagaacagagtattttcatcttgtgtttaaagcaattccttggcttcggctcctcaccactttctatgccagtctcccatttatgtccctagtaatgcctatgcaaaacacagcaacgacaacaacacgcaacaccctggcatggtggaaaccctacaggttcaaggggcttaaattctcaaactttggtaagggagtaaccaggagaccgtggcttgaagcgcggccagcactacaccaaactcattacccaaaaagccacactgggccaccacccaaggcccaaacccaatccaatcctgttgccccaggggtccaaccacaacatacccggaaagc

SEQ ID NO: 177711 - DNA, 745 bp, Homo Sapiens
  misc_feature (432)..(460): n is a, c, g, or t
acgtatttaaatccactttttattctttcacagattttaacaattatacacaacttttaacataaaggtagtgaaatctcaaggataaggaggcaatatatatggcctcttctattcgttattcaggatggaaggaaattttcaaagtacagtgtgtgagattcaacactggaaaaatacatatgaaacttgtttaattggctccacttaggaccagacacagcacaataaatacagaactgcatcatctttttaaaagatcattgtaattttaacacattcttactaaagaaatacatactatcagtgaccgatctgaaactctgtaacaggtgaagggagacttacgatgaatatctgagcataggttcgctagcatcttcacactcatacataaacattcttaaagggaataagaatgatttcaaattnnnnnnnnnnnnnnnnnnnnnnnnnnnnntttggtcaaactttcttcatcataccattcattgctatcacaatcctagtttgctggtaggtttaagaaaggaatagaaagtttttgaaatccttttaatttctaccagtcttagggcctcttgagtaggccactttggaagcaaactgattaaacagcaccatcaagtccgtatctcaacaaaccattgcataatttctgtcaatgttctcaaaggttaaaacaagttgtatggaagaatacctttcctcaatagcaggccactgtaaaaacatgtaatctgca

SEQ ID NO: 177712 - DNA, 1044 bp, Homo Sapiens
  misc_feature (729)..(729): n is a, c, g, or t
  misc_feature (814)..(826): n is a, c, g, or t
gggtggcgaattcggcacgaggctcgaatgcccggcagccgtggcggctagagcgttcctccccagctcgaatgcccggcggccgaggcggctagagcgtcgcctcctcccggggaaccgcgtgtgaccttccagcccgcggaccgatgctgccggcggccgctcgccccctgtgggggccttgccttgggcttcgggccgctgcgttccgccttgccaggcgacaggtgccatgtgtctgtgccgtgcgacatatgaggagcagcggccatcagaggtgtgaggccctcgctggtgcacccctggataacgcccccaaggagtacccccccaagatacagcagctggtccaggacatcgccagcctcactctcttggaaatctcagacctcaacgagctcctgaagaaaacgttgaagatccaggatgtcgggcttgtgccgatgggtggtgtgatgtctggggctgtccctgctgcagcagcccaggaggcggtggaagaagatatccccatagcgaaagaacggacacatttcaccgtccgcctgaccgagggcgaagcccgtggacaaagtgaagctgatcaaggaaatcaagaactacatccaaggcatcaacctcgtccaggcaaagaagctggtggagtccctgccccaggaaatcaaagccaatgtcgccaaaagctgaagcgggagaagatcaagggcggcccctgggaggcggtgggcncggcacccgggggttctgggagtaacccttccagccccggagggaattggtggtctcagggtccctgggcccccgggcggaggtnnnnnnnnnnnnntgggtcacttgggttccgcccccccagcaccagggcgccccagtgggaacccgctttggggaaaattggccctgcgccccccccaacggggggcccgggaaccgggaccgcaccaaaaccctacttggtggccgggtaagggaaagggggcgggtatggcctgccctggggggaaacgcgaaccccggggagggcccccacccagggaaaccccccct

SEQ ID NO: 177713 - DNA, 1384 bp, Homo Sapiens
  misc_feature (45)..(53): n is a, c, g, or t
  misc_feature (199)..(208): n is a, c, g, or t
gcgcctatagaaaataagacgagccgaccgccgccatcttcggannnnnnnnnttcacacaatttctcccgcggggtgcctgacggcaaccaccccgaggggctccatcaaagaggtcccagcggggtcaaacaacccaggggggcttttatggcgcacaacgacttataaagtagcggcgccgcccctttattcgaannnnnnnnnnaccaccgcgggcgcgggattctttacgtggcgcgcccgttttgggcgcgacgaccacaaaaaccgccctgggcggctccggcggcacaacaagccacaccgctttatgtctccgcccccgctcgtgcccccccgcctgtcttgcccacggtgcgcccttgtttctgtgttttctcccgggacacaggcccgtgcggccaaggtggcgtatgccgccctccggagaggcgctcgggggtctgtggttgtccggacgttacggggtccccgccaggctgcggcgcccgggtcgctctcctggggcccagggaggggggcaccaggtgttattttgtgtccagccaggcccgcccagagggcccattcccccggtggcgcgttcctggtggccctccgggtgccgtcaccaggccagcagccgcccctccctgccgccacagtaggtctgtgcggcctgtccggccccgctgcgtggcgcaggcaattctcccaaacggctccactgggcgcctggtgctgggggcggagccagtgaccacgggagggcgggacctcgcccggggcccaggacccctgaacacaagtcctccgagctggaggctactccagaaccacggtgccgcccaccgcctccagggccgccttgatcttctccgcctcagctttggcgacattggctttgatttcctggggcagggactccaccagcttctttgcctggacgaggttgatgccttggatgtagttcttgatttccttgatcagcttcacttagtccacgggcttcgcctcggtcaggcggacggtgaaatgtgtccgttctttcgctatggggatatcttcttcccaccgcctcctgggctgctgcagcagggacagccccagacatcacaccacccatcggcacaagcccgacatcctggatcttcaacgttttcttcaggagctcgttgaggtctgagatttccaagagagtgaggctggcgatgtcctggaccagctgctgtatcttgggggggtactacttgggggcgttatccaggggtgcaccagcgagggcctcacgcctctgatggccgctgcatcctcatatgtcgcacgggacagacacatggcacctgtcgactggcaaggcggaacgcagcggcccgaagcccaaggcaaggcccccacaggg

SEQ ID NO: 177714 - DNA, 642 bp, Homo Sapiens
gttgaagatccaggatgtcgggcttgtgccgatgggtggtgtgatgtctggggctgtccctgctgcagcagcccaggaggcggtgaaagaagatatccccatagcgaaagaacggacacatttcaccgtccgcctgaccgaagcgaagcccgtggacaaagtgaagctaatcaaggaaatcaagaactacatccaaggcatcaacctcgtccaggcaaagaagctggtggagtccctgccccaggaaatcaaagccaatgtcgccaaagctgaggcggagaagatcaatggcggccctggaggcggtgggcggcaccgtggttctggagtagcctccagctcggaggacttgtgttcaggggtcctggaccccggcgaggtcccgccctcccgtggtcactggctccgcccccagcaccaggcgcccagtggagccgtctcgggagaattgcctgcgccacgcagcggggccggacaggccgcacagacctactgtggcgggagggaggggcggctgctgcctggtgacggcacccggaggcccaccaggacgcgccaccggtgaatgtgcctctggtggctgctgagaaaaatacactgtgcagctcagatacatatacagacacacataacaaaagggct

SEQ ID NO: 177715 - DNA, 1032 bp, Homo Sapiens
  misc_feature (417)..(576): n is a, c, g, or t
  misc_feature (684)..(747): n is a, c, g, or t
aagaatcccctttttgtgcaaatgcatgcggacattactggcatgcctgtggtcctgtcgcaagaggtggagtccgttcttgtgggtgctgctgttctgggtgcctgtgcctcaggggatttcgcttctgtacaggaagcaatggcaaaaatgagcaaagttgggaaagttgtgttcccgagactacaggataaaaaatactatgataagaaataccaagtattcctgaagctggttgaacaccagaaggagtatttggcgatcatgaatgatgactgaacagggcttgcaggtgctgatgccagaagcttctgtgccattgcattaaagacttctgtcatttgatccatgttcaagacccttgaggtattgtttcatcatttctgtattgtctttcaataaagaaaacaaacatgnnnnnnnnnnnnnnnnnnnnnnnnnnnnnnnnnnnnnnnnnnnnnnnnnnnnnnnnnnnnnnnnnnnnnnnnnnnnnnnnnnnnnnnnnnnnnnnnnnnnnnnnnnnnnnnnnnnnnnnnnnnnnnnnnnnnnnnnnnnnnnnnnnnnnnnnnnnnnnnnttttgcgcccccccccgccccccaaaaaaattttataaacccttttccttggggcccggggccccccaaaaagagaaaaaagacaggggccaaaacgtgtttcccacnnnnnnnnnnnnnnnnnnnnnnnnnnnnnnnnnnnnnnnnnnnnnnnnnnnnnnnnnnnnnnnnaacacacgaagggtttctggaaaaaaacccaaaaggggatttctcgggggggcttttcagtgggttttattacacagggaggcccccaaggcgggctctcatattttaataatatacgcccccgcgcccggggcaattttataagagaaatagagggtgggaaaatttaactataacacttcccccgccgaccggcgggaaccccccccacaaacaggcggagtgtatgaaaaaccctcatactccccaagggggacactcaaaccctctttgggcccctccgtg

SEQ ID NO: 177716 - DNA, 716 bp, Homo Sapiens
  misc_feature (126)..(143): n is a, c, g, or t
  misc_feature (161)..(302): n is a, c, g, or t
  misc_feature (309)..(324): n is a, c, g, or t
  misc_feature (363)..(486): n is a, c, g, or t
  misc_feature (613)..(637): n is a, c, g, or t
gcagaattaactataacaatcactggctaccgaagtaaactgatgtactgaattccataatacataacattcaatttttaccacttctgtttagcgaacttgtatacttattttctgttcagattnnnnnnnnnnnnnnnnnnctcagatatcctatacgnnnnnnnnnnnnnnnnnnnnnnnnnnnnnnnnnnnnnnnnnnnnnnnnnnnnnnnnnnnnnnnnnnnnnnnnnnnnnnnnnnnnnnnnnnnnnnnnnnnnnnnnnnnnnnnnnnnnnnnnnnnnnnnnnnnnnnnnnnnnnntttgggnnnnnnnnnnnnnnnnaaaaaatttttaaaaaccttttttgggggggggcccccnnnnnnnnnnnnnnnnnnnnnnnnnnnnnnnnnnnnnnnnnnnnnnnnnnnnnnnnnnnnnnnnnnnnnnnnnnnnnnnnnnnnnnnnnnnnnnnnnnnnnnnnnnnnnnnnnnnnnnnnnnnnggggaccttgaggggcttttcggggtccctccccaagggggccccaggggggctttcttttttaaaattcccgccccccggggggaaatttttgaagagtgggggggaaattctctaaaaccttttnnnnnnnnnnnnnnnnnnnnnnnnnacacgggctggtttgaaaaaccttaaaaccccgccgcgtgggtacaacacccccttgtccgcccttggagaaaaaatat

SEQ ID NO: 177717 - DNA, 461 bp, Homo Sapiens
gggagaaataaccagctatggttccgcattcaaacagaaattcaggtgcttgcatctttcacgtattgttcaaaaatcacaagcatctgtggaaaaaactaaggtattacagacactacacggaggtcatgttcttacattcaagacactaaatacaaaccgaagcaaatgcaaaaatgtatactttaattttaaaacccaatttttgttctcaacttgaaaagggaacacttttttgtttcacaaacaagctggtcggttggaattctttttggaacagtagtcccgcgctaaacactggttcttgcctccccacccccattctctaaaataaacccagcaaactgggaggtgcatttgtgccgctgcaggcttctactgctcactccatgcagcacacttagaccaaggagaaacggcagcgatccagctcaaaagtcgatcattagaaaaaagggtgg

SEQ ID NO: 177718 - DNA, 831 bp, Homo Sapiens
caggctggtacggtccggaatgtcgggatatcgtcgacccacgcgtcgcaggtgcggcaagtctactgcgggctggtccgggctcctcaggttcagacccgaccgttatccagtcggttcgtggagaggagaggtgcactttacaggtccccgatgaaccaagagaaccctccaccatatccaggccctggtccaacggccccatacccaccttatccaccacaaccaatgggtccaggacctatggggggaccctacccacctcctcaagggtacccctaccaaggatacccacagtacggctggcagggtggacctcaggagcctcctaaaaccacagtgtatgtggtagaagaccaaagaagagatgagctaggaccatccacctgcctcacagcctgctggacggctctctgttgctgctgtctctgggacatgctcacctgaccagaccagcccagccgtcctgtcctgccagctctgctgccacctctgacaggtgtgcctgcccccatctcttctgattgctgttaacaaatgactagctttgcacagacacctctaccttcagcactatgggattctagattaatgggggttgctactgtttaattcagtgacttgatctttttaatgtccaaaatccatttcttattgatctttaaagatgtgctaaatgacttttttggccaaaggcttagttgtgaaaaatataatttttaaattatacattcaaggtagtggccaaatgtaacacatcaatcatggaatgatttctctgctaacagccgcctgtatgtttcaataaatttgtccaaagctcaaaaaagg

SEQ ID NO: 177719 - DNA, 832 bp, Homo Sapiens
ggggccgtgacgtcaggcgcccggctgctcctcacttgctctgagacaggtgcggcaagtctactgcgggctggtccgggctcctcaggttcagacccgaccgttatccagtcggttcgtggagaggagaggtgcactttacaggtccccgatgaaccaagagaaccctccaccatatccaggccctggtccaacggccccatacccaccttatccaccacaaccaatgggtccaggacctatggggggaccctacccacctcctcaagggtacccctaccaaggatacccacagtacggctggcagggtggacctcaggagcctcctaaaaccacagtgtatgtggtagaagaccaaagaagagatgagctaggaccatccacctgcctcacagcctgctggacggctctctgttgctgctgtctctgggacatgctcacctgaccagaccagcccagccgtcctgtcctgccagctctgctgccacctctgacaggtgtgcctgcccccatctcttctgattgctgttaacaaatgactagctttgcacagacacctctaccttcagcactatgggattctagattaatgggggttgctactgtttaattcagtgacttgatctttttaatgtccaaaatccatttcttattgatctttaaagatgtgctaaatgacttttttgggccaaaggcttagttgtgaaaaatataatttttaaattatacattccaaggtagtgggccaaatgtaacacctcaatcatggaaatgattctctgctaacaacccgcctgtaatgtttcaataaatttgtcccaagcccaaaaaa

SEQ ID NO: 177720 - DNA, 870 bp, Homo Sapiens
aaacaattcggccctcgagtctgcctccagcacctggggggacacggggcggctctgctgaccaggccttctctttggaacacccctcccaccacactgccctgggtctgggagcctcccacccctgctgaagtcaattccttaagggagaatctggcggtcgcagccccaactggggatggacagggagtggggaccccagggccccaatctggaagggccccctcccagccattgtgggaacaataaatactgtgtgacggtggcagggagtggggggttcggccactggctggcgggcaagggggagctggccggcctagccgccctgccctgccccgaggccaggcctgggctccccaccctcactcagtgcggaggatgatgtggatgccggaatccgtgaacacgggcccgctcatctcccccgtccgcagcgcaaacgaggcgtcttcaaatggcttctgcatctgacctctgctgaaggcacccaggtctcccctggccttggctgagctgcagtcgctgaactgtgaggccagagactcaaagtcctcctctcccgacttgatcttctggatgtagccgttgatcagctccagggcctcctccttggtccgggtgatcttctcctgccgccaggacgagggccgccgtgactggctgtgcttcaccagcaggtgcgagcagcggaccctggcaggctccccctgcccgtttttgccaccactgctgctgttgccgctgggccgctcccactggctggcgttagtgatgtggttgaagtagtacactcggcctgagctgcggctcatgcgcttctcccagccgggcggcagcttctcctcgtccgccatcttccctcctccc

SEQ ID NO: 177721 - DNA, 639 bp, Homo Sapiens
gggagagcgcggaggcagccatggtgcggttcaagcacaggtacctgctctgcgaactggtgtctgacgacccccgctgccgcctaagcctcgatgaccgagttctgagcagcctcgtacgggacacgatcgccagggtgcacggaactttcggcgcagccgcctgctccatcggcttcgcgggtacaataagaacatgtcagaagttcctaattcagtacaacaggagacagctgttgatcttgttgcagaactgcactgatgaaggagagcgggaagctatccagaagtctgtgacaagaagctgcttactagaggaggaggaggagtcaggtgaggaggctgcagaagcaatggagtgaacctctgctccccacacagctggctacactgctcaggcttcaggcccacttgttgaacagaacaatctgggtagcaacagcatcttccacagttttccaaactggatagctgccaaccagcagacattacccacttgaaatggagtactcagttaaactgaagttgcctttacctagcattccctggtgaagtgttgcaggttgtgaactctgtagacatctttattgcttggctaagagtagatttaataaatgtatctggtttccgtggcgaaaa

SEQ ID NO: 177722 - DNA, 799 bp, Homo Sapiens
gggacgccggaccggagagcgcggaggcagccatggtgcggttcaagcacaggtacctgctctgcgaactggtgtctgacgacccccgctgccgcctaagcctcgatgaccgagttctgagcagcctcgtacgggacacgatcgccagggtgcacggaactttcggcgcagccgcctgctccatcggcttcgcggttcgatatctcaatgcctatactggaatagtgctacttcgatgcagaaaagaattctatcagcttgtgtggtcagctcttcccttcatcacatacttggagaacaaaggacaccgttacccatgctttttcaacacattacatgtgggaggtacaataagaacatgtcagaaagttcctaattcagtacaacaggagacagctgttgatcttgttgcacaactgcactgatgaagggagagcgggaagctatccagaagtctgtgacaagaagctgcttactaaaggaggaagaggaatcaggtgaggaggctgcacaagcaatggagtgaaccctctgctccccacacagctgggctacacttgctcaagcttcaggcccacttgctgaacagaacaatctggggtagcaaacagcatctttccacagttttccaaacttggatgcctgcccaaccagcagaactttccccccttgaaattggagaactccgttaaacctgaagttggcctttacctaccatttccctggttgaaattgtttccaagtttgtgaactctcggaaaacattccttcatggcttgggccttaaaactacaatttt

SEQ ID NO: 177723 - DNA, 390 bp, Homo Sapiens
  misc_feature (26)..(26): n is a, c, g, or t
  misc_feature (52)..(52): n is a, c, g, or t
  misc_feature (68)..(68): n is a, c, g, or t
  misc_feature (240)..(240): n is a, c, g, or t
gacctgtaaatgtttattttttaacnctccccagtgcgaactctgctgtgantgtgtgcggggaaggngcccgcgctgagtcggcggcgggtagccactccatgcccttgtccgatggtttgcaactccgattttgcacaccgctccaccgtgccccccagcgcacacccattcacactcacgccaacactctcgctgaacacttttataattgttagccgtggccgttgggactttggngccagcgcggctgctactgcgtctggaggattgatatttatttttgcattgcgatggctgaaggcatttatttaacgatctttttacctggatatgtctgtgaggctcctgaaaggagacaaataaagtaaaaaatatttgcacaaaaaa

SEQ ID NO: 177724 - DNA, 474 bp, Homo Sapiens
  misc_feature (52)..(52): n is a, c, g, or t
  misc_feature (350)..(350): n is a, c, g, or t
  misc_feature (415)..(415): n is a, c, g, or t
  misc_feature (444)..(444): n is a, c, g, or t
  misc_feature (463)..(463): n is a, c, g, or t
ggcgaaccggtcggtgcgccctcgccgcgctcgccctggcccgggagcgccnggaagcggggccgctttcctcgtccttgtaaatgtttattttttaactcttcccagtgcgaactctgctgtgagtgtgtgcggggaggcgcgcccgctgaagtcggcggcgggtagcactccatgcccttgtccgatggtttgcaactccgattttgcacaccgctccaccgtgccccccagcgcacacccattcacactcacgccaacactctcgctgaacaattttataattgttagggcgtgggcgtttggggaatttggggcgcaggcgggcttgcttacttgcgttctggganggattgatatttatttttggcattgcgatgggttgaagggatttatttaaacgatctttttaacnggggtatgtctgtgagggttctgaaaggngaacaaataaagtcaattntattttggcac

SEQ ID NO: 177725 - DNA, 358 bp, Homo Sapiens
  misc_feature (144)..(144): n is a, c, g, or t
tgccggcctcagaggacacctggcccagcacaggcagctagaagggccggtgggcacccgggccgggaagcccccacctcaccacctgagggcccctgggaggctcctctggcctggctgggctgggtctggggccgctcaacnagctcacggggcggcagaggcaacttcagtgtccctgttagagcaacacgggtccctccgtggggggctgggtgcggccccctgccgtgtatttcctccccagggagtggggcctccccgggacggacgccaccaccctgcttacgctcacagggccccaaggtgtccgagtgtgttgggtctgaacgcgaaataaagaaatcctctcagcccg

SEQ ID NO: 177726 - DNA, 470 bp, Homo Sapiens
  misc_feature (68)..(68): n is a, c, g, or t
gatatttaaggtagcttcagctagcttttaggaaaatcactttgtctaactcagaattatttttaaanaagaaatctggtcttgttagaaaaccaaaattttattttgtgctcatttaagtttcaaacttactattttgacagttattttgataacaatgacactagaaaacttgactccatttcatcattgtttctgcatgaatatcatacaaatcagttagtttttaggtcaagggcttactatttctgggtcttttgctactaagttcacattagaattagtgccagaattttaggaacttcagagatcgtgtattgagatttcttaaataatgcttcagatattattgctttattgcttttttgtattggttaaaactgtacatttaaaattgctatgttactattttctacaattaatagtttgtctattttaaaataaattagttgttaagagtcgagcaacgg

SEQ ID NO: 177727 - DNA, 525 bp, Homo Sapiens
ggcaggaatttaattaggtcatatttggtgatgagacttatggagtgtgcctctctctcccaactgctgcttaaaatgcaaggacaagcaattagaagccatcctaaggtgcttacctcacacgccacccatgaggcttgtggccacagtggcacttgggtgtggctcctctgttatttgtcctcatgtgagaaagcagatcatctccaaatcttgccatttgtatacttttggtggagacttggatgtcatatcttctttgttttgggttttcttccctagcttattttgtggcttttaaagaagtggattgtattgtgagatcctgtgattcctggtggccagtatcctggattcctctaagatcttgcctctttcctccgcatgaaagcagcacacattgtgttaacttatgtctcttgttaaatgagcttaatgtctttgtgttttgtccaaaactgtattgaaaaaatattgtttaatgcaaatgaaggaatgcaataaagagtaaatatacttgaaaaa

SEQ ID NO: 177728 - DNA, 517 bp, Homo Sapiens
  misc_feature (137)..(145): n is a, c, g, or t
ggattaccggcatttcctgcagatcaccctgtgcgtgtgcgagctgtatggctgctggatgaccttcctcccagagtggctcaccagaagccccaacctcaacaccagcaactggctgtactgttggctttacctgnnnnnnnnnaacggtgtgtgggttctgatcccaggactgctactgtggcagtcatggctagaactcaagaaaatgcatcagaaagaaaccagttcagtgaagaagtttcagtgaactttcaaaaccataaacaccattatctaacttcatgaaccagaatgaatcaaatctttttgtttggccaaaatgtaatacattccagtctacactttgtttttgtattgttgctcctgaacaacctgtttcaaattggttttaaggcgaccagttttcgttgtattgttgttcaattaaatggtgatatagggaaaagagaacaaatttgaatttgtaataataaaatgtttaattattaaaaaacatgaagacaccccaaaaacc

SEQ ID NO: 177729 - DNA, 478 bp, Homo Sapiens
ctgtgccgtctatccagaccagacttcggtagatgcctttgttagatctatcacatgtaaacgagcttgtatctccttccctgtgccacgagagagattggctttttattccagtctaggcagagacagaagaatgttgaataagagcacgattagagtcctgtctggttatctgttgcccaagaaaagaactctgctgtccaggcactgcttggcttactatcccagcaaagactgcagttttgtggacttttgaccaccttgggctggcactcttagcacacctgagacagatttaagcctccctaagagactgaagagaggaacaggtgtcagatactcataggcactgagatctacaaatgggaagcttgtgagtggcccatctttgttggcctacgaactttggtttgatgccagtcaggtgccacatgagaacctttgctgagatgcaaataaagtaagagaatgttttcct

SEQ ID NO: 177730 - DNA, 748 bp, Homo Sapiens
  misc_feature (565)..(576): n is a, c, g, or t
ggtaacttaaggtatcttgctacagtagacagaattggtaatagcaacttttaaaattgtcattagttctgcaatattagctgaaatgtagtacagaaaagaatgtacatttagacatttgggttcagttgcttgtagtctgtaaatttaaaacagcttaatttggtacaggttacacatatggccatttatgtaaagtccctctaagactacatactttttgtttaaaacaaaattggaatttgttttcccttcttggaagggaacattgatatttaacagagtttttagagattgtcatctcatatatataaaatggacacgtggctataaaacaccatataagagatgagtagtgcgttttattttatatgccaatctactttgtttaaaaaaggtctgaatcaggacttgtgaaaacctgtagtgaaataccttaagctgttaactaactgtaaggcgtggaataggagttgctcagtggattggttctatgttgtggactacttaagtctgcatttgttactgcggctaataaacaatattaaaaacccccttctttctnnnnnnnnnnnntataacttcttgttcgggcgccctcggcccctcaagaagattttctaagaccatttcttttggcccccgcggggccccctaaggtaaagtggaacttggccccttagctggttttccttaggaaaaatctcgggctcctggaacaagtaggcttgggaattcttcccctaat

SEQ ID NO: 177731 - DNA, 539 bp, Homo Sapiens
gggattcttcagggaagcccagttaagacaaacagctctctatactcaatccttactttgctgagaagatacaggcctgcccactcgctcccacctgctcttcatgaggagtcctttattcctgcatgtttcctgttctttgggacctttaggagctaacctccacagatgctgatagtctgtagagtcaggaataccatgtaacatgttgaagtagactaaagattagttctttggcaatagcccagtctggacttactatgtacttttgaaaataaaactgcttatttgtaaactctgtaattaggaccttttgctatttgagttatattcctttctaacttcaaacgtctgcattcatgtataatagccattttatgcacagatgaggtgattcccacacttcttttcgcagatgtttcattatctggatgagtgtattacataataaatttgaataatggtagtcttccaaatgacaaaaagcaagctagttgatttgtcaattttgagtttaaatgttttgactgcttatcagc

SEQ ID NO: 177732 - DNA, 209 bp, Homo Sapiens
ctgtgttcatctacaaattgataagagtgaaagtcataatcctacaggaggattaccctatttatttcacaaaccctatttctaccggattttcatacaaggaatacaggcatgtgtttcacctcattaatttattttttcacttagttttgatgatattcacatatattatcaagtgtgcaaacattaaattcttgtgtacaaaactc

SEQ ID NO: 177733 - DNA, 848 bp, Homo Sapiens
  misc_feature (747)..(747): n is a, c, g, or t
ggccagaccattcctgtctttgccttcctgggagccatggtggtcctggccttctttgtggtacaaatcaacaaggccaagagcaggccgaagcggaggaagcccagggtgaagcgcccgcagctcatgcagcaggttcacccgccaaagaccccttcggtgtgaccggcagcctggctgaccgtgagggccagagagagccttcacggacggcgctggtgggtgagccgagctgtggtggcggctggtttaaaagggatccagtttccagctgcaggtttgttagagtctgttctacatgggcctgccctcctgtgatgggcagaggctcctggtacatcgagaagattcctgtggatcccgtcaggagggacttagtggctctgccgccagtgagacttcccgccggcagctgtgcgcaccaaagactcgggagaactggaaaggctgtctggggtcttctgactgcaggggaaggatgtactttccaaacaaatgatacaaccctgaccaagctaaaagacgcttgttaaaggctattttctatatttattgttgggaaaagtcactttaaagacttgtgctatttggaagcaaagctattttttttgtcagtggaatgcagtttttttactattccatcatgaggaacaacatagattccatgatctttttaatgacagtacagactgagatttgaaggaaacatgcacaaatctgtaaaacatagaccttcgctttattttntgtaagtatcacctgccaccatgttttgtaatttgaggtcttgatttcaccattgtcggggaagaaaattttcaataaatatgtattacccgtctgaagct

SEQ ID NO: 177734 - DNA, 478 bp, Homo Sapiens
  misc_feature (433)..(433): n is a, c, g, or t
accaccagcttcctcagcgagcagggcccagggctctgggcctgaagcaagagccagcccggctcccagtgtctgcccggctcccagtgtctgcccagccctctcccagacaggagcaggctgccaccccttctacctcaccactgcccctcgaagaattttgcaaatggccccttgccccattttaaacaggaacaggtggctggtttgaaaccccaggtatcccccttccctgctatgggaaaggccaaactgctgggtggggacaaaaactgcaggggaaagggaagcagccgtgctgtcaacatcatccggcaccctctggggtaggagaacagccattccacatgtgttccctctatccgtcctgcttcccgggcagctggtggtgctgggaatggggtgccccagccttggtgaggacagtgttggngcagcccaggggcccagtaaagtgcatttgacattgaaaaaaatt

SEQ ID NO: 177735 - DNA, 533 bp, Homo Sapiens
atctccatctggtgacagtgggatgggtggggttcgtgtttagagtatgacactaggattcagattggtgaaagtttttagtaccaagaaaacagggatgaggctcttggattaaaaggtaacttcattcactgattagctatgacatgagggttcaggcccctaaaataattgtaaaactttttttctgggcccttatgtacccacctaaaaccatctttaaaatgctagtggctgatatgggtgtgggggatgctaaccacagggcctgagaagtcttgctttatgggctcaagaatgccatgcgctggcagtacatgtgcacaaagcagaatctcagagggtctcctgcagccctctgctcctcccggccgctgcacagcaacaccacagaacaagcagcaccccacagtgggtgccttccagaaatatagtccaagctttctctgtggaaaaagacaaaactcattagtagacatgtttccctattgctttcataggcaccagtcagaataaagaatcataattcacac

SEQ ID NO: 177736 - DNA, 525 bp, Homo Sapiens
caccatgctccagaagataagacattgagggttacattcagaggacaggacaatgggcggcagattctgggacacagaggatgagctgaggaggttgcagagcagaaggaacacagactgccccctggccaggaggagaatggggaagacccgtatgcaggctccacggatgagaacacggacagtgaggaacaccaggagcctcctgatctgccagtccctgagctcccagatttcttccagggcaagcacttctttctttacggggagttcccctggggacgagcggcggaaactcatccgatacgtcacagccttcaatggggagctcgaggactatatgagtgaccgggttcagtttgtgatcacagcacaggaatgggatcccagctttgaggaggccctgatggacaacccctccctggcattcgttcgtccccgatggatctacagttgcaatgagaagcagaagttacttcctcaccagctctatggggtggtccgcaggcctgaagtatgtgctat

SEQ ID NO: 177737 - DNA, 345 bp, Homo Sapiens
gggagagcctgctgtgtgccaggctttgtgctgagtgctgtacatgtattagttcctttactgctgaccacattgtacccatttcacagagaaggagcagagaaattaagtggcttgctcaaggtcatgcagttagtaagtggcagaacagggacttgaaccaagccctctgctctgaagaccgcgtcctgaatttcttcactagagcttcctcatcaggttacccagaagtgggtcccatccaccatccaggtgtgcttggatgttagttctccaccctcgaggtgtacgctgtgaaaagtttgggagcactgctttataataaaatgaaatatattctacttc

SEQ ID NO: 177738 - DNA, 445 bp, Homo Sapiens
  misc_feature (356)..(356): n is a, c, g, or t
  misc_feature (408)..(408): n is a, c, g, or t
agattcggaacgagagcaaggcagagatcctgaaaagatagggctattgtcccctgcctccttggtcactgcctcttgctgcacgggctcctgagccacccccttgggcacaacctgccactgccacagtagctcaaccaagcagttgtgctgagaatggcacctggttgagagcctgctgtgtgccaggctttgtgctgagtgctgtacgtgtattagttcctttactgctgaccacattgtacccatttcacagagaaggagcagagaaattaagtggcttgctcaaggtcatgcagttagtaagtggcagaacagggacttgaaccaagccctctgcttttgaagaccgcgtnctggaattttcttacactaggagctttcctcatcagggtttacccagaagtngggtcccatccaccatcccgggtgttgctttgggtgt

SEQ ID NO: 177739 - DNA, 502 bp, Homo Sapiens
cccaccttcttcttcgacccggaaaattttgacccaacccgatggctgagcaaagacaagaacatcacctacttccggaacttgggctttggctggggtgtgcggcagtgtctgggacggcggatcgctgagctagagatgaccatcttcctcatcaatatgctggagaacttcagagttgaaatccaacacctcagcgatgtgggcaccacattcaacctcattctgatgcctgaaaagcccatctccttcaccttctggccctttaaccaggaagcaacccagcagtgatcagagaggatggcctgcagccacatgggaggaaggcccaggggtggggcccatggggtctctgcatcttcagtcgtctgtcccaagtcctgctcctttctgcccagcctgctcagcaggttgaatgggttctcagtggtcaccttcctcagctcagctgggccactcctcttcacccaccccatggagacaataaacagctgaaccatga

SEQ ID NO: 177740 - DNA, 301 bp, Homo Sapiens
gaactgaggaccaagaagtgcaaggatcagtagcccaggaccagagtggccgcctggaggtccccatctcacgtgtgatgccaccccgtcacccctcccctcctgagcagggatccaagaatgtgccaagagtcccgccagcctcagccaggtgggcctgtatatagggtccatgtgcaatagggagggacgtcttctattttttgctgccccctccccgcccactgtctggggcagggggagaaggtattttcgagataaagcacaggcaccacaaataaaagtcgtgaagttgccactc

SEQ ID NO: 177741 - DNA, 492 bp, Homo Sapiens
tgatactaccttttaaatattttagataaagcacagcaccacagcaccacatctaagcattagtgatgggtagctgatgtcagcttcatgtggattttaagcactctagaaacaatgaagcttcttggcatattttaaggagctccctaaaatgtgttacctataaaattgtaactcagcaagtagaagaccatttgaaaagtcaggtacaaatttcctcaagtggcataaaaatgtagtcagttttctcttttaccagtttttatttccactccaattatttagaactttatttgtacatgtgcagaagaataaggcagctgagaatcttgtttcccccaagagagttttacaggctgagtgttgcaaatgtgttctttgtcctgttatatgtatatcaggaatacaaggatgtgaaataaaactgtaaatttgcataactggatgtacttagataatgtgaaataaacattaaagacaaggtctattttt

SEQ ID NO: 177742 - DNA, 516 bp, Homo Sapiens
tcagctagttttgtgtgctcatttcttctgggagcattaaaagtggtgatctgttacagtcactattcaactgggcacgtgttgtgattggtcagtcactgagccagggatacagtccggacttgcttagtacctaagccctaatgctggtggggtttcaagacatggttcagcatcatcttttaaacaaaggcccagaggcccagagcccccatcaagtcattttgatgtaaatagtgaactttgttagagccctcacttctatcaatcagctgtcctgtccctgccagcaccctggagcaccaactaccactccctggaaagaacccttccctgcagttttttaaggacaaaactgcccactcctcattaagtttgctgcctggatacacttttccacaaaggaaaactggcatatcctgccttccgagtagtatgggtctctgtgtgagaaaccaggagatattttcatcttgttcggaaatacttgtatgtattttggtgtcaataaatatc

SEQ ID NO: 177743 - DNA, 404 bp, Homo Sapiens
aaggggagaaacagatctctcaggatgataaaaattagcactttacagactttcaagtagacctaaacttttaaacaaaagtactcaaggcttttaaggaagcagctctgtgattagctactgaccaagaccctcctatcactggtgtctaatccctatgttacagatgaagacataggtttagtactttgcccatatagttaaattagtgacagagataggccataagcccacatttgtcttcagtcaaagctttcactcctgtccctgttccactcctgtatacctgaggtccccaacataaactttagatcaggcttagtggtcagcattcctagtacttggaaagttggtattttttacaacagatatatgtaaacatataaaaatttcaaaatgaatga

SEQ ID NO: 177744 - DNA, 459 bp, Homo Sapiens; identical to SEQ ID NO: 7608

SEQ ID NO: 177745 - DNA, 436 bp, Homo Sapiens
  misc_feature (80)..(88): n is a, c, g, or t
  misc_feature (90)..(335): n is a, c, g, or t
aaaaggcccaaggggggccttgggggtttcccccacggggggctccggaatcccgggatatcgtcgacccacgcgtcgcnnnnnnnnnannnnnnnnnnnnnnnnnnnnnnnnnnnnnnnnnnnnnnnnnnnnnnnnnnnnnnnnnnnnnnnnnnnnnnnnnnnnnnnnnnnnnnnnnnnnnnnnnnnnnnnnnnnnnnnnnnnnnnnnnnnnnnnnnnnnnnnnnnnnnnnnnnnnnnnnnnnnnnnnnnnnnnnnnnnnnnnnnnnnnnnnnnnnnnnnnnnnnnnnnnnnnnnnnnnnnnnnnnnnnnnnnnnnnnnnnnnnnnnnnnnnnngaagaaggtggatctccaaccaggccagagaagattctcacagaaggttttgaactctaagaaataactgggtttggtaataaatggcttctggtcagatt

SEQ ID NO: 177746 - DNA, 1450 bp, Homo Sapiens; identical to SEQ ID NO: 70183
  misc_feature (1437)..(1437): n is a, c, g, or t

SEQ ID NO: 177747 - DNA, 854 bp, Homo Sapiens
ggggccttccgtcggtcggtccttgcttcctgcttcgcctccgcgcctcgcgctatgggacagagcccccgatccgccagcaccacctgaggatccagaaaccgccccagcgatggaagaggatcaggagctggagaggaaagcaatagaagaactgcttaaggaggcaaaacgtgggaaaactagagctgaaacaatgggacccatgggttggatgaagtgtcctcttgctagcaccaataaaagatttctaattaacacaattaaaaacacattgccctctcataaagagcaagaccatgaacaaaaagagggcgataaggaaccagcgaagagccaggcccagaaagaagaaaacccgaagaaacacagaagccatccttacaagcacagcttccgcgctcgaggttccgccagttactccccgccacgaaagcggagcagccaggacaagtacgaaaagcggtccaaccggcggtgaggctggaaccagggccagccagccctgcgggcctccgtgctccttcggggtgcggtgtgcggagaaggcctgagctggcagggcaaacacctgagagtgactttgacattaggtcctttgttgtttttaaagaggctgctggccacaggcaaaaaaaatgacctagcaactcttgaggaaacaagtgcaaaggaggatgtcttggcaagtttaagctacttctgcagtgtagtagacttacatattgttgtttatcttgtttggaagtgtgtttcaaaataaacatgtctagaatttaaagttttcagagattgttaaaactggttccaattttttggtcatttctcagaaaaataaaatacttataaatccc

SEQ ID NO: 177748 - DNA, 453 bp, Homo Sapiens
ggggctcctgccgacgtgttcttccggtggcggagcggcggattagccttcgcggggcaaaatggagctcgaggccatgagcagatataccagcccagtgaacccagctgtcttcccccatctgaccgtggtgcttttggccattggcatgttcttcaccgcctggttcttcgtttacgaggtcacctctaccaagtacactcgtgatatctataaagagctcctcatctccttagtggcctcactcttcatgggctttggagtcctcttcctgctgctctgggttggcatctacgtgtgagcacccaagggtaacaaccagatggcttcactgaaacctgcttttgtaaattacttttttttactgttgctggaagtgtcccacctgctgctcataataaatgcagatgtatagccgccccacaaaatggccccccacaaccctcccctgtt

SEQ ID NO: 177749 - DNA, 760 bp, Homo Sapiens
gggtaatttaggagttctttggggcttctgtgacttgggaaatgcttacattcaggccttaatgttgcattagctagcatgttttccctctgatgtatatagtcactgttgtataaactaatctttgcttgttttctactctgtgatctttccatatcatatttcattaatgatcagttagtgtcaaggagtcaaaacagattaaaattaatttcatgtgtatatggtggaaatttgtggctagtgtgatttttgtttgtttccttttaagtactgttgatcagttgtgacacttactggttaaacttacgttgctaaagatttctctataataagccacacattatatttagactatattaagggaccttggttttcttctagatagcagctgtcccaaagaaaatatttcttctttgtctgttaagatttagctattatctgccagttgttaagaggttttggttccaaactcaaccagcaatgtgtgagagctgaacttaagatagctgttgtactttttgctttccatctgttactgtccttcattcttggctccctactatctataaacagctgctgtgaagaagaaaagttgaataagagttggcttaaattttaaaaaagaaaaggaaaattgaggtttttaggattttcatggtaacaagctctggtataagctaaggctggcaagttcagatactaaaaatattatttgatcatatcctgggatcctttttgaaaaagttaaggactatta

SEQ ID NO: 177750 - DNA, 791 bp, Homo Sapiens
  misc_feature (105)..(196): n is a, c, g, or t
aagcaattctccccacctcagcctccaaagtagctgggattacaggcatgcgcaaccatgcccagctaatttttgtaattttagtagagatgggttttcgcttannnnnnnnnnnnnnnnnnnnnnnnnnnnnnnnnnnnnnnnnnnnnnnnnnnnnnnnnnnnnnnnnnnnnnnnnnnnnnnnnnnnnnnnnnnntaagcaccaagcccggccgaccttcttctatttttccattctcctttccaaagccatggccatgcgctcctgtgtacaggtgcataaacacatcagtgtgccatccctcacatgcatgtcgttccccacccctccttcccagggcttctcttggctccagcgttcctctgggaccctctgcagatacagcctgtgctggacccccagccagggtgagggctcattctgctctgtcttccccactgcctcagtttcccccaaaagctgctttcacgtccttctagtagggggcctcccatgggggcaaggatcccctttaggattcaatctttcctctttgggcagttttggctttgagtcccccagggatcagggtgagaatgaagaagagctcagtgagcggaatgacagcagctgggtgggtggtgtggggagaggctgaggggaaggcagcccccccaggggggcctaaccgtggaatcactgcaatttcctctgagatcccgacttggacaaccaggacagggattgaccattcccttcccattccactcggactgtgtccaagcgggggctgtccactgcgggggctgcc

SEQ ID NO: 177751 - DNA, 199 bp, Homo Sapiens
aatatatttgtcattgactcacaaaacaaaatgtgctttcaaaatcttttgaaacaatttttctgaaatttatttctaaaagtcagagacaaaactttagaagtgacacatttatactaagcatacatgcgtgagcaaaaaaaataagcacagaatacaaaaatgaaatagtaaaattttaatacagtattctgaatcc

SEQ ID NO: 177752 - DNA, 367 bp, Homo Sapiens
  misc_feature (91)..(99): n is a, c, g, or t
  misc_feature (337)..(337): n is a, c, g, or t
gggggcccctcttggcctctgtcccagctctctgcagccagacggaaaggcggctgcttgcctctccatcctccgaaaaacccctgaggannnnnnnnnatcctcttctaggatgaggggaagctggagccccaactttgatcctccattggagtggcccaaatctttccatctagggcaagtcctgaaaggcccaaggccccctccccagtctagccttggcctccagcctggagaagggctaacatcagctcattgtcaaggccacccccaccccagaacagaaccgtgtctctgataaaggttttgaagtgaataaagctttaacacctacatnccaccaccaacccaaccaaaaaatcctgtc

SEQ ID NO: 177753 - DNA, 421 bp, Homo Sapiens
  misc_feature (20)..(20): n is a, c, g, or t
  misc_feature (113)..(113): n is a, c, g, or t
cccccccaagaaaaaaccanggtgaagccccagacagccagcaaaaccttttgtgaaaaacccaattgtgttcatcctagatagtaagtaaccccctatttttacctgttaantttttaaaagagaatttttccctgtggaaactccctgttagtacgtcctaggggagaaagcctgtggaatatggtggttattgatggcgttgcctttgtttcatctttgagtttgccctttgtgggatctagtgggataatgagcactgacagaactcttaacagcgtgctgtatttttgacattgaaaatgttaatgacttgatttgtacataactctgtaactaggtgaaagtagatcacagctgacatttacaaaatgtttttgtaccttagaatttctgcattaaataaaatgttttgttttaa

SEQ ID NO: 177754 - DNA, 402 bp, Homo Sapiens
atctactaaaaatccaaaaattagccaggcatgtggtgtgcacctgttgtcaccaaaaaagaagaatgtatatgccgtcatggcatggaccatatttatctttttcgaagttcctagcaataggaccaggtgcggcattggcactcaatgaatatttgttgaagaaataaatgtgtttggtacttgttcacatttatatgacaaacacctgcatttatagctctcatctttttgtcagttttccagctttgcggtagagctgttattaaactgttttgtctggttgttatagcaacccagaggcttccagaactacaggttgtttctgatgtgcatattctaccagacaaccaaacacacacagtgtttttaatcatgaaataaagatgttactataaatca

SEQ ID NO: 177755 - DNA, 240 bp, Homo Sapiens
ccacgcgtccgatttgatttttacctattttcttaatatctcttataatgataaagtcaatgtatctgtttcattcacaatataatttaagattctttatcatatgatatttattagattagaaaatacttatatagagcttactctgtgctaggcactaagtgccttggaaaatattaacttattcattataagagctgtgattcaccataagaaaagcttagatgttgtgattcttag

SEQ ID NO: 177756 - DNA, 264 bp, Homo Sapiens
ccacgcgtccgccacattcctgatgtggaaatgttctcccaaacaggggtgattccatgccaccttcatgatttttactctgtccttgtattatccatattgtgtactcattttttaaaagtctgacataaaaataacttaaaaatgaaaactttatatcatgtccttaaaaggaggtatcacttgccataaatactaggtaactataaaagttatatgtaatggaactaaataaagttgtggactctagccagatactggtcc

SEQ ID NO: 177757 - DNA, 437 bp, Homo Sapiens
agacccctggaacctgtggatatgtcaggtttcatggccatgggaattgacattatacaaggaattcaggttgctgatcaactgatgttaaaataaggaatatattcaggtttatctgatggttccagtgtaataatcagggtccgtaaaagtggaagaagcaggcagagaagagatcagaaggagatgtttgaaggaggtcagagagatgcaacgtgagaaggactcagctactgctgcctttgacaatggaggaaggggccatgaacttaaggaacgcagcagtctctgaaagctggaaaaggagaggaaatgggttttcccctggagcctccagaaaagagcacagccctgccaatactttgacttaagtccattgagacctgtgtcagacttctgacttctagaactatcagagaataaatgtgtattaagcc

SEQ ID NO: 177758 - DNA, 420 bp, Homo Sapiens
gggaattgtctgatatttaagagaaacattcaggacctcatcattatgtgggggctttgttctccacagggtcaggtaagagatggccttcttggctgccacaatcagaaatcacgcaggcattttgggtaggcggcctccagttttcctttgagtcgcgaacgctgtgcgtttgtcagaatgaagtatacaagtcaatgtttttccccctttttatataataattatataacttatgcatttatacactacgagttgatctcggccagccaaagacacacgacaaaagagacaatcgatataatgtggccttgaattttaactctgtatgcttaatgtttacaatatgaagttattagttcttagaatgcagaatgtatgtaataaaataagcttggcctagcatggcaaatcagattt

SEQ ID NO: 177759 - DNA, 1159 bp, Homo Sapiens
  misc_feature (115)..(115): n is a, c, g, or t
  misc_feature (138)..(138): n is a, c, g, or t
actccacaatcccctgccaaaagccaagcctggcacacatcttcctcagggaccatcttcaaggacgcacccagaacctctagctggccgacacttcaatctggcccctctaggncgacgaagagttcagtcccaatnggcctccactaggggaggcatgaaggagcgccccacagtcatgctgtttccctttaggaatctcggctcaccaacccaggtcatatctaagcctgagagcaaggaagaacatgcgatatacacagcagacctagccatgggcacaagagcagcctccactgggaagtctaagagtccatgccagaccctggggggaagggctctgaaggagaacccagttgacttgcctgccacagagcaaaaggagtgagtggaacagagttgcttcttactaggagcacattctttgcctgccttcccttcatcctatcctctttgcttgctctcacctcaggaattgcttggattgctacatggaccccctgagactatcattattacctcctagggccaggaagccaggtaggtagtctgagtcaggattggatcaacagcctcctctcttggggactctcaagagcctgtgttcatctggaagtagtagtttgattctggtttccctcctacagtgtgtcctccgtctctgtgcagctccgtcattaccataggggacttggttttagactctgatgaggaagaaaatggtcagggggaaggaaaggtgagtgggaaggaccagaaagctgggaaaggggatgggtagaaccaagactgagaaatcccacatgccttcagaattcagagggttcagggaatggtttcggatagtaggctctccctgctcccttctctacaggaatctctggaaaactatcagaagacaaagtttgacaccttgatacccactctctgtgaatacctacccccttctggccacggtgccatacctgtttcttcctgtgactgtagagacagttctagacctttgtgatagaactaaaatgctctctgtactctagtctcctgcctcctcagctctgcaagtagtttagtaggaatgaagtggaagtccaggcttggattgcctaactacactgctaaaaatatttgtaatccttaataattaaactttggatttgtt

SEQ ID NO: 177760 - DNA, 433 bp, Homo Sapiens
tgtgcgtgtaaaacaacctgtccccaagcccttgttccacacaagctctgtgtaagggactaggagcattgtagttaatggcaattctttgacctcaacctgtgttgaggggagaaactcatctgctccccctcacctgggcacctggggagtgggacagagtctgggtttatttattttcctccccaccaggtggggagggggtttgggggcttgcaagtatgttttagcatgtgtttggttctggcgcccctttttaccccccttgagctgagatggaacctctttctcgcccgagctgggggccatgagctcaagacccccagaaaccctcctatcacctcccctccttgcctcctgtgtaatcatttcttgggccctcctgaaacttacacacaaaacgttaagtgatgaacattaaatagcaaagaaa

SEQ ID NO: 177761 - DNA, 626 bp, Homo Sapiens
  misc_feature (289)..(473): n is a, c, g, or t
  misc_feature (482)..(496): n is a, c, g, or t
ccctccagagctgggaaacctaccacaagatctaaagttctggctgtccattaacctccaactatggtctttatttcttgtggtaatatgatgtgcctttccttgcctaaatcccttcctggtgtgtatcaacattatttaatgtcttctaattcagtcatttttttataagtatgtctataaacattgaactttaaaaaacttatttatttattccactactgtagcaattgacagattaaaaaaatgtaacttcataatttcttaccataacctcaatgtctttttnnnnnnnnnnnnnnnnnnnnnnnnnnnnnnnnnnnnnnnnnnnnnnnnnnnnnnnnnnnnnnnnnnnnnnnnnnnnnnnnnnnnnnnnnnnnnnnnnnnnnnnnnnnnnnnnnnnnnnnnnnnnnnnnnnnnnnnnnnnnnnnnnnnnnnnnnnnnnnnnnnnnnnnnnnnnnnnnnnnnnnnnnggagggcgnnnnnnnnnnnnnnnaaaaaaaatttttaaaacaaccttttgggtggggcggcggcccccccaagaaagaaagaaagaatgggttttttatttgtttccccaaaaaaaaccccgagaacaaaaatgtgggttcttttccctccac

SEQ ID NO: 177762 - DNA, 422 bp, Homo Sapiens
  misc_feature (380)..(380): n is a, c, g, or t
cctcttcacataccagggttattaaaagtgtgctttctttttacattatattacagttacaaggtaaaattcctcaactgctatttatttattccagcccagtactataaagaacgtttcaccataatgaccctccagagctgggaaacctaccacaagatctaaagttctggctgtccattaacctccaactatggtctttatttcttgtggtaatatgatgtgcctttccttgcctaaatcccttcctgggtgtttatcaacattatttaatgtcttctaattcagtcatttttttataagtatgtctatgaaacattggaactttaaaaaaacttatttatttattccactaactgtaggcaattggacaggtttanaaaaatgttaacctccataatttctataccataacctcaatg

SEQ ID NO: 177763 - DNA, 637 bp, Homo Sapiens
  misc_feature (134)..(159): n is a, c, g, or t
  misc_feature (161)..(162): n is a, c, g, or t
  misc_feature (166)..(242): n is a, c, g, or t
gggggaatccaaaccctttttcttggccagggtttccttggaaacagttatgcccagtttccctttccttctggggccgcgcgcccaaagaaaggtttagaaaaattttttaaggccgagggcggcccccaaannnnnnnnnnnnnnnnnnnnnnnnnntnntccnnnnnnnnnnnnnnnnnnnnnnnnnnnnnnnnnnnnnnnnnnnnnnnnnnnnnnnnnnnnnnnnnnnnnnnnnnnnnacccgcacagaactagtttattcagtagtatggggcatgaaaaaacaacaacaacaaaacgctaccatatttacagcaacaaccaaactgtacaatctgatggttagtatcaagttagcatccagcatctttgtattttttttaaatcaagtcatcagtagtaaaaaccagttaaatttttaaccctttgcaggaattgctgaggggagaagacagggggagaatccacggcagaaaagccagaggctggcctcacaaatgagaaacaggagcctttctttcctgcccacagcctctttttctagccacctgctccagaaggaaagtcagtgacaagtctggaatacatgcttggagtaaatggtgactcagatgaaaagcagtcggcaaaaccc

SEQ ID NO: 177764 - DNA, 464 bp, Homo Sapiens
  misc_feature (14)..(14): n is a, c, g, or t
  misc_feature (75)..(75): n is a, c, g, or t
  misc_feature (112)..(125): n is a, c, g, or t
  misc_feature (219)..(219): n is a, c, g, or t
  misc_feature (287)..(287): n is a, c, g, or t
  misc_feature (327)..(327): n is a, c, g, or t
  misc_feature (329)..(329): n is a, c, g, or t
  misc_feature (350)..(350): n is a, c, g, or t
  misc_feature (371)..(371): n is a, c, g, or t
  misc_feature (377)..(377): n is a, c, g, or t
  misc_feature (400)..(400): n is a, c, g, or t
  misc_feature (416)..(416): n is a, c, g, or t
  misc_feature (441)..(441): n is a, c, g, or t
catacaattgaagntttatgtaagttacttacttatttttaaactgcacaatgctgaagccagtctaaaaaagantcaaacacaccactgcaagttaattcaatgagttacnnnnnnnnnnnnnnaaacagatttgtacagcaaaaagttcccagatcacagtctctaccatacagtcacctgtccagtgtgcaggaagccacaggggccctgggcagnaggggccaagagcagaagctgcactgcgagtttacttctacctacaggtgacatgtgggctggaaaantcttgagttccctttgttctccagtgtatcttgtacaaantnttacatttgtttaaacacatntttacagagtttgcacaattnggaaantgggttacaatttacaaccgggnttgggcagggttaccngttcccctccccttggaccaggtcngttgtggtggcctttcctttttt

SEQ ID NO: 177765 - DNA, 489 bp, Homo Sapiens
cacaaaggcagtgtagactttaattcaggttgacaggtgggaagagaactaggatttgcttccaagggtgtccagatgagaagaccatccttcagggaggggcagagagggcaagagggtgcgggtggcctggtggcagaatagggcgaggagcaggggcgtacacaacagtgcaaaattgccagggcttctgccagggttcagcagcaggtccagagcctgctgggccagacattttgacaacagcaacagcttggacctcaccaggaaatccagtcctagaaccaccccatgaggccaccagaaattaaaccaggccaccagatattcatccaggggcctggccataccccaatgctttcttaagcccttggttcaaaacaaccccattggaagcaagacaaggattgcaggaaaggtcaaattttgttgtggctgaaaagctttaagttccgtgctcgatattaagggtgaaagttcctccgaagg

SEQ ID NO: 177766 - DNA, 1035 bp, Homo Sapiens
gcctgggtggaaattcggacgaggccacatgtgccgagagatggcccagagccagttcccctccagctgcaagggcatggtgtccccagagctctgagtctgtcactctccctctgctactgctgctgatctgaatatggaaaccccatggttcccttccccattcggactgggtgtgtacaagcaaggacccagatgcatcagacacagcccccaagatgttcctttctactcggccagctcgggagccagacacagcactcacagcccaggccgtgatccaccctccccaagtccaccagggccagcggcccctcacctctctggtcactggtgagaccttccacaactttcctccagacctgccagcagatgtgcccaccaggggcattaggtatccgccggagcctggccatagggtagtctcgggagccgcgctgagatcttttgccacctgcattttagaagaacatggtctctgtctcctcggcccagccagctgtcccggcaaggcctgctgagggcagttttcaacctcatgaaggaaacacagtcctgccaaggagggggagtggcgcccatggggacaggcctcagtccttagaagccctctgggtagctgtgcccacccagccttcatggctgcaggtacaaggacctttgcttccatagagaaaacgcacagctcagaaagggggccacatgggcagaaacccaaaggaaggacaaaccacgaccaccgtggccatctgcagaatccctgggaagagaaggaaagcagggtggaccggggggaaaaaccatcatggagagaaggaccacagcatcaagagaacggaacacgccacaaccagccaggcagccctgtgtggtgccttaaattttttaagagcaagaaggggtagaaaaggatcaagcctgggccctggcctggagatggcctagccccctgaagacatgcaccttctgggttttgaaaatgactctgttctgtggggggcaccccaaaacctaaaaaaagggcaagtgggctgg

SEQ ID NO: 177767 - DNA, 1078 bp, Homo Sapiens
  misc_feature (900)..(900): n is a, c, g, or t
  misc_feature (1013)..(1013): n is a, c, g, or t
ggcctgggtggcgaattcggcacgaggcccgcctggaggcacaggccatgaggggctctcaggaggtgctgctgatgtggcttctggtgttggcagtgggcggcacagagcacgcctaccggcccggccgtagggtgtgtgctgtccgggctcacggggaccctgtctccgagtcgttcgtgcagcgtgtgtaccagcccttcctcaccacctgcgacgggcaccgggcctgcagcacctaccgaaccatctataggaccgcctaccgccgcagccctgggctggcccctgccaggcctcgctacgcgtgctgccccggctggaagaggaccagcgggcttcctggggcctgtggagcagcaatatgccagccgccatgccggaacggagggagctgtgtccagcctggccgctgccgctgccctgcaggatggcggggtgacacttgccagtcagatgtggatgaatgcagtgctaggaggggcggctgtccccagcgctgcgtcaacaccgccggcagttactggtgccagtgttgggaggggcacagcctgtctgcagacggtacactctgtgtgcccaagggagggccccccagggtggcccccaacccgacaggagtggacagtgcaatgaaggaagaagtgcagaggctgcagtccagggtggacctgctggaggagaagctgcagctggtgctggccccactgcacagcctggcctcgcaggcactggagcatgggctcccggaccccggcagcctcctggtgcactccttccagcagctcggccgcatcgactccctgagcgagcagatttccttcctggaggagcagctggggtcctgctccctgcagaaagactcctggactggccaggcgccccaggcgggactgaagnccctcacggccgccctgcagcccccatgcccctggcccaaaaatggctgggggggtccaaaaaccaccctcgggggtggcctgaagcgggaaaggccaggccggggggccttnctccctctttccctcctccccctttcttcggggaagcttccccaaaaccctgtggaagtgggaag

SEQ ID NO: 177768 - DNA, 1007 bp, Homo Sapiens
acggagcgaggcctgggtggcgaattcggcacgaggctcctgcctgtcctttgcactagacgacctcgatgaccaggccgacgcggccgaggccaggcgcgccggaaacctgggcaagaaccccgacgtggacaccagcttcctgccagaccgcgaccgcgaggaggaggagaaccggctccgagaggagctgcgccaagagtgggaggcgcagcgcgagaaagtgaaggacgaggagatggaggtcaccttcagctactgggacggctcgggccaccggcgcacggtgcgggtgcgcaagggcaacacggtgcagcagttcctgaagaaggcgctgcaggggctgcgcaaggacttcctggagctgcgctccgccggcgtggagcagctcatgttcatcaaggaggacctcatcctgccgcactaccacaccttctacgacttcatcatcgccagggcgaggggcaagagcgggccgctcttcagcttcgatgtgcacgatgacgtgcgcctgctcagcgacgccaccatggagaaggacgagtcgcacgcgggcaaggtggtgctgcgcagctggtacgagaagaacaagcacatcttccccgccagccgctgggaggcctatgaccccgagaagaagtgggacaagtacaccatccgctaacacccgcctgccagagcggaaaccgggggtggggggagacactcatttctaggccccatcaccagtcacttgatttcgtgaccttgatttcttcccccaaatttaattaaagacagaggggttctcatgaattcacatttgggttgggcctatttgcctgaaggtttatgcctttggggttgcgcttgggttggggccctttttcctggaatatatttttaaggggtgcgccaccccctgggaattttgccttgggattgcgctcccgagctgtattggaaaccaggtatctgggcccccctggtcggaacgaaatttagaatagggagggccattttttatc

SEQ ID NO: 177769 - DNA, 1104 bp, Homo Sapiens
  misc_feature (34)..(34): n is a, c, g, or t
  misc_feature (901)..(902): n is a, c, g, or t
  misc_feature (925)..(928): n is a, c, g, or t
  misc_feature (933)..(933): n is a, c, g, or t
  misc_feature (936)..(952): n is a, c, g, or t
  misc_feature (993)..(993): n is a, c, g, or t
ggcctgggtggcgaattcggcacgagggtccctnttggggagcagtccctctgcaccccagagtgaggaggacgcaggggtcagaggtggctacagggcaggcagaggaggcacctgtagggggtggtgggctggtggcccaggagaagtcaggaagggagcccagctggtgacaagagagcccagaggtgcctggggctgagtgtgagagcccggaagatttcagccatgcctcacagctccgacagcagtgactccagcttcagccgctctcctccccctggcaaacaggactcatctgatgatgtgagaagagttcagaggagggagaaaaatcgtattgccgcccagaagagccgacagaggcagacacagaaggccgacaccctgcacctggagagcgaagacctggagaaacagaacgcggctctacgcaaggagatcaagcagctcacagaggaactgaagtacttcacgtcggtgctgaacagccacgagcccctgtgctcggtgctggccgccagcacgccctcgccccccgaggtggtgtacagcgcccacgcattccaccaacctcatgtcagctccccgcgcttccagccctgagcttccgatgcggggagagcagagcctccggaggggcacacagactgtggcagagctgcgcccatcccgcagaggcccccggtcacctggagacccggagacagaggcctgggacaaggagtgaacacgggaactgtcaccactggaaaggcgtgaagcctcccaacagttgccgcaacgttttcaaggggcgtgtgctggaccccaccactgtgggttgcaggcccaatgcagaagagtattaagaaagatgctcaagtcccatggcacagaagcaaggcgggcagggaacggnntatttttctaaataaatgctttnnnnggaanaannnnnnnnnnnnnnnnnactcgagggcatcctattccgggtggcgggagaaagaagtntattaaaatggcccagtggccataagctggtttcctgaacccaccttttcttgttaacaaagggggaaaatctgcccggccctcccccaaaagggagagccccattaattt

SEQ ID NO: 177770 - DNA, 1513 bp, Homo Sapiens
gcctgggtggcgaattcggcacgaggctgaggtgctgcggctgcaggaggaactggccgcctcggaccgtgctcggcggcaggcccagcaggaccgggatgagatggcagatgaggtggccaatggtaaccttagcaaggcagccattctggaggagaagcgtcagctggaggggcgcctggggcagttggaggaagagctggaggaggagcagagcaactcagagctgctcaatgaccgctaccgcaagctgctcctgcaggtagagtcactgaccacagagctgtcagctgagcgcagtttctcagccaaggcagagagcgggcggcagcagctggaacggcagatccaggagctacggggacgcctgggtgaggaggatgctggggcccgtgcccgccacaagatgaccattgctgcccttgagtctaagttggcccaggctgaggagcagctagagcaagagaccagagagcgcatcctctctggaaagctggtgcgcagagctgagaagcggcttaaagaggtggtgctccaggtggaggaggagcggagggtggctgaccagctccgggaccagctggagaagggaaaccttcgagtcaagcagctgaagcggcagctggaggaggccgaggaggaggcatcccgggctcaggccggccgccggaggctgcagcgtgagctggaagatgtcacagagtcggccgagtccatgaaccgtgaagtgaccacactgaggaaccggcttcgacgcggccccctcaccttcaccacccgcacggtgcgccaggtcttccgactagaggagggcgtggcatccgacgaggaggcagaggaagcacagcctgggtctgggccatccccgggagcctgaggggtccccaccagcccacccccagtgaccctaccctgtccccagatgcactaacagatggggcccagcccccttcctccctggaccccacgggcccctgtcccaggaaccccgccctctgacttcttgccctttggaaatggcgcagccctctggcatttatcacccccacctgggtcccctgcaaccctcccatcaaaggatgacccctaaacacagaggaaccgggggcaggcagggcagggcaaggaactgggagctaaccttggcttggttggggggaacggggctaccatttgggccaagcctggggtttccattcaacctccactggttcctccctttccttccccctccgttatttgattcctaataaaacccttaatggaaaggggagtggaaaaagggctcccctcccaccaattcttacgctcaggtgccacccccatttccccccctgcgcttctcctcatcctcttatatcccaatacgccccttcccttcatgcttttcccctgccccctatttccaacatcttttcttttgtggccctccttttgaagggggcctctcccccggtggcatcttttttttaagaagaaattttggcgtctccccacctttccctccaccgtg

SEQ ID NO: 177771 - DNA, 1033 bp, Homo Sapiens
  misc_feature (831)..(831): n is a, c, g, or t
  misc_feature (840)..(840): n is a, c, g, or t
aaggagcgaggcctgggtggcgaattcggcacgaggccctgcagtaacattgtccaggtagaaggggccatgtcaggcagttgtgatgttctttcagccactgagcctcctctggggccgccctgccaggtggggccctatgctgcgtgctctttctccctggggactatagtattctctgatctcactcctccatggtgccactgaaggcacctaatagagcaatttctctcccgaaaagtgcaggagatgaacaggcttcttgagagacatggtcagtgttcacttttatttttattcacattattgtcagcggctgctcccatggtgtggcaaacctccaccgcaaccccacaaggtactggtattttttccgttttgccgacagacatattcaggtcctagaggcagagtcatccattcagatcacaaagctatgaagcaggtgcggtgggttttgtggggatcagatgaaataatccagtaccttgagacagtgtctggctcctggtaggtgctcagtgatagcgaacctctattcttatcatcatggttattgaaaaatgttttaaatgactggacgtgaaaaggatgtgtaagggacacagtttctgatatcccttgaattggtacccctgacccactgccgagtgttgtcagagtgggaaccaaagtcttcctggcagtgtttgttctgttcaccacaccggggacaaattaaagttagcctgtctctgagatggctctgtgaagtgccaccagtgggtattaaaaaccaccttcctcgagggtcagtgtgactccattggtcatttaaaatgcaatggacancgcccgggncaaaagggggctcatgccctgtaatcccaaagaccattttggggaaggcccaaggcaggcaaaatcactttaaaggtcacgaagtccaaagactaaccctgggcaaaaattgggaaaaaaccccataacctactaaaaagtacaaaaaatattccccgggcatgggtgggggcattgcccctttagggtgggg

SEQ ID NO: 177772 - DNA, 970 bp, Homo Sapiens
  misc_feature (256)..(256): n is a, c, g, or t
  misc_feature (631)..(633): n is a, c, g, or t
  misc_feature (639)..(679): n is a, c, g, or t
  misc_feature (894)..(903): n is a, c, g, or t
gagcgaggcctgggtggcgaattcggcacgaggggactctggccggacggccaatgggctgcctgggccccgaagccaagccctttccagctcctccgatgaaggcagcccctgccctggcatgggggggccactagatgcacctgggagccccctggcttgcactgaaccctcgaggacctgggcacggggtcggatggacacacagccagaccgtaaaccctcacgtatccccaagcctcggggcccccgccgncccctccggacccgcagagctggggacatggcatgccctgcactcagtcaccccgagggctgagccagattccctggatgtgatggacccagctcagctgtccccagaccccatcccttctccttttcctttgtggccttaacccttctgcatcagggagccccctctgcctcttgagtaccagacctcatgggaccagaccccttgggaccacatggcacaatgggacctctgttgtacattccggttgggggatgagcgttgctatttaattactaatattattgaatgccttagaggaagtggggcgagcccggtgttctgaagacctgtggcccagcagagcctctgacagtaaagttttgctcccagccnnnaaaaannnnnnnnnnnnnnnnnnnnnnnnnnnnnnnnnnnnnnnnnctcaaggcatctatgtcgggggcgggaaaaaaagtaatgaaatggcacctggcccatagttgtttcctgacccagctttcttgtacaaaggggaaaaatctgccgggcccccctaaagggagccgtattaatttccaaaagcccgggttaacctgcaattaatggaaccgggtggcgaaacccggggaatttaaccccccctaatggagggggcnnnnnnnnnnggggacccaaaggaatctttctgggaaaaccttttttttccggcgaataattcggcggcttgcaaac

SEQ ID NO: 177773 - DNA, 748 bp, Homo Sapiens
  misc_feature (43)..(43): n is a, c, g, or t
  misc_feature (53)..(53): n is a, c, g, or t
  misc_feature (55)..(55): n is a, c, g, or t
  misc_feature (74)..(74): n is a, c, g, or t
  misc_feature (92)..(92): n is a, c, g, or t
  misc_feature (121)..(121): n is a, c, g, or t
  misc_feature (641)..(641): n is a, c, g, or t
  misc_feature (654)..(654): n is a, c, g, or t
  misc_feature (707)..(707): n is a, c, g, or t
  misc_feature (726)..(726): n is a, c, g, or t
aaaggaggggcccgagaccccacccagccccagtccagagttnggcaccacancngccagcatcttccgcacanccctgcagctcgacccgnagcaggagcagcagctgttccggcgcctngaagaggagttcctggccaatgcccgggcccttgcaggctgttgctagcgtgacccccactggaaccagcccctgacccagctcgggcccccgaccctccagctcctgactctgcctattgttcctccagttcctcctcttcgtccctcagcgtcctgggtggcaaatgtggccaacctggggactctggccggacgaaattggggctgcctgggccccgaagccaagccctttccagctcctccgatgaaggcagcccctgccctggcatgggggggccactagatgcacctgggagccccctggcttgcactgaaccctcgaggacctgggcacggggtcggatggacacacagccagaccgtaaaccctcacgtatccccacgcctcggggcccccgccgccccttccggacccgcagagctggggacatgggcatgccctggcactcagttcaccccgagggcttgagccagatttcctgggatgttgatgggaccagcttcagctgttccccagnaccccattccttnttcctttttcctttgtgggcttaaacctttttgcatcagggagccccttttgntttttgagtaacagacttnatgggaaccagaacctttggaa

SEQ ID NO: 177774 - DNA, 929 bp, Homo Sapiens
  misc_feature (720)..(741): n is a, c, g, or t
aaggagcgaggcctgggtggcgaattcggcacgaggggaagagcaagcaaaaagggaagaaggactcctaggccctttctagtaaatccttcagcaacaaggctggcttggtgccctccaagcatctaatggcttattaaattatcccacaagtgggttttaggctccttttttgagccaaaatggaagctgggaatctggtgccataactaatgagaaactcctttaatagcccacaatcagtgttctgttctagctggctactgcttcactggattgagaatctatctatctccttgcacacatgggcacacacaatctccaccatccagggaggtcctgaagtcaaatctctatctatacaagtgatacaattcatagggggctggctcctcccagaacctgtctggaggctcagaaacgggggcagtgacagtggagtcagctgctcttgggtgccagcagagccattcagtacaacccccaggctcacagcagtggcttctaggaaactgggagtttagatcagctttacagatacatcgatcagaggctaaaatgaaacctcagcctaaaactcataggactgactgcctgggaggagggttaggtctgcttcttccacttatacttagtctctgtgctccgagaggtcaaatttttgcttctagaatttccttggggtctttcagagggtgggggaacaaacccctatgcacnnnnnnnnnnnnnnnnnnnnnngagatggagttttctccttgtcaacccgggctggaattgcaatggtggcaatcttgggctcacttgcaaccttcacccttcctgggtttcaaacgaatttctggcttcgaaccttctcaagtaaccttgggaattaccaggcacccggcccacccagggccggggggtaaaattttgggaattttttt

SEQ ID NO: 177775 - DNA, 1048 bp, Homo Sapiens
  misc_feature (199)..(230): n is a, c, g, or t
  misc_feature (800)..(801): n is a, c, g, or t
gggggaggtggtgagagtcgcacgcgcagcggggaaggtgtgagtcgtgaacggcccgggtctccgccatggcctctctactcgccaaggacgcctacctgcagagcctggccaagaagatctgctcccattcggccccggaacagcaggcgcgcacgcgggctggcaaaactcaaggctcagaaactgcagggccccnnnnnnnnnnnnnnnnnnnnnnnnnnnnnnnnttccggaagcgagaagagaaggctgctgagcacaaggccaagtccttgggggagaaatctccagcagcctctggggccaggaggcctgaggcagccaaagaggaagcagcttgggcttccagctcagcagggaaccctgcagatggcctggccactgagcctgagtctgtctttgctctggatgttctgcgacagcgactgcatgagaagatccaggaggcccggggccagggcagtgccaaggagctgtcccctgccgccttggagaaaaggcggcggagaaagcaggaacgggaccggaagaagaggaagcgaaaggagctgcgggcgaaagagaaggccaggaaggctgaggaggccacggaggcccaggaggtggtggaggcaaccccagagggggcctgcacggagccgcgggagccgcccgggctgatcttcaataaggtggaggtgagcgaagacgagccggccagcaaggcgcagcgcagaaaagagaagaggcagagggtgaaggggaacctcacgccgctgaccgggaggaactaccggcagctgctggagcgcctgcanngcacgcagaaccggctggacgagctgcgcggccaggatgaggggaaggcgcaggagctggaaggcaagatgaagtggaccaacctccctctacaaagcgggaggggcgtgaaagatccgtggaccaccgaacgccttgctgccaggaaggcccctgaaaacggcaagggagaaaacgccaagggcgccaaacggccaaccccccggttggggaaaaaaaccgcaacgggcccggcggttggggtggg

SEQ ID NO: 177776 - DNA, 990 bp, Homo Sapiens
ggagcgaggcctgggtggcgaattcggcacgaggcgctggggtaagaagcctgctgagggatgcccaagaagttccagggtgagaacaccaagtcggcagcggcccgggcacggagggcagaggccaaggcggccgctgatgccaagaagcagaaggagctggaggatgcctactggaaggacgacgacaaacacgtcatgaggaaggagcagcgcaaggaggagaaggagaagcggcgcctcgaccagctggaacgtaagaaggagacgcagcgcctactggaggaggaggactccaagctcaagggcggcaaggcgccgcgggtggccacgtccagcaaggtcacccgggcccagatcgaggacacgctgcgccgagaccatcagctcagggaggccccggacacagccgagaaagccaagagccatctggaggtgccgctggaggagaacgtgaaccgccgcgtgctggaggagggcagcgtggaggcgcgcaccatcgaggacgccattgcagtgctcagcgtggcggaggaggcggccgaccggcacccagaaagacgcatgcgggcagccttcacagcctttgaggaagcccagctgccgcggctcaaacaagagaaccccaacatgcggctgtcgcagctgaaacagctgctcaagaaggagtggctccgctctcctgacaaccccatgaaccagcgggccgtgcccttcaatgcccccaagtgagcccagaacttggggagccagttcacccacgggtggtccaggtcacgactctgcacgcccttaggccaggtcagctgcgagggtcacagagcgttccgggggccaaggcgccggggccccggggccatgctcttatcaccagccacccgtccctcccgccagagggtcccctgccccgcaggtgaaaccccattccccttcccattccccgggggggtgggttgttaaagcctccagggcttgagtgccccaataaag

SEQ ID NO: 177777 - DNA, 1190 bp, Homo Sapiens
  misc_feature (65)..(125): n is a, c, g, or t
  misc_feature (805)..(805): n is a, c, g, or t
  misc_feature (844)..(890): n is a, c, g, or t
  misc_feature (930)..(930): n is a, c, g, or t
gggcgaggcctgggtggcgaattcggcacgagggccgctgtccccgcgccctgcgcccggtggcnnnnnnnnnnnnnnnnnnnnnnnnnnnnnnnnnnnnnnnnnnnnnnnnnnnnnnnnnnnnngtggagccatcttccctcacctcctaccggcaccctagcttgctcccggcccatgcggcccccgcgggctcccggccccggcttcagaactcagccctgcacctgagcgcggggcccggcggggcgtggcggcggcgatggggaaactgcagtcgaagcacgccgccgccgcccgcaagcggagagagagcccggaaggggacagcttcgtggcgtccgcgtacgcgagcggccgcaaaggcgcggaggaagcggagcggcgcgcgcgggacaagcaggatctgcccaatggggaccccaaggatgggcctttccgggaggaccagtgtcccctacaggtggcactccccgctgagaaagctgagggccgcgagcacgcgggacgactcctcggcgcagatgacggacagacggcagcaaaccgcgagggcccgcgaggaccggggcgggcagcgcctcaacattgacgcactcccgtgccgatgtcctcggtgggaggaggacgacccgccaggagtgggacgtctcacgcctccagtgactttgaccacgtgcggggaagggtcacccggggagggacattgtccagccctccatgccacgccatcctatggagggcgggggaagtcccccggtccaccccccctgcctcagggcagacagcaaggacccctcccgcnttgcaacgttaaccggggccgacgcctagaggccctgcnnnnnnnnnnnnnnnnnnnnnnnnnnnnnnnnnnnnnnnnnnnnnnngccggataagccgcgcgcgttgttgggggggttggagagntgcgaacttggccgggaaggagcctgatgggggggcggggagcggtggaagggagtcgtggtgaccgcggcggcgggcattgtggggcgatgggtgtcctgaggtaggcgcaggggagcgggggtgtcagagcgaaggcgcgatacccggcgggtagcccgtggtcggaacgtggttgagagagtacttgggcggggtgccaggagagggactcgatgccccgcgaccgcggggacgaggggcggcgggcgcgatggcgc

SEQ ID NO: 177778 - DNA, 862 bp, Homo Sapiens
  misc_feature (65)..(125): n is a, c, g, or t
aggacgcgaggcctgggtggcgatttcccacgagggccgctgtccccgcgccctgcgcccggtgnnnnnnnnnnnnnnnnnnnnnnnnnnnnnnnnnnnnnnnnnnnnnnnnnnnnnnnnnnnnngcgtggagccatcttccctcacctcctaccggcaccctagcttgctcccggcccatgcggcccccgcgggctcccggccccggcttcagaactcagccctgcacctgagcgcggggcccggcggggcgtggcggcggcgatggggaaactgcagtcgaagcacgccgccgccgcccgcaagcggagagagagcccggaaggggacagcttcgtggcgtccgcgtacgcgagcggccgcaaaggcgcggaggaagcggagcggcgcgcgcgggacaagcaggagctgcccaatggggaccccaaggaggggcctttccgggaggaccagtgtcccctacaggtggcactccccgctgagaaagctgagggccgcgagcactcgggacaactcctcagcgcagatgacggagagagggcagcaaaccgcgagggcccgcgaggaccgggcgggcagcgcctcaacattgacgcactccaggggcgatgtctcgctggaggaggaccaccgcccggagtggacgctcccgctctatgaatttgacactgcgggaaggccaccagggaggacatgtccagcctcatgcacaccatcttatgagggccgtggatgcccccggccaggcactcccccggccagcaaccaagaccctcccgtggggaaagttaatcgcccagcccctgagcccttccaccaaaaggaaaggagggcccctccctgctggcccagggaccgggaa

SEQ ID NO: 177779 - DNA, 1292 bp, Homo Sapiens
  misc_feature (879)..(879): n is a, c, g, or t
  misc_feature (1098)..(1098): n is a, c, g, or t
  misc_feature (1113)..(1113): n is a, c, g, or t
ggcctgggtggcgaattcggcacgaggctggaatgagggtagctgcggcgactgcggcggctggagcggggccggccatggcggtgtggacgcgggccaccaaagcggggctggtggagctgctcctgagggagcgctgggtccgagtggtggccgagctgagcggggagagcctgagcctgacgggcgacgccgccgcggccgagctggagcccgctctgggacccgcggccgccgccttcaacggcctcccaaacggcggcggcgcgggcgactcgctgcccgggagcccaagccgcggcctggggcccccgagcccgccggcgccgcctcggggccccgcgggtgaggcgggcgcgtcgccgcccgtgcgccgggtgcgggtggtgaattaagaggcgggcggtctgggcatcagcatcaagggcggccgcgagaaccggatgccgatcctcatctccttgatctcccccgggctggctgcccaccagagccgggccctgcggccggccgacgccatccctgtcggtgaacggcacccacctgcgccaggccacccacgaccaggccgtgcaggcgctgaagcgcgcgggcaaggaggtgctgctggaagtcaagttcgtccgtaaaagtaccccctatatcggggaagccctcattaggtatcagatcctgccgtggggaaaggggcaacccccaccaggtcacccagggcttttccgaggggcagtcggaggcacctcgtggggtttcgaccccaaaggccccgcggggagagctgcccagccccaaagcgtccccgggacaacgaatacccattctccccctactcgcggggacgagtgctggctctgtctttcgctcgggacgttagacaanatcgcctgcaggagaccgcttgggccgctgcgccctcctccccgtcccctcaccctgctttttcggcggtaccgtaacccttcttcacctcttcctctccgcagggagctgccgccgccgggttcctgcaccgctcggcctgatctccccttaccggcacagtcaccagtcgctacgcgcgttctgccctcctgtgtcacctacgtatcttctcggggntgagtgatgagatcntcgtgacagacgaagctactactagatgatgttttgggcgggagctcccccacgccgcaaacactaccgacaaaatttcatacctttccctgcttctggatgttgagcgaccgcgtgggagcggacgcggctcccgcccgaccgccccctcttatctatgcgatccacatacagacgag

SEQ ID NO: 177780 - DNA, 454 bp, Homo Sapiens
  misc_feature (106)..(106): n is a, c, g, or t
  misc_feature (119)..(119): n is a, c, g, or t
  misc_feature (235)..(235): n is a, c, g, or t
  misc_feature (378)..(378): n is a, c, g, or t
  misc_feature (429)..(429): n is a, c, g, or t
cgggctggctgccgaccagagccgggcgctgcggctgggcgacgcattcctgtcggtgaacggcaccgacctgcgccaggccacccacgaccaggccgtgcaggcnctgaagcgtcggngcaaggaggtgctgctggaggtcaagttcatccgagaagtaacaccatatatcaagaagccatcattagtatcagacctgccgtgggaaggtgcagccccccagtcaccaagctgntagtggcagtgaggactctggttcgccaaaacaccagaacagcaccaaggacaggaagatcatccctcttcaaaatgtgctttgctggctaggaaaccttaaggcatgccgggttcttgggaaaacaggatttgattaggagnttacatttcttcctggattaggcagggaacacgtttgattccctaacgttngcaaaggtttacaggcccacagcac

SEQ ID NO: 177781 - DNA, 1124 bp, Homo Sapiens
  misc_feature (892)..(892): n is a, c, g, or t
ggcctgggtggcgaattcggcacgaggcagtggcggccgcgttctgtggttttccgctattcccccagacccgcaccttctcggcctctttgcggagaatcgtgaccaagatgtggaacagtggattcgaaagctatggcagctcctcatacgggggagccggcggctacacgcagtccccggggggctttggatcgcccgcaccttctcaagccgaaaagaaatcaagagcccgagcccagcacattgtgccctgtactatatctcagctgctttctgccactttggttgatgaagtgttcagaattgggaatgttgagatttcacaggtcactattgtggggatcatcagacatgcagagaaggctccaaccaacattgtttacaaaatagatgacatgacagctgcacccatggacgttcgccagtgggttgacacagatgacaccagcagtgaaaacactgtggttcctccagaaacatatgtgaaagtggcaggccacctgagatcttttcagaacaaaaagagcctggtagcctttaagatcatgcccctggaggatatgaatgagttcaccacacatattctggaagtgatcaatgcacacatggtactaagcaaagccaacagccagccctcagcagggagagcacctatcagcaatcccaggaatgagtgaagcagggaaactttggtggggaataggcttcatgccagcaaatgggctcactgtgggccaaaaaccaggtgttgaatttgattaaggcttgtcccagacctgaaggggttgacttttcaggatctcaagaacccgcctgaaacacatgtctggaatcctccatcaagcaaagctgtgggattttctgaacaaatgagggggccatctattcnaactgtgggatgatgaaccatttaaaatccacacgatggccggaataactgggatctaaactggggaaaccggagaaaattttaccagctgggacctaatttttccaattcctggtgcctcccagctcctgcatatggccggggcccaggggggcttttctagggaagaaaagggttttcatcttatcaaaagggcctccctcctggacttcccctttttgaaaacttaacg

SEQ ID NO: 177782 - DNA, 974 bp, Homo Sapiens
  misc_feature (617)..(617): n is a, c, g, or t
  misc_feature (654)..(654): n is a, c, g, or t
gagcgaggcctgggtggcgaattcggcacgaggggtgcaggagtcctggggcatggcgggggcggggcagggggaggcgcgcacagaacaggctggggcatccctcgccctggctctttgagcccggaccagacagagatgtgataatggatcatcatgtttctaccatcaagcctcgaagatccaaaaccaaaatgtcattcaccgcttggaacgccggcgggatcagttcagggcaaggcatctttctttggggggtaccatatggtgacgaccgaggggattgctgggtttgagaatacatcaaatgaccttttggaactctttgaaaacttcggggacctttttcggaaggctaccccgcacaggaaaattcagttttcccggctcaacttctaaacaaaaattttgcaaggcgaaaacccagccccggttcaaaaaaactattattaaaggcccaaatatggagggcacacagaggcagtacgccggctgctgggtcagctccccatcagtgctcagtcttacagcggtagcccctatctggatttgtctctcttcagttatgatgacaagtgggtatctgtcatggagcggcccaagacttgtggagatcnacccatcaggttctatgcccgggactcgggcctgctncagtttgagattccagcggggttattgggcccgcccatcaaccacacagtgcgacgccttggtgccttcacctttccccttttgagcccttcgctatttctgtgcaaaggactaatgctggatatggtgtccaacttccatatggggacactggctgcaacgtaggtggcctccaccagaacccagaattatctgggtctttccaagaactttggcccctcccctttatcttcaatgggaactccaaaagcaaaagactccccgaacttactaagcttctggttagattcccagccctggtcttatcccttcaaataggg

SEQ ID NO: 177783 - DNA, 974 bp, Homo Sapiens
  misc_feature (474)..(474): n is a, c, g, or t
tgggtggcgaattcggcacgaggggacgggctgctctatgccatcggtggcgaatgcctgtacagcatggagtgctacgacccgcgaacagacgcctggaccccacgcgcgccactccccgcaggcaccttccctgtggcccacgaggctgtggcctgccgtggggacatctacgtcaccgggggtcacctcttctaccgcctgctcaggtacagccccgtgaaggatgcttgggacgagtgcccatacagtgccagccaccggcgttccagcgacatcgttgcactggggggcttcctgtaccgcttcacctgctgcggggcgtgggcgccgccgtgatgcgctacaacacagtgaccggctcctggagcagggctgcctccctgcccctgcccgcccccgccccactgcgctgcaccaccctgggcaacaccatttactgcctcaacccccaggtcactgccaccttcacgngtctctggggggactgcccagttccaggccaaggagctgcagccctttcccttggggagcaccggggtcctcagtccattcatcctgactctgcccctgaggaccggctgcaaactcactctgagtgccagggaaaaaccaaagctgctttccctggtttccagggaaaacctccctgggatgggcctgaaaaggccgggctcaagggaagggcctgggaaaccggaacttcccggcccttgggtccggaaaaatttttccccttcggcttttaaagggtgtccaattattttgaagcccagactccctcagccctctttttgccccttacttcaaaacccagattgtttccctgactccattccggaccctacttacagaccctctcactttgctgaacccccccctggctggggggaactccctattcccctaaaccaggggaacttatggcgcttcccacaaaaaagggaatttgggttccccgggaagctttggtg

SEQ ID NO: 177784 - DNA, 944 bp, Homo Sapiens
  misc_feature (67)..(67): n is a, c, g, or t
ggctcagccagagctcccagggagccaaagtcccttgtctgtggagacggcatcagtcccctggctnctggggaatagggagtcccacaagaccagggggggtgtcagcaagctgagaggggtctgtaagtaggtacggaatttgagtcaggaaaacagtctgggtgtggagtgaggggcagaaagaggctgagggagtctgggcttcaaaataatcgacaacctttaaagcagaaggggaaagttgtccagaaacaagagcaggaagttccgatcccagccccttccctgagccccggcctctcaggcccatcccaggagggtctccctggagagcagcgaagcagctttggttctctgcctgccactcagagtgaggtctgcagccggtcctcagggggcagagtcaggatgaatggactgaggaccccggtgctccccaaggggaagggctgcagctccttggcctggaactgggcagtccccccagagaccgtgaaggtggcagtgacctgggggttgaggcagtaaatggtgttgcccagggtggtgcagcgcagtggggcgggggcgggcaggggcagggaggcagccctgctccaggagccggtcactgtgttgtagcgcatcacggcggcgcccacgccccgcagcaggtcgaagcggtacaggaagccccccagtgcaacgatgtcgctggaacgccggtggctggcactgtatgggcactcgtcccaagcatccttcacggggctgtacctgagcaggcggtagaagaggtgacccccggtgacgtagatgtccccacggcaggccacagcctcgtgggccacagggaaggtgcctgcggggagtggcgcgcgtggggtccaggcgtctgttcgcgggtcgtagcactccatgctgtacaggcattcgccaccgatggcatagagcagcccgtc

SEQ ID NO: 177785 - DNA, 920 bp, Homo Sapiens
tgcgggacttctaagggaggaattagggggaatttccccccccgaaccaagggggggttgtccacccaaagttagaggagggtgttttgtaaaggtaggttgcggaaattgagagccaggaaaacacgttctggggtgttgaatggaggggccagaaatgaggctagggggagtttgggcttccaaattaatcgaccaccctttaaagcagagggggaagttttccagaaacaagagcaggaagttccgatcccagccccttccttgagccccggcctctcaggcccatcccaggagggtctccctggagagcagcgaagcagctttggttctctgcctgccactcagagtgaggtctgcagccggtcctcagggggcagagtcaggatgaatggactgaggaccccggtgctccccaaggggaagggctgcagctccttggcctggaactgggcagtccccccagagaccgtgaaggtggcagtgacctgggggttgaggcagtaaatggtgttgcccagggtggtgcagcgcagtggggcgggggcgggcaggggcagggaggcagccctgctccaggagccggtcactgtgttgtagcgcatcacggcggcgcccacgccccgcagcaggtcgaagcggtacaggaagccccccagtgcaacgatgtcgctggaacgccggtggctggcactgtatgggcactcgtcccaagcatccttcacggggctgtacctgagcaggcggtagaagaggtgacccccggtgacgtagatgtccccacggcaggccacagcctcgtgggccacagggaaggtgcctgcggggagtggcgcgcgtggggtccaggcgtctgttcgcgggtcgtagcactccatgctgtacaggcattcgccaccgatggcatagagcagcccgtc

SEQ ID NO: 177786 - DNA, 1052 bp, Homo Sapiens
ggcctgggtggcgaattcggcacgagggtcttgttgacatgtagcccagtcattcactctttaaggattattagtgtttcattgatactaaattacccagcttaatcaacagaatggtttaagtagtaccaggaagtaggacaagtaatttcaaaaatataaaggtgtttgctactcagatgaggccgcccctgaccttctggccagagagacattgctgccagccagctctgccttcccatcatctcctttcaggaccgtcccacaccttttacttgctcagtgctgtctgaagatgcagttgctgtttgcaaacaacaggaacaccagttaaactaattaggaaaagagggagatttccaggcctgggtaactatatactgtgaccattggaggtagagacaggtctcaacagttggaaccaggaactctgctgtcaggttgtgagttttgtttctcttccagcttttcactgtgtgggggtcttttctcttatgtcagctctttctatcacatggcagctgacctctcacgctccactctgcagcttggacacccagtagaccctgaatttcactctctctaaaaggttctgagggctcatcctgggccaggggccctcctgtgcactgttagctatggccacgggagcctccagagctgcctggtagcttcaggttgacctgcttatcaggcctacgatccttctgatttaagtacagctggaaagtattatctaattaagttcatgatagtgcttttgggagaacttgtcaaattacagccaatgaaaaaataaaggacctagcataccgtgggagaacccattaaaattttgagaagaaaccaccagtattatgtccaacttacttcaaaggcgtaagtttttgggaaatttgatgcaggtaaagattaccctggtttttatgattgtttcccttgaaaatccaaatgggggggacctggtccaatggggcccctaattaatcctgggccggaaaactggtccccaaaaccaaaaatttgaagttttgccccttggttccttagga

SEQ ID NO: 177787 - DNA, 1008 bp, Homo Sapiens
  misc_feature (763)..(764): n is a, c, g, or t
  misc_feature (888)..(901): n is a, c, g, or t
gcctgggtggcgaattcggcacgaggacttcgtggcacggatgctggtggagaacctgtatcgggacgggctgatgagtgactgtgtcaggatgttcatcgccacgttccactttcctcaccccaaatatgtggacctgtacaaggagcagctgatgagccagatccgggagacgcagcagctctgccaccagaccctgttcatcttcgatgaagcggagaagctgcacccagggctgctggaggtccttgggccacacttagaacgccgggcccctgagggccacagggctgagtctccatggactatctttctgtttctcagtaatctcaggggcgatataatcaatgaggtggtcctaaagttgctcaaggctggatggtcccgggaagaaattacgatggaacacctggagccccacctccaggcggagattgtggagaccatagacaatggctttggccacagccgtcttgtgaaggaaaacctgattgactacttcatccccttcctgcctttggagtaccgtcacgtgaggctgtgtgcacgggatgccttcctgagccaggagctcctgtataaagaagagacactggatgaaatagcccagatgatggtgtatgtccccaaggaggaacaactcttttcttcccagggctgcaagtctatttccccagaggattaactacttcctgtcatgaaggctagaggaagacttcctggaactgcctttcttccactaacaggaccctgggacctgtanngagcaccccgtttgggactgtgaggggtttgagggtgtggactggcatccagcagccacctaacaaacacacaactgggggtgtaaaaggcaggcccttacattagaagcccaagccaatcccnnnnnnnnnnnnnngggagggcccccccgaaatagataggaaccttggattggctggaattcaaaaaccgagcccctttccttaagatccctgtgggggccttaaaagacaccccattccc

SEQ ID NO: 177788 - DNA, 1060 bp, Homo Sapiens
  misc_feature (221)..(234): n is a, c, g, or t
  misc_feature (820)..(822): n is a, c, g, or t
  misc_feature (825)..(835): n is a, c, g, or t
  misc_feature (837)..(839): n is a, c, g, or t
  misc_feature (896)..(896): n is a, c, g, or t
ggcctgggtggcgaattcggcacgaggcttcctgtcatgaaggctagaggaagacttcctggaactgcctttcttccactaacaggaccctgggacctgtaggagcaccccgtttgggactgtgaggtgtttgagggtgtggactggcatccagcagccactaacaaacacacaactggtgtgtaaaaggcaggccttacattagaagccaagccaatccnnnnnnnnnnnnnnggaggtcccaccgagatagataggaacttggattgctgaattcaaaaacagagcccattcttaagatcacttggtgccttaaagacacgcattccaaagtggaatgtggttgaagaaagtgggccaggtggttgaagaaagccatgtgggagctcagcaaatcccaagggcttattatgacactccagatggtctccttagcatctcagctcttctgcaaggaagagcttgggtgttaggcctcagaggctgtagggtccttgggttacagagccggggagaacgaagttctgtgacccaggggtggagaatacactctaggtttgcaggctggtgggctttcaaattggtacttccagaggaaagccaagctgcttctgttgtgagcgaatcagccaagagcctgaggctgaagggaaaagtacacagaggaagatattttacaaaccaggtcagtgtaggccaagacttatggtctacagattttggcgggggaggggggaccttttcaaaagacaatagggggtcttgacatgtttgttgtatgtaaagatgataagattaaaatttttgattttcctaaaannnaannnnnnnnnnnannnaaactcgaggcatctatgtcgggtgccgaaaaaagaggtaatgaaatggcacatggnccatagcctgtttcctgacccagctttcttgtacaaaggtggtagatctgccggtcttcctataggggagccgtaattaattttcgataagcccgggtaaaccctgcattaatgaatcggctgcaataccccggggaatttaaccccgcctaatggaacggggc

SEQ ID NO: 177789 - DNA, 1161 bp, Homo Sapiens
  misc_feature (481)..(495): n is a, c, g, or t
ggggaacacctggagccccacctccaggcggagattgtggagaccatagacaatggctttggccacagccgtcttgtgaaggaaaacctgattgactacttcatccccttcctgcctttggagtaccgtcacgtgaggctgtgtgcacgggatgccttcctgagccaggagctcctgtataaagaagagacactggatgaaatagcccagatgatggtgtatgtccccaaggaggaacaactcttttcttcccagggctgcaagtctatttcccagaggattaactacttcctgtcatgaaggctacaggaagacttcctggaactgcctttcttccactaacaggaccctgggacctgtaggagcaccccgtttgggactgtgaggtgtttgagggtgtggactggcatccagcagccactaacaaacacacaactggtgtgtaaaaggcaggccttacattaaaagccaagccaatccnnnnnnnnnnnnnnnggaggtcccaccgagatagatagataggaacttggattgctgaattcaaaaacagagcccattcttaagatcacttggtgccttaaagacacgcattccaaagtggaatgtgggttgaagaaagtgggccaagtgggttgaaaaaagccatgtggggagctcaacaaatcccaagggcttattatgacactccagatggtctccttatcatctcacctcttctgcaaggaagagcttgggtgttatgcctcaaaggctgtagggtccttgggttacagagccggggagaacgaagttctgtgacccaagggtggagaatacactctaagattgcaggctggtgggctttcaaattggtacttccagaggaaagccaagctgcttctgttgtgagcgaatcagcctatagcctgacgctgaagggaaaagtacacagaggaagatattttacgaaccatgtcagtgtatgccaagacttatggtctacatattttggcggtggaggcgggaccttttctaacaccataggaggtcttgacatgattgttgtatgcttcgatgattggattaaaatttttgattttccctaggcatctaaaaacaggtgccctcaaagcagtctatgtccggggccggaggaaataggtaattaaaatggccccatgc

SEQ ID NO: 177790 - DNA, 276 bp, Homo Sapiens; identical to SEQ ID NO: 72659

SEQ ID NO: 177791 - DNA, 1097 bp, Homo Sapiens
agggagcgaggcctgggtggcgaattcggcacgaggctcagttacacaggaaccctaaagcaaatctgccaccgtgggggaactgacgctggagatgcaaggtgctggtgggtctgagctggacgtcgcggtgtgtcctctgtgcccacggtctgagctagctagcgcaccgccgagttaaagaggagaaggaaaacatgctgctctggtgcacgcctgagcgtcctccatcttccaggatggcagcaatggcgctgtgcggcctcaccaggcccacgaggagcagcagcgctcggcccggagcagcaggaaggcccctctgtggagcgcccgccgtctgctccggggtggttcagtcactgcttgttgacatcaacatggcaattgcactcatgtggactgggaccgtgcgagctgccgtgtgggttagtcgggtgccaggacaatgaaatactccagcacctgtggctgacgaatttgtttctacagaaataacagctggggacaactgcggtgatgatgtaaaaaccttcccataaaatgtaagaaaagctgatgaggctggtgacgttcagcctttgtcaataaacctgtcatgtgcggatccttccggaggctctgtcttgggggtctgccaagtggggtggaacactgggggtggggcatgggggcactcggggagaatccctccccccctcacagaaaacacagcccctcccctgccaccctggaaaactctcacaaggccagccctctgagtccggccagccggacctaacctggcattttccaggctggtcaaaaatgccgtggggggcactttctgtggcatgcttggggtgccatgacaagcttcccatggaatggtaggaaggaaggggctcagcctttggtccagcaaccctgtgcggacttaagctgccctttctagaagggctctcgggccgcgttgccagggcccaagaagctcggcggggacccaaagcgctccctggaacaaacccgggcccgggaaaagggtcccggggtcccttcctcccattaaacggggggctgggattctgggggggctggttcccccctctttttccccgcct

SEQ ID NO: 177792 - DNA, 1231 bp, Homo Sapiens
  misc_feature (38)..(38): n is a, c, g, or t
  misc_feature (118)..(118): n is a, c, g, or t
  misc_feature (120)..(120): n is a, c, g, or t
  misc_feature (1109)..(1109): n is a, c, g, or t
tctcccacctgtcaccctggccattctctgcttggatngtgtcttcctctcctcagccgagaatgacttcgtccaccggatccaggaggaactggaccgctttctgctgcagaagcantngttcaaaggttcttcttttccccccactctccagtcgcctccggtacctgatccatagaacagcagagaattttgatctcttgagcagcttctccgttggggagggctggaagaggaggacggtcatctgtcaccaggacatcagggtacccagttcggatggcctctctggcccctgccgcgctcctgcctcctgccccagcaggtaccacggtcctcggcccatctccaaccaaggagcagctgcggttccccgaggtgcccgggctggccggtggtatcgtggacgcaagcctgaccagcctttgtatgtgccccgggtgctgcgcaggcaggaagaatgggggctgacctctacctcggtgctcaagagagaggccccagctggcagggacccagaagagcctggagatgttggtgctggagaccccaactctgatcagggactccctgtgctgatgactcagggaacagaggacctaaagggcccaggacaaaggtgtgagaatgagccactgctggaccctgttggccctgagcctctggggcctgagagtcagtcagggaagggagacatggtggagatggccacacggtttgggtccaccctgcagctagacctggaaaaggggaaggagagtctgttggagaagaggctggtggcagaggaggaagaggacgaagaggaggtggaagaggatggccccagcagctgctcggaggacgattacagtgagctgctgcaggagatcacagacaacctgacgaagaaggagattcagatagagaagatccatttggacacatcctccttcgtggaggagctgcctgggagagaaggaccttgcccacgtggtagagatctatgactttgaaccagcgctccagacggaggacctgctggcaacgttttctgagtcccagagaagggggttcagattcagtggggtggatgatactcacgcactcggcatcttttcctgcctggnctcagctggcgaagcccctgacccggaagtctcggtgcttcagaacccggcccctcacacaggggaccaagcagttcaagctccaaacccttccaaaggccaaaactcccggccgcctgggg

SEQ ID NO: 177793 - DNA, 1145 bp, Homo Sapiens
  misc_feature (959)..(967): n is a, c, g, or t
ggcctgggtggcgaattcggcacgagggagtgagtggcaccagaggaccctctccatgtttagggacctcctgggcctcaggagcgtggcgcccgcccctgggcggactccccccatccgcgggcgcgaatggtccgggccgcgtccgcagtgctgctggctgctccctggttgctgggtgcaaagtgctgggttctgggtttctggattcgcgggccgttcacacgtagcctgtgccggctcctcgggtgagtccgtccgcgcgcggtgccccgggacggcctaggctgccgggggtccggggccccaggcattccgggctgcagattgacggggatcccggatgcaccgcgcgcccccgcgccctcaccgacgggtccagatctggtgggaagaaggtgcggggacgggtccctgaggatcccgatgcctacgagccaagatgctcagctttataggtgtgacctacacatgtgacttcacctcagctttgtgatccgtaaaatggaccaattcgaagctacttcacagtgctgtcgataggactaaatgccccaatgcttcgtccagctcttgtcaggagggagccctcggaagcagggccctgcccgcccagagcacacctgctcgtcaccaagggaccacagggcagccatgaagaacccccgtggaagcttggcccgtcagtgggcacgcgcaaaacccctcggggccttcagtctaccgcttgcccagaggggcctaccgcggtcaacggccaggccacgtcattattgcggcgatgacgactctgtgtcttgccacggccgcactcaaggcccccggcctaccccaccggacttcaatcccccctgggtgggaaaaggttaacaaacccaaagccgtgggcaaggagcatccaaagcctttggggggcaaaggggggcctgtgaaaaccacccccctcaaggggcaaggannnnnnnnntttacaccaggggagaaaaaaacaattatgaaccctttcgtccacaaccccgctcttatttgggaataaaccccctggttgggtctccccaatctgaaagggccccactcttttgaggccccccgcaaatggcgaaagggagaaatccccaaaagatccccggctgtctattttggag

SEQ ID NO: 177794 - DNA, 964 bp, Homo Sapiens
accgctgccgaggtggctaccgggtcaaggccaggacgtcatatgtggatgagactctgttggcagcccagcaggcacccggcctaccccaccggacttcgatccgccctgggtggagaaggctaacagaaccagaggcgtgggcaaggaggcatcgaaggccttgggggcaaaggggagctgtgagaccaccccctcaaggggcagcacccccaccctcacaccaaggaagaagaacaaatacagacccatcagccacaccccgtcttactgtgatgagtcgctgtttggctcccgatctgaaggcgccagcttcggggccccgcggatggcgaagggggatgccgcaaagctccgtgctctcttgtggacgccaccacctacccccaggggtagccactcgccccgccccagggaggcaccactgcgagccattcacccagctggtccctccaagacagagccggggccagcggcagactcccagaagttatctatgggtgggttacactcttcacgccccctgaagcggggactttcccattccctcacccacctgaatgtccccagcactggtcatccagccaccagtgccccccacacaaatgggcctcaggatctcaggccttccacgtcaggggtgaccttccggagccccctggtgacttccagggctcgctcagttagcatttcagtgccatctaccccacgacgaggtggggccacccagaaaccaaagcccccttggaaatgatactctttcatcagggttgcctatggggccacggcgacaggtatggccccttgccagggtaggaggacattcatcacccagggaacccaggtattaaagaagccctgtggggggcagaacagacatagcagggggtgggcagtgcctcccttaatcctgacaatctctagtcgattcttggcttttttctccgattgcggattggggggc

SEQ ID NO: 177795 - DNA, 1163 bp, Homo Sapiens
gctgggtggcgaattcggcacgaggtgcagctagtgtgtcaactcagcgtttctcctctcgtccctggtgaggtgtagcggcggcacgcggctggagatcccctgtggcctccagtttaggaagggtccagcatcccaagggaggggtgtgtgggcgaggggtctctgggcccggggtcgcggctgtgaggagaggatgcccgcgcggcggcatctcaggcacctggaggaggccgcgctttctcctcagggaaccggcgccttggcagcccccggcgacgccgcccccttcgcggcctaggttggtctggtgagccgggaagcgggcgtcgttcgcagcgccgctgtgaccaccgcgtcccgggcggagctgggctcagtgccggcctgggcctagagtccgagcctcgagctgccggcgtggggggtcgcgagtggcctaatgcggcctcgaagccgaaggacccgagtccgagctcgcactccgacccgctggtgctgtggaaaactcaggtggccttccgctttcgtagcctctaaagtgggggaccaagactttcacctcttaagattgtagcccggattaaaagatttttccccggaacagctaaagatgggctggaatttctagatgacccaggaaactcgactgtgtgacaactgcaaaaaagaaattcctgggtttaactttaccctccatgagattcactgtcaaaggaacattgggtatgtggccctacctgcaagggaaccttttccccaaatctgacctggcaaactcacctgggctggcagaaaccctggtcagggttgacctggcacaatgtgacccacgaagtttggacacagaagggtggttaaaaaaatccatgaagggaaactcggttggccctctttgccggcttggcttgtcctgcccgtctacgtggggatcttataaagcttttccacttcttccacacccgtgaagggacctatgaacaatttttctttcggggtgccccctggcgtgaacactttattgggtcacctttgtggccggcccaatgtcccttggtgcaaagaatttctgaggacgtccctcccttggaagctatcccgggcactaatactggggtgcgcgaaaaacggaaaccatgtcggttgcgccagaacgcccccta

SEQ ID NO: 177796 - DNA, 987 bp, Homo Sapiens
  misc_feature (16)..(16): n is a, c, g, or t
ctaggagcgagcctgngtggcgaattccgcacgagggtctcccgacgggaggttaataccaagaaccatgtgtgccgagcggctgggccagttcatgaccctggctttggtgttggccacctttgacccggcgcgggggaccgacgccaccaacccacccgagggtccccaagacaggagctcccagcagaaaggccgcctgtccctgcagaatacagcggagatccagcactgtttggtcaacgctggcgatgtggggtgtggcgtgtttgaatgtttcgagaacaactcttgtgagattcggggcttacatgggatttgcatgacttttctgcacaacgctggaaaatttgatgcccagggcaagtcattcatcaaagacgccttgaaatgtaaggcccacgctctgcggcacaggttcggctgcataagccggaagtgcccggccatcagggaaatggtgtcccagttgcagcgggaatgctacctcaagcacgacctgtgcgcggctgcccaggagaacacccgggtgatagtggagatgatccatttcaaggacttgctgctgcacgaaccctacgtggacctcgtgaacttgctgctgacctgtggggaggaggtgaaagaggccatcacccacagcgtgcaggttcagtgtgagcagaactgggggaagcctgtgctccatcttgagcttctgcacctcggcccatccagaagcctcccacggcgcccccccgagcgccagccccaggtggacagaaccaagctctcccagggccccaccacgggggaagcaagaaatcacctcccagagcccagcagttagggaagacttggcccaaggtgccaaagggtgaaccgaaggtaaccaaaaaccaccccaaacgccccatgccccaaggcaaaagtcggggggccttggggggttcaagggacccttccgggaaacccccgaatggggaagaacaaacaggtctggagtat

SEQ ID NO: 177797 - DNA, 1835 bp, Homo Sapiens
  misc_feature (87)..(87): n is a, c, g, or t
  misc_feature (93)..(93): n is a, c, g, or t
  misc_feature (182)..(190): n is a, c, g, or t
tcgtgtaactcgtgcctggccgggcgaggcacgggggtgcaatagctgcgcaacctatagccgcgctcatgcctgcgcggcatgcantaacgnctcgtccggccggtcatcgagagcgacgggacgtgagcgcctggtggtgacagtagggaggcgccgacagccgctctccgcaccactcnnnnnnnnnactcctcggattcccagtctcgcgctgcgcgtccctccacagcgagaacgggtggagcacgcttgaggggtgcgaataatagtagaggtcggcgtgtcatacccggggccgacaacagagcataggacagtcgcgactcgcttcgagagttccctccccggcgctccacgcacacgcgtggcaccacagacaccgctctggtggccccctacgacgccacgagaccacctaacccgggcgtggcggggcgatacagaatgcgcgctgccgcgcgaggccccggcggcacacggcgcgggcgaggggctgctacactgggtccgccaccggcgagtccggggccgagcgggagatgcgagtggcctgcagtgagggtccgttgtggatcgagtgaatgggtcacggggtgcggagtctcgagtccactccgtgtacggtggcccccatcttttgaggggtccgtaccttagggcgtgccgcctccatgggtgcacctggttccacaacagaggcgacgtggcggcccggggtctccccagatggaaagaggacaaaggtacgaggataacgcgggcgcgctgccttgagtcctgctaagtgcagaattccgcaggcacccctgagaccccgcggccccaggggtctccatctcacctgtccgttccgcggaacacaacacctcgatgaagtccacagtccccacagaatcctgcgtgtgacatcccccctctctaatggtaaatgttttggaatgtccatagataagaaaatggacggcgtggaggaaagatttcgtggccaggcctttcatttcacctccggatatcagaatactcagactgttcgtcttcccactcgctgcttccggaaggtccctgagccccaaggcccccgactctgcctcgggcatgggcgtttgggtggctcttgctacctcgctcacccttggcacctcggccagtctccctactgctgggctctgggaggtgatgtcctgcttccccgtggtgggccctggagagcttggttctgtccacctggggctggcgctcggggggcgccgtgggaggcttctggatggccgaggtgcagaagctcaagatggagcacaggcttccccagttctgctcacactgaacctgcacgctgtgggtgatggcctccttcacctcctccccacaggtcagcagcaagttcacgaggtccacgtagggttcgtgcagcagcaagtccttgaaatggatcatctccactatcacccgggtgttctcctgggcagccgcgcacaggtcgtgcttgaggtagcattcccgctgcaactgggacaccatttccctgatggccgggcacttccggcttatgcagccgaacctgtgccgcagagcgtgggccttacatttcaaggcgtctttgatgaatgacttgccctgggcatcaaattttccagcgttgtgcagaaaagtcatgcaaatcccatgtaagccccgaatctcacaagagttgttctcgaaacattcaaacacgccacaccccacatcgccagcgttgaccaaacagtgctggatctccgctgtattctgcagggacaggcggcctttctgctgggagctcctgtcttggggaccctcgggtgggttggtggcgt

SEQ ID NO: 177798 - DNA, 939 bp, Homo Sapiens
gtctcccgacgggaggttaataccaagaaccatgtgtgccgagcggctgggccagttcatgaccctggctttggtgttggccacctttgacccggcgcgggggaccgacgccaccaacccacccgagggtccccaagacaggagctcccagcagaaaggccgcctgtccctgcagaatacagcggagatccagcactgtttggtcaacgctggcgatgtggggtgtggcgtgtttgaatgtttcgagaacaactcttgtgagattcggggcttacatgggatttgcatgacttttctgcacaacgctggaaaatttgatgcccagggcaagtcattcatcaaagacgccttgaaatgtaaggcccacgctctgcggcacaggttcggctgcataagccggaagtgcccggccatcagggaaatggtgtcccagttgcagcgggaatgctacctcaagcacgacctgtgcgcggctgcccaggagaacacccgggtgatagtggagatgatccatttcaaggacttgctgctgcacgaaccctacgtggacctcgtgaacttgctgctgacctgtggggaggaggtgaaggaggccatcacccacagcgtgcaggttcagtgtgagcagaactggggaagcctgtgctccatcttgagcttctgcacctcggccatccagaagcctcccacggcgccccccgagcgccagccccaggtggacagaaccaagctctccagggcccaccacgggggaagcaggacatcacctcccagagcccagcagtagggagactggcccaggtgccaagggtgagcgaggtaacaagagccacccaaacgcccatgcccgaggcagagtcggggggccttgggggctcaaggaacctttccgggaagcaaccgaggggggaaggaccaaacaggttctgaagtaattct

SEQ ID NO: 177799 - DNA, 951 bp, Homo Sapiens
  misc_feature (179)..(200): n is a, c, g, or t
  misc_feature (214)..(214): n is a, c, g, or t
  misc_feature (222)..(222): n is a, c, g, or t
aggtggattgggagagaagggcccacagccttctccctggaaactgggggggaggcggggacccaggtgggaaaagggggccccatgggggggcccacagtggggaaccatcctggaaggaaaaggagggcaggaggcccctgggggaaagttggggggcctgaggccaagaattgttnnnnnnnnnnnnnnnnnnnnnntggccccctgatcncgccaggnctccgggggtggtggtgactgcgctggcagcgatgcacgaaggacatccatacgggcaggtggggcaggtctgctgccgctggaaccaggagcgcaggcagctggtatggaaaatgtggttgcagggcagtctcttggcaccagtcaccatctcttctcggcagatgatgcagacattgtccattgcctggagctcctctggggtggcatctggatacagggtgttcatgttgcggatggctcggcgagacatgatggcatctgtcacagctttcttgaactgtctcatggccaggtacatgggccggatggcaaagagtgggaaggtgtgcaccttgatcatgatggtcatgaaggccatgtacagcagaaccttgatgaagcctgtaaacagctctgtgtagagcatgtacacagccttgttgtcccaggggttctcactctggaggtccacggagtgcagcacatacttgatgaagatggtgagcaccatcgtcatcaggatggcatactcaaagccaaacaccagctgcacagaggccccacgggtcaggatgctgtgataggcgtggctgacgaagaggaagtccaggatgcccaggaggaacataagagagacaatgcggcagtgaaagagccaggagatgttggggctgcgttccataaagtccacacggtcctcagccagccagtggaaacatttgaggaagagaagaagagtgaagagtg

SEQ ID NO: 177800 - DNA, 1098 bp, Homo Sapiens
  misc_feature (945)..(945): n is a, c, g, or t
agggagcgaggcctgggtggcgaattcggcacgaggcttctaccttgtccagctcctccaggatgttttgtgccgctcagctcctgcccgtgtcattgtggtctcctcagagtcccatcgatttacagatattaatgactccttgggaaaactggacttcagtcgcctctctccaacaaaaaacgactattgggcgatgctggcttataacaggtccaagctctgcaacatcctcttctccaacgagctgcaccgtcgcctctccccacgcggggtcacgtcgaacgcagtgcatcctggaaatatgatgtactccaacattcatcgcagctggtgggtgtacacactgctgtttaccttggcgaggcctttcaccaagtccatgcaacagggagctgccaccaccgtgtactgtgctgctgtcccagaactggagggtctgggagggatgtacttcaacaactgctgccgctgcatgccctcaccagaagctcagagcgaagagacggcccggaccctgtgggcgctcagcgagaggctgatccaagaacggcttggcagccagtccggctaagtggagctcagagcggatgggcacacacacccgccctgtgtgtgtcccctcacgcaagtgccagggctgggccccttccaaatgtccctccaacacagatccgcaagagtaaaggaaataagagcagtcacaacagagtgaaaaatcttaagtaccaatgggaagcagggaattcctgggggtaaagtatcacttttctggggctgggctaggcataggtctctttgctttctggggggtggcctgtttgaaagtaaaaacctgcttggttgtgtaggttccgtatctccctggagaagcaccagcaattctctttcttttactggtatagaataggctggaggtccccctcgtccccatccagctaccanccacggccacactggcagccggggggctggcccttctcccacttagggaagaaaaagcaggggtcacggctcccttgctgcattgatcccgggagaaaaatggtttcattccatccggaccaagactgaacccaccttaaccaatggctgggg

SEQ ID NO: 177801 - DNA, 914 bp, Homo Sapiens
  misc_feature (830)..(830): n is a, c, g, or t
  misc_feature (842)..(842): n is a, c, g, or t
tagcgaggcctgggtggcgaattcggcacgaggaacagattaaacatttagagattgaaaagaatgctgaaagtagcaaggctagtagcattaccagagagctccaggggagagagctaaagcttactaaccttcaggaaaatttgagtgaagtcagtcaagtgaaagagactttggaaaaagaacttcagattttgaaagaaaagtttgctgaagcttcagaggaggcagtctctgttcagagaagtatgcaagaaactgtaaataagttacaccaaaaggaggaacagtttaacatgctgtcttctgacttggagaagctgagagaaaacttagcagatatggaggcaaaatttagagagaaagatgagagagaagagcagctgataaaggcaaaggaaaaactggaaaatgacattgcagaaataatgaagatgtcaggagataactcttctcagctgacaaaaatgaacgatgaattacgtctgaaagaaagagatgtagaagaattacagctaaaacttacaaaggctaatgaaaatgcaagttttctgcaaaaaagtattgaggacatgactgtcaaagctgaacagagccagcaagaagcagctaaaaagcatgaggaagaaaagaaagaattggagaggaaattgtcggacctggaaaagaaaatggaaacaagccacaaccagtgtcaggagctgaaagccaggtatgagagagccacttctgagacaaaaaccaagcatgaagaaatcctacagaacctccagaagacgctgctggacacagaggacaagctgaagggcgcacgggaaggagaacagtgngcttgctgcagngagctggaggagctgagaaagcaagcccgagaaagccaaaatcgctaaacttattttggttaacatcaggcc

SEQ ID NO: 177802 - DNA, 582 bp, Homo Sapiens
  misc_feature (567)..(567): n is a, c, g, or t
gggttggcgcctgtcagtgaccatcctaatgcctctcgctcactcccaagccaccatttgagagggaggggtgttggtgccctgacagggactgggcagggtgtccaaacttggggcttcccaggcacctgcagtgtgaacactgcttggctggctcaagattagggccgcggagggggctgtgcacataccagttacttaagcagccacgagtgtcccccatgccttggtgcgggtcctgggaggcctcttgggggtgggacctttgggcagggtttgcccactgacaagcccgccatggggcactggctgcatggggctccttggaccctgtagacccagcagaccccgcctgtgtcaggccagctgcccgaaggcacttggctgtggtcccaggggacggctctgctggcacactcaggagcctggccgcggggactgcagggagggtgcctggacccgtggggttgcttcattgagataaagcacacttatcacgtagcacaaaggacgtgccatggtgctttccccaaaagttgtgttgcttttatcagttttctaacttanaatttaagagttgag

SEQ ID NO: 177803 - DNA, 930 bp, Homo Sapiens
  misc_feature (45)..(54): n is a, c, g, or t
  misc_feature (325)..(344): n is a, c, g, or t
  misc_feature (350)..(350): n is a, c, g, or t
agaccagggcccgaggggggtggccggggcttcggggccattttnnnnnnnnnnacccaccaagtgtgccgcccgcgcccgttggtcggcttgggttggggtggagcccaggtgggccaggtgcaggtacctggggccaggggggcccccagatcagggcaggagtagctccggcccagagagggcttagggagaagtgctggggtatgtggtccctgagttcgccactggcggattggggcccgggggctgacagacgcagtgccctcagcagccccagactgctcggcctctgagatggcgatcttcaactccagcttcattnnnnnnnnnnnnnnnnnnnnctgtgnggttttgttgggcgtgaggaagatgtcagcaaagctctccagcttggagcggacggaacggaagagcggggccaagccccagggactgaggcgggggcgtaaaaggctggacggtggtggggtggatgggagctccagagcaggatctggggctgttggtgggctctccagagggtctgcaggcagagcagatggctggaatgggggttctaggtccccaggtggaggcgttggctggcgaactatcctcatgggctcagctctttgtgctgggatgatgaagttgggggtctcatcaatgaagccctcagcggggggtctaggactggcgatgtcttccagcatcaccaccagggtgggctggggggcccggtccaccttttgtgaagggccctcctctgggccaggggttgtccttgatcgccgcctcagggtggaagaggtccggtggatgcggctcaagggctcgcgacacaaacacagagggtcgggaggcctggcctgcgaggaccacccggcctgccggggtggcgaggcaggcggctgcctgtggacaggatcctgatggtagctgtggtgc

SEQ ID NO: 177804 - DNA, 888 bp, Homo Sapiens
  misc_feature (579)..(606): n is a, c, g, or t
  misc_feature (870)..(870): n is a, c, g, or t
gcaccacagctaccatcaggatcctgtccacaggcagccgcctgcctcgccaccccggcaggccgggtggtcctcgcaggccaggcctcccgaccctctgtgtttgtgtcgcgagcccttgagccgcatccaccggacctcttccaccctgaggcggcgatcaaggacaacccctggcccagaggagggcccttcacaaaaggtggaccgggccccccagcccaccctggtggtgatgctggaagacatcgccagtcctagaccccccgctgagggcttcattgatgagacccccaacttcatcatcccagcacaaagagctgagcccatgaggatagttcgccagccaacgcctccacctggggacctagaacccccattccagccatctgctctgcctgcagaccctctggagagcccaccaacagccccagatcctgctctggagctcccatccaccccaccaccgtccagccttttacgcccccgcctcagtccctggggcttggccccgctcttccgttccgtccgctccaagctggagagctttgctgacatcttcctcacgcccaacaaaannnnnnnnnnnnnnnnnnnnnnnnnnnnaatgaagctggagttgaagatcgccatctcagaggccgagcagtctggggctgctgagggcactgcgtctgtcagcccccggcccccaatccgccagtggcgaactcaggaccacaataccccagcacttctccctaagccctctctgggccgaagctactcctgccctgatctggggcccccctggcccaggtacctggcacctggggcacctgctccaccccaaacaaagccagacaaggccgcgcgggaacccgtttgggntggggtgggcaaaaaggc

SEQ ID NO: 177805 - DNA, 1040 bp, Homo Sapiens
  misc_feature (881)..(938): n is a, c, g, or t
  misc_feature (951)..(951): n is a, c, g, or t
ggatatggtgcttgaatatattcctataactgtagaacagtgtggaaagtgatggtaactttgaagttgttcatgttttattggctttgttttaattgacactagtagagttttaatggtctttgtgtaaattttaatggcttttccattgtttttgcttctcttaaaaagtttaagaagaatatgacctcattaaatgtgctgttttatttggaccagtcacacaaaatgtctctctagagttgactttaaagttgtttacagaaatttaaactcaattccagagattgaagttgtccaaacagctcatgggcttagtgtccaaacccctgcccagccttccctttccaagttggtgccacctccaggtagccattggtggttttcctattactgatgtggctgtggaatgataaggtcctagaggggccctggcatttcaggaagcggacctggtattccctgacaaacattgcttaggaaagagggccggagaataagaagccagcacctcatcagtcagccctgcaatgtgagacttccgtagctgttgagagtcactgcaggtgttctttcatcccgtctgattttaacccatggttgagacgttccaagttagatctgctgctcttaggtgtggggctgtccacattagggaacttgcctcaaaaacagtccacagtggcaataccggacttctgttcaagctttttaaagtgctgagccttacaaacccctgaaggaaggtgaccctttaagagaggatcatctttttttatatttattttcaccaaatagggtgatgagggttggtttttgttccctcaacccatttgggtaaaataacggatctaattaggaaactgttttaagggaggggnnnnnnnnnnnnnnnnnnnnnnnnnnnnnnnnnnnnnnnnnnnnnnnnnnnnnnnnnntcacgagggtcanggagtttcggaggacccagccttaggcccaacatgggtgaaaaccccgttctttttacaaaaaaattacaaaatttagcccgggtgggg

SEQ ID NO: 177806 - DNA, 1031 bp, Homo Sapiens
  misc_feature (967)..(977): n is a, c, g, or t
aggtaggaaaaaattaaggccccataaggttctaagtagcgaggcctgggtggcgaattcggcacgaggctgagccctatcccgcgccgtctccctcctccagggccaaggagcggcccccgcgcgcgcggcccgccagcacctctccgtccccgggcgcgcacggccggcgcggcggcccagaagggaagagctcgtcgcgcagccccggcccgcacccccgctcctggagctccagccgctcgccctccaaatctcgctcgcgctctgcggagaagcggccccacagccccagccgctcgccgtcgcccaagaagcccctcagccgggacaaggacggcgagggccgcgcaaggcactctgaggccgaggccacccgcgcccggcgccgctcccgcagctactcgcccatccgcaagcggcgccgggactcgccaagcttcatggagccgcggcgcatcaccaggtccagcctgctgagtggcctgtggtcagcctgggggccaggcggacccctctgcacaggctgcctgggagatgcccaacgcccgcaagcgtcctattccatactaccggcccagcccctcttcctcctccagctgcttgagcagcgactactcgacccggagccacagccgcagccccagccccggccacagccacgggagctacagcagtcgcagccatgggacccgcagccggacacgcagcccctcgaggacccccagtcccagctaccacagccggaagcagcttctgagagcggggggccttctgagcccaagaccagactcaggcttggtgcccccctggccactgggaaaaaggccaggggcgggcccccaggaccccagtgggggagggaagacatattcttccttggcccccaaggggtaaacaagaaggcctcacggggccaggggccccggggcaaaatgggggacccgggcgaaagacattttcgaannnnnnnnnnncttctccagggggaacacggggagaaaaacgcctacaatgggtgccttccgttt

SEQ ID NO: 177807 - DNA, 717 bp, Homo Sapiens
ggcctgggtggcgaattcggcacgagggtaccctccggctgggccgtgtgttcccccacgaggtcaactggaacaagtggatccacctctaggacccctgtgggcgtcccctccctcccagccaccgcctgccacaccactcctgcctggtgctcggcagaccccactgtgccctggccttgggtctgccgagcctcctgcagcaggggacgggtgctttggccagagtcacagactgacacgtttcccactgtactggaactctggaaagaggggctccccgacctgcccatcccccaggctcttctgggccttccccttgggaactggcctcatcacactgggagttggtgcttcttgtctctgggtctccagagtttgccccgcctgtgcacacctcacattccagactctagccatctcggcaggatctcctggctccttgagtgcccaggtgccaccaagaggaagggccttgtgggatacaccttgcagaatagggatcggtgtgccccgctgcgaggggccccccatgggggctgtggcccctccgcaggcaggacatcccaacccctggctgggactgaaccacccagagcggagcggctcccttttcagccttgtgagtcacctggcaggccccagctgggctggctgtccgtgtccctcagcctggctggtgattccttgcaggccagaaatgaagagtccctgtag

SEQ ID NO: 177808 - DNA, 891 bp, Homo Sapiens
  misc_feature (262)..(263): n is a, c, g, or t
  misc_feature (810)..(810): n is a, c, g, or t
tggggaagggctagcattggtcaggactctgctgacagcactgagtaggcaggaatgtatttgagatttggaagtactgttaatttggtggagtcaggtgaatggataagaagcagatcggcagaaagcatcagtgtggtcccgaggctccctctgttttccttgccatggagtccccagcgccttgtgcctgtttccatttccctctctctttgaaaagtagaaatcagtggtttcttgactcctaaacagcctcctcacnntatagaaggagcctgagcaggtcagaagaactagaaaagtcctcagatacccccctctgtccagccccctttcccatacacagatatcaatggatgagcaggaaaagaggaggcctggactcactgaagtacttgaagaagcacaagtgtcatagatgtgccgccctttgccctgggtgttctagatcacacagaacacgtttcagctggactaagaatcagactagccaggggttcttctgaacagctcaggccagacctctgggctcctctgggggccctgggacatgatgccttgcagtttccattccattgtccccaggcctcctgacctggtgacagagagtgccctgcagaagtgagtctatttttcccaattcctcttcatgaccagaaaatggcagctgggccggttggggtcctggtgggaaagggctaacctgggctgttaggtagacactaggtttaaaggtagacaggggagatggcatcatcagggcaggcccaggcccacttccctgtgaccccagacctttggcaggcgggntcggtgcctgaaaaccaaggcatcttccctcacaccccggaggggaaaaggttttaagggcaaactttgtttggccctcca

SEQ ID NO: 177809 - DNA, 543 bp, Homo Sapiens
ggcctgggtggcgaattcggcacgaggacagtttcccttagtgacagttatctgggaaaggaaaaagggcatttagaaggaataaacatagggctgaatatggagttgaattttaacctcttcagactgatgggtgcagacgaggttgtgtggggcctctgtggagcctgctgtggcttccagccatgggactttagggccgaggtggcctctgcagcactgtggctgtgggagcactgtgtgttggggtaagagaagccagggggcctccctgaagccagctcataaaggaaggttcgtgtttcagagggaggcggcaagggaatctgagtacctgagtccccgatgtttgaacccttccacccaatagaagtgcagtgatttcagccatttcccatctggcggtctgaatttttcccttcagaggagagaagtggtgggcccaggcatccctcctcctgtgtgtggtcgttctggtgagaggaaccccgcgcgagagtcagcacctgtttcttcagagttgctgtcaaaataatcactgcg

SEQ ID NO: 177810 - DNA, 1233 bp, Homo Sapiens
  misc_feature (13)..(13): n is a, c, g, or t
  misc_feature (762)..(866): n is a, c, g, or t
  misc_feature (1043)..(1077): n is a, c, g, or t
ggagcgagcctgngtggcgaattccgcacgaggggcctgtgccccacagccccagcaccaggtggactgcagcgcagtgggtgggccagtggcagccagggagaagccccccgtcagcaggctggggtctgcccaccagggtctccccacgtctgcctttgagggtgcctgccatgccctgggggatcctggcatctttactggactggaagcaggagacagaacagtgtctgtcccggggtgacttcatcaggagaccgcccacatagagctggaccccgcagctgaagcggaaatgtgagacaggctggcacctccggaaaaactgcctttcagccttggtgttccgtgcaaggtgaaaagaaataggtcctcccagtttacagcttgaaatcaggctagtgagtggccctggagaccacgaggggagaatttaaaggccccggctggcagggtctaggtggctggcagaggcacatgcagaccctgcctggagcctgccctaggacgctgggcgggtcagtctccgtgcaggatgtgagcagcgtccctgggctctatccgcgaggtgccagtagcgtgtgcaggtacatacacgtgcgtgcacactgtgatgacacccggaaatgtctcaggatgttgaaatgtgtccttgggggcagaagtgtccccagttgagaatctgccccagaggaacacacccacaccaggcctcaggattttgtgttgatcaagttccaaggaaaaaggaacatctccgcnnnnnnnnnnnnnnnnnnnnnnnnnnnnnnnnnnnnnnnnnnnnnnnnnnnnnnnnnnnnnnnnnnnnnnnnnnnnnnnnnnnnnnnnnnnnnnnnnnnnnnnnngaaagaaagaaaatgagagatccaggtttaaaaattcataaacaccacaaggaaacaatacactatgagacccagcagaagcaacagattgactctagacccagatactagaattatcagagagaatataaagtaacagtgttttatatatctaaagaaataaaagagatttctggnnnnnnnnnnnnnnnnnnnnnnnnnnnnnnnnnnnccctggtcggccgccttcggccttcaaaaagttttctaaacaattcgttttgggggccgggggcccattagggaaatggaacatgggccaaagttggtttcccaaagaaaaaaccctgggccaataaacaaagggcttgggaattcccccccaaat

SEQ ID NO: 177811 - DNA, 1177 bp, Homo Sapiens
  misc_feature (61)..(153): n is a, c, g, or t
  misc_feature (177)..(280): n is a, c, g, or t
  misc_feature (286)..(294): n is a, c, g, or t
  misc_feature (303)..(303): n is a, c, g, or t
  misc_feature (363)..(363): n is a, c, g, or t
  misc_feature (1152)..(1152): n is a, c, g, or t
ccacaccctccgaggggagaaccccccaatcccccatttatctgtggagatattttttccnnnnnnnnnnnnnnnnnnnnnnnnnnnnnnnnnnnnnnnnnnnnnnnnnnnnnnnnnnnnnnnnnnnnnnnnnnnnnnnnnnnnnnnnnnnnnccgcgggtttggggtgggttgaannnnnnnnnnnnnnnnnnnnnnnnnnnnnnnnnnnnnnnnnnnnnnnnnnnnnnnnnnnnnnnnnnnnnnnnnnnnnnnnnnnnnnnnnnnnnnnnnnnnnnnntgggannnnnnnnnggcttattngtgtggggggccccccctttccgggggaaagagtgtggggtccttggggtggtggggggnccctcggccttttggtttaacgggttgggtgggggggaaaaaggttccgggcattgaggtttccgggcttcaccagggtaagggggcttcttcccttgaacttaggaggctctcccaggcagtcccccggcggtcgccctttttttagggtcgtacatgaacaggaagtgcagcaggcgcagcccggcctccgacagccatgggaacttgtgcttcaggttgttgtagggctgcttccggaggctgtactggccgaccagtggcagcttggaaaagcccggccagatgttctcactgggcgtgcccagcagctgcacgatcaagtcgatctggtggatctcggaagtgccggggagaagaggcctgtgcgccagcagctcggccagtatgcagcccacagcccacatgtcgatgctggtggtctgcgtggtggttcccaacagcagttcaggggctcggtaccagagagtgaccaccttgggggtcattggctttactgggacaccataggcccgggccaggccgaaatccgctgtcttcacacaacccttgtcggtcatgagcaagttggaaaccttcaggtccctgtggataatgaagttcctgtgcagatactggaggccccggagcacctgcagcacgatgcacttgacctgagcctccgagaagggtgttggcatattctccaggaggctggccaggtcctgctcacagtaacccatcaccaggaagacctcgtgccgaattcgccacccaggcctcgctacttagggggggattggttcaagnacgggtgtgtgggggattagggtgg

SEQ ID NO: 177812 - DNA, 474 bp, Homo Sapiens
  misc_feature (418)..(418): n is a, c, g, or t
  misc_feature (432)..(432): n is a, c, g, or t
  misc_feature (438)..(438): n is a, c, g, or t
  misc_feature (451)..(451): n is a, c, g, or t
  misc_feature (461)..(461): n is a, c, g, or t
ggctggcggggtcagcagacgtctggccgcagtgaggtccactgttctctgcagggctgtgggctgcatactggccgagctgctggcgcacaggcctcttctccccggcacttccgagatccaccagatcgacttgatcgtgcagctgctgggcacgcccagtgagaacatctggccgggcttttccaagctgccactggtcggccagtacagcctccggaagcagccctacaacaacctgaagcacaagttcccatggctgtcggaggccgggctgcgctgcttgcacttcctgttcatgtacgaccctaagaaaagggcgacggccgggggactgcctgggagagctcctatttcaagggagaagcccctaccctgttgagccggagttcattgccgaacttttccccaccaccgnaacaagggggccgncttagncactttcgagggncagagcaagngttgtaaaactta

SEQ ID NO: 177813 - DNA, 951 bp, Homo Sapiens
  misc_feature (699)..(699): n is a, c, g, or t
  misc_feature (888)..(888): n is a, c, g, or t
  misc_feature (912)..(912): n is a, c, g, or t
gacatggaggcagctgtggcgggtgttagagatgtctgacatcgtcctgcttatcactgatatccgacatccagttgtgaatttcccgccagcactttatgagtatgtgactggagaacttggactggccctggtgctggttttgaacaaggtggatctggccccgccagctcttgtggttgcctggaagcattatttccatcaacactatccccagctccacgtcgtccttttcacctcttttcctcgggacccccgcaccccacaggaccctagtagtgtcttgaagaagagtcggaggcgggggagaggatggactcgggccctggggccagagcagttgctgagagcctgtgaagccatcactgtggggaaagtggacttgagcagctggcgggagaagattgctcgggatgtggctggggccacctggggtaatggctctggggaggaggaggaagaggaggatggcccagcagtcctggtggagcagcagactgattcagcaatggagccaactggcccaacccaagagcgctacaaggatggggtggtgaccatcggctgtgtgggtttccctaatgtgggaaagtcctcgctgatcaatgggctggtggggcggaaagtcgtgagtgtctccagaaccccgccccatacccgatactttcagacctactttcttaccccctctgtgaagcntctgcgactgcccaggcctcatcttcccatctcttctgcctacgcacttgcacgctctgcccagggatctaccctatcgcccagatccagggacccctacactgctgcgaggctacctggaccttcccgaatttcccgtggcagggccctgcttccacctggcgccacccaggagggttgagggacccntcagcggggaacaccctgggtttngcctggggggacattttgttggaaggttgagtttccatg

SEQ ID NO: 177814 - DNA, 505 bp, Homo Sapiens
  misc_feature (89)..(89): n is a, c, g, or t
  misc_feature (299)..(299): n is a, c, g, or t
ccggcgaagtctggtaatccattcccctctattggtcccaccccaaattctattaaaacccgcctattaccacccaaaaatgcctaatnaaacttaccctaaaaacaaatgataaccatacacgacacctcggacgggaagtctgtgaccatcatatccgcaggcttaaccagcagccttctcaggggctgggtccacgaggctacgacccaaatcgataccgactgcattttgagagagacagcagggaggaggtagagaggagaaagagagcagcccgggagcaagttcctacagcnggtcagtgctgagatgaggagaccccaacatccgctcccaggtgtatcagcctggtctggccgaaacccttatgccctgctgggtgaggatgagtgctgagttcctgcccagcgccatcttccctcccagtatctttgcttttggactgacctgggggtatctcccctctgccaccccaattgtgaataaagattgtttgctttgt

SEQ ID NO: 177815 - DNA, 916 bp, Homo Sapiens
ggagcaggcctgtgtggcgattccgacgaggttgcgacttggtacttgcaaaaatggacaaggattgtgaaatgaaacgcaccacactggacagccctttggggaagctggagctgtctggttgtgagcagggtctgcacgaaataaagctcctgggcaaggggacgtctgcagctgatgccgtggaggtcccagcccccgctgcggttctcggaggtccggagcccctgatgcagtgcacagcctggctgaatgcctatttccaccagcccgaggctatcgaagagttccccgtgccggctcttcaccatcccgttttccagcaagagtcgttcaccagacaggtgttatggaagctgctgaaggttgtgaaattcggagaagtgatttcttaccagcaattagcagccctggcaggcaaccccaaagccgcgcgagcagtgggaggagcaatgagaggcaatcctgtccccatcctcatcccgtgccacagagtggtctgcagcagcggagccgtgggcaactactccggaggactggccgtgaaggaatggcttctggcccatgaaggccaccggttggggaagccaggcttgggagggagctcaggtctggcaggggcctggctcaagggagcgggagctacctcgggctccccgcctgctggccgaaactgagtatgtgcagtaggatggatgtttgagcgacacacacgtgtaacactgcatcggatgcggggcgtggaggcaccgctgtattaaaggaaatgggcactggccctgggaaaaaccctgttatcacctgtccctcttacccttaaccccccaataaccattcgggggcttctattttggggggcggaaaaagaagttaaggaaatggggccatggtccataacctggtttcccggcaccca

SEQ ID NO: 177816 - DNA, 920 bp, Homo Sapiens
  misc_feature (827)..(827): n is a, c, g, or t
  misc_feature (841)..(842): n is a, c, g, or t
  misc_feature (869)..(869): n is a, c, g, or t
ggcctgggtggcgaattcggcacgaggccggggagtaggaaggagccggggctgtagccggagtggagcggctgccagccgaggagcaggcgcggccgcggcgccatattgcggccctcagcggccgcgaccgagtcatggctgagacctacgacttcctcttcaaattcctggtgattggcagtgcaggaactggcaaatcatgtctccttcatcagttcattgagaataagttcaaacaggactccaaccacacaatcggcgtggagtttggatcccgggtggtcaacgtgggtgggaagactgtgaagctacagatttgggacacggctggccaggagcggtttcggtcagtgacgcggagttattaccgaggggcggctggagccctgctggtgtacgacatcaccagccgggagacatacaactcactggctgcctggctgacggatgcccgcaccctggccagccccaacatcgtggtcatcctctgtggcaacaagaaggacctggaccctgagcgggaggtcactttcctggaggcctcccgctttgcccaggagaatgagctgatgttcctggagaccagcgctctcacaggcgagaacgtggaggaggcgttcctcaagtgtgcccgcactatcctcaacaagattgactcaggcgagctagacccggagaggatgggctctggcattcagtacggggatgcgtccctccgccagcttcggcagcctcggagtgcccaggccgtggcccctcagccgtgtggctgctgagctctgtggagccagctcacctgttctccaggaccagcccctgctggnggcccaggccccanngctctggagaggcccgtgtccctaacnctgcccctgggcccccggggagaaagctaccgttgcccacacctggtcccc

SEQ ID NO: 177817 - DNA, 1452 bp, Homo Sapiens
  misc_feature (104)..(112): n is a, c, g, or t
  misc_feature (136)..(136): n is a, c, g, or t
  misc_feature (184)..(184): n is a, c, g, or t
  misc_feature (321)..(330): n is a, c, g, or t
  misc_feature (363)..(371): n is a, c, g, or t
  misc_feature (398)..(408): n is a, c, g, or t
ttttaacaagggagatacgcaaacggggggatcccgctttttttgtaatgggaggggtgtagtggttctccatggttgcggggcccctcttttgtgggggtgtnnnnnnnnngcaataggttcaccaaggggtgcnggccctctggggtgtttctccagtcgggggcgggggcgggaggcaganacaccccacggggacttggtgcgaaaagggtctctttgtgggagggattggtttccccccgcgtcccgagggggaagggtggcgttttctaacaaaaaggccccccagatggtgccccctcccaacgccttaggccnnnnnnnnnntgcctttgggaaaagagtggggggcggaacttnnnnnnnnnaacttggaaggggggtcccccgtcctnnnnnnnnnnnagcgtccgcattatctttccgccccccaagaagtcctaaaagaggccgcccactcaggggccccaggggaacccgggaaccagggaggaaaaacggcagctattttccgggcgccaagggacgcattaggaccacgggactcttcaaagcctgggccatggtcgccccaccaggggatgagcctggagaaaaggtgagcgggctccacagagcgcaagcagccacacggcccaggcgccacggccggggcagctcaaaggctgccgaacccgccggagcgcacaaatcaccgtactgaatgcaagagcccatcctctaagggtctagctcgcctgagccaccaccttgttgaagagaaagcgggcacactccaggaacgcagcctccacgttcgcgccggtgaagaagccgcttggttcttccagggaacatcaggctcgattctcctggggcaaaggcggggaggcctccaggaaagtgactcccggctcagggtgcaggtccttcgtgttgccacagaggatgtccacgaggttgggggctggccagggtgcgggcatccgtcagccagggcagccagtgagttgtatgtctcccggctggtgatgtcgtacaccagcagggctccagccgcccctcggtaataactccgcgtcactgaccgaaaccgctcctggccagccgtgtcccaaatctgtagcttcacagtcttcccacccacgttgaccacccgggatccaaactccacgccgattgtgtggttggagtcctgtttgaacttattctcaatgaactgatgaaggagacatgatttgccagttcctgcactgccaatcaccaggaatttgaagaggaagtcgtaggtctcagccatgactcggtcgcggccgctgagggccgcaatatggcgccgcggccgcgcctgctcctcggctggcagccgctccactccggctacagccccggctccttcctactccccggcctcgtgccgaaatcgccacccaggcccggtgctgagcatatagtttctgtaaataataa

SEQ ID NO: 177818 - DNA, 895 bp, Homo Sapiens
ggcctgggtggcgaattcggcacgagggagcgcagagacgctcagaagcgccggttctcccagacgtctgcctgggcctgggctccccatcccccggaccccggtgggccagaccttggggttcagactgcggccggccaggcaggcagagtgactcttgctggtggctgcagcacccgtacccctcggaggagcagaagaaacagctggcgcaggacacggggctcaccatcctgcaagtcaacaactggttcattaacgcccggagacgcatcgtgcaacctatgatcgatcaatccaaccgcacagggcagggtgcagccttcagcccagagggccagcccatcgggggctataccgagacgcagccacacgtggccgtccggcctccgggatcagtggggatgagtttgaacttggaaggagaatggcattatctatagaggctgatgcaggagagacccagcctccggctgtgacccccagcctcacacctgcctctggttcccgcctggtcctccagcttcaggaccccacctccaaaggcccctctgctcaatgcctacctccctagggccctgctgggacatgggggcctgagtgcccatccaagggctctcaaggacaccggcaaggcctccaggccctgagccccacttctgccttcacctctgcctgggacccgagctgggctcctgggccttggtccccagaagatggcggctagggcctcgccgccaggacagagaagggacggggtggctgggcagtcagggaaggagggtcgcccggatccgacattttggagagattccttcactctcctggtccccctaccccccttctctaatttcctccttttttttaaaggataaaagtcttaaaaacacggaaa

SEQ ID NO: 177819 - DNA, 988 bp, Homo Sapiens
  misc_feature (467)..(483): n is a, c, g, or t
  misc_feature (487)..(487): n is a, c, g, or t
  misc_feature (489)..(489): n is a, c, g, or t
  misc_feature (498)..(523): n is a, c, g, or t
  misc_feature (613)..(613): n is a, c, g, or t
  misc_feature (871)..(881): n is a, c, g, or t
ggcctgggtggcgaattcggcacgaggctcaagagctccgtctccgtctcgccctcctcgaagtcctcgtcgcgcgcccgcgacccaggtcgccctgaaatctagcccgtccgagcgcgagtccaacggccgcggccgcaccaaggccccctcagaccgtgccatgggtgacagtgatgacgagtacgatcgaaggcgcagggacaagttcagaagagagcgcagcgactacgaccgttcccgcgagagagatgaaagacgtcgaggggacgattggaatgacagagagtgggaccgtggccgtgagcgccgtagtcggggtgaatatcgggactatgaccggaatcggcgagagcgcttctcgccacctcgccacgaactcagcccgccacagaagcgcatgaggagagactgggatgagcacagctctgacccataccacagtggctatgagatgccctatgctnnnnnnnnnnnnnnnnncccnantttatgggnnnnnnnnnnnnnnnnnnnnnnnnnntggccgttccccttccttgccggccccttgttcctgccctatccccggcccagcctggggccggcctttgcctgagaattggaccctggngggggggcccgcccgcccccggggaagggaaaaaccctttctaggggagggtttcttcccttctcccccttggattggacctccgggggggatacaaaaccgggagggccccctccaagacctctcttttaaggggcttcacaaggccttggattatttccggggagaggcacacaagaggcccgggaatttctcttttcctgggggcgcacacaaaagattgataggggagtggtgtttcccgggccctcaaacaannnnnnnnnnnacaaatagggaggggggtggggaaacaacctccccccccgaatggaggccctccgggtggggggacccccctgcacaaaaccaccactacgggcgggggtgctccca

SEQ ID NO: 177820 - DNA, 394 bp, Homo Sapiens
  misc_feature (52)..(52): n is a, c, g, or t
ttgacgagtacgatcgaaggcgcagggacaagttcagaagagagcgcaggcnttacgaccgttcccgcgagagagatgaaagacgtcgaggggacgattggaatgacagagagtgggaccgtggccgtgagcgccgtagtcggggtgaatatcgggactatgaccggaatcggcgagacgcttctcgccacctcgccacgaactcagcccgccacagaagcgcatgaggagagactgggatgagcacagctcttgacccataccacagttggctattgagatgccctatgctggggggggtgggggcccaacttatggccccccttcagccctggggccaccctgacgtccacatcatgcagcaccatgtcctgcctattccagggccagggtt

SEQ ID NO: 177821 - DNA, 842 bp, Homo Sapiens
gtagcgaggcctgggtggcgaattcggcacgaggagatggtcagatatgtgtgtatttttttaaaaacgatttgaaaaaatatgatgttcctttgtcgtgggaacaagccaggttgcagacgcagaaggagctacagctgagagagggacgtttggcaataaagccttttcatccttctgcaaacaattttcccataccattgcttcacatgcaccgtaactggaagaggagcacagagtgtgctcaagaggggaggattcccagcacagaggatctgatgcgaggagcttctgctgaggagctcttggcgcagtgtttgtcgagcagtctgctgctggagaaagaagagaacaagaggtttgaagatcagcttcagcaatggttgtctgaagactcaggagcatttacggatttaacttcccttcccctctatcttcctcagactctagtgtctctttctcacactattgaacctgtgatgaaaacatctgtaactactagcccacagagtgacatgatgagggagcaactgcagctgtcagaggcgacaggaacgtgtctaggcgaacgactaaagcacctggaaaggctgatccggagttcaagggaagaggaagttgcctctgagctccatctctctgcgctgctagacatggtggacatttgagcagcctgacctgtggggagggggtctctcccgaagagtttctgtttttactcaaaataatgttattctcagatgcttgatgcactgttggaaatgtgattaatttaatcatgcagataaaccaatttaaatgtcagtctcccagtttttcataatgaaaagttgttttcccgc

SEQ ID NO: 177822 - DNA, 915 bp, Homo Sapiens
  misc_feature (757)..(757): n is a, c, g, or t
  misc_feature (764)..(764): n is a, c, g, or t
  misc_feature (805)..(805): n is a, c, g, or t
  misc_feature (840)..(841): n is a, c, g, or t
  misc_feature (861)..(861): n is a, c, g, or t
ggcagtcaggggcctctctgaggacaggtcccatggtgcagggtagagggattatgacaacaggctctggccaggaaccagggcagtcagggacctctctgaggacaggtcccatggggtctctgggacaggcagagcaagtcagctcgatgcccatggggtctctggaacatgaggggctggtaagcctgaggcctgtggggttgcaggaacaggaggggcccatgagcctggggcctgtggggtctgcaggcccagtggagacctctaaggggttgccggggcaggagggcctggtggaaattgccatggactcaccagagcaagaggggctggtgggtcccatggagatcaccatggggtctctggagaaggcagggcctgtgagcccaggatgtgtgaagctggcagggcaggagggcctggtggagatggtgctattgatggagccaggggcgatgcgcttcctgcagctctaccatgaggaccttcttgcgggcctgggagacgtcgctctcttgccacttgaaggaccggatatgactggctttcggctctgtggagcccaggcttcctgccaggcggctgaaggatttctgcggagcctgctgggcaacattagctgccatgtgttgtgcctggagcccccggccaacgccagatttttcctgggcccaaaagggcagcaacttccccaagggccggaaacctcagttcccaatgcggttccccggggacagagcaccctcggccacangccacgnttggacaccaggccctttgaaagaaggtgggacccctaccngaagggcccctccccagttgcctcccctgggcaanncgccccacacccctggtggnaccccagaacaagggaaccaggggtggtttaacacccagggaagaacgtgtaaa

SEQ ID NO: 177823 - DNA, 1005 bp, Homo Sapiens
gggcgccggggggccgcggcgctgctagcgctgctgtgcgtggcctgcgcgctgcgcgccgggcgcgcccaatacgaacgctacagcttccgcagcttcccacgggacgagctgatgccgctcgagtcggcctaccggcacgcgctggacaagtacagcggcgagcactgggccgagagcgtgggctacctggagatcagcctgcggctgcaccgcttgctgcgcgacagcgaggccttctgccaccgcaactgcagcgccgcgccgcagcccgagcccgccgccggcctcgccagctatcccgagctgcgcctcttcgggggcctgctgcgccgcgcgcactgcctcaagcgctgcaagcagggcctgccagccttccgccagtcccagcccagccgcgaggtgctggcggacttccacgcgccgacagccctacaagtccctgcacctcgcttacttcaaggctagaataaaccccccaaagccaatcccccgcttgcgtcacaccctttctaacgaagcactccccacggaagaaatgactcaacgaacggaacatgccacccccaaaattaacaccctgctctgggaacgcgaagactactcattaaaaaccttgagggaaacaagaagtacgcacacgaaacccccttgccattccgactccactgatccggcatacaacagcgagaacgacagaacagtccagcacaccacacgcgagccaaaacttggtaccccatttacccgaccccgccaaaccatattttacaaatgtctcactttaacccccaagggttccagggagatcaaggacttcaaggatttctaccttttcatagcagatcatttatgtagaaagttctggaaatgcaaaataacagtgtggaaagagaaacttcacccccagtttatagggagggcttaatccgggttggagaaaatttgggggggcttacccatgtaatccattaaactttggccaggttttgcccctaattaaaa

SEQ ID NO: 177824 - DNA, 931 bp, Homo Sapiens
  misc_feature (715)..(716): n is a, c, g, or t
  misc_feature (770)..(770): n is a, c, g, or t
ctgggtccgctgtgccaagttctcccccgacgggcggctcatcgtgtctgccagtgatgacaagactgttaagctgtgggacaagagcagccgggaatgtgtccactcgtattgtgagcatggcggctttgtcacctatgtggacttccaccccagtgggacgtgcattgccgctgccggcatggacaacacagtgaaggtgtgggacgtgcggactcaccggctgctgcagcattatcagttgcacagtgcagcagtgaacgggctctctttccacccgtcgggaaactacctgatcacagcctccagtgactcaaccctgaagatcctggacctgatggagggccggctgctctacacactccacgggcatcagggaccagccaccactgttgccttttcaagaacgggggagtattttgcttctggaggctctgatgaacaagtgatggtttggaagagtaactttgatattgttgatcatggagaagtcacgaaagtgccgaggcccccagccacactggccagctccatggggaatctgacagtctccattctggagcagcggttgacactgacagaagacaagctgaagcagtgtctggagaaccagcagctaatcatgcagagagcaacaccatgatcaggggagcaggaatcaggagctcggtggatttgcaggtggcaggccagggatttgtaccatgggacttgnngtaaataaaggggactgaactctgtgggaatcacatccatactggagccctggnatttttgcagttctgcccctcacacttgctatctgcaccaggaggctctccacctgggcagccagaaggtccccagtgggccggggctcacacacaaatgatgcttcagaccccgaatgagaaggaccacattttgggcttaatggtaaagggagccactt

SEQ ID NO: 177825 - DNA, 940 bp, Homo Sapiens
cagaagtctggccaaaaaaatttccccgggggctcccccatttattggaatgtgggatttccccccccaaggggtttccatgttcccccctttttatttttacccccaggtttccccatgggttacaaaattcccgtgggcccttgcccccccttggcaaattccccccggagggctcccggaattcccgggctcccccctgatccaagggggttggctcttctggcaggaattagcctggtgggtttttccagacccacggcttcaagcttgttcttctgtcaggtttcaaccggttgctcccagaaatggagactgtcaagatttccccatggagctggccagtgtgggctgggggccctcggcactttcgtgacttctccataatcaacaatatcaaagttactctcccaaaccatcacttgctcatcagagcctccagaagcaaaatactcccccgttcttgaaaaggcaacagtggtagcaggcccctgatgcccatggagcgtatagagcagccggccctccatcaggtccaggatcttcagcgttgagtcactggaggctgtgatcaggtagtttcccgacgggtggaaagagagcccattcacggctgcactgtgcaactgataatgctgcaacagccgatgagtccgcacatcccacaccttcaccgtgttgtccatgccggcagcagcaatgcacgtaccactggggtggaagtccacataggtgacaaaaccgccatgctcacaatacgagtggacacattcccggctgctcttgtcccacagcttaacagtcttgtcatcactggcagacacgatgagccgcccgtcaggggagaacttggcacagcggacccagttgatgtgctgggtcagggaaaacaggaatctctggcgatgagttgaccacactttgactgtcttgtcatccc

SEQ ID NO: 177826 - DNA, 1597 bp, Homo Sapiens
  misc_feature (140)..(140): n is a, c, g, or t
  misc_feature (321)..(360): n is a, c, g, or t
aagacggcgggcccagcgggtggtgtgcccgggcacgagaagtcgagggggggagatctggtgaagcaccagaccggatgggtggaccgagaatggtgatgcagcgccgggcgaggagatgtcaatgagcgagggtggantgcacgaagggccatgggggccatgcggccatgggctcggccctcgactggagtacgccagggcccgtattgccgtttgcgcgcgcgcacgttgggggtgcccaaggggggccccaagaagtgggtggtaaatggacgtttgccgaggccaggtggtgggttttcggatataccctgaaannnnnnnnnnnnnnnnnnnnnnnnnnnnnnnnnnnnnnnnccagaagcgggcacgtgtagcatagggactggaaccagcgggggtgtgccgcaagggcggcggttgcgatggccggggcgttgggggcgcaccccgggcccgaaacttggccaggggggaaagggggctgactttggggcttgcgaggggggctggacccaggggcgtccgctggactggccatccagttccaggatggggataagcagctggactggtcagcaggcagcattcatccgccagcgcgtggtcgggctcgctcgctgggccgtcgtcgcgacagcagatccagagcttggtgagcaggcggaagagcagggacatgctgtcctgggtatccgaagtggccgtatgcacgggcaggcagctgggcttcagaaggccccagatgcggatgaccaccatcaattcccgaagcatgcccagcgaggtgccgtcccgcagaaagctgtggcccggcctcagcagggaaccctggttgggtaggctggccaggcaggtacagcacgaagtcgccctacccactgcaagagctgctgcagcgcctgcagtgtgttcatgtccagcacaaattcctccgtcttgaggttgatcaggaccttgtcaatgtcgacgtcggtgatcttggtgcagatctcggtcagccggtcgccggggctcttcgtcaggcgctgttgagaaagtgggggcgcagcagcgacttcagggtggagctgatggcgatgaggaagagcttggtgtggtagtcgcacacgcgggtcaccgtgcagggcgacagcttgcagagcgaggccttcatggccaggatccgggtggagaggacctgctgcagggcagcggtctggcgcgtgtactcctcgtgcagcttctccaccaggctctgtaccatactgggctgcacgtgcagcaggatgtccccaccagtcgtagccggtcaccatgcagtactccagcaggaagagcaggtgccgcagcgccagccccacctccagcgggtggcccatggaaggtgagaggacggagcacgctcagcttcccgtggctgtcaatccccaccagggccagtgacgtccacgatagctgcatagcctttaagtggacggcggggcccgcggtgcgggggcgcttcatggccggctcatccacaggcctcggggccgcggagctgtagaagacggccatggtctgcagtgagagccggtgcacgatgtggacgctgccgtcgtggaaggccagg

SEQ ID NO: 177827 - DNA, 894 bp, Homo Sapiens
agccggacatgaccatccggcagcagatcatgcagctgaagatcatgaccaaccggctgcgcagcgcctacaacggcaacgacgtggacttccaggacgccagtgagggcagggcctggccgggcggccaaggggccagggttggtgggggtgccacaggggtgtgactgccctccgggttcccccacccgaggggccctctgctccggcatcaccacagtgagtctgaggacgctgtgctgcccaggcacgatcaccgagccctgcacctctgcggcgccctggaggcctggccgggatgtctgttggctttggctccagggaccaagggaggcagccccagggagtgagagtctcccagcctcaggggtcagcggggatcaggtgctgctggtcctgggattccacaccgaaaggatgttggggtcacctggcacgggccccttacagggtggggcctgcaatggccgcctcctggcgggacctgcctgccggagcctcctctccttcccaggtgacgacggcagcggctcgggcagcggtgatggctgtctggatgacctctgcagccggaaggtcagcaggaagagctccagctcccggacgcccttgacccatgcccctccaggcctgtcagagcaggaaagacagaaaacctcggctgccagctgcccccagccccccgacctttcctcctgcccctcctcctctttctgggcctttacgtacccagggccccggtgggggggtaaacttgccccaagggcccccagggaacaggaggcccaaaggacctggactttttgcccaaaaaattaaccacccccggaaccgattaattttaaaatttccacccttccaaacccttggaaaaaggggccccttgggggggtg

SEQ ID NO: 177828 - DNA, 1389 bp, Homo Sapiens
  misc_feature (761)..(761): n is a, c, g, or t
  misc_feature (775)..(775): n is a, c, g, or t
  misc_feature (830)..(830): n is a, c, g, or t
  misc_feature (833)..(833): n is a, c, g, or t
  misc_feature (872)..(872): n is a, c, g, or t
  misc_feature (925)..(925): n is a, c, g, or t
  misc_feature (1032)..(1032): n is a, c, g, or t
  misc_feature (1104)..(1104): n is a, c, g, or t
  misc_feature (1110)..(1110): n is a, c, g, or t
  misc_feature (1112)..(1112): n is a, c, g, or t
  misc_feature (1203)..(1203): n is a, c, g, or t
  misc_feature (1244)..(1244): n is a, c, g, or t
  misc_feature (1275)..(1275): n is a, c, g, or t
  misc_feature (1343)..(1344): n is a, c, g, or t
ccagggagacgctggccgagttctgggcccgcctgctcgagcgcctcttcaagcagctgcacccccagctgctgctgcctgatgactacctggactgcctgggcaagcaggccgaggcgctgcggcccttcggggaagccccgagagagctgcgcctgcgggccacccgtgccttcgtggctgctcgctcctttgtgcagggcctgggcgtggccagcgacgtggtccggaaagtgctcaggttcccctgggcccgaatgctccaaaactgtcatgaacctggtctactggggctcactgccctgggaacccccgggccacggccctgccttgaatattgccaaaatgtgctccaagggctgccttgccaaccaagcccaaactggaacgcccaagggcacaaacccctcctggaacccctgcgcggccccacactcaaaaaattctgggggaactcaccggggggggcccgacctaacatttgctccctcccgccccaccctacctgggcggtaaggccactccaccgtgtcccccgagaacgaaaccaccggtatacgacgccaacacagcggagcgcgaccatttcagcgtattgtacaatatgtcccaccgctgtggcggttacgtctaactttggccccccgccccgcgcctccactcgaccggacgacagagcggccgcggcccgggccgggttattaatgaacctcccgccctctccaccatcccgtgaagccgtaaccggagccgttcactantgatctggggtttnagttgcggtacgccacagcccagctaagacacagagtctgagaccggaaacgctnttntgttcttacatgagcgcagacgccgccgcatcagaaccngccgacgacatcgttcgaagtccagccaatgtagcgaaccccgcggcgcgcgncgcatgtcgaggcgcacgccgtggatacgcgtacgcacacacaccccaagcccacactacagtaaccaactgcctgactctgcgcagtgcacgggcactcgcggtcnctatatctgatatagcccacctcgcgagcgtctagcccgcgccacgatattgacacatggtccccgcacttnttttantntcccgcaccagtccgccgtcgagccggcgcccctacctatatatctgccccgcgcgccacccgcgctcacagatatattatattatgtgcncggtgcgctcaagccctagcgtcacgagcgcagcgagcacntatcacgcggagctgtcgaggtagacacatnacctccgccccccgcacgcacagagtccatagtctgcccgccgaggtcacgttgtgctagaagcgcgnncgtcgacaggcaggcgcggcatagtgacgccccgcacagcctagc

SEQ ID NO: 177829 - DNA, 903 bp, Homo Sapiens
ggtcttctggccttcctgtctgacaggcctggggagggcatggggtcaagggcgtccggagctgggagctcttcctgctgaccttccggccgcagaggtcatcccagacagccatcaccgctgcccgagccgtctgccgtcgtcactggcgtcctggaagtccaacgtcgttgccgttgtaggcgctgcgcagccggttggtcaatgatcttcagctgcatgatctgctgccggatggtcatgtccggcttggtgatgtccacctccacctcggggttgttgatctggttggccaggccgtcacccatgacctcgggggaggtaccggcctctggccatcccgttccagcagcggtcatcactggcagtgctcagggccatcttctcactgcacagtgtccctgggaggctgatccagaagtcctggacgtcgcggagctgggccttggcttcagagaccagcttctccagcgtgcctgaaggtggcctctcccgcggggccagcttgccccggcgccgcttctcctcaggcccagggccctgggggttgaccttggggttcccgcagcctggatgacctggagagacactgcagggtccttggccgtgagcgtgtccctgttgtcctggagggcgttgatggcctccgccagccacgtgtgcacgctgccgatgacactctccacacccgatgtaccccagaacttgtcggtgatgagcaccatggagtccaggaggttcctccactcggcgtccaggtcggcctggttggcaaggcagcccttgagcacatttcggcaatagtcagggcagggcctggcgccggggactcccaggcagtgagcacagtagaccagcttcatgacagctctcgagcactccgggcccagggggacctgagcc

SEQ ID NO: 177830 - DNA, 959 bp, Homo Sapiens
cctcctccccacctccccgcaagctggtcccatcgaccagcaagcccagccccagggcgcttagggagaaatgacccagcctcctcagaccccgcctgcctgtcctgtgcccaccacgcagcagtcaggggagaaaatggtggctatcccttctgcttagagaaagaaatggcctttagctggtttcatgtttgtgttttgactggagggagtagaccctatctataaggtgccaccccatcatccaagctgccacactgcccggagcagcctgttcctgcactccaccctgctggccccaggacttctgatctcagtcctctgggagggaggttcgcctaggaggtgccccccacattggtgtccccatgggcagcaggcagacagctcacccccaccagcatgatggccccagctgggggcagtggcaggagccttacttttgtcacagccttgcccacaaaccctgcctctgaggggagactgaggaagggcagagccagaagcaagccgtgccaggccatctgcctgctcatggggtcctaaagcgcgcgctaagcctgcaggaaagccggggcggtggggggggcttagtgccacatgcaccccactcattccaaagccaccaaactgccaggggctgccgtccacccgtggggcccaaggggctggggccacagccttgccctttttcgttgccctaccctcttgccctaactcgcggtggaggccggatttgcacggggcaaacgtgcaacctggcgccgtgggtgagcttgtttctgaccaaaagtaaccgaattttcctttctcaaaaaagcccttaactttttcaacccaaattttttggaagcccacgtttttgggaaatttggtccacctgggaaaggaaacattttacctataagcggggccacactcccctttttcttcccgcaccccccttttccctacctcct

SEQ ID NO: 177831 - DNA, 319 bp, Homo Sapiens
  misc_feature (56)..(56): n is a, c, g, or t
  misc_feature (77)..(77): n is a, c, g, or t
  misc_feature (82)..(82): n is a, c, g, or t
cggtggggggggcttagtgccacatgcaccccactcattccaaagccaccaaactnccaggggctgccgtccacccntgggncccagggcctgggcccaaagccttgcccattttcgttgccatacccctcttgccttactcgcggtggaggccggatttgcacgggcagacgtgcccctgggcccgtggggagcttgttctgaccagacgtacagattttcattctcagaaagccttacttttcaaccaaatttttgtagccagttttgtgaatttgtacactgaaagaaaatttaaataaaggggaagtccacatta

SEQ ID NO: 177832 - DNA, 790 bp, Homo Sapiens
gggtgaagtcccaggggcataaggacaaagccaaggagctgaagtcgcttgagaaagaaattgctggcccaagatgaggacccacttcaattacagtggacgctgtgggttgcttcgagggtgatgaagaagaggaagaggatgatgaggatgaagaagagatcgaggttgaggaggaactctgcaagcaggtgaggtccagagatatatccagagaggagtggaagggctcggagacctacagccccaatactgcatatggtgtggacttcctggtgcccgtgatgggctatatctgccgcatctgccacaagttctatcacagcaactcaggggcacagctctcccactgcaagtccctgggccactttgagaacctgcagaaatacaaggcggccaagaaccccagccccaccacccgacctgtgagccgccggtgcgcaatcaacgcccggaacgctttgacagccctgttcacctccagcggccgcccaccctcccagcccaacacccaggacaaaacacccagcaaggtgacggctcgaccctcccagcccccactacctcggcgctcaacccgcctcaaaacctgatagagggacctccctgtccctggcctgcctgggtccagatctgctaatgctttttaggagcctgcctggaaactttgacatgcttcatgtttttactcaaaatccaataaaacaaggtagttgggctgggcaacccaccgtacgataggccacaaccctaaaaaaacaaagggggcataatctaccctaatgagaac

SEQ ID NO: 177833 - DNA, 909 bp, Homo Sapiens
gggaggaaccagggataagggtgaaggaggcttttgggctgggccgccctggcaggaacgtgaattttgcagagcaaagacggggaccccaagagtgccctatctggttctaaccccacaggtcaccagagggtaaagaggtcccaagagggaaaagtttcctgggagctggcgcagtaaaatgggagtttgggggaaaaggcaggaaagggaagttggagccccccggcgtgggtggaagaggtcagtccacaggggaagaacggggtgaacggggctcctgctgaggcatctcatgagctgggaagcatccagggagccagccccttgcagacgagttgggaggaacacctggtgttgctaactctaggaggctgctgtgggcaggctggcatggcagctcagtcccggggacaggcgtggtgggcagcccagagcaggtcgggcacgacgccggcgtgcagctgcaggatggagcccacgctcagcaggtgcatgatctggtgggagttgccccagtagtcaaagcggccaggtccccagcgctcgggcagacgggctacatttaccagtcccccaagcagcgccagtgcgtccatgcgcaggtagcagggcagggagcctggagcccctgaacccagacccactccccgggccccaaataccagtaggcgggcagcagcctgccatccaaatgcccggagccgagcactggtggagggggcggtgagagcacgccagccggccacacccgacaacacagtgtagcccaccagggcagccgggcgcagccagggcctgcaggccagggtgcagtggatgatgggcagggccccaagggtgttgacaaggcagaccccacacatgtccagggcgaggagccgggcgtacacagcgctgcccccttgc

SEQ ID NO: 177834 - DNA, 800 bp, Homo Sapiens
  misc_feature (129)..(129): n is a, c, g, or t
ttttttttgggttccccggccctggaaaaaacaattttggaagagtttgggcccttcttggttttaaggaataaaaaaagttgggcctttttattgccatgaaactaaaattgggaaaggttagggggncgtgaatggggtgggagggggttgaggggaccagggagatgccctccccaccagctcctggataatgacacctcacttcttgcataatttctggcatcttcccgcctgcaatgcctgctctctcagcgtctcggagaaggggggatcacacactcatcgtcatgcttggagaataattgtcgttctgaaaggagtggaggaagttccctcctagctcgccgtcatctcgaggggtgcctggaggattgctaatgccacttatgttgttaggagaattttttggaagtccgtctatgtcgcctgaccctaatgatccattcatgtggtgtggctccatgccacccatgccgcccatcggaccgtccgagccgggacccatcgggaagttggaccggctgcctccaggcggcactggattaatcattgtgtagatgttgtcactggaatttgttgaatctgcgggactgggcataatgggtgttcctggaggaccgccaccaccagggggtcccacataggtaccaggtgatgaggaggagtatggaattgagttagcactgttaggattgggccagggtctgccagctcccgggcccatgttaatcccgggcatggcggggccgagggagcttgggtggtggtctcatgccgctgccgtaattctgtgggcc

SEQ ID NO: 177835 - DNA, 1041 bp, Homo Sapiens
gcatgcgccccaaattgcgctcggggaattaaaagaggggaaaaaaagcccgaagaaaactcacgccccaaacaaaacgcaaggagaggagggcgcgcggcctgcagccctcgcccgcgtccccggccgcggcgtgatgcgcgcggaccagcccgcgacgcccgggctgccgctgtccccgcacctggacgctggcgcggtggccgcgccccagcctcgatcgctcgccgcggcgactcggccccaggcttccggcgccggtgggggccctcgctctccatggggctgagggactggctgagaaccgtgtgctgctgctgccggtgcgagtgcttggaggagcgcgccctgcctgagaaggagcccctcgtcagtgataacaatccatattcctcatttggagcaactctggtgagggatgatgagaagaatttatggagtatgccccatgatgtgtcccacacagaggcagacgacgacagaaccctgtacaatttgatagtcattcgtaatcagcaggccaaagactcagaggagtggcagaagctcaactatgatatccataccctgcggcaggttcgaagggaagtaagaaacagatggaagtgcatcttagaagatttaggttttcaaaaggaagctgactctttgttgtcagtgactaaactcagcaccatcagtgattctaaaaacacaaggaaagctcgagagatgttgttaaaactggctgaagaaaccaatattttcccaacaagttgcgagctctcagagagatatctctttgttgtgcaccctctcattgcacttgatgctgcccaagagttctttaggcttgctcgtcgaacttcccccaagaaaccctgggggctccatgcctcggcacatgcggcccccaggcaccgcttctccccttcccgcctccctagccccccacacgggaccctccccctgggggcgtccaggcgtaccaatcccttccggccgacgcctgtcccgttgcgttcttctcccacactcttcgcccttggtgccgcttctctc

SEQ ID NO: 177836 - DNA, 955 bp, Homo Sapiens
  misc_feature (577)..(611): n is a, c, g, or t
  misc_feature (665)..(665): n is a, c, g, or t
tcagtgagccagacttgcttactatattcctttataataatgctagccacttcctggattctttagtaatgtgctgtatgcaagaactttccagtagcagtgaaggagggttgcctctccaagcttcctaagggatgctgccctgtgtggggatgcattgcagaggcactagtagcatgggggctagagtggggagcgagatgtaaaagggtggggggataggagaattccagagtgcttccagcattagggtcctgagaacttctgagttcagagaaacatgcaaagtgactaacaaaatagctacttacctttgcagttctacagaccctgggagctgctttgggagtgagaaaggcaaccctccaatgtgtttcaactttaaaatgttgaattcttttcagacatggtatctcatttattctccttttctagcgtttgttgaatttcaggcagaatgtcttacagaatgtcctagaaccagattatcatttaatctgaaacagctgaggaagggacagagaaggtacaagggcaaggcagcacaaaacagatcaggagaatgaagagggaatgnnnnnnnnnnnnnnnnnnnnnnnnnnnnnnnnnnncaagtaactaaaacagcatctacatgtagagtgttgtggagagctgagaccagngtaaagtcaagtgcagcatcagtactgcgagacccaccagcccctggagagggtcagcccgagaatctggtagtgaaagcctgtctagggtcccggaaccctcacccttcagccacctgcagagaagccagggcccccagagactagcctggttctgaagtgggcaggggttgctgccaaaacccctctggccccttatggttgagaccctgcttttcaggacaggccagcccgttggcccaccatgtcacatttctggaatggagtgtcacagggttccctaacaataa

SEQ ID NO: 177837 - DNA, 1082 bp, Homo Sapiens
ggtcagaaaatccagtgcacattgcaggacgtcggctcggccctggcgacaccatgctcctcggcccgggaggctcacttaaagtataccacgttcaaggcggggcccatcctggagctggagcagtggatcgacaagtacaccagccagctcccaccactcacggccttcatcctgccttcgggaggcaagatcagctcggcgctgcatttctgccgggccgtgtgccgccgggccgagagacgtgtggtgcctcttgtccagatgggagagaccgatgcgaacgtggccaagttcttaaacagactcagtgactatctcttcacgctagccagatatgcagccatgaaggaggggaatcaagagaaaatatacaagaaaaatgacccatcggccgagtctgagggactctgaaatcacagaaagtgggagcttggaggatccctccatggcgatggccgtggagagaggagcttgcccttctggggtcctgggtcctgaagagctcacccagagaggctcaaagcagccttttgtcccagctcagctttgatctacacctcttgccaccctcctcaagggactgtgaccccttggggaatcctgtccctgaccctgcttccccaagctctcctgggtctgggagggatgtggggaatgaattggcattgcaggaaagacaggcaaaagggattgctgcaatgagaaggacctgtgcggaaaaggaataaaagctggaaaggctggaaattcattaccctttctcccatcccccacttccgagcgaacactccaggcttctatgtcgggcgcggaaaaagacgtattgaaagggccccctggtcataccgtgtttccctgacccagttttccttgcacaaaggggggagaactggcccggctctccccaataggggagtcctgtacttatttcccgcataaccccagggtcaaacccgggcatcaaatggaaaatcccgcctcgcacattacccccgggggaaatttataaaccccggcccataacagggagccggggcgcttttttcttttcttctggggacattcccaccaagggagat

SEQ ID NO: 177838 - DNA, 932 bp, Homo Sapiens
  misc_feature (710)..(710): n is a, c, g, or t
  misc_feature (725)..(725): n is a, c, g, or t
agagcttgtgaaaaaacagttgaagaagcacctttcaggagaggagcatgagaaactgcagcaactgcttcagcgaatggagcagcaagaaatggcacagcaggaacgaaagcaacagcaggagctgcacctggccctgaagcaagaacgtcgggctcaggcccagcagggccatcggccatacttcctgaaaaaatctgagcagcgccagttggcactagctgagaagttcaaggagctgaaacgcagcaagaaattggagaacttcttgagtcgaaagaggcgacgaaatgcaggcaaggacaggagacatctccctttgagcaaagagtaataaggaactatcctctgctctgccactgccccagggagacatggatctgtgaggacagatttggccacggctggtttccgttcaagggcaaggatcacagctgcccttgaatctcattgcctcagagaagactagagggctcttggactatccctagggctacacaagaatagttcagccttctgccatgccacacagcctcagcttgaatctggttcattgcgtcctcgtgttcttctctcatccttgccttaaaccagggattctgataccgaagaagaggggccaatgaaaaccatggagtctgttcgtgactcccagggctgggacattatgtaggagccacttcataaacattctccttcactcatccaanaaccgcgagcgacgnccccccaaactcggaggcatctaatgcccgggtgccggagaaaagagggaatcgaaaatgggaccctgggtccctaatctgttttccctgaaccccaacctttcccttggtacccaaagtgggtaagaaatctggcccggcgtcttcccccttattaacggcgaaggccggaaattcaattttttccgcaaaaaagcgcccagaggt

SEQ ID NO: 177839 - DNA, 1021 bp, Homo Sapiens
accgcgaggaggacggcgggggcctggagcccgcggccgtggccgcgacctattgaggggcacatctaacggtctaggagcgagcctgggtggcgaattcgagacgagggggactaagacgtacaaacaattggtagctggaaacagtcctaagaaacaaggttctagaccacctatccaaaatgcatgtgttgcagataagcacaggcctctggaaatgtcagccaagatccgagtaccatttttacgtcaggttgttcccattagtaaaaaggtagcccgggaccctcgctttgatgatctgtcaggggaatataatcctgaggtgtttgacaaaacataccaattcttgaatgacatccgagcgaaagagaaagagcttgtgaaaaaacagttgaagaagcacctttcaggagaggagcatgagaaactgcagcaactgcttcagcgaatggagcagcaagaaatggcacagcaggaaacgaaagcaacagcaggagctgcacctggccctgaagcaagaacgtcgggctcaggcccagcagggcccatcgggccatacttcctgaaaacaatctgagcagccgccagttggcactagctgagaagttcaagggaggctgaaaacgcagcccgaaatgggagaacttcttgagtccgacagaggcgacgaatgcaggcaaggccaggagacatctccctttgagcaaagagtaataaggaactatcctctgctctgccactgccccagggagacatggatctgtgaggacagatttgggcacggctggtttccgttcaagggcaaggatcacagctgccctttgatctcattgcctcagagaagactagagggctcttggactatccctagggctacacaagaatagttcagcccttctgccatgccacacagcctcagcttggaatctggttcattgccgtccctcgtggttccttctcctcatcccttgcccttaaaaccaagggatccttgatacccgaaaaaaagagggggccc

SEQ ID NO: 177840 - DNA, 1336 bp, Homo Sapiens
  misc_feature (654)..(662): n is a, c, g, or t
  misc_feature (757)..(765): n is a, c, g, or t
  misc_feature (790)..(790): n is a, c, g, or t
  misc_feature (1010)..(1010): n is a, c, g, or t
gcgggacgcggctcggggctcccggaagcggcggcggaggcggaggcccggagttgggccgggacgggatccgggaggcttctgagccggagcaggcagcgcctggaggccagaggccgttcgcccgcctcaggccggtcggccgccgctcccctcccctgcgccctgttcccggcagggccagagaggccgccgcctccgcccggtggttctcgggcgaagggaagccgcgaagcaggtcctggggaagagctcgcctgctcctgagggaagcagcgataagatggcgctttgaaggggagccgaggccgagtcactctgttcgtcgggacgccgcctttctaacgccgccgtcggctcgcaccactctgggcctgctgcccacactgactgcggggtccgggagagcgggatgctggccggccgcgcctggcttcttggaaagagcaggaaggaagcgcgaagaatgccagttccgcgggcagaaaaacctctgttagagggagcagggatggcaacccgaacaagggctgtggccccacagcgaccgcccagcacatggagcccccaagcgcacgcaatggccaaagaaccccccataaccgccggccaaaaagagcgaatttggggcccgcacaagtgaagaaagggcgnnnnnnnnngagttaaatatatcccccctcgcggggcgcggggtaaaaacaaacacactggggaacaactgggggcccatcagacgtttttaccgccggttttnnnnnnnnnaccgttgataccccctttgggcagngacgcaattttttgcgcgagcccttccccctccaaccaggcgagggcactctccgttggggcgggcagtaaaccaggtgagctaattagccggaaggaaaaaaatttccggttgaaaatattgtggatttgcagcctacattatccgcctatttcctgtgaagttcttctttgtttcccccataaatatctgtttgggcaaccaagaagggtgaaccccncccgccccacacgaccccttatcccacctctagcttcgccccatgacgggggggtacacttctctgcaaaaccagaacattgggcgacaaaactattttttgttccattcccatggagatacccacttctataaacaattatctacaccaactgcacatgtggcgggggaagacaccacttcacctcacccctcagcctcgaccgcatgttatcttacctatcgcgcgggagtaaaattggctttgggaccgctccaaagatccgaaaagtgcgggaggagtcaactcgctcgagctcggtagacgagcaactaacagaaaccacc

SEQ ID NO: 177841 - DNA, 1044 bp, Homo Sapiens
  misc_feature (89)..(114): n is a, c, g, or t
ggttcacgggggcaatgtggttatgggtccgcaccccccgccgagtcggcggtggccgtgaaaggacgttctcaacaatgtgccgttannnnnnnnnnnnnnnnnnnnnnnnnnaggaagattagaggcccttgccccagaagggccatataatggcccccggggtccaggctctttccagggcctatttgtagaggccacaaggaaattgtgaagcccttgcccgcgcaagtttgttcccgacggtggggccaaagcgtgtacccagagggcttccgggggggttccgcggggtaggaccagaactttggaacacggcccgctttctcgggatggtagggggggacttttccctgggaaagggggttcgtttggtttttcccagggcccaataggatgcccaagctgggcctcaggagcgccaggttctttaagagccccgtcgcctctgtccaaggggggtaggcattcgcctcccagcaccttgtgctctgcaattgactttgtccgagagtagtgatcaggggtggaggtgaagaggcaggtagggcagagattcatccccatttctgataacttgacctccaaagatgacattgaaagtgctggtgtaaactaacctgggcacccttctcctttggcaaacctggaggatgttgtctgtgcccctgacgttgacttctttgatcaggtttcgattgagttgctcccgccctgacataccataagaggcaatatggaacacacaagtgacgtctgcatcctggaaggctttctctacgtcagacaggtggcggatgtctccttgtataaacttgattccttctggaatggtttgagcagggctgctgatgtcaaacagaatcacatggactccattttggttcagggcacagcccaggcgaaaaccaaaatagccacttcctcctgtaatgaggacactttccttttgagatcttttggggtccatatgtggcagtcaaaagataactggacagctgcaggaacaagggcgcggcagacggctacagcaggcagagaggc

SEQ ID NO: 177842 - DNA, 747 bp, Homo Sapiens
acctccagactcagctggctgtgcagaccaagcgcgtggcggcgcaggtggacggcggcgcgcaggtgcagcaggtgctcaatatcgagtgcctgcgggacttcctgacgcccccgctgctgtccgtgcgcttccggtacggtggcgccccccaggccctcaccctgaagctcccagtgaccatcaacaagttcttccagcccaccgagatggcggcccaggatttcttccagcgctggaagcagctgagcctccctcaacaggaggcgcagaaaatcttcaaagccaaccaccccatggacgcagaagttactaaggccaagcttctggggtttggctctgctctcctggacaatgtggaccccaaccctgagaacttcgtgggggcggggatcatccagactaaagccctgcaggtgggctgtctgcttcggctggagcccaatgcccaggcccagatgtaccggctgaccctgcgcaccagcaaggagcccgtctcccgtcacctgtgtgagctgctggcacagcagttctgagccctggactctgccccgggggatgtggccggcactgggcagccccttggactgaggcagttttggtggatgggggacctccactggtgacagagaagacaccaggggtttgggggatgcctgggactttcctccggccttttgtatttttatttttggtcatctgctgctgtttacattctggggggttagggggagtccccctccctcc

SEQ ID NO: 177843 - DNA, 930 bp, Homo Sapiens
  misc_feature (13)..(13): n is a, c, g, or t
  misc_feature (751)..(751): n is a, c, g, or t
ggagcgagcctgngtggcgaattctgcacgaggagcagatctgggaactgtgagagcggcaagcaggaactgtggtcagaggctgtgcgtcttggctggtagggcctgctcttttctaccatggcagcccagggctatggctattatcgcactgtgatcttctcagccatgtttgggggctacagcctgtattacttcaatcgcaagaccttctcctttgtcatgccatcattggtggaagagatccctttggacaaggatgatttggggttcatcaccagcagccagtcggcagcttatgctatcagcaagtttgtcagtggggtgctgtctgaccagatgagtgctcgctggctcttctcttctgggctgctcctggttggcctggtcaacatattctttgcctggagctccacagtacctgtctttgctgccctctggttccttaatggcctggcccaggggctgggctggcccccatgtgggaaggtcctgcggaagtggtttgagccatctcagtttggcacttggtgggccatcctgtcaaccagcatgaacctggctggagggctgggccctatcctggcaaccatccttgcccagagctacagctggcgcagcacgctggccctatctggggcactgtgtgtggttgtctccttcctctgtctcctgctcatccacaatgaacctgctgatgttggactccgcaacctggaccccatgccctctgagggcaagaagggctccnttgaaggaggagagcaccctgcaggagctgctgctgtccccttacctgtgggtgctctccactggttaccttgtgggtgtttggagtaaagacctgctgtactgactggggccagtttcttcctttatccaggaagaaaggacagtcagccctttgtaggtagcctcctacatgagttg

SEQ ID NO: 177844 - DNA, 328 bp, Homo Sapiens
ttccctaaaggtctcacagcaaaggagcaggactccccaggcccctgtaccctgccctggcctgaatttcaaggccttgtggcccccagcttctgtttcaagctgggcagacccccaggatcccttccctccctaaggactcagctgaggggcccctctgcccccttctacctccacctcagcaccctcccccagcttgatgtttgggtctccccagcaccctcctccctggccggtgcaaagtacagggaggtaaagcaggacccttgcagacatgttgcccagcacacagtaggccctcaataaaagccatttgcactttaaatat

SEQ ID NO: 177845 - DNA, 1024 bp, Homo Sapiens
  misc_feature (847)..(847): n is a, c, g, or t
ggggcgcgcgggcggcgggcgggctggggatccgccgcgcagtgccagcgccagcgccagacccgcgccccgcgctctccggcccgtcgcctgccttgggactcgcgagcccgcactcccgccctgcctgttcgctgcccgagtatggagctgctgtgttgcgaaggcacccggcacgcgccccgggccgggccggacccgcggctgctgggggaccagcgtggcctgcagagcctgctccgcctggagggagcgctacgtaccccgcgcctcctacttccagtgcgtgcagcgggagatcaagccgcacatgcggaagatgctggcttactggatgctgggaggtatgggaggagcagcgctgtgaggagggaagtcttccccctggcccatgaactacctggatcgctacctgtcttgcggccccacccgaaaggcgcaggtgcagctcctgggtgcgggtctgcatgctgctggcctccaagctgcgcgagaccacgcccctgaccatcgaaaaactgtgcatctacaccgaccacgctgtctctccccgccagttgcgggacctgggaggtgctggtcctagggaagctcaagtgggacctggctgctgtgattgcacatgatttcctggccttcattctgcaccggctctctctgcccccaggaccgacagggccttggtccaaaagcatgcccccagacctttttgggccctctggtgctacagaattataccctttggccatgaaacccgccccatccattgattcgccaccggggcaaggattggggggcttgcaagtgccaaagccctgggggtgccctggcttccaatgtcccgggnggaatgaaaccctcccagaaccctggcttggcaaggggataccccctgcccaccctgaaagtggggacttggccctggcgggggccctgttccagggagccacaaatctcgaagactttgccccttctcagagggaaaaggcccctccgggtgaaaaagccggtcttaaaaaccccg

SEQ ID NO: 177846 - DNA, 1200 bp, Homo Sapiens
agcaccacacagcactttccaggcctcaagcagtactagcaggtggaagggtgttcccagtcctgtagaagcagcctgggtactgtgtatcccacagggggtcagggctcccagcgtgctctgtcaaccctggcctcctgttgcttgtggcctccttgtgtgggcccgctgagctcctgggggctccatcccaacagcagaggccccatgcagcccatctctgacctggcctctctcccagaaggcagcctgcctcctttatctgtaactcaccctctcatgcacctggggtgtgtgctgtcttattctgcagcccgaggaggaccccggatgtagaggagctcatggcctgcgtccacccacagtcttctgccctgctcccttttttctgaatgccaagctggggcctctcttgctcagccttccgttcacccaggattgcctattgttgtctgagtcccagctggggaaaggcccacgcatcctgggtggtcaggcgggcaggggccctggctggtgagggaggcctacctttgacggctacgtgaacgctctggctgatggagagctggggctggatgaggacactgcacaggtactccccctcatccatgcccttctgcacgtcagtcagcttgagggtcccattctcaaacaccacctggcggtggttgtctggcagcagcagggcatccttgtaccacttgatggagtagtagggatagccgatgaccctgcagttgataagggtgtcccgcccggcgactgctgtgatgttccgcatagcccggatgctgggtgggcctgggcaggagtcagaagagaggaggaggaggagaagggcatgtgctgctgtcagccagggacagccaggcaccaccctgcggtgctcttctcaggcactcggcccctgagactttcgggggcggacatttggtgggggcacagggatgcctttttacaaagctacagacaggggctggaattggggggtgcccacagtctctccaggactcactgttactagcttcaaagagttgcaaacggacgcagtatatacatgccttggccaagagccattcccctcgtgggacagggataggaccaaactgcagccccaccaagaagtgactgggatttgggagggcaagtcctcatttatggggagattaagattttgggattaaagtggaaaggtag

SEQ ID NO: 177847 - DNA, 907 bp, Homo Sapiens
  misc_feature (834)..(844): n is a, c, g, or t
  misc_feature (846)..(846): n is a, c, g, or t
  misc_feature (848)..(856): n is a, c, g, or t
  misc_feature (858)..(859): n is a, c, g, or t
  misc_feature (861)..(863): n is a, c, g, or t
  misc_feature (865)..(867): n is a, c, g, or t
acactctgcggcgcatccaggcgtccatggcacccgcggctgccctgccacctgtgcctagcccacctgcagcccccagtgtggctgacaacttactggcaagctcggacgctgccctttcagcctccatggccagcctcctggaggacctcagccacattgagggcctgagtcaggctccccaacccttggcagacgaggggccaccaggccgtagcatcgggggagcagcgcccagcctgggtgccttggacctgctgggcccagccactggctgtctactggacgatgggcttgagggcctgtttgaggatattgacacctctatgtatgacaatgaactttgggcaccagcctctgagggcctcaaaccaggccctgaggatgggccgggcaaggaggaagctccggagctggacgaggccgaattggactacctcatggatgtgctggtgggcacacaggcactggagcgaccgccggggccagggcgctgagccctcgtgctggaatggttgtctggtatctgaactgagcctgctggctggaccaactgtcctcgaaaagacacagctggcttccctagtacagagaacagggcttgggccactttggagagacagaatctagtcctgggcaacttcacatccgtcctcctgtctcagggctggcagggggagcctggaattaccccctagtgatggaatgacagggtctggtggggactgaattccctggccctggggtcatagcttgggctgttccttctctgatacgggaagagaccccaatcagatttttcaaattaaagcccagtcctggggaaatctccannnnnnnnnnnanannnnnnnnnannannnannnaactccaaggcgatcctattgtcccgggggccggaaaaaa

SEQ ID NO: 177848 - DNA, 926 bp, Homo Sapiens
  misc_feature (660)..(670): n is a, c, g, or t
  misc_feature (817)..(822): n is a, c, g, or t
  misc_feature (824)..(828): n is a, c, g, or t
  misc_feature (830)..(831): n is a, c, g, or t
  misc_feature (833)..(833): n is a, c, g, or t
  misc_feature (835)..(836): n is a, c, g, or t
  misc_feature (838)..(841): n is a, c, g, or t
  misc_feature (843)..(846): n is a, c, g, or t
gtccgcgtgcccaccaccggcatcatcgagtaccctttcgacctggagaacatcatcttccggatggtggatgtggggggccagcggtcggagcggaggaagtggatccactgctttgagaacgtgacatccatcatgtttctcgtcgccctcagcgaatacgaccaagtcctggtggagtcggacaacgagaaccggatggaggagagcaaagccctgttccggactatcatcacctacccctggttccagaactcctccgtcatcctcttcctcaacaagaaggacctgctggaggacaagatcctgtactcgcacctggtggactacttccccgagttcgatggtccccagcgggacgcccaggcggcgcgggagttcatcctgaagatgttcgtggacctgaaccccgacagcgacaagatcatctactcacacttcacgtgtgccaccgacacggagaacatccgcttcgtgttcgcggccgtgaaggacaccatcctgcagctcaacctcaaggagtacaacctggtctgagcgcccaggcccagggagacgggatggagacacggggcaggaccttccttccacggagcctgcggctgccgggcgggtggcgctgccgagtccgggccggggcctctgcccgcgggaggagannnnnnnnnnncatatttttaacaaatggtttttatttcacagttatcaggggatgtacatctctccctccgtacacttcgcgcaacttctcaccttttgtcaacggcaaaggcagccttttttctggccttgaatttatggctcgctttttttcttnnnnnnannnnnanncnannannnnannnnaacctccgaggcatcttatggtcgggtgccgggagaaaagaggtaatgggaatgggcaccgggggccttaagttggttcc

SEQ ID NO: 177849 - DNA, 837 bp, Homo Sapiens
  misc_feature (667)..(687): n is a, c, g, or t
gtccgcgtgcccaccaccggcatcatcgagtaccctttcgacctggagaacatcatcttccggatggtggatgtggggggccagcggtcggagcggaggaagtggatccactgctttgagaacgtgacatccatcatgtttctcgtcgccctcagcgaatacgaccaagtcctggtggagtcggacaacgagaaccggatggaggagagcaaagccctgttccggactatcatcacctacccctggttccagaactcctccgtcatcctcttcctcaacaagaaggacctgctggaggacaagatcctgtactcgcacctggtggactacttccccgagttcgatggtccccagcgggacgcccaggcggcgcgggagttcatcctgaagatgttcgtggacctgaaccccgacagcgacaagatcatctactcacacttcacgtgtgccaccgacacggagaacatccgcttcgtgttcgcggccgtgaaggacaccatcctgcagctcaaccctcaaggagtacaacctggtctgagcgcccaggcccagggagacggggatggagacacggggcaggaccttccttccacggagcctgcggctgccgggcggggtgcccctgcccgagtcccgggccggggcctctgcccgccggggaggagannnnnnnnnnnnnnnnnnnnnaacaatgggtttttatttcacagttatccggggatggacatctcttcccttcggtaaacttccgggcccctttctcacctttttgtcaccggccaaagggcgccctttttttctggcccttggactttatgggctggcttctttttcctt

SEQ ID NO: 177850 - DNA, 934 bp, Homo Sapiens
gaatctgtccgaaggatattgaggcagaagagtccagaatgggcctcatcatcgtcaatgcctggtacgggaagtttgtcaatgacaagagcaggaagagcgagaaggtgaaggtgattgacgtgactgtgcccctgcagtgcctggtgaaggactcgaagctcatcctcacggaggcctccaaggctgggctgcctggcttttatgacccgtgtgtgggggaagagaagaacctgaaagtgctctatcagttccggggcgtcctgcatcaggtgatggtgctggacagtgaggccctccggataccaaagcagtcccacaggatcgatacagatggataaactgccaagaaccagatttttaaaaggccgcaaaaaatcttttcctgggagtctacaaatttggaaatgaaaaaacccagacatcagatgtttttattttatattattattatagaaggtggtaccattatcaattatgtgaagggacatgcagacaccccagcttttgagggtgctgggggtaggactgaggcagccccactgggaaccagactgcagcctggcccatggctgttttcccaaggatcagttcctggagggaagggctctggccctgacctccgctgtgtcccgagcacacgtgctgaccgcagcccgccgccctgtagttcttggctgggtctggaagtgtctgtggagcaccctgccctcaccacaggagcgtgagccacttctgcagtccacgctgaacatgggaaacaacctgaaaagcaggcaggcctccccggtcagggagccttctgctgtgctggcttcccatgaccaccccctcctgctgaaatattactgcttgaatctggagcagatttgcgggtttataaaactgctttttatctgaggaacaaacgggtttgggaaaattatccgccttt

SEQ ID NO: 177851 - DNA, 956 bp, Homo Sapiens
  misc_feature (734)..(864): n is a, c, g, or t
tcggacgagggggcctccttcccccaggggcaaggcctggatcttgctcggggggcccgtcttgcagggcgctttcggtccgacgccgctgtaccgtgcagcctttgggggccacctggcagctgtggaggtgctcctgaagctcggagcagacccccgggtgtacgcagaggacgggagcacccctgagcgggtgtggaccccagaggtgtgggccccgggaggtgtgagccccgggaggtgtgggccccgggaggtgtgagccccgggaggtgtgggtaccgggaggtgtgagtctggcaggtgcacacccaggcagggaaggctcacccgaccggctgtctctgaaagctgtcagaagcctgagtggcctgctagagcggtttcctagccccgccgtgcgccattcccttcctggaagtcctgactttaaaacctcgtcagtctgcagtggaagtggcagcgactcccattttgtgaatgcctttggtgtcgggttttgtgtcatttccttccgtgctttgcctgaggaagtggtgttactgatggagaaactgaggctggcgattccagggttggcagagctcacggcgctgggggcagcacggggcccacccatcggtcccctcactgtcagtacgtcggttttccagagaacttgagccacacagcccagccacagagctcctttctagagccttttgactatgttagaaaggacagtctggctgtcnnnnnnnnnnnnnnnnnnnnnnnnnnnnnnnnnnnnnnnnnnnnnnnnnnnnnnnnnnnnnnnnnnnnnnnnnnnnnnnnnnnnnnnnnnnnnnnnnnnnnnnnnnnnnnnnnnnnnnnnnnnnnnnnnnnaaccaaaattggctggggcgtcctggggcaccgcctgtgggtcccaactactttgggaggctgaaggcggaaaaatcgtttgagcccgggga

SEQ ID NO: 177852 - DNA, 726 bp, Homo Sapiens
  misc_feature (706)..(706): n is a, c, g, or t
ttcgtgcgcctgctagagctctttccttcggggaaaagccgggcccttgctggccgggccccagctcacatgccaatggagaccctgttgcagtggccaaggcccagccgagccggctgatcatgggcacccaccgggacctggaagctttcaagcgccttaactaccggaagacaaagctgggaggcaaagcccccctgccttacccttccaaggggcctgggaatatccctcgaggggacccaccctggagggagttgtaggccactttgaggtctgtgtttcctttgccacccagcccccatgtccgcagacctcctccaagatgctccagggggtcctagtggaccctacaaacctcccttcagttgcccggaagttggtcttccatggacaacacaaaggaggccgtgaggtcctagcctcacctggccagggtcaaggtcatttgccacccttggcttcagggagggaaactgtgtctcccacagccccagtgacttcaagcgggcctgggctccagggaagctggccacctctgagcagggcccatcctgtccggatttgcaaattttagggtcctgagccaagtatggatggttcagaatttgtttctttcctgggaggagaagagagctccctttgttttctttcttccccatttccattttatttcttcttgggaagacccataataaatgatctnttaggagggccccttgaaaa

SEQ ID NO: 177853 - DNA, 705 bp, Homo Sapiens
ggagcgagcctgggtggcgaattctcgacgagggaggagccccagccccgcgacgaggaggaagcggagctggagctgctgaggcagtttgacctggcctggcagtacgggccctgcaccgggatcacacggctgcagcgctggtgtcgggccaagcagatgggcttggagcctcccccagaggtgtggcaggtgctgaagacccaccccggagacccccgcttccagtgcagtctctggcatctctatcccctatgaggcaccacgtaagacctcctgcccttagctctcttgctcaccacccaagaacctcaggacagaagcgagagcccattgctcctgctcagctcagcccggctgcggaggaacccttggcaggcagaacctggaggtgtcagaggctcaactcctccatctaaccagcaggctcccagagtccccggaagagcctgcgcagctgaagcagagtgcttctagatggagagtggtcactggggaaaaggacctggccatcaccttccaatacctgctgcctgtctccctgacccatgatctggcaagttaggcacagtcagacatggacagttgatccatgaggaaaagatgctctcccacctaaggccaggaatctgagagcaggactggctgagctcccagggcaaggggttcactaatgcttatcaataaagaatattgagcctggta

SEQ ID NO: 177854 - DNA, 998 bp, Homo Sapiens
gggctggtacaggtccggaattccgggatatcgtcgacccacgcgtccggggaggcgtcctccctggaccccggcgacttcctctctcggtttgtctgggtcatcttgtctgcccgccgctggcctggccccgtctgtctctctcagcagctgtctttctcgcgcccactggccggtctctcctcttccccgcagttgcctccttctctgcctgcctgggtggccgccatgggccggaagcggctcatcactgattcctacccggttgtgaagaggagggaggggcccgctgggcacagcaagggggagctggcacccgagctaggggaggagccccagccccgcgacgaggaggaagcggagctggagctgctgaggcagtttgacctggcctggcagtacgggccctgcaccgggatcacacggctgcagcgctggtgtcgggccaagcagatgggcttggagcctcccccagaggtgtggcaggtgctgaagacccaccccggagacccccgcttccagtgcagtctctggcatctctatcccctatgaggcaccacgtaagacctcctgcccttagctctcttgctcaccacccaagaacctcaggacagaagcgagagcccattgctcctgctcagctcagcccggctgcggaggaacccttggcaggcagaacctggaggtgtcagaggctcaactcctccatctaaccagcaggctcccagagtccccggaagagcctgcgcagctgaagcagagtgcttctagatggagagtggtcactggggaaaaggacctggccatcaccttccaatacctgctgcctgtctccctgacccatgatctggcaagttaggcacagtcagacatggacagttgatccatgaggaaaagatgctctcccacctaaggccacgaatctgagagcaggactggctgagctccccagggcaagtggggtcactaatggctatcataaagaaatatgagcctgg

SEQ ID NO: 177855 - DNA, 1349 bp, Homo Sapiens
agctcttcattgattcttgctgcagcaatcgctaccaggaacgcaaggaggaaaaccacgagaaggactgggaccagaaaagccatgatgtgagtaccgactcctcgtttgaagagtcgtctctgtttgagaaagagctggagaagtttgacacactgcgatttggtcagctccggaagaaaatctggattagaatggagaatccagcgtactgcctgtccgctaagcttatcgctatctcctccttgagcgtggtgctggcctccatcgtggccatgtgcgttcacagcatgtcggagttccagaatgaggatggagaagtggatgatccggtgctggaaggagtggagatcgcgtgcattgcctggttcaccggggagcttgccgtccggctggctgccgctccttgtcaaaagaaattctggaaaaaccctctgaacatcattgactttgtctctattattcccttctatgccacgttggctgtagacaccaaggaggaagagagtgaggatattgagaacatgggcaaggtggtccagatcctacggcttatgaggattttccgaattctaaagcttgcccggcactcggtaggacttcggtctctaggtgccacactgagacacagctaccatgaagttgggcttctgcttctcttcctctctgtgggcatttccattttctctgtgcttatctactccgtggagaaagatgaccacacatccagcctcaccagcatccccatctgctggtggtgggccaccatcagcatgacaactgtgggctatggagacacccacccggtcaccttggcgggaaagctcatcgccagcacatgcatcatctgtggcatcttggtggtgggcccttcccatcaccatcatcttcaacaagttttccaagtactaccagaagcaaaaggacattgatgtggaccagtgctagtgaggatgcaccagagaagtgtcatgagctaccttactttaacattagggatatatatgcacagcggatgcacgccttcattaccagtctctcttctgtaggcattgtggtgagcgatcctgactccacagatgcttcaagcattgaagacaatgaggacatttgtaacaccacctccttggagaattgcacagcaaaatgagcgggggtggttgtgcctgtttctcttatcctttcccgacattaggttaacacagctttataaacctcagtgggttcgttaaaatcatttaattctccagggtgtacctttcagccatagttggacattcattgctgaattctgaaatgatagaattgtctttatttttctctgtgaggcattaaatgccctgtctgaa

SEQ ID NO: 177856 - DNA, 1549 bp, Homo Sapiens
  misc_feature (72)..(72): n is a, c, g, or t
  misc_feature (134)..(134): n is a, c, g, or t
tgggtaaagttacctgtggaaaaaaccctggtttgaaaagattgaatgggttgatgggggaaagggccccanccacccaaaggaatgcccaccagatgaatgccaatgtgcttggcgaatgaagcttttcccgnccaaaggtgacccgggtggggtgtctcccatagccccacagttgtccatgctgatggtggccccacccaccagccaagatggggatgctggtgaggctggatgtgtggtcatctttctccacggagtagataagcacagagaaaatggaaatgcccacagagaggaagagaagcagaagcccaacttcatggtagctgtgtctcagtgtggcacctagagaccgaagtcctaccgagtgccgggcaagctttagaattcggaaaatcctcataagccgtaggatctggaccaccttgcccatgttctcaatatcctcactctcttcctccttggtgtctacagccaacgtggcatagaagggaataatagagacaaagtcaatgatgttcagagggtttttccagaatttcttttgacaaggagcggcagccagccggacggcaagctccccggtgaaccaggcaatgcacgcgatctccactccttccagcaccggatcatccacttctccatcctcattctggaactccgacatgctgtgaacgcacatggccacgatggaggccagcaccacgctcaaggaggagatagcgataagcttagcggacaggcagtacgctggattctccattctaatccagattttcttccggagctgaccaaatcgcagtgtgtcaaacttctccagctctttcccaaacagagacgactcttcaaacgaggagtcggtactcacatcatggctcttctggtcccagtccttctcgtggttttcctccttgcgttcctggtagcgattgctgcagcaagaatcaatgaagagctcgttgatgccccagtactcgatctcctggcagaatgagaatacgcacagctcctccatgacatgcagcttccccgtgtaataaaaattcaaaacatatctgaacaaggagggattccgatcaaagtagtattccttatcggccacactgtaatcatcacacagctccagaatggcctcttcagaatggcaagtaagcagcttccccagtctggtgtgaggaaaccgcaggagggtgctttggtcaacagactgcttaaagccccccacattcaggttgacaagttcctcgtcttgtccagggcgatggaaaaactcaccaaacaccatggtggatacagaaggcagagtgctggctggcaagggagaagaggaagatcaggctgcacccttgaggtggagatgccacacgctctgccttcatcctgcccggtgggacgtccatcatcatccaagaagctctgcccttctcagcacactggaatgtgtggtgcacataggcatttggtggccaaaaagaagggaagaatcctgttctctggttgtacagccccaagcaatcactggaaaatcactctcacctgcaggagt

SEQ ID NO: 177857 - DNA, 699 bp, Homo Sapiens
  misc_feature (83)..(83): n is a, c, g, or t
  misc_feature (155)..(156): n is a, c, g, or t
  misc_feature (160)..(161): n is a, c, g, or t
tggggggggtagaattttcccaggaaagcctgggttgcagtttccccatttgtttgggaggtgggaggaaaaagtcaaagtcncctccttgggctgtcttcatcatacttccgcagtcagactgggctggtagtaagctacacctgttgaactannaganncccaggccttggggggttgtggggctttggtgatggctttagccagcaattgggtggtctctaggcggctgccgagaacctctttttggaaggtttcattccatcttcggagagggttgaggatgttctctccggccaggttgacggcggcatcgcagctcggcagccccgatgcagcgagctcatcccacgtgaatccggccgggcccgggctttcgggagaccaacgccacttcgtggcctctggcattcagcagctgggttagggctgtcccaatgaagcctgtcccgccacctgatcggaaaatacaaattgtttatattcccgtggagttggggtgggggcgccttccgtccccgctgtggcaccctcttccggcgccatcccatctgacaccagacttctccccacttatccccctcctcgcgatgcagaggtgacacaggtcacagggattagggagattcggcttctcgggctaggaggcgaaggccaggttgcctgtgcactagacagtgccctcccggaagcggattc

SEQ ID NO: 177858 - DNA, 940 bp, Homo Sapiens
  misc_feature (564)..(564): n is a, c, g, or t
  misc_feature (675)..(675): n is a, c, g, or t
caacggcacctcggctctgggctgtaagccctgcgatctcaaggcgcaaggctgggcgcaacggcagggttgcggggttacgggattgcggggtccggggagtggaacccgccgactccgggaacgaagcaccggcgccaaggtgtgggaggcggcggggtggagttggacgcctgcctcgcgccgacgcagtgcactcacgggggcggtcccagaggcagctagctgtggttccggttccgtcgcggagacacgtgaaggtcggtgcggagttcgtctctgcaagcttggtcgccctgggatggattcctcctcctcttcctccgcggcgggtttgggtgcagtggacccgcagttgcagcatttcatcgaggtagagactcaaaagcagcgcttccagcagctggtgcaccagatgactgaactttgttgggtgaggagcctggggctgggacctgaacactgtacctactttccctctgtccttgtaccgcgggactcgcgacaacgtcggggattcggggtggggggcgggcacctggcagcaacccttgattttctcangttcctgtggcctagccggatgggagaagggtgactccgcttctctggggactgtcattccggacctcggctttgttggtgtagaggactgggtatcaaagaagacttatngcactggacacccagcactttcaggcacccgaggttgaagctgcctagtgctggtcaacaagactgatcggagcccccagtactgggatttttatttttggcagccccgagtcccagaagagtcagtggaatcaggggaatctggctatccttggaactcctccgggattttacctttctttaacccagtttcctaacccctcctccgcctgaaaaaatgaagttgccctccagcccccgcgtaacctattaaaaaaggtggggg

SEQ ID NO: 177859 - DNA, 780 bp, Homo Sapiens
tgggcgtgatcgtgctctgctggttccccttcttcgtcacctacagcctgtacggcatctgccgcgaggcctgccaggtgcccggcccgctcttcaagttcttcttctggatcggctactgcaacagctcgctcaacccggtcatctacacggtcttcaaccaggatttccggcgatcctttaagcacatcctcttccgacggaggagaaggggcttcaggcagtgactcgcacccgtctgggaatcctggacagctccgcgctcggggctgggcagaaggggcggcccggacgggggagctttcccagagacccggggagctctcccagagacccggggatggattggcctccagggcgcaggggagggtgcggcagggcaggagcttggcagagagatagccgggctccagggagtggggaggagagagggggagacccctttgccttcccccctcagcaaggggctgcttctggggctccctgcctggatccagctctgggagccctgccgaggtgtggctgtgaggtcagggttttagagagcagtggcagaggtagccccctaaatgggcaagcaaggagccccccaaacacactaccactccccatccccgtctgaccaagggctgacttctccaggacctaagtccgggggtggctgcccaggggcaaaggagaaagcaccgacaatctttgattactgaaaggatttaaatggttgccaaaaaaaacagccaaaacaaccaaactattttccaaataaaccctttggaaact

SEQ ID NO: 177860 - DNA, 972 bp, Homo Sapiens
  misc_feature (18)..(18): n is a, c, g, or t
gtctaagagcgaggctgngtggcgaattccgcacgagggtttcctctccagccaacggggcgtcgctgccttaatgggaggagcactcggaagggttggtttgggcctgaaactctcccaagtggcatagccccttttccggtatggggtctcctacacccacgcgcaccacctctccggtcgcgtggctgcctctacagcctacctatacgtccctttttccccccaactgggaattgagaggtaaggtctttctctggaaatccagcagtagaggaagggaccacccaagaaaactaaaaaccaaggcaccttaccagtctgtctggggacaggatccctgctgcaccttccccaccccctcctgggaagtgccccctcacctcagggcacccgcaacctgggctcctccctgagcgcaccggcccttcctgtcacccaggtccaccctcagtactcaagctgcagtatacagcgggaaaaactgaggcactttggtgctaggggtttgggactgaggcgtggagagcagatgtgatggcaggaagactctcgcttttaaacatctggtttgggagagaccatcgacttggccagtgagaactgagaatggattccgagtagtgatgggccgtttgcacctcggtttttccacgtgagaaatggggagaacgctgctgttaggaggaagttgtgtccagttcagggtgccctcgggagccctggtccctgttgctgggggcccctctcacgccgccatctttctggccccgccccgcccccttccggcctcccccaaaacccccctttgcccttcactaaccttgtatcctcaacccggcgtggtggttccacccctcccccggagtggggcttaacaacaacttccttcattttccgcccctacccaaataatttctcacggggaaaacaaaaaccgggtgcccacaaaagaaaggtcccctcacccga

SEQ ID NO: 177861 - DNA, 959 bp, Homo Sapiens
  misc_feature (492)..(528): n is a, c, g, or t
  misc_feature (784)..(792): n is a, c, g, or t
tgaggggacagcagccctttgctgcaaagccagagactgatcctggctctgacggctgaagagggaagacccaaggctgggtggcgtggctcgtgaatccacttagaattcttggcttgtgtcgcatactgggtgtcacggcacacatttactctgcattgtccccgtctttcccatcgcctagcgtttggggaggaacagggagagagcttcggggcgtctgtctccgtgctctcctgcctccaccgccttggttttgcttcctgctggaggcagggcacctgcttgcgacccagattcttctgcaggatgtgtctgtctttgtcacggtggacagagggtgacatcataggagcagctcgctggccagaaggggatgggggcatccctgttgccttcactcagctcctgctgcttcttaggggaaaggaggccggggtcaagccagcatccccttggtaaagacccccgcaggccaccaggcattctggnnnnnnnnnnnnnnnnnnnnnnnnnnnnnnnnnnnnnaaacttcacagcaggccagctgcagtgacttgtcatcaagagtcacctcagctgcgcccccctcccatcctttcctatgagaagccactgctttgggggcgccggctagaaaaagtagggtgcggtggccaagaagggccctgccccccggggggctgggtccggctgagtcactgctttcccgagggcagcgcagggatccggggaaacttgcgccaggagcggccgccggcttcttgcctctgaagggtaaacnnnnnnnnncctccctcctccggaagacctcctctgggtccaggtcaaaaaactggcccccggaaagggggaagtttccgttcccggggccccgaggggggccccggccacccgtggcgatccggtgccaccatgggccaatggccccggccccccgccggggggaacaaaaacct

SEQ ID NO: 177862 - DNA, 788 bp, Homo Sapiens
gggagtccatacagtggcaactcattagaaaggagtgagccagcattgaaattctcataagaacagaaaagtggaattgagatggtctgagtactctaaatgaggatgggaaagtgataccaagaagaagcaggggatgaagaagaggagcaacagtgaagtggaagacgtgggaccaacaagtcataacagaaagaaggccaggtgggacactttagagcctttggataccggcctgtctttagcagaggatgaagagctggtgttacatctgctaagaagtcaaagctaaatacttcctgcgcctgccttctccttgaaaccttggttatgactgcgtaggcaagaagttgaaaaacagttgatttgggggcacttaggtaccatatgccccattcccaaagggcacatttctggatagaagcgatcgtatctccaagtccctctcacaggacatgctttgtgccatcactgagcatactcagatcgagggtggatgataccatttcctgaccccgttttccagcatgtgttctgttagatttttatccatgggttcctacgccttgtcattggaaacactgcctttgtcttactggcaagttctggagctcttgtgtcattgttagaaatccctgtcttgcttactgtacagaagtttctgttgctgttaaaattgctcatgatttcgacgtatttaatattttcaaagagactatgatggaccagccctgagaaagaatgagtatttttgaattgagatgatcaataataaacatatttcctat

SEQ ID NO: 177863 - DNA, 928 bp, Homo Sapiens
ctgctcagtgatgagaagtccttgctgggtgagcttcctattgactgctcccctgccctagtgcgggtgatcaagaccacatctgctgtgaagaacctgcagcagctagcccaagatgcggacctggccttgctgcaggttttccagcttgcagctcatctggtgtactggggcaaggccatcatcatctacccgctgtgtgagaacaacgtctacatgctgtctcccaatgccagcgtatgtctgtactccccgctggccgagcagttctcccaccagttcccatctcatgacctgccgtccgttcttgccaagttctccttgccggtctccttgtcagaatttaggaatcccctggcccccgctgtgcaggagacccagctcatccagatggtggtgtggatgctgcagcgccggcttctcatcaagctgcacacctatgtctgcctgatggcctcacccagcgaggaggagccccgtccgcgagaggacgacgtccccttcactgcccgggtcggcggtcgcagcctcagcacgcccaacgccctcagctttggctccccaaccagcagcgatgacatgaccctcaccagccccagcatggacaactccagcgcagagctacttcccagcggggactcgccactgaaccagaggatgacggagaacctgctggccagcctgtcggagcatgaacgcgcagccatcctcagtgtacccgcagcccagaaccctgaggacctccgcatgtttgccaggctccttcactactttcgcgggccgccaccaccctggaggagattatgtacaacgaagaaaacgcggcggctcccagttgctcatgctgttttacaagttcccgcaacgtgcttggggtgaaccaccccaccaggacccctttcaattgcccgtcttccagggctctgct

SEQ ID NO: 177864 - DNA, 409 bp, Homo Sapiens
aattcggcatgagggagcttcctattgactgctcccctgccctagtgcgggtgatcaagaccacatctgctgtgaagaacctgcagcagctagcccaagatgcggacctggccttgctgcaggttttccagcttgcagctcatctggtgtactggggcaaggccatcatcatctacccgctgtgtgagaacaacgtctacatgctgtctcccaatgccagcgtatgtctgtactccccgctggccgagcagttctcccaccagttcccatctcatgacctgccgtccgttcttgccaagttctccttgccggtctccttgttagaatttaggaatcccctgggcccccgctgtgcaggagctgcacacctatgtctgtctgatggccttcacccagcgaggaggagccc

SEQ ID NO: 177865 - DNA, 952 bp, Homo Sapiens
gtcactgtctccacctcagttcctcagggctgttggccaccctatgactaactggaagaggacacgccagagcttcagtgaggtttccgagcctctccctgcccatcctcaccactgaggccacgacaaagcacagctccagctcggacagcaccctcagtgccagccagcctctgccagacctctctttccctcttctccccagcctcctccagggctgcccaaggcagggtttccagccaggcctcggggtcatcttttcaccaggagcaaacccaagtcttagttgctacaagaaaatcccctggaagtactgggggccaggttccccagacagcaggaattgcccctgttcagagcagccggagtttgctggaccacaaggaagaagagaagagacttgcagtgaactgtttttgtgccaagaaaccctggacctggggccaagtatttcccaagccaagcatccacttgtctgtgtctgggaagggatggccaaggccgctagggtccttacccctcaggatcactccccagccctttcctcaggaggtaccgctctccaaggtgtgctagcagtgggccctgcccaacttcaggcagaacagggaggcccagagattacagatcccctcctgtaagtggccaggcattctctccctgccctctctggcctctggggtcatactcacttctttagccagccccatcccccccaccccacacctgaagttctgccctcctcctttgggggacacccaaaacactgcctgtgagaaagaagatggaaggtaagttctgtcgttctttccccaatccccaagaatggacaagaagccaacttagaaagaagggtctcacgtggctggcctggctcctccgtaaacccttggtccttttaaactctggcccacccgggcatggcattaccaaaatttggctcttaagttaa

SEQ ID NO: 177866 - DNA, 937 bp, Homo Sapiens
aggatctgaaaacttggctggggctatatatactggaagttgaaggttaaaggaaaagcacaagaaactttggaagcactttttctgcatacttagatgatcttcatgggcccacaggtaccaggataaagccgaactggtaccatctactcttttgaagtgttttagtctagttattggatcagtgaaaaacattagtatacgtttttaaataggctaatttttcaacttggatcattaggcttacgtactacttgtttcaaatgtgtcaaatacaaaaatggtaactaggttgacagatactttgtatttttcttttgaattcagacctggaatgtaagtaagtgacaatgcttatggaaagccagttagttagaattggaaatctgtcttgtcattttacaagcattagattcctttcctgtgtgaagaaagcctcagtgaaacaggtctttgccataactttatgaagtgctacagaaagcacaaagaattgattcatgttcatcaatacctgctgagagtactgtcccaggaatatccagtggatggattcatcatccaggaggttcaaaagtaagatggttttcaaatcatttttgagactggttgcataacagcagggtacctgaaagagccttctgggagttagtgaactaggtagattgttttgttcacataacgccaccatcaacttaaagtgaattgtctttgttataaatgaggtcactatggacttaccctaaagatcttctgtacttctggcttccataggacaaatgataagtactacatacctcatctcttggggttattattgtagtcttgcattcatgattatgaattttaaaaataaataccaatttatggaaaatagtactaaaggcttggccgcgcatgaaacattaattggtttaaaagtccctttataaagaag

SEQ ID NO: 177867 - DNA, 883 bp, Homo Sapiens
  misc_feature (661)..(661): n is a, c, g, or t
  misc_feature (702)..(702): n is a, c, g, or t
aggatctgaaaacttggctggggctatatatactggaagttgaaggttaaaggaaaagcacaagaaactttggaagcactttttctgcatacttagatgatcttcatgggcccacaggtaccaggataaagccgaactggtaccatctactcttttgaagtgttttagtctagttattggatcagtgaaaaacattagtatacgtttttaaataggctaatttttcaacttggatcattaggcttacgtactacttgtttcaaatgtgtcaaatacaaaaatggtaactaggttgacagatactttgtatttttcttttgaattcagacctggaatgtaagtaagtgacaatgcttatggaaagccagttagttagaattggaaatctgtcttgtcattttacaagcattagattcctttcctgtgtgaagaaagcctcagtgaaacaggtctttgccataactttatgaagtgctacagaaagcacaaagaattgattcatgttcatcaatacctgctgagagtactgtcccaggaatatccagtggatggattcatcatccaggaggttcaaaagtaagatggttttcaaatcatttttgagactggttgcataacagcagggtacctgaaagagccttcttgggagttagtgaactanggaagattgtttttgttcacataacgccaccatcaacttanagtgaattgtctttgtttataaatgaggtcactatggactttaccctaaagatcttcctgggacttctggcctttccatagggacaaagggttaaggaactacattaccttccatttttcttggggggttaatttaattgggaaagcccttgggcatttcctggggattaaatgggaattc

SEQ ID NO: 177868 - DNA, 867 bp, Homo Sapiens
cgacgaggattctctgtatcatcagaggctgggcttggcagaggggaggggcctgtgcccgtcacccctggccccattccttggtaattagccacacccttgcctctgtacagggccctagagcagatgtgcatccccctcctcttccagcaggtctataaagggaaggggtagcagaaagtcctgggctaggagagtgagtccctgggttctaatcttgggcacatctgtggccatcgctgggtccatttttctgactgtgaagtaaggagagacgtctcagtacccagggcctcttcagctctttgtaggttctgggctgggttgtgggggactggggagctgggctctaccatccctcccattagtagctttatccagccccgtttttgctgcttccagggcctctgccttcaaggcccccatggggctgtccatccatggctctgcctacggaaggggcttaatgcatgtgcctgcccctcccccagctgtttttaatgaaactgaaaaaatagacttgatcccggcaggactgtgatacagagccctagcctgcccagccagccccaagatctcaggagctttagggagaagactgggtggggctggagcacaccttgggcctcagtggtttctgtgtccctgtggtgccagtgcttctgggcagtgcaggcggctgcccaggcccagccctgacttccactctggctcagcaacctggttatttatgtggggccgtgcaggcatgggcccactgcctgtccatcctgtttctcttatttattgaaactcaccattgccctatccttgtgtctccacccccctccatgtgttgaataataaaaagtggggaaagtgctgtcc

SEQ ID NO: 177869 - DNA, 695 bp, Homo Sapiens
acggtctaggtacgagcctgggtggcgaattctccacgagggccggcgcccccgcgcccaaggcctacgtgctgggcagcccagccctggccgcggagctggaggccgtgggcgtcgccagcgtgggcgtggggcccgagccactgcagggcgagggtcccggcgactggctgcacgcgccgctggagcccgacgtgcgcgcggtggtggtgggctttgacccgcacttcagctacatgaagctcaccaaggccctgcgctacctgcagcagcccggctgcctgctcgtgggcaccaacatggacaaccggcttccgcttgagaacggccgcttcatcgcgggtaccgggtgtctggtccgagccgtggagatggccgcccagcgccaggccgacatcatcgggaagcccagccgcttcattttcgactgcgtgtcccaggaatacggcatcaaccccgagcgcaccgtcatggtgggagaccgcctggacacagacatcctcctaggcgccacctgtggcctgaagaccatcctgaccctcaccggagtctccaccctaggggatgtgaagaataatcaggaaagtgactgcgtgtctaagaagaaaatggtccctgacttctatgttgacagcatagccgaccttttgcctgcccttcaaggttaaagattgagtgtctttaatctgcagaat

SEQ ID NO: 177870 - DNA, 1103 bp, Homo Sapiens
  misc_feature (22)..(22): n is a, c, g, or t
  misc_feature (82)..(82): n is a, c, g, or t
  misc_feature (86)..(86): n is a, c, g, or t
  misc_feature (95)..(95): n is a, c, g, or t
  misc_feature (103)..(103): n is a, c, g, or t
  misc_feature (139)..(139): n is a, c, g, or t
  misc_feature (144)..(144): n is a, c, g, or t
agggggccgaggggccggaaanctggtacccattcctggattgcaggggacgggcttcggattgggcaggcttgttggtggngatnggatggganccaatganaagggggtgcccagaggccaggggacagtttggggnccatnccctgagggggtcaggggaccaagttgtcgggacgtggcaaaagacgacccccagtcccccgtagtgtaaagaacgtaaattgaaagccccgggcccaattctgggaagaggagggcttgcccacgccccccaggaagctggagccaattgggagggagaactcaggaaaagcggacggtgactatgtagagactggtcaagccctttacaggatttgagccaatcaaaaaaagagctgtccagcgactaggggatggagccaatgccgtgcgagcaaatcccttgtcgctaggcgggaaaacaaaggagtggacccatgtagagcgtagaactcagcgagccaatcccttaatagaaggaatctgtcgctaggcggagagagacgacagacccaatcgggaaacgggacagatcccgctcctcggcgcggcaggtcgtgggctggaaggacggcggggattggcagaggcgggacaatcttgggaatgggagacgcaaggaggccggtcccggatcggcctcagattagcaggccccgggagtggggcgggggcgtagtgtgggacggggcggacgcggcccggggcgctccctccctggacttcaatatttccgcttcagcttctggaagtcgctggtgttaagccgcggccgtggcaggtccccgaagacctgggtgtcctcggcctctcgcagcaccagcgcgcgcatgctcgccgcgatgcggtccaggtcgggcgaagagggcggcccattctcctcatctgatgaccgcgcctctgtcctcttctccttgaagccccagacgggcacagacacaggcagggacttggcgtactgctcgtgtgggtagcggctgaggctggggccactgagcagtggggggcccggcgggggtctcctcgctcaggctgccatcatctgtactctcggggtctgactcacagaaggggggaag

SEQ ID NO: 177871 - DNA, 656 bp, Homo Sapiens
  misc_feature (108)..(122): n is a, c, g, or t
  misc_feature (475)..(569): n is a, c, g, or t
cgccgtcataactcactgcagactccacctaccggtctcaagggatccttccattttagcctcctgagcaggtgggactgcaggcctgccccaccatgcctggttaannnnnnnnnnnnnnngtggagacggtgtattagtccattttcatgctgctgataaagacgtacccaagactgggcaatttacgaaagaaagaggtttactggacttacagttccacgtgactggggaggccccacaatcatggcagaaggtgaaaggcaggtctcacatggcggcagacaagagaagagagcttttgcaggggaactcccctttttaaaaccatcagatctcgtgagacttattcactgttactagaacagcacaggaaaaacctgccccatgattcagttacctcctgctgggtccctcccaaaacacgtgggaattcaagatgagatttgggtggggacacagccaaaccgtagcnnnnnnnnnnnnnnnnnnnnnnnnnnnnnnnnnnnnnnnnnnnnnnnnnnnnnnnnnnnnnnnnnnnnnnnnnnnnnnnnnnnnnnnnnnnnnnntgagccaccatgcgcaaccactcttagtgattttaaaacctaatttagtaactcatttttagagaataccacttggttgtttgactg

SEQ ID NO: 177872 - DNA, 843 bp, Homo Sapiens
ggcggccacggcgccctgcagcggctggacctccgcaacaaccagatcagtcacaagggcgcggaggagctggccctagccctgaagggcaacaccaccctccagcagctggacctgcgctggaataacgttggcctcctggggggccgggccctcatgaactgtctccccagcaacagaaccctgtggagactggacctggctgggaacaacatccctggagacgtcctcagagccgtggagcaagccatgggccacagccaggaccggctcaccaccttccaggagaaccaagcccgcactcacgtcctcagcaaggaggtccagcacctccgggaggagaagtccaagcagttcctcgacttgatggagactattgataagcagcgagaagagatggccaagagcagcagggcgtcggcagcccgtgtagggcagcttcaggaagccctgaatgagaggcactccatcatcaacgctctcaaggccaagctgcagatgacagaggccgccctggctctgtcggagcagaaggcccaggacctgggggagctcctggccacagcggagcaggagcagctgagcctgtcacagaggcaggccaaggagctcaagctggagcagcaggaagctgcagagcgggagtctaaactcctcagagacttgtctgctgccaatgaaaagaaactgcttctgcaaaaacaggtaaacgagttggaacggaaaattcagtgtcaacaaggaacaacctgttcagaaccaggcaggaaaagacccacctggtcagcttaacctggaaaatgccgggccatcccaggcccgaggaccggcctggaaacttgg

SEQ ID NO: 177873 - DNA, 966 bp, Homo Sapiens
gaagatcgtgcagcgctactacaagcagatccaggacatgacgccgctcagcgagcaagagatgaatgcccatctggccgaggagtcgaggaaataccagaatgagttcaacaccaatgtggccatggcagagatttataagtacgccaagaggtatcggccgcagatcatggccgcgctggaggccaaccccacggcccggaggacacaactgcagcacaagtttgagcaggtggtggctttgatggaggacaacatctacgagtgctacagtgaggcctgagacacatggagagttggtcaggctgctgctgggagaaatggacgcccactgggccgcaacttgatcttctaccccgtgcctgtgactcagactgggaaatactgagcagagacggctggggcgggggcaggaggaggggctgctctctgagacaggggcgcccccgccttgacccctgggcacctccatcccctcccacctgtccccagatcagtctctgggatggaggccagagagctggtcaggctcccccatctgcccagcacggcctgcactgtgcccacccacttgctccacaacgtccagttggtcctgctgccaagagccccgtgcatccaggcggccaagcacaaactgggggagaggaggccgccagcccggaggctgcagcccagaaactctacctcatccacactggtgcaggcagccctccttgaactgacctttgattggtttctgcttcaactaccaaaatgttatctcccacttccccctcacccgtaaaggatcctggccccagacagttttcaggtagtgtccagattttttgttgcctttgggcggctgtttcgtaaaattgggcactgcccccgcccccgtggcggtgcctctgttgggcctttctccacagaaccaagggaaagggtggaaagccgcacgggaaatgggggggcgccccacgt

SEQ ID NO: 177874 - DNA, 1245 bp, Homo Sapiens
gcagccagccagctgcaggccctgaacgtccccttcatgctggtggacatgaaggactccttccaccacaatgtggctgctctccgagcctccgtggagacagggttcgccaaaaagacattcatttcttactcggtgactttcaaggacaacttccggcaggggctagtagtggggatagacctgaagaaccagatggtgctgctgcagggtggcgaggccctgcccttctctcatcttatcctggccacgggcagcactgggcccttcccgggcaagtttaatgaggtttccagccagcaggccgctatccaggcctatgaggacatggtgaggcaggtccagcgctcacggttcatcgtggtggtgggaggaggctcggctggagtggagatggcagcagagattaaaacagaatatcctgagaaagaggtcactctcattcactcccaagtggccctggctgacaaggagctcctgccctccgtccggcaggaagtgaaggagatcctcctccggaagggcgtgcagctgctgctgagtgagcgggtgagcaatctggaggagctgcctctcaatgagtatcgagagtacatcaaagtgcagacggacaaaggcacagaggtggccaccaacctggtgattctctgcaccggcatcaagatcaacagctccgcctaccgcaaagcatttgagagcagactagccagcagtggtgctctgagagtgaacgagcacctccaggtggagggccacagcaacgtctacgccattggtgactgtgccgacgtgaggacgcccaagatggcctatcttgccggcctccacgccaacatcgccgtggccaacatcgtcaactctgtgaagcagcggcctctccaggcctacaagccgggtgcactgacgttcctcctgtccatggggagaaatgacggtgtgggccaaatcagtggcttctatgtgggccggctcatggttcggctgaccaagagccgggacctgttcgtctctacgagctggaaaaccatgaggcagtctccaccttgatggagaggccaggcgggagaactaccgcagcaggtgggcgtacggactgcttggcgcatggcacccgcctggcaagtgctagaactaatgctattcttctggaataagatgccaatgatgtggtggctagaaatgcaacttgtataaaacaaaaatgggagagagagaggtattaaacaaataccccccttagaggat

SEQ ID NO: 177875 - DNA, 1001 bp, Homo Sapiens
cctccgcctcgcccttccagccgcacgtgccttacagccctttccgagggatggcgccctacggcccgctggcggccagctccctgctcagccagcagtatgccgcctccctgggtctaggagctggttttccatccatcccagtcggcaagagccccatggtggagcaggctgtgcagactggttctgctgacaacctgaatgctaaaaagctgttacctggcaagggcaccacagggacgcagctcaacggtcgtcaggcccagccgagcagcaagacggccagcgatgtagtccagccggcagctgtgcaagctcaagggcaggtgaatgacgagaacagaagacctcagaggaggcgatcaggaaacaggcgaacaaggaatcgctccagagggcaaaaccgtccaactaacgttaaggaaaacacaatcaaatttgagggtgactttgatttcgagagtgcaaatgcccagttcaaccgagaggagcttgacaaagaatttaagaagaaactgaattttaaagatgacaaggctgagaagggggaagagaaggacctggctgtggtgacccagagtgccgaagcgcccgctgaggaagaccttctggggcccaactgctactatgacaaatccaagtcgttcttcgacaacatctcttctgaactcaagaccagctccaggcggacgacgtgggccgaagagaggaagctcaacacagagacctttgggggggtcaggggaagttttcttcgtgggccgcagtttctcgggggcgggattcccaagggaggcagggggcaatggggaccaccccgtcgcaacccccactttcccacagggcccggaactgggcaaggtcgatggagggtgccagcccaaaagggctccctaactgaaacatgggcgccatcaaactgtaacgcctgggggtggtggtccaggcacgcccccaggaaaaaaaccccttggccacccttatcaagcgggaagaagggg

SEQ ID NO: 177876 - DNA, 760 bp, Homo Sapiens
gctatgagctgcaccatcgagaagatcctgacagacgccaagacgctgctggagaggctacgggagcacgatgcggccgccgagtcgctggtggatcagtcggcggcgctgcaccggcgggtagcagctatgcgggaggcggggacagcgcttccggaccagtatcaagaggatgcatccgatatgaaggacatgtccaaatacaaacctcacattctgctgtcccaagagaacacacagattagagacttgcaacaggaaaacagagagctatggatttccttggaggaacaccaggatgctttggaacttatcatgagcaaatatcggaaacagatgttacagttaatggttgctaaaaaagcggtggatgctgaaccagtcctgaaagctcaccagtctcactctgcagaaattgagagtcagattgacagaatctgtgaaatgggagaagtgatgaggaaagcagttcaggtggatgatgaccagttttgtaagattcaggaaaaattagcccaattagagcttgaaaataaggaacttcgagaattattgtccatcagcagtgagtctcttcaagccagaaaggaaaactcaatggacactgcttcccaagccatcaaataactgaactctgaatgatggctggagattgtctatcaaggaaggaagttactgtcttcccattcaagtactgtccattaagtgtcttgcctcagatttgatttaatcttaaataaaggtatcaggtggcaattta

SEQ ID NO: 177877 - DNA, 1020 bp, Homo Sapiens
  misc_feature (622)..(630): n is a, c, g, or t
  misc_feature (649)..(734): n is a, c, g, or t
  misc_feature (965)..(965): n is a, c, g, or t
ttaggggaaaaacccaagtggctaagagctgtgttattcctggggaagaactaccaatctagggcacacgtctctctgaattgttgattatgcgctttatgaagagatttttcaatctcgtgtgctttactttgtgtggtttagaccctctgacctagacttttatttttaaactgaaaaagttggtcttgtctatataattgctgcttttacataatttattttcccctctcaggacaaattctgtcttgctccatcttacagcttttccatgttctccaagaaaggtgtggaacattttcattaaacagctgttgctgaggcttctgcttgaccttctgcgtgcccgaatgcacagagaggcaccgaggagagaaaggcttttctcactcgctcccgatgataccgtctctggccattcctgactgaggcagctcactctgaatgggcacctttggagcttttgcccaccacaaggctagtggggtgtttctaacaacacaagtgggacagcttttggcaggcttttcctgaggcctcggcgcttccatcctggacagcaccacttccacatggagctggaatgcaagcaggctgctaattggccttaaaaattctttgnnnnnnnnngagatggagcttcgctctnnnnnnnnnnnnnnnnnnnnnnnnnnnnnnnnnnnnnnnnnnnnnnnnnnnnnnnnnnnnnnnnnnnnnnnnnnnnnnnnnnnnnnccttgtgaagtaacctggcgattacagggtgtgccaccatcaccgcccaggctaatttttcattcctctcggtggcgggcacgggtttcccccatggttggcccacggtcttgttaccttccggaatccttcgggcccgattctgcctccggcctcccaggcctttcccaaaacgtaccccgggggatttattccggccgggtgaagggccaccctgtgccgcccgtgggngtcctctaaaaatctccgcacttaaacccgagtaaaaccccccgggaacaacggt

SEQ ID NO: 177878 - DNA, 996 bp, Homo Sapiens
  misc_feature (840)..(855): n is a, c, g, or t
ggtttggcctggaggtcttcgcctgtatggggcagacctaccgagatgggactgcctgtgcagaggtctcccgggcctgtgacttcctgctgtcccggcagatggcagacggaggctggggggaggactttgagtcctgcgaggagcggcgttatgtgcagagtgcccagtcccagatccataacacatgctgggccatgatggggctgatggccgttcggcatcctgacatcgaggcccaggagagaggagtccggtgtctacttgagaaacagctccccaatggcgactggccgcaggaaaacattgctggggtcttcaacaagtcctgtgccatctcctacacgagctacaggaacatcttccccatctgggccctcggccgcttctcccagctgtaccctgagagagcccttgctggccacccctgagaacatgcctacctgctgggtgccgtctgtgcgttccagtgaggccaaggggtcctggccgggttggggagccctcccataaccctgtcttgggctccaacccctcaacctctatctcatagatgtgaatctgggggccaggctggaggcagggatggggacagggtgggtggcttaaactcttgatttttactgtaggttcatttctgaaagtagcttgtcgggcttgggtgaggaacggggcacaggagccgtgacccctgcggaggcacagcgccctcccccacctctggggcacggccttcaaggcactgaggctaagcaaggcctttcccgacccataactcgaccctctcgaaaaaacaaccccaatactctccgccaacgacctaattcccaaccatttatnnnnnnnnnnnnnnnngaggcctttctttgtccgggggcgcggacaacaggggtatatggaacggggtatccggggccctaacgtggtttccctgaaccccgttttttcttgccacccagggggttaaaaccctgcccgggtcctcccatataaagc

SEQ ID NO: 177879 - DNA, 960 bp, Homo Sapiens
ggagtaatttctttcattaatggaggtttcagccggttggttcagcaaatccattttccagagggctgggagcttctgattttcctttctccattcaaagcaggcagtatctgtggaagaatagccttttgcccacagctctcggagctcacgagatgtcctttccttttcctctgggggggggccaaaagggcccatcttcacaaactggttctaaaggagatcgtgggggaagctctcccagctctgaataatcttcatatctgctggaagaatcgcacgccttctgcggggtggctactcggaggaatatctgctgcctccaggaatgcctccgggtcttcacaggagtcccaccagaatcaccaagatggtttgctttggattcaaagtcctttcgttcatgaggcgtctctgtgctcactgagtgatacctcataagtttcctttgcgaaacccccggggacccccgggcaggttgtggaggttcctggcattcgatggggaagtgactcagggtgtttgctcgcctcctgaaggcctgctggggcgacagcggagctggctcttctgggagatgactctccgagtcactggacaggtcctccgaggagccgaggagcttaaaggagctctcagagatgggcaaggcctccttttcacacacagatggctctttgctggtgttacttaatgtactagacagggagctatccagatccacactgatggagtgttcctgcaggcctctggctttattaccccgggacaaaatactttctaaagactctgttaaagatctctttgctttgtttttcagcatatctagcctaaatcgagtggcactgggtggtaattcacttccaatattctctgctgccatctgcgatgtctgcttcatctccccaatatggatgtgttctttctgtttctcttcatataaacatctcagaaaagaaa

SEQ ID NO: 177880 - DNA, 1191 bp, Homo Sapiens
  misc_feature (824)..(900): n is a, c, g, or t
agaatacagtagtaagagtaacactgtagccgccaccggcaaggggtgcgcgctggggagcggacgctgcatcccctttctgctgcaggaacctctcatcagaccgcctgagggaagcggcgcccggagacccgccccggcccggtccacattctccccaggaagccggactctatggggcgggaccctgggggagcctgagccgagcccggagccagccccgaacccctgaacctccagccaggggcgccccgggagcagccagcccgtgggcgagccgcccgcccgccgagcagccatgagcgagacggtcatctgttccagccgggccactgtgatgctttatgatgatggcaacaagcgatggctccctgctgggacggggtccccaagccttcagccgcgttcaagatctaccacaacccccacggccaattccttttcccgtccgtgcgcccgaaaaaagccccccccaaccaccaaggggcgcaatcaaaatggtgcccatccggcccggggggggtcaaagttataaaaccagggccctggggccgcccaaaattgccttggtacccaaaactcccggaaaagttcaccaacccccgcacgcaggtcctccccggggcgctccactatgcccccccatcccctttaccagccgggtccaaacccgctaaggtgtggcgggtacctctccgggaaattaacctccgcacccgccccttggcctggcaccccgtgtccccaaagccgaaagtctccccgccctctactttttcgcggtgcgacccacacaaccgtctatcttaagggctatggacaannnnnnnnnnnnnnnnnnnnnnnnnnnnnnnnnnnnnnnnnnnnnnnnnnnnnnnnnnnnnnnnnnnnnnnnnnnnnattttaccctttccgctcgtgttcgccgaaccccccttgcccatcactgcccacccgcttccgatcccctctttccttgatggcccgcttaataccgctccgctttcctttctctgctgcgcccccattttgtcccagcacgcctgtccccgctggatttacaccctgttacccggctgccattttacttcgcgcgcctcactcgccaggggtttagaacccttgcggtccccactgcgcacatttcccccgccccccgcccgctgttctctttcatttttttatcccccg

SEQ ID NO: 177881 - DNA, 943 bp, Homo Sapiens
ggtcacctgagctccgggtgacgcggctgcggtagctgcggatacaagccttccgcgggtcctgcctggcgaccccgacctcctcctgctgtctctccgctccgccaccccgaacccgccaaggtcctgtccttttcctcctgtcctttgccagcgttgggccggaccgggccgagccgggccgcccgggcgcagtctttaaccatggcgtccctcttcaagaagaaaaccgtggatgatgtaataaaggaacagaatcgagagttacgaggtacacagagggctataatcagagatcgagcagctttagagaaacaagaaaaacagctggaattagaaattaagaaaatggccaagattggtaataaggaagcttgcaaagttttagccaaacaacttgtgcatctacggaaacagaagacgagaacttttgctgtaagttcaaaagttacttctatgtctacacaaacaaaagtgatgaattcccaaatgaagatggctggagcaatgtctaccacagcaaaaacaatgcaggcagttaacaagaagatggatccacaaaagacattacaaacaatgcagaatttccagaaggaaaacatgaaaatggaaatgactgaagaaatgatcaatgatacacttgatgacatctttgacggttctgatgacgaagaagaaagccaggatattgtgaatcaagttcttgatgaaattggaattgaaatttctggaaagatggccaaagctccatcagctgctcgaaacttaccatctgcctctacttcaaaggctacaatctcagatgaagagattgaacggccactcaaggctttaggagtagattagtcaaaagaagccatactaattttgcttacttataattatggaggataaacccaagcacagtgccaaatttctttttacaaaacccatgtaattttgc

SEQ ID NO: 177882 - DNA, 1413 bp, Homo Sapiens
ccgccgggatgacgccgtccccgcttaaggggggggcggtggatcctgcgaggggttaccaccggggcgggggggcgacccctcgtttcgtgtccaggagcccgggcggcgggcggcttcccccccggggcggccacccttcgggggtttcacaagaaacccccccttagtttttggcccgcgcgctgcggccaaactggggcggaagaatcttgcgttccccgggaggacggcgttctcgccccccctggaagtgggggaacgtggactcggttcacccgttggggaattcagccgcttagggttaaaccagcgcattcccccaccccaccccaggattaagtcccctcccgccccaagttggggggtcccgcctccaggggagtaccctccaggggcccgggggccccaggtggcgcggggccagggttcagatccccgccttggccagcaggggctccgtggaatgcaggagacccagcagggggtgcccggcccagtgtggacgcaggggcggggcggggccccgggtgagtcagtgcggcaggggcacaagcacctccacgtagctgagcgggaagaagcccgactggccgtccagcatgccctcgtaccagttctcatcgatctggttggtcagcgtgatgacgtccccctcaatggaagcccagctccccgtcgttctcgggctcgaagtcgtacagcgcctgccagctcggctggtccaggggcggcatgctccggctagggggtccggatgggcttgtcggaagatcggaaagaccgatgaagctgcgatcttgggggctgtggtgcaggggaagccccccgttgggactgctcaggctctccaaggtcaaagggctcccggggcttgggcttatactcccgcttagggcgtgaggaagcttcccgcatcctgcgcttgagcttctccgccagctcgtccaggatctgcacggcctgccggtggtagtccagctgtgcatccaccagggccgagagctgactcacctgctcgatgtcagtctccaggaggttgtgcatgctggtttctgccacctccttggactcctcgaacttctccagcgcctggcgtagctcctcatcggggatcttgccctgccgcttcttcttgtagtcaaagtccaggcggcggccctccagtttcttcaggtggtgctggatctccttcaggtctttctcgcacaggttctggagggggtcaatgaagttctgcttgacctcgatgtccagggagtccttcacctctgccaggcgcttcatggactcgccggcatccagcaatgcgtcaccaaagttggactcgccgcccagctccttcccgtggcggatcatgcactcgcccagaagcccctccgactgcgggtagccggggttcttccgccaccc

SEQ ID NO: 177883 - DNA, 1022 bp, Homo Sapiens
caacaacggtgggaagccgtgtctctttcccgcggactcgtgcagctggggcgtccgcagccgctcgtcacccgcgtgatgctgtttctggcgttgggcagcccgtgggcggtcgaactgcctctctgcggaaggaggactgcattgtgtgcggccgccgcgctccgaggtccccgggcctctgtctcccgggcgtcctccagcagcgggccttcggggccggtagccggctgggagtacggggccttcgggagccgcgcgccttctccggcgtccgggttcgagcgcagatccctgtttattgggaaggatatgttcgattcttaaatacgccatctgacaaatcagaagatggaaggctaatttatactggcaatatggcccgagcagcgttctggtgtgaaatgtttctcttattctacgactctgattggccttacatttctgccatacattcctacacaaaataatgctatttctgaaactgcgcctctgcctattcaaatcatattctatggcatcatgggaccctttacggtgatcacccccgtgctgcttcactttattacacaaggctatgccattcgattgcaccatgaggccacaacagaccacttataacgcccattaccctacaatgctatgcttgcagaactgagtacagtgtttcccccagaatgattgtgaagattccccgatgctaaaccctgtattttacccccattctatgctacacacaaaaatcccccgtatagttcaattcccgttgtttctttccccaaaccggggtaacacccccccttctccctaccgcccgttacccaccctccaagaaacccccctttgtggataatcgggaagaaaaacccccgggaagcaaaacacggtgcgtgaaaaattgaccaaatcggatcccccatctttggattagggggttccccgctgttttcgcccgtgtcaactcattactcttgtttattatgccaccccgttattatattcccgtccctgccccttttttt

SEQ ID NO: 177884 - DNA, 589 bp, Homo Sapiens
  misc_feature (65)..(155): n is a, c, g, or t
taagatccacatcagctcaactgcacttgcctcgcagaggcagcccgctcacttcccgcggaggnnnnnnnnnnnnnnnnnnnnnnnnnnnnnnnnnnnnnnnnnnnnnnnnnnnnnnnnnnnnnnnnnnnnnnnnnnnnnnnnnnnnnnnnnnnagctctgggcttcctcttcgcccgggtggcgttgggcccgcgcgggcgctcgggtgactgcagctgctcagctcccctcccccgccccgcgccgcgcggccgcccgtcgcttcgcagagggctggatggttgtattgggcagggtggctccagaatgttacgaactgtgaagatggaagggcatgaaaccatcgactggaacagctactacgcagacacgcacgaggcctactcctccgtgccggtcagcaatatgaactcaagcctgggctcgatgaactgctggaacacctacatgaacatgaaccccatgactaccaacgggatcatgaaaacgacgacctaacaacatgagaaaagccaacaccaacacaacgggaggaccctgaaaccacaaaccaaataacaatgaagacaagaagccatcagaacag

SEQ ID NO: 177885 - DNA, 863 bp, Homo Sapiens
  misc_feature (820)..(820): n is a, c, g, or t
ggggggaagggccccggaggcgggcacttggggggaaagttgagacgtgattaccgggttgggcgggccccatctgggaggggtttgtgggtgaactcggggtccaccgcccgctgaggagatggatgaggacgggcttcctctcatggggtcaggcatagacctgaccaaggtgccagctattcaacagaaaagaacggtggcttttctaaaccaatttgtggtgcacactgtacagttcctcaaccgcttttctacagtttgtgaggagaaactggcagacctttcacttcgtatccaacaaattgaaacaactctcaatattttagatgcaaagttgtcatctatcccaggcctagatgatgtcacagttgaagtatctcctttaaatgtcaccagtgtcacaaatggagcacatcctgaagccacttcagagcaaccacagcagaacagtacacaagactctggactacaggaaagtgaagtatcagcagaaaatatcttaactgtagccaaggatccaagatatgccagatatctcaaaatggttcaagtgggtgtaccagtgatggcaataagaaacaaaatgatatcagaaggactagacccagatcttcttgagaggccagatgctccagtgcctgatggcgaaagtgagaaaactgtagaagaaagttcagatagcgaatcttcttttagtgattaagcttaattttgataagaattacatatgcatgcataggggtacatttacattctgtaaaagattgagcctgaactctcttaatcataaaaacatcaaatggccacatgtccactnccaagcttcttctatgttaaaaaaataataataaagcagtttt

SEQ ID NO: 177886 - DNA, 461 bp, Homo Sapiens
  misc_feature (391)..(391): n is a, c, g, or t
gtgaactcggggtccaccgcccgctgaggagatggatgaggacgggcttcctctcatggggtcaggcatagacctgaccaaggtgccagctattcaacagaaaagaacggtggcttttctaaaccaatttgtggtgcacactgtacagttcctcaaccgcttttctacagtttgtgaggagaaactggcagacctttcacttcgtatccaacaaattgaaacaactctcaatattttagatgcaaagttgtcatctatcccagggcctagatgatgtcacagttgaagtatctccttttaaatgtcaccagtgtcacaaatgggagcacatccttgaaggccactttcagaggcaaccacaggcaggaacagttacacaagattctgggantacagggaaagttgaagtattcaggcaggaaattttctttaactgtaggccagggttcccaggtatggcc

SEQ ID NO: 177887 - DNA, 924 bp, Homo Sapiens
  misc_feature (826)..(826): n is a, c, g, or t
gcgtgtcgagtggctcttcctggctgctgaggcgggttaaggtctgagggtcttgtggggccacggcgctgatcaccaggtgtttggcttggtcggttcttatttctcgcctggcaatggcgacgtacacctgcataacttgccgggtggcgttccgcgacgcggacatgcagcgggcccactataagacggactggcaccgctacaacctgcggcggaaggtggccagcatggccccagtgaccgccgagggcttccaggagcgagtgcgggcgcagcgggccgtcgcggaggaggagagcaagggctcggccacctactgcaccgtttgcagtaagaagtttgcctctttcaacgcctacgagaaccacctcaagtcccggcgtcacgttgagctggagaagaaggccgtgcaggcagtgaatcggaaagtggagatgatgaatgaaaagaacttggagaaaggactgggcgtggacagtgtggacaaggatgccatgaacgcggccatccagcaggccatcaaggcccagccgtccatgtctcccaagaaggcgcccccagcgcctgcaaaggaggccaggaatgtcgtggccgtgggtactggtggccgtgggacccacgaccgagacccgagtgagaaaccaccccggctccagtggtttgaacagcaggccgaagaagttggcaaagcaccaggaggaggacagccaggaagaagaagaggacctggatggagacgattgggaagatattgattctgatgaagaattggaatgtgaagatactgaagcaatgggacgatgttggtgggagcaagatgcanaaggaagaaaaaggctgaaggaaggcccaccccctgggtgccatccccaatcacggactgctttatttttgttcccatcattccagcttgcctgatga

SEQ ID NO: 177888 - DNA, 1142 bp, Homo Sapiens
  misc_feature (109)..(109): n is a, c, g, or t
  misc_feature (727)..(728): n is a, c, g, or t
aggagcgggccacccgggcggggatatatcgcgtcgcgccgggtgcgaacctatggtccgtcggcactggggaggacaagggacccgctggtgccgcggggtgagtagntggcggataattaaggcttgtgaaggccggtccgtgtggaagcaccgcggcgccacccgtcaccttcaccgggggggatgcgacagagaggggccggcgcacgcgcgggcacaatccgcgcgaaaagcggtcaaatatacaagcggcgtgccgggaggcggacgcgccctggcgagtggcgagaggctgtcccgcatgctgtataagtcgcggatagcatggacagaatcatggagcgagacgcagcgggcgaagcgagccgggcgctaggcggggataaacgtggtggaaacggcacaggacccgaggggcgtgtgcacacgggcagtacgactacatagggacgcgactaagcaggatgagcggccacgccacgaacttgcaacatacgccgggaaccgggggggcagggtataggaagacagggtctacgcgccagcgtagtccaaccggggcccaggcggcgcccgaattggcgaacgcccataggctccccccggagcctggcgggccgcgagtagcccggcaaagcaaggaacccgcttggaagggggccggccccgggccgggcgccaaggcctgcggcgcgcccagagaaataaaggcacgggctgaagnntcgaagacgcgactaatgattcgacgaggcggcccagctcacctatcaggggggtgcgtcccgagttcgtccgcggaaggacggcggggggccgcattgccgccgtacgcagcagccaagcagtcggcctcgtagtagaagttggccacgtccatggatggtaaaggcaggcggctgcggcggcagggggagacatgctgggtcccaggccaccaggcgttgcatgaacgcgggtgcccggggagggggcctggggctgcccgctccggccggcccgcaggtggcgcggcctccctgctctgagctgtcgccgctgcgtcgctgctgctgctgccgccgctgccggggtggccgctattagtgagggggctggtggctggaccctcgggtgggtcccattcccagtcccgtgcg

SEQ ID NO: 177889 - DNA, 1487 bp, Homo Sapiens
agcgaaaggcttgaggaccaggtcggggccgggttccgggtcggggagcggctccgggcggcagctatgaggcgggacgtgcgcatcctgttactgggcgaggcccaggtggggaagacgtcgctgatcctgtccctggtgggcgaggagttccccgaggaggtccctccccgcgcggaggagatcacgatccccgcggacgtcaccccggagaaggtgcccacccacatcgtggactactcagaagccgagcagacggacgaggagctgcgggaggagatccacaaggcaaacgtggtgtgtgtggtgtatgacgtctctgaggaggccaccattgagaagattcgaactaagtggatcccactggtgaatggggggaccacgcaggggcccagggtgcccatcatcctagtgggcaacaagtcagacctgcggtcggggagctccatggaggccgtgctccccatcatgagccagtttcccgagattgagacctgcgtggagtgttcggccaagaacctgaggaacatctcagagctgttctactacgcccagaaggccgtcctgcatcccacagcccccctctatgaccctgaggccaagcagttgaggcccgcgtgcgcccaggcgctgacgcgcatcttcaggctctcagatcaggacctggaccaggcgctcagtgacgaagagctcaacgctttccagcagaaatcctgctttgggcaccccctggccccgcaggccctggaggacgtgaagacggtggtgtgcaggaacgtggcgggcggcgtgcgggaggaccggctgaccctggatggtttcctcttcctgaacacgctcttcatccagcgcggccggcacgagaccacctggaccatcctgcggcgcttcggctacagcgatgccctggagctgactgcggactatctctcccctctgatccacgtgccccccggctgcagcacggagctcaaccaccttggctaccagtttgtgcagagagtgtttgagaagcacgaccaggaccgcgacggcgccctctcgcccgtggagctgcaaagccttttcagtgtgttcccagcagcgccctggggccccgagctcccacgcacagtccgcacagaggccggccggttgcccctgcacggatacctctgccagtggaccctggtgacctacctggacgtccggagctgccttggacacctaggctacctgggctaccccaccctctgtgagcaggaccaggcccatgccatcacagtcactcgtgagaagaggctggaccaggagaagggacagacgcagcggagcgtcctcctgtgcaaggtggtaggggcccgtggagtgggcaagtctgccttcctgcaggcctttctcggccgcggcctggggcaccaggacacgagggagcagcctcccggctacgccatcgacacggtgcaggtcaatggacaggagaagtacttgatcctctgtgaggtaga

SEQ ID NO: 177890 - DNA, 1061 bp, Homo Sapiens
  misc_feature (28)..(28): n is a, c, g, or t
  misc_feature (46)..(46): n is a, c, g, or t
  misc_feature (50)..(228): n is a, c, g, or t
  misc_feature (232)..(232): n is a, c, g, or t
  misc_feature (236)..(236): n is a, c, g, or t
  misc_feature (247)..(247): n is a, c, g, or t
  misc_feature (250)..(250): n is a, c, g, or t
  misc_feature (263)..(264): n is a, c, g, or t
  misc_feature (267)..(434): n is a, c, g, or t
  misc_feature (437)..(438): n is a, c, g, or t
  misc_feature (441)..(444): n is a, c, g, or t
  misc_feature (450)..(450): n is a, c, g, or t
  misc_feature (453)..(554): n is a, c, g, or t
  misc_feature (558)..(588): n is a, c, g, or t
  misc_feature (590)..(663): n is a, c, g, or t
  misc_feature (665)..(673): n is a, c, g, or t
  misc_feature (675)..(732): n is a, c, g, or t
  misc_feature (734)..(746): n is a, c, g, or t
  misc_feature (748)..(749): n is a, c, g, or t
cacggcgggacggcgcgaggccgcgcgncgggcgccaggcccggcnccannnnnnnnnnnnnnnnnnnnnnnnnnnnnnnnnnnnnnnnnnnnnnnnnnnnnnnnnnnnnnnnnnnnnnnnnnnnnnnnnnnnnnnnnnnnnnnnnnnnnnnnnnnnnnnnnnnnnnnnnnnnnnnnnnnnnnnnnnnnnnnnnnnnnnnnnnnnnnnnnnnnnnnnnnnnnnnnnnngggngggngccgggcggcnggngcgggggggcggnnggnnnnnnnnnnnnnnnnnnnnnnnnnnnnnnnnnnnnnnnnnnnnnnnnnnnnnnnnnnnnnnnnnnnnnnnnnnnnnnnnnnnnnnnnnnnnnnnnnnnnnnnnnnnnnnnnnnnnnnnnnnnnnnnnnnnnnnnnnnnnnnnnnnnnnnnnnnnnnnnnnnnnnnnnggnnggnnnngggcgnggnnnnnnnnnnnnnnnnnnnnnnnnnnnnnnnnnnnnnnnnnnnnnnnnnnnnnnnnnnnnnnnnnnnnnnnnnnnnnnnnnnnnnnnnnnnnnnnnnnnnnngggnnnnnnnnnnnnnnnnnnnnnnnnnnnnnnngnnnnnnnnnnnnnnnnnnnnnnnnnnnnnnnnnnnnnnnnnnnnnnnnnnnnnnnnnnnnnnnnnnnnnnnnnngnnnnnnnnngnnnnnnnnnnnnnnnnnnnnnnnnnnnnnnnnnnnnnnnnnnnnnnnnnnnnnnnnnncnnnnnnnnnnnnnannctggcgagcagtctccacacctgaccttctaacccccaaaagaaaatccggaagctgccccttctctttccccacaggtgggctctgcagggcctcccagggatggtggttctgcggcagggcctaggcagggcctggtctcagctggctcctgcccgagccatgaggtcttccaaagcattgtcctggtcattgttgtgtaatagcaaaacttccttaatgtctttcagctcaaagcccatctccttaaatttgctcattaactgaagaaactccatcatcttttcttctgaacactggtgcatttcccag

SEQ ID NO: 177891 - DNA, 1061 bp, Homo Sapiens; identical to SEQ ID NO: 177890
  misc_feature (28)..(28): n is a, c, g, or t
  misc_feature (46)..(46): n is a, c, g, or t
  misc_feature (50)..(228): n is a, c, g, or t
  misc_feature (232)..(232): n is a, c, g, or t
  misc_feature (236)..(236): n is a, c, g, or t
  misc_feature (247)..(247): n is a, c, g, or t
  misc_feature (250)..(250): n is a, c, g, or t
  misc_feature (263)..(264): n is a, c, g, or t
  misc_feature (267)..(434): n is a, c, g, or t
  misc_feature (437)..(438): n is a, c, g, or t
  misc_feature (441)..(444): n is a, c, g, or t
  misc_feature (450)..(450): n is a, c, g, or t
  misc_feature (453)..(554): n is a, c, g, or t
  misc_feature (558)..(588): n is a, c, g, or t
  misc_feature (590)..(663): n is a, c, g, or t
  misc_feature (665)..(673): n is a, c, g, or t
  misc_feature (675)..(732): n is a, c, g, or t
  misc_feature (734)..(746): n is a, c, g, or t
  misc_feature (748)..(749): n is a, c, g, or t

SEQ ID NO: 177892 - DNA, 416 bp, Homo Sapiens
acgacttcgtggggaagctggagactctggacgaggacgccgcgcagctgctgcagctactccaggtggaccggcagctccgcttccccccgagctaccggaacaggaccgcccagcagctgggaggaggactggttcgcccaagatcccccctggcctggaggcagcagctgtataaactctacgaggccgactttgttctcttcggctaccccaagcccgaaaacctcctccgagactgaaagctttcgcgttgctttttctcgcgtgcctggaacctgacgcacgcgcactccagtttttttatgacctacgattttgcaatctgggcttcttgttcactccactgcctctatccattgagtactgtatcgatattgttttttaagattaatatatttcaggtatttaatacg

SEQ ID NO: 177893 - DNA, 1227 bp, Homo Sapiens
  misc_feature (810)..(913): n is a, c, g, or t
  misc_feature (915)..(926): n is a, c, g, or t
  misc_feature (928)..(974): n is a, c, g, or t
  misc_feature (980)..(983): n is a, c, g, or t
  misc_feature (989)..(989): n is a, c, g, or t
  misc_feature (998)..(998): n is a, c, g, or t
  misc_feature (1012)..(1130): n is a, c, g, or t
gagggaacttgcaccgaagcatcactcgagaccccaaacctccaggcctgaggcccagccagcgcccaatggatgacaaaaagaagaaacggagtcccaagccctgcctggcccagccagcccaggccccaggcacactacggagggtccctgtgcctaccagccacagcggctccttggccctaggacttcctcatctgccatcccccaagcagcgggccaagttcaagagagtaggcaaagagaagtgccgcccagtcctggctggaggtggaagcggctctgcaggcacgcccctgcagcactccttcctgaccgaggtgactgatgtctatgagatggaggggggactcctgaacctgctcaatgatttccactctggccggctgcaggccttcgggaaggaatgctcctttgagcagctggagcacgttcgggagatgcaggagaagctagcccggctgcacttcagcctggatgtgtgtggggaggaggaggacgatgaagaggaagaggatggggtcactgaggggctgccagaggagcagaagaagacaatggctgaccgtaacctggaccagctgcttagcaatctggaagacctcagtaattctatccagaagctgcacctggccgagaacgccgagcctgaggagcagtccgctgcgtaggcgtcccacgcaggcccacactgcccctctcattctcttcaaactgtgactttttacagactcgggcggggtgttctgcggccccccaggtgctatgggggagggggacgttaaatggaattaaaccagaaagaaagcnnnnnnnnnnnnnnnnnnnnnnnnnnnnnnnnnnnnnnnnnnnnnnnnnnnnnnnnnnnnnnnnnnnnnnnnnnnnnnnnnnnnnnnnnnnnnnnnnnnnnnnnannnnnnnnnnnnannnnnnnnnnnnnnnnnnnnnnnnnnnnnnnnnnnnnnnnnnnnnnncacccnnnnaaaaanaaaccaccnaaaaaacccataannnnnnnnnnnnnnnnnnnnnnnnnnnnnnnnnnnnnnnnnnnnnnnnnnnnnnnnnnnnnnnnnnnnnnnnnnnnnnnnnnnnnnnnnnnnnnnnnnnnnnnnnnnnnnnnnnnnnnnacaacaaaaacatacccccaaattctaccataacacttttcacacccatccccaaacatgtggcaccgcgggcattcttggttctctaacacgcgga

SEQ ID NO: 177894 - DNA, 1055 bp, Homo Sapiens
  misc_feature (77)..(101): n is a, c, g, or t
  misc_feature (626)..(683): n is a, c, g, or t
  misc_feature (690)..(698): n is a, c, g, or t
  misc_feature (761)..(770): n is a, c, g, or t
tcaccccgcctgcgttcctttccccaaccttcaatggtaccagcctgggtggcgaattctccacgaggatttctttnnnnnnnnnnnnnnnnnnnnnnnnnggttagaatctctattccaatgagaaggctaactgtgtgtagcaattgttagcgctgataaccccctttgcagtaggtgacagagagggtaagaaacttgttcagaccacacagcaggtcaagggcagactgggggcttgggttcctctggcttgggccatcctggagcccctccgtgtagccccaggcactgggaccacatggggacagaggaagccagcagctccatgccaggagtgccagcgccagccctgaaatgcccagttattgttgcagtgaatgacaattacccctgtctttgaagaccgtgggtgacgggcctgctcccccgacagccccatgtagagctgccagattgaggaggaaaataacataaaaacaggatgcccagttatatatgaatttcagataaggaatactgtcaagtagaagcatgtcccaagcattgcatgggacatgcctctactaaaaaaactatttgttaacctgagattcaaatgcgatggaaggcccgcattttacctnnnnnnnnnnnnnnnnnnnnnnnnnnnnnnnnnnnnnnnnnnnnnnnnnnnnnnnnnnaaaactnnnnnnnnnctaccagggtctatgaggcccaggggacactgcctaaacattgccctgacacacagggacagnnnnnnnnnngcagaagaaatgacccaaagtggttagcaaccgcccaaggcttaaggggacccttgggtccacacaccgaagtggttttccggtggcccaggccagggctgcccaaaggtacctgggccttcttcttttttttggcttccccagggggtggccctgggcccctttgttttcccttttttacgggcatggagttaaaatgccaaggccctgaagggaaggggaacaaattgcctggcgaaaatcgatcggcaatccagggggctttgtgaccctgggccctttaaa

SEQ ID NO: 177895 - DNA, 964 bp, Homo Sapiens
  misc_feature (162)..(222): n is a, c, g, or t
  misc_feature (912)..(912): n is a, c, g, or t
ggaccgaggcctgggtggcgttccgagacgaggctcgaatcccgttgccgactcgcgctctcggcttctgctccggggcttcttccctgcccgcccggggccctgaccgtggcttcttccccggcctgatctgcgcagcccggcgggcgcccagaaggagcnnnnnnnnnnnnnnnnnnnnnnnnnnnnnnnnnnnnnnnnnnnnnnnnnnnnnnnnnnnnntgggaccgctcggccgcctcctgcccggcgagcagctcagaccatgtcgcctgaagaatggacgcatctagtggctcttcttatctccatccccatcggcttcctctttaagaaagccggtcctgggctgaacagatggggagcagccgctgtgggcctggggctcaccctgttcacctgtggcccccacactttgcattctctggtcaccatcctcgggacctgggccctcattcaggcccagccctgctcctgccacgccctggctctggcctggactttctcctatctcctgttcttccgagccctccgcctcctgggcctgcccactcccacgcccttcaccaatgccgtcccgctgctgctgacgctgaagctggtgagcctggcccaggaagtccccggacctgcatctggccccagaaggaaggaaatggccccaggcttcccgcaagggggcccacccctgggggctgctggcccgaacctgccccctccctgatcgaagacactcaagttatcggctactggctccgtggggaaatcctgaccaggccccgtccttcccgcctacccgcaccctaacctgggacctgggctgggaaccagccccctctcccccggggggcagaggccccaagccctggcggggccccccgccgtgcgacaccgaccccgtgaccgggcacnacggcgtcctttggggcgcggcctgctccccctggcttcttcctcctcgccc

SEQ ID NO: 177896 - DNA, 935 bp, Homo Sapiens
  misc_feature (132)..(192): n is a, c, g, or t
ggactcgaatcccgttgccgactcgcgctctcggcttctgctccggggcttcttccctgcccgcccggggccctgaccgtggcttcttccccggcctgatctgcgcagcccggcgggcgcccagaaggagcnnnnnnnnnnnnnnnnnnnnnnnnnnnnnnnnnnnnnnnnnnnnnnnnnnnnnnnnnnnnntgggactgctcggccgcctcctgcccggcgagcagctcagaccatgtcgcctgaagaatggacgtatctagtggttcttcttatctccatccccatcggcttcctctttaagaaagccggtcctgggctgaagagatggggagcagccgctgtgggcctggggctcaccctgttcacctgtggcccccacactttgcattctctggtcaccatcctcgggacctgggccctcattcaggcccagccctgctcctgccacgccctggctctggcctggactttctcctatctcctgttcttccgagccctcagcctcctgggcctgcccactcccacgcccttcaccaatgccgtccagctgctgctgacgctgaagctggtgagcctggccagtgaagtccagggacctgcatctggcccagaggaaggaaatggcctcaggcttcagcaaggggcccaccctggggctgctgcccgacgtgccctccctgatggagacactcagctacagctactgctacgtgggaatcatgacagggcccgttcttccgctaccgcacctacctggactggctggagcagcccttccccggggcagtgccccgcctgcggcccctgctgcgccgcgcctggccgggccccgctcttcggactgctggttcctgatctcctctcacctcttcccgcttggagccccggcccgaaggacaccttctacgcccggcccgctggcccgccccgct

SEQ ID NO: 177897 - DNA, 920 bp, Homo Sapiens
cggcttcctctttaagaaagccggtcctgggctgaagagatggggagcagccgctgtgggcctggggctcaccctgttcacctgtggcccccacactttgcattctctggtcaccatcctcgggacctgggccctcattcaggcccagccctgctcctgccacgccctggctctggcctggactttctcctatctcctgttcttccgagccctcagcctcctgggcctgcccactcccacgcccttcaccaatgccgtccagctgctgctgacgctgaagctggtgagcctggccagtgaagtccaggacctgcatctggcccagaggaaggaaatggcctcaggcttcagcaaggggcccaccctggggctgctgcccgacgtgccctccctgatggagacactcagctacagctactgctacgtgggaatcatgacaggcccgttcttccgctaccgcacctacctggactggctggagcagcccttccccggggcagtgcccagcctgcggcccctgctgcgccgcgcctggccggccccgctcttcggcctgctgttcctgctctcctctcacctcttcccgctggaggccgtgcgcgaggacgccttctacgcccgcccgctgcccgcccgcctcttctacatgatccccgtcttcttcgccttccgcatgcgcttctacgtggcctggattgccgccgagtgcggatgcattgccgccggcgtttggggccaaccccggagccgacaaaacccgcaccaggagcaggcaccacacgaaaatgagacaccaccagcgaagccgggagaaagccgccttccttggagtatgactaatgagacatccgcaacatcgactgctaaagcacagatttctgcctggcgggtgccccaatggcatgccggtactggaaaca

SEQ ID NO: 177898 - DNA, 953 bp, Homo Sapiens
  misc_feature (129)..(191): n is a, c, g, or t
  misc_feature (862)..(862): n is a, c, g, or t
cgaatcccgttgccgactcgcgctctcggcttctgctccggggcttcttccctgcccgcccggggccctgaccgtggcttcttccccggcctgatctgcgcagcccggcgggcgcccagaaggagcagnnnnnnnnnnnnnnnnnnnnnnnnnnnnnnnnnnnnnnnnnnnnnnnnnnnnnnnnnnnnnnnactgctcggccgcctcctgcccggcgagcagctcagaccatgtcgcctgaagaatggacgtatctagtggttcttcttatctccatccccatcggcttcctctttaagaaagccggtcctgggctgaagagatggggagcagccgctgtgggcctggggctcaccctgttcacctgtggcccccacactttgcattctctggtcaccatcctcgggacctgggccctcattcaggcccagccctgctcctgccacgccctggctctggcctggactttctcctatctcctgttcttccgagccctcagcctcctgggcctgcccactcccacgcccttcaccaatgccgtccagctgctgctgacgctgaagctggtgagcctggccagtgaagtccaggacctgcatctgggccagaggaaggaaagggccttcaggcttcagccaggggcccccccctggggctgctgcccgacgtggccctccctggagggaagaccctccaataacggctcctgctacggggggaatcttggcagggcccgagccccccggatttcccgtccttatttggcacgggcccgggagctgaccccttcccccggggccctttcccccgtaacaccaacccccctaacgagccgcaccccatttctactcccgcgcgatcncacacccacccccagccgcatctgtttcgtccaccgccgccctcccctacctatagccgccgaaacattcgtccgtatcccccccgctgcg

SEQ ID NO: 177899 - DNA, 806 bp, Homo Sapiens
  misc_feature (673)..(748): n is a, c, g, or t
cgcacactcatctccacgaccggctttaagtgcggccttgaggcctggctccctgtttggacttctctgcacctccaggagctcacttcccgtcacagctggatgcctcctcccgcaggcacctcccgggcatcctcccgccccaggctgcaccttctgtgggactggcccccgcaggcacctcccgggcaccctcccgccccaggctgcagcttctgtgggactgagccccgcaggcacctccccggcatcctcccgccccaggctgcaccttctgtgggactgagccccgcaggcacttccccggcatcctcccgccccaggctgcagcttctgtgggactgaccttaagaccccatcggttcctcctgagagcagcagatctcagccagatgctgccgggagggaggtgctagcgtccacacccagacgggtccagtccagccctgctctccctggtctccaggcagggccctcccagggtggacattgcccatctctgcctggccaggggctgctgacccactggttccagagtctgagcctgtcctgcacaagtaccatggacaggggtcagccgggcactgaagaggcgtggcagaattgggcagggcaagggccccagctggcaagctggagtcagggcaattccaacccaagaaactgcggcagnnnnnnnnnnnnnnnnnnnnnnnnnnnnnnnnnnnnnnnnnnnnnnnnnnnnnnnnnnnnnnnnnnnnnnnnnnnngagttttgaaacccgccattggggtaccattagaagacccctaatcgcctacaagaaa

SEQ ID NO: 177900 - DNA, 1479 bp, Homo Sapiens
  misc_feature (578)..(578): n is a, c, g, or t
  misc_feature (1221)..(1251): n is a, c, g, or t
gggttcctttctatcccactttcaaggagggaatggctttggaagactatcagaggatgcttggttaccaagtaaaggattccaaagtggagcagcaagacaactttctaaaacgcatgtcagggatgatccgtctctacgctgctatcatccagctccggtggccatatggaaaccgacaggagattcaccctcatggcttaaatcatggatggcgctggttggcacagatcttaaacatggagcccttgtcagatgtgacagccaccctcctctttgacttcctggaggtgtgtgggaatgccctcatgaagcaataccaggttcagttctggaagatgctaattctcatcaaagaggactactttcccagaattgaagctatcacaagctcaggacagatgggctccttcatacgcctcaagcagttcttggagaaatgtttgcaacacaaggacattcctgtccccaagggctttctgacttcctccttctggcgctcctgatgtcactccatcacccaccatcaccgctgctgcaaagaggcaataataaaggaactgaagacagctgtattntgggagaagtcatgtcagattcagaaatttgccattatgtatttttatgtatttatgcccttgtgactaggagaggagattttcatgggtcacaaaattcttggaggtcccttagtagatttggtagttcccttaagagatccacgtgaataaaataaatggagttggccttttcttggttttttgcaaaagtgataaaaggtcctttaacacttgggtctcctcccctgtctctagtgtctttcagaaagttggcaataccttaacaaatgcactctgagctggagggagcccaccatttgcacccacctacccaccctcacccctgttcagatgaatttccagaaagagctaaggctcataaggttcccttttaagtattatttaatagttgaggccagatacttacatgcaagtctgggttatggttgttttgcctttctcagcttgtgaagtcattctaaagctagaggaagtatgtgatatacacatggactaaggctcaggtgacactatggctagattaacatctgggattaggactggaaacacatgtcattttgaactaagggaaactctttgtcatcctaatttggaatttggtccctggatggctagggatccatgacccaggcaggtaccnnnnnnnnnnnnnnnnnnnnnnnnnnnnnnnctgcttgaattaagatgggctaagatggggcttgcaacattaaacatgagctgagcttccataagcattgaattgggataaataaagatggtgggcaggaactgaacactgctaatatgatgataaatatggcctgactaaagccccctacagaaaatccagaagaattgggctgttaaaaatttggttttggggaaaagaataatttcctccttggatactggcaga

SEQ ID NO: 177901 - DNA, 825 bp, Homo Sapiens
gggggcttccccgcctggcgcctgccctccagggctggggcctcgcctggcgggaccccgcagcagccccggccccatccccgcccagagccgggcgtcgtgtgggtccgtgggtgataattgagagcgtcagacccaggactgttcagggaggagccccggtcagactcccacgtgtgaagaccgggccccaagtggcaagggctggcctggggcgggcagcttgggtcctggacgttgataggaagcggaaggggaatcgcgggaagctggcccaggtcaggtccgcaaaggcttctgaagaagaggaagggcgagtaggggcacctggacgctgatggtggccaggatgctcagctggccaggagggcagcacctgctggggacggtggccctgccttcatgcccaggacaccagctgggtccagctagcagccactgggaatcagaggaatggggcagagctgggcattcaggaccttgaggacacgtgaccccacccgcccaccgccactatcaggccccgggaccgcactgacaggaaaccttccgtcgtgagggagcacttcccaggggccgcagggacgacactctccagggaggccccagcaaccacaccatcttcttgctgtgagaggtctcaccccgggctacctcctgtcactactcactgccctggggtccgtgggcaagttgcccagggtgggggtgcctagccaggtgcagtccccgccccgcctagtcctcggcgtcacgcaatgctcacctcgcctcttccccactaacatcccagactttaaaattcagtaaatcagatgtacaccg

SEQ ID NO: 177902 - DNA, 1099 bp, Homo Sapiens
  misc_feature (67)..(67): n is a, c, g, or t
  misc_feature (138)..(202): n is a, c, g, or t
  misc_feature (309)..(363): n is a, c, g, or t
  misc_feature (389)..(434): n is a, c, g, or t
tgggttaggcggggggggagggctatgcgaacggggcgggtgcgttaatcacggggtacgcgtacancgggcggacatctctagaggcgactatttcataacgcgtgtggcggggcgccttagggatggtatacatannnnnnnnnnnnnnnnnnnnnnnnnnnnnnnnnnnnnnnnnnnnnnnnnnnnnnnnnnnnnnnnnaatgcggcgggtcggtgcgttgtgtataatgggggtggggcgactgggggtcgggaatgccggatattgcggtcgagcgggggagagtcttacgtaatatggttacnnnnnnnnnnnnnnnnnnnnnnnnnnnnnnnnnnnnnnnnnnnnnnnnnnnnnnnccctgcggtattttagacgtctgcannnnnnnnnnnnnnnnnnnnnnnnnnnnnnnnnnnnnnnnnnnnnntgatttggcgaacggtgagggctttgtatgaacggggtgggcctaggggtgggtgggggaaagaacgagcgtggtacgggggcgcgctgagaacgcggacggtgggtgggcgaggatcccgggaagagcgacccgagggtttatttttgtcttctaagggggcgggaggtggagatattgtttgttggtggttgcatatgtcagacttcgcgctgagcttcaggcgcaagtactccaggttattctgagagtcttgacagagtcttcttcccccgctggtcatgtgacctcacttccagtgcacacctggaaactctgcatgggtctcagtgggccctgaccctgcctttcccatccaggggcagggtatgctggaaagccctggagccgccccaccccacttctagggtcccctggctacaaaagaactgtcctgctagagcccagctctgcagcgcccccgatatcacctgttcttcgggccttagagcctggcagggcacttgcagccctgtggagcctcagccacgagcaccacaggcccagaatggggcatgaggccctggagagtgaggcaggcccagcctcgtgcagaacaatagcaggtgggctcagcaagcccctgctccccacagacatggcccacttcctggggctgctctgag

SEQ ID NO: 177903 - DNA, 751 bp, Homo Sapiens
gtacatagaggtttttcacaccaacacatctctgcccagtgtgccaacatctgccacctgctataatagtactataacactcaatatgtaattaatgtagtctcagggatgttatgacaatatgattacaactatcacgtgtgtgcccagccaggctcaatgccccaggctgggcgaggtggggcaggggacacagcctaaaatgccaggcctcaggaagccatttggtttagcagacattgtttattaaaggagttacctatgccagatcgaaggcctaagatgattaagacactatgagtgccttcaagtggttggggacgttcatgattgtggtacagacaaataggctttcacatcattcttttatgtaatcatacaacagatatttgcacctacatgtgcagagcactgtgataggcctcagtgacacagaataatacggcaaagaccccacccgatgagccccctcccaccacccaccagtacagtagggggtggtttaatgggaagggttcctggaaaatgaaagtggggggcaaggcattaaggggtgggcaaaggggaacaaggggtttattccggatcaggtttatgcaacctgggtttataataaagttaaatcaccccagaggggggggaataatatccttttacgaactctatagagagtaaatctgacaagatgaaatgctgatgaaaatatggaggaaatgaaactctcatgggttttgcagggaatctaagtcag

SEQ ID NO: 177904 - DNA, 912 bp, Homo Sapiens
tttcctccatctggtggcagtgaagagggcatcacaaaaataaattttaaaaacgtttcctttcttcttcatcttcagtttccttgacatcctcagctcctgcttcgattgccatctccagggcacgctctaggttcacagccttctttctctctgtcctccactccaaccacaatcaccccctttttgtcaaaagagtgacgagctcttacagccatcactcctccattcttattcaggatatgtctaatgtctgcttggcacttgtggctactgttagataatgcctcgatgagcagagaagagccaccagggcctcgaccctcatacagcaaataagtgtccttggatttctccattttcagtgctgtctcaatcgttgacttgggcatatgtttgctgcgacacacctctaagatattggccaggttgctgttgtgctcagggttggggcctccttctttcactgccaggcggatgttcaaacagagtttggagaagatgcgactcctttcgacgtccttcggacccttgatgtgcctgactttggaccacttgttgtgcccggcggggacagccgcggtaaagtgcagcgtcctgcccggagcggcaccgcagccccggggctcggggtgggagggccgggggtcgcgcggaggagccgccctgaccccggggcctcgtgccagcaagcatcgggcagcggccctgcttaggctggcagcagcccaagccgacatcggtcccgaccctggggttcaagctgctagcagcagcggccaacgccggcgcgtctcttccactgccggaacaagcagttccggaccccgcggccgcctgtgccggtcacctgagatccaaaggcttgggcccgcccggggcggctcaacagctaatgaccctacactgtcc

SEQ ID NO: 177905 - DNA, 1089 bp, Homo Sapiens
  misc_feature (61)..(61): n is a, c, g, or t
  misc_feature (84)..(84): n is a, c, g, or t
  misc_feature (285)..(285): n is a, c, g, or t
  misc_feature (992)..(992): n is a, c, g, or t
ggcgcgtggggctccctacatccacttcctgaacacgttcaccagcaaggagccgcagcgngggtatgggcagcatgcacaagncggggcctggaggtcagcaagtgcgagatcgcccggttctacaaactgcatgagcgcaagtgtgagcccatcgtcatgactgtgccaagaaagtcggacctcttccaggatgatctgtaccccgacacagccgggcccgaggcagccctggaggctgaggagtgggtgagcgggcgggatgccgacccgatcctcatctcnacttgcgggaggcctacgtgcccagcaagcagcgggacctgaagattcagccggcgcaacgtgttgtcttggacagccggcccgccatggccccgggctcctcccacctaggggcccccgctccaccaccactgctgctgatgccacccccagcggagcctggccagagccggggaggctgggaagctggaggaggtgatgcaggagctgcgggccctgagggcgctggtcaaggagcagggcgaccgcatctgccgcctggaggagcagctgggccgcatggagaacggggatgcgtagggccacagacacacgccaacttcatctcctccgccgcccccttcccactcagcttctgccagcgggtcgcaccgggctagctggctgcccagagcctctgaggcagcgcaggggtcagttcccacccccacccgtcccaggcccaggccgaagccagcgcccagctttcctcactgttcctgtggaggatgtctacgcccaggcgagctcctcgacctctgagggaccatctccccgaccactgcccagccctctgctccctccccagaggaggcgggagggtgggctctatattttcattccaaataaaattctctttcccgccaagctacttcgcccgcctacatacctcttgttcggccgccctcgggccctccaagaagctttcctaaaccatttcctttggnggcgcgggccccagttaggtaaagtgaacatgggtccttagctggtttcctaaggagaatcctgggccttgacctaggggctttggattctcccccc

SEQ ID NO: 177906 - DNA, 719 bp, Homo Sapiens
cacacgggacctgtcctggacatcgactggtgtctcacagaggacgaagtcatagccagcggctcggaggactgcacggtcatggtgtggcagatcccagagaacgggctgacctccccgctgacagagccggtggtggtactggaggggcacaccaagcgagtgggcatcatcgcctggcaccccacggcccgaaacgtgctgctcagtgcaggctgcgacaacgtggtactcatctggaatgtgggcacagcggaggagctgtaccgcctggacagcctgcaccctgacctcatctacaatgtcagctggaaccacaatggcagcctgttttgctcagcatgcaaggacaagagcgtgcgcatcatcgacccccgtcggggcaccctggtggcagagcgggagaaggctcatgagggggcccggcccatgcgggccatcttcctggcagatggcaaggtgttcaccacaggcttcagccgaatgagcgagcggcagctggcgctctgggacccagaaaacctcgaggaacccatggccctgcaggaactggactcgagcaacggggccctgctgcccttctacgaccccgacaccagtgtggtctacgtctgcggcaagggtgactccagcatccggtactttgagatcacagaggagcctccctacatccacttcctgaacacgttcaccagcaaggagccgcagcggggtatggg

SEQ ID NO: 177907 - DNA, 603 bp, Homo Sapiens
aggagcgaggcctgggtggcgtttcggacgaggcacccacttgtgatggggtccttgtgcggtggggaccggggccggcgggctccaggccagcacacctaacccatggatgtggaacctacggccgagaaggaatgttgcatgagtcggatcccagtccattgtcagtggagggtgagggtgaccccatctgctatttttgtgctcatcctcatacaaccatttggggatgtgcctattagggctccgtaagaactcagatgcctgggaagcccagcccctcaggtgcccccacacacagccttcccttgacgccctacatttctaggcacatgtgaggcatctttccctggagccccgagccagccctgtccctccccagtgcagcatggcactcaggagatacaggctggacatggggcagtcgttctggggaggcctggcctagcagccacccacctgagccctcccggccaggcttcgtgctggggtgggccatgtgccaggacaggagggtcccggcggaaagccagccccggactcatcgtgacattgagatcccactggagggtaggggtggtaataaacttctccaaacgataa

SEQ ID NO: 177908 - DNA, 1107 bp, Homo Sapiens
  misc_feature (1036)..(1036): n is a, c, g, or t
tcgtcggacaggcgggcggtaagagcataggcgagtacaatatggcgagcagttgagttcacgctctcgaaaaaaacgcgcggcgcggttttagcggtgaagagggtggcgaggaactggtacgggcgcccggaatgggcaacggataagggggcgttcgggcggaacatgacaggcaacgcaaccgaggatgaaggaagagaggggacagaacggatttgattatcgtgtgtcggcacgtgagattcgatggcaaatcatagccaaatcgctggaggcaaccaacattaggacgactgactgacggttgtgggggaatcctttgcaaaaaagccccgggggacggatgtaggaagtggacgtgggcccttccaggacccccgggggaacccccccaggacccgttcggggttccatggggttgaaaaaagggagggcccaagcaggctccccaaaagtctcggaaggactcccactgggtgtggaagccagagggggccctttccaggccaagggcaggccctcggggcagcagcaggggcaaagggctctgtctcacgcacacgggcacaggcacgcaggtgccggccctgccgctggctcccaagaggccgatagcccggtaggggaggtcacacacacacagctgatccctggaggtaaagaaacctagacgaggagagtggaggctgggcctgcgcaaggaggcgccaaggggggagaccactgcccacaacagggtcagtcccgcgagagggtcagttccgcgcctgccgcctgcccgcccagctgcagggtgctcgccattgccactgctggggagcatggtttgggccgagaaaccagtgactccgggaggaaatgcagaagggccggggtgccagcgccagtgcccattatgggcagggctgggcctcacgtctgggccagcgagagctcctccaagcctctctttcccaggcggtacctggcgaggtccttcctggtcaccaacccgacaacctgattgcggttgtccaccaccaccaggtgccgncaggcccagggcccggaacagcttgaacacccgtgggagcgacgcctcctggggcaccgtgtagggggagg

SEQ ID NO: 177909 - DNA, 439 bp, Homo Sapiens
  misc_feature (299)..(299): n is a, c, g, or t
  misc_feature (321)..(321): n is a, c, g, or t
ggcaccctgcagctgggcgagcaggcggcaggcgcggaactgaccctctcgcgggactgaccctgttgtgggcagtggtctccccccttggcgcctccttgcgcaggcccagcctccactctcctcgtctaggtttctttacctccagggatcagctgtgtgtgtgtgacctccctaccgggctatcggcctcttgggagccagcggaggggccgcacctgcgtgctgttgcccgtgtgcgtgagacagagcccttgcccctgctgctgccccgagggttgccctgccctgggaaggcnccttcttgcctccacaccagtngagttcttcgagaattgggagcttgcttggccttatttttagccatgagcagacggcctgtggtccctggggcctgaggaagggatttgttagcaacagggttttggaagttggaacg

SEQ ID NO: 177910 - DNA, 893 bp, Homo Sapiens
ggaggtttccatccaggattgatccttgatcccggcagttcctgtgaggacaaatgtggtctttaaactgcagtctccattacactgtccagcctcggtaactttccacctggtgttgacagctctgccccatctcccgcagagtaaaggggggagtctgtgcataataaaatccttcttcatgtctgaggaaagcagttctttggtgccctccagccggtctgcaagtgtcctcaggaagccacttaatcgtcttgtagcaacagttgtggattccacctgcaggagcagctgccggggtatgccggtccgtaactccacgtcttcctttgcagtatcaaatacaagccccgagatggtatccaaaaggaaatctccccatgaattgttctggtaggtgctgatggtcacgtgagtcgagtgggccagccccgcaggagtgtccgcttgatgaatggttcctctgggaaagtacaacaaatcacccggcttcagcataaactcatgcaccggcctgccgatcctttcctcggcctccacgctgtactctcgtgccaggggcacagtggggtggtagaggcgccagtgtttctctccctccagctgcaggatgaaaacctcgacatcatcataatggggcggcaggccctgagatcctgcgggagttatgtacacattcgagccaaccaaggagccaaagtaacattccagcttctcctggatcctccaaagctcatccttaaatctctgaggttggtgaaactgaatcgttgcccttttctgatcaaaatcttttctcagctgaagaaagtgtgctttgccatctttatttaaaaccttcttcttcccattgacacaccggcagacgacgcgtgggtcgacccacgcgtccg

SEQ ID NO: 177911 - DNA, 894 bp, Homo Sapiens
gacacccgcatctacctccccgcctattggtctctgctggccaccttggcctgcctggtggtgctgtaccagaatgccaagcggtcatcttccgagtccaagaagcaccaggcccccaccatcgcccgaaagtatttccacctcattgtggtagccacctacatcccaggtatcatctttgaccggccactgctctatgtagccgccactgtatgcctggcggtcttcatcttcctggagtatgtgcgctacttccgcatcaagcctttgggtcacactctacggagcttcctgtccctttttctggatgaacgagacagtggaccactcattctgacacacatctacctgctcctgggcatgtctcttcccatctggctgatccccagaccctgcacacagaagggtagcctgggaggagccagggccctcgtcccctatgccggtgtcctggctgtgggtgtgggtgatactgtggcctccatcttcggtagcaccatgggggagatccgctggcctggaaccaaaaagacttttgaggggaccatgacatctatatttgcgcagatcatttctgtagctctgatcttaatctttgacagtggagtggacctaaactacagttatgcttggattttggggtccatcagcactgtgtcccctcctggaagcatacactacacagatagacaatctcccttctgcctctctaccccctgatattgctgatggcctagctgttacagtgcagcagcagtgacggaagaaacagacatggggagggtgaacagtccccacagcagacagctacttgggcatgaagaagccaaggtgtgaaaagcagatttgatttttcagttgattcagatttaaaataaaaagcaaagctctcct

SEQ ID NO: 177912 - DNA, 1011 bp, Homo Sapiens
  misc_feature (349)..(365): n is a, c, g, or t
cgtgggcaaaatacaatgtgactgtcgatcaccaataactcggagtgtcgtgttcacaatctcggcgcccgaggccatcaatgacaaaaataattctagagcccgggtcctccgcgggggtggttgtgcactctgtgacctactctgttctacgccgtttctgcggtgatagcttcatcactcactgagtcatcgccctcgcgtgtaccttctcattgttgtagtggctgccaaatgcggggagggagagtaaatggtgtgactggtgcgggggagggttcgggctcagggtaaacctgctacattgctgggtcccaaaagaatcactttaaccccccggaattttatnnnnnnnnnnnnnnnnnttccatcgttgcaggggtttatagaacctgaaaagaaggcagtggagagggcgtgaatttgtcggcgaggcggaggcccggacgcccagcaatggtagaagcataccgcagcgaaggcgaaagccctcctgcacgctgggcctgcaggcagcaacgggtcgcgcgggtccccgcgccgagtagggcccgagcctcgccactacgaccagcagcgtggccagcgccctcctccagcaccaccgctgcctcggcgtcgcccgctccttgcagcgccaggtccaggcgcacagctcgcaagcggtctgccacgaagctggccacctcggcgcgggcgatgtcggcgctctccgccacctcaccggccaggtagcgcacggtggccagcagcacggagggcggacgcaactggctgggcgggggccggggcttgccggcggcgggtcggctgtactccttcaccgcgcgctgcggatccgcgcggggcgggtcctggcggcaacccggcaccacctccaagcggtgcaggcggtgctccctttcgcgctgggcgcgctcggcggccgggcacatgtccgggcaggtgcccacgggcagctcgcagccgggcatgagggggctgcggggagacggtgggcgctcagcatcc

SEQ ID NO: 177913 - DNA, 962 bp, Homo Sapiens
ggtttaaaggggtttgggccccctccctctctccctgtttttctggccgggggcttcccctggggggttggggggccccgccctgaaaggctggccccgtttgctgacagttcccgggttcgggcctttgcccttctttcaaccagggaccaagccctggacagcggggggcccggctgccccaggctgccaaccgctttgctccccagacctccacctttccttcttgggctttggggcctcatccaggatggcggtggggttgggccgaagggctggctgcaggggcgagggagcagcctcatcctctgagtcggagtcctccagcagtcttcgctttctggcttcctccaacagggccgcggtctcctgctcgtcctcctcctgctgctgcctccgccgctcctcctccgacaggcggtgctgcctcagcatagcctcgaagtccacgtgcgcctgccgctggttcaggtctttcagctcctggaggttctccagcacctccatctccagcttggagtccttggtccggttctccagcaccttcatggggttgttcagctcctcgtcctcccgctccttctgcaccctcttctcctcctcctccaggagcttctcagcctggaaattccgcgtggctccatgctccatggtgtagtctgtgttttcagggtctgtcttgaaggtgatctctgccaggcagcgcgtgcacttgatgtaaaagcggaagatgggcaggcccaggtagacctcgttctgcaccgtctccttccgagcattgaatttcttccccttgtagatgtattctccgcacgtcttacacctcatgttgaagggggccatcagccgcaccacgtactgccggtctttggggagcttgagtttggggatctttgatgggtcaaagtccggcgggtagtatttgtttaatacttttcgctccgacatctttgccttctgat

SEQ ID NO: 177914 - DNA, 976 bp, Homo Sapiens
  misc_feature (19)..(19): n is a, c, g, or t
  misc_feature (114)..(114): n is a, c, g, or t
ggtctaagtacgagcctgngtggcgaattccgcacgagggatcagaaggcaaagaatgtcggagcgaaaagtattaaacaaatactaccccgcccggaactttgaccccatcanaagatcccccaaacttcaagctcccccaaagaccggcagtacgtggtgcggctgatggcccccttcaacatgaggtgtaagacgtgcggagaaatacattctacaaggggaaaaaattcaatggctcggaaggagacggtgcaaaacgaggtctacctgggcctgcccattcttccgcttttacatcaagtgcacgcgctgcctggcagagaatcaccttcaagacagaccctgaaaacacagactacaccatggagcatggagccacgcggaatttccaggctgagaagctcctggaggaggaggagaagagggtgcagaaggagcgggaggacgaggagctgaacaaccccatgaaggtgctggagaaccggaccaaggactccaagctggagatggaggtgctggagaacctccaggagctgaaagacctgaaccagcggcaggcgcacgtggacttcgaggctatgctgaggcagcaccgcctgtcggaggaggagcggcggaggcagcagcaggaggaggacgagcaggagaccgcggccctgttggaggaagccagaaagcgaagactgctggaggactccgactcagaggatgaggctgctccctcgcccctgcagccagcccttcggcccaaccccaccgccatcctggatgaggccccaaagcccaagaggaaaggtggaggtctgggagcagaagcgttggcagcctgggcagccggcccccgctgtcgaaggctggtcgtggggtgaaaaagcaaaaggcccgacccgggactgcaaccaacggggcaagcctcaggcgggcccccaaccccaaggaaaccccggccagaaaacgggaaagggaggcccac

SEQ ID NO: 177915 - DNA, 981 bp, Homo Sapiens
aggacgcgaggcctgggtggcgttctcggacgaggaaggaaggctactcggagcaggacctggaagccatcctggacgtcgtgcacctgcaccacatcctgcagcgggagggaggttgggaggctatgtgtgactggaaggacgtcctgtcgggtggcgagaagcagagaatcggcatggcccgcatgttctaccacaggcccaagtacgccctcctggatgaatgcaccagcgccgtgagcatcgacgtggaaggcaagatcttccaggcggccaaggacgcgggcattgccctgctctccatcacccaccggccctccctgtggaaataccacacacacttgctacagttcgatggggagggcggctggaagttcgagaagctggactcagctgcccgcctgagcctgacggaggagaagcagcggctggagcagcagctggcgggcattcccaagatgcagcggcgcctccaggagctctgccagatcctgggcgaggccgtggccccagcgcatgtgccggcacctagcccgcaaggccctggtggcctccagggtgcctccacctgacacaaccctccccggcccctgccccgcccccaagctcggatcacatgaaggagacagcagcacccacccatgcacgcaccccgcccctgcatgcctggcccctcctcctagaaaacccttcccgccctcgggaaaataaatggggagggtgggcgccctgcgtaacccttcgccctgtccctcccactccctgggggccgctgttccccaggtaactggggcccctgtccagggcaggggaagccctctactttgcctccggggaagggaacctggggctacaagggggccctaggggcttgggcacaaaacaagccgcaagccgagacccccagaagccccgtcaggggccaccagacccctgggccactggccagtggaccctcccctttcaaaaaacatccagtcc

SEQ ID NO: 177916 - DNA, 938 bp, Homo Sapiens
  misc_feature (826)..(826): n is a, c, g, or t
  misc_feature (845)..(845): n is a, c, g, or t
cctacccccggaggcctggctccagccccaaggtggccctgcactgcgtagacacccgggaatctgctgccaggggccccaccatcttgtgacaaatggtgtggcccagggccacataacagactgctgtcctgggctgcctcaggtcccgagtaacttatgttcaatgtgccaacaccagtggggagcccgcaggcctatgtggcagcgtcaccacaggagttgtgggcctaggagaggctttggacctgggagccacacctaggagcaaagtctcacccctttgtctacgttgcttccccaaaccatgagcagagggacttcgatgccaaaccagactcgggtcccctcctgcttcccttccccacttatcccccaagtgccttccctcatgcctgggccggcctgacccgcaatgggcagagggtgggtgggaccccctgctgcagggcagagttcaggtccactgggctgagtgtccccttgggcccatggcccagtcactcaggggcgagtttcttttctaacatagccctttctttgccatgaggccatgaggcccgcttcatccttttctatttccctagaaccttaatggtagaaggaattgcaaagaatcaagtccacccttctcatgtgacagatggggaaactgaggccttgagaaggaaaaaggctaatctaagttcctgcgggcagtggcatgactggagcacagcctcctgcctcccagcccggaaccaatgcactttcttgtctcctctaataagccccacccctcccccgctgggctcccctttgctgcccttgcctgtttcccctttancaccgggagtaccagccancaggaaagggcaaagaaccctaccaagtggggaatcctggggccccctggacccaacttggtgcgggcatgtggccctaaatccacctcctgc

SEQ ID NO: 177917 - DNA, 1270 bp, Homo Sapiens
  misc_feature (1234)..(1234): n is a, c, g, or t
  misc_feature (1239)..(1239): n is a, c, g, or t
ggacttcgatgccaaaccagactcgggtcccctcctgcttcccttccccacttatcccccaagtgccttccctcatgcctgggccggcctgacccgcaatgggcagagggtgggtgggaccccctgctgcagggcagagttcaggtccactgggctgagtgtccccttgggcccatggcccagtcactcaggggcgagtttcttttctaacatagccctttctttgccatgaggccatgaggcccgcttcatccttttctatttccctagaaccttaatggtagaaggaattgcaaagaatcaagtccacccttctcatgtgacagatggggaaactgaggccttgagaaggaaaaaggctaatctaagttcctgcgggcagtggcatgactggagcacagcctcctgcctcccagcccggacccaatgcactttcttgtctcctctaataagccccaccctccccgcctgggctccccttgctgcccttgcctgttccccattagcacaggagtagcagcagcaggacaggcaagagcctcacaagtgggactctgggcctctgaccagctgtgcggcatgggctaagtcactctgcccttcggagcctctggaagcttagggcacattggttccagcctagccagtttctcaccctgggttggggtcccccagcatccagactggaaacctacccattttcccctgagcatcctctagatgctgccccaaggagttgctgcagttctggagcctcatctggctgggatctccaaggggccttcctggattcagtccccactggccctgagcacgacagcccttcttaccctcccaggaatgccgtgaaaggagacaaggtctgcccgacccatgtctatgctctacccccagggtagcatctcagcttccgaaccctgggctgtttccttagtcttcattttataaaagttgttgcctttttaacggagtgttcactttcaaccggcctcccctacccctgctggccggggatggagacatgtcatttggtaaaagcagaaaaaggttgcatttgttcacttttgtaaaattgtccgggggcctgtgttggggtgttgggggaagctggggcatcagtgggccacatggggcattcaggggctgggccccacagaggaccccacaggggcagttgagctctgtttttccccccacctggcctaggcccattcatctattttaaaccggttcnttgantttaattaaaacattataaaaaagttttttt

SEQ ID NO: 177918 - DNA, 450 bp, Homo Sapiens
cctgagcacgaaaacccttcttaccctccccggaaagccgtgaaaggagacaaggtctgcccgacccatgtctatgctctacccccagggcagcatctcagcttccgaaccctgggctgtttccttagtcttcattttataaaagttgttgcctttttaacggagtgtcactttcaaccggcctcccctacccctgctggccggggatggagacatgtcatttgtaaaagcagaaaaaggttgcatttgttcacttttgtaatattgtcctgggcctgtgttggggtgttgggggaagctgggcatcagtggccacatgggcatcaggggctggccccacagagaccccacagggcagtgagctctgtcttcccccacctgcctagcccatcatctatctaaccggtccttgatttaataaacactataaaaaagttctttgctttactc

SEQ ID NO: 177919 - DNA, 1541 bp, Homo Sapiens
  misc_feature (20)..(20): n is a, c, g, or t
  misc_feature (1221)..(1229): n is a, c, g, or t
  misc_feature (1261)..(1261): n is a, c, g, or t
  misc_feature (1266)..(1267): n is a, c, g, or t
  misc_feature (1270)..(1270): n is a, c, g, or t
  misc_feature (1273)..(1273): n is a, c, g, or t
  misc_feature (1277)..(1277): n is a, c, g, or t
  misc_feature (1286)..(1286): n is a, c, g, or t
  misc_feature (1483)..(1483): n is a, c, g, or t
  misc_feature (1507)..(1507): n is a, c, g, or t
ggtctaggtagcgaggcctngggtggccaacctacgggctcccaggcagcctccgccagccggaccccgtcgccctcctgatgctgctcgtggacgctgatcagccggagcccatgcgcagcggggcgcgcgagctcgcgctcttcctgacccccgatcctggggccgaggtacctttgacaggagcgtgaccctgctggaggtgtgcgggagctggcctgagggcttcgggctgcggcacatgtcctccatggagcacacggaggagggcctccgggagcgacttgccgacgccatggccgagtcacctagccgggacgtcgtgggatccggaacagaacttcagcgagagggaagcatcgagactctgagtaacagctcaggctccaccagcggcagcataccaagaaactttgatggctaccgatctccgctgcccaccaatgagagccagcccctcagcctcttcccgactggcttcccgtaggtaccagcaacctgcttctgactggccagccccctcccctgctggaggaggggagaagccccgctctggtcctacccttcagtctctgctcttccttcatcaaccaccttccccaagcttagtgacagcagccgcccatcctacctggatggagaagagacccttctccaagcacctcagcgcacttgccctctgccacacctgtcggtggaggctgtggccaggagagactgtagaagctcggtccctgtgtatgtttgcatatgacatcctgcattggatccgcttttgtattttttaaccatacccacggtgggggcgggtggggggagcctggaacagtgaccagatctggggggcctgagtggggacagagttgatcgtccacctggccattttgaccctgagtggacagtcacagcctcagctcatgtctggctgtgacacacactgccccccagcttcccttggtcagccccactccagcacggggtgaacggaggcccagagtactagggaaggaggaagggaggacatgcctcttcttcctcctttctttccccatctgttcctgcgaagagtttgtctttcttatctttaagcccctctaccctggcccctgtactgatcactgaaagaaaccctcggctactgagccgtaagctgcatttaaaaacgccgggagagagcgcctctagaccgcagcaaacaatattgcccccggctccagactnnnnnnnnnggcgaattgccctccccgcccgttctaaacantatannaanaanaaantataaatanataattttaaaatttaaaattataaaaatataatagattgggggtagagcgactttccccccctgaccccgcagacccaacccctcattccctcgctagcgcggccgtttagacggccccctacaattgagcgcccttcggtgcagccctcgaacaccaccattagccgccacgcctccccgacccacacctcccantacccatctcacgtcactcagtcnctctcccaacctaccaattacctaccagccaccc

SEQ ID NO: 177920 - DNA, 1252 bp, Homo Sapiens
  misc_feature (55)..(55): n is a, c, g, or t
  misc_feature (159)..(159): n is a, c, g, or t
  misc_feature (437)..(437): n is a, c, g, or t
  misc_feature (646)..(683): n is a, c, g, or t
  misc_feature (909)..(921): n is a, c, g, or t
ccggccgcgtacgtcccggcacggcgttgagagagaggggtgggatcgtacactntacggtaaggcagagcggcggacgccgcggcgggagcgggggttacagaagccgagcgccggcgtactgcggtggtagctgtgtggaggctcgcgtgggcatgncgcggtgtgatggtgtcgcgagcgcggacagcgccggcggcgcgtcacacgcaatgttccgggctctcgtgcatagaagggtgttagggcgccgtatgagagcaaaacagcgccctcagtcgagtggcgcctcctgcgtgtctatacggcaggaagtgcgcgtgtggcgccgggcatgacagcgctattcacaacagggcgccaacacactccacgcgcaacggcggcacgctatacaagagaggagcggtctaatgagcgtcgtagtcaatctatcncccggcagggatgacgtgatgacgcggaggtgcggcatagaagtacaccggagtgctgtgtcgtgagagctcgcgcggaaacgggaggatgagcggcgcaacgagaggggggtgacagcggggaaataaataagagggggcgtggaatcgggggaatagaaaggcgggtgtgggagtcgcgcggtcgaaccaaggggcgggggaataannnnnnnnnnnnnnnnnnnnnnnnnnnnnnnnnnnnnncaaagcgcgggtagaatgagggccgcgggagggggggccggcgggagacggaagggccctggcgacggggtcaggggtatgggcttaagggctagggtgggggaaatgggcggagggggaacggcgcaggggaatggggtttacggcggagcgccgcggcgagggtgtgtaggggcggttcgagtcggatggtgagggtggcccggggcagcttccgaggggcttnnnnnnnnnnnnngcctgttggggtatcggaagagagacgccatgcttctcagggttgaagtctggaggatagtacttggtgacccctttcctttcacccatcttgggagctgcctactggtcctcagcctcggggcggacgatcagaaactggccttgtgaacacactgcactgtcctgacctcttgtggagcctggcagagggtccacaggcttccctgcgaagatgtcgtgggccgtgtggtggtgccagctcagacaagactcccgccaggcataggaggcatccaaaaagcggcgtgtctgccctcctcccgacgtcacgccctgaccgtgcccggaag

SEQ ID NO: 177921 - DNA, 694 bp, Homo Sapiens
  misc_feature (1)..(1): n is a, c, g, or t
ntccaaggttctttgctgcacccaagtcactgatgcttggggatgtctaccgtgtatgtgtgcttgtgggagggtttccggatgtatgcatatttgcggctgggattgggggtgttcgtatgggtgtgtgcgcgcccatatatttagcttttcctcataaatctttattattaaaatgagccccccaccgaagaagatgagaactctggggctatgtacgaaatgcccggctccgagggtggattaacggcacgagagggccacttgggaacgggacctttcttggggatcaaacccaaaaggggggccccacgcggggccttgggggggaaaaaatttcatccagcgggttttggagccgaaaagggattcccgccctttgggtgggtcctgaaaaattccatgcaaagcttttcgcaaagaatactttttcaaaggggaaagattaacgcttgtaccccccgagggcgcccggtccaatttcttttcgccgcgccgccgggtcgaaacaaaattgggacatttcggagggccggataaaatttccctctcggcatcggggcacagccgccctgtatatgcgcagtcggccacaccggtaccccaccgggctagacaccggctcgaccacaccgctcgtctatgaaacaaggtcataaaaaataatctcccgccaccagtcctgggcctatgt

SEQ ID NO: 177922 - DNA, 1120 bp, Homo Sapiens
aggcacgtacgaagaagacagaggaagcataaaaattctggagctaatataattttatatgtgtctctgagatgggggagtagactgagtgccttttttacaaagaagatcccatatttaattcaagtatttatagcatcagcaaaaatgggcagagggcgggaagttgagaacactaggttctgtgctatgttacctgtattcagtagaagtgtttctggagtcaggttttaagtcatgatcctgaagcttccttcccctcttccactaatgatgcaataatagctgttttcattttaacgagcagagaactaagaggaaaggtcctagctctgccttccacttgcagcttccctttacctcctcttatcgctttcatctcaaatatccctgctactcaaccaatcctaaagctaaagtactgagatgcacacaaaggaaaggtgtgagagtgcttggaagcatccagctgagcccactggatgaaaatcagacgatagggcctcctgttgtaatatactagccagagaaaagcgccaagaacttcagggatattattcactgctttattgctccctaaccctagatcagatcggcatttcaccttggtagttcaggaccttaacgaagtccaaatcgctgaccgaggtgggcgaagcgatgacggaaatcaaacggtccacatccggccaatggccagaacctgagcatttgctcaggctcactctccttcccccatcttgtctgtaatagcaatgactgaataatcagtagaccaatggaagaggagttgcaagtttaaatttgtaacctgactctgggttctgttctaggaatagtgcatgttttagaggctttgccagttgggatacattgttgacttgggggaggatgaaggagagaactgatgacctagacatagaaaagagtagttaactaactagatgttcttctgatctcttccatggtagacattctgagcacattggcccagttagttggtatggtgaaggggcaccgtactaacagatttggagactgaaacctaatcccatcaccaacacttagcaggtatatgatcatgggcaattcattcaattgcctgccaattatagactat

SEQ ID NO: 177923 - DNA, 913 bp, Homo Sapiens
  misc_feature (804)..(804): n is a, c, g, or t
  misc_feature (888)..(888): n is a, c, g, or t
tcagctccctgctccgacagaatcaccttctttgacgccaataagacagggcagctggtgagccgcttgacaactgacgtgcaggagtttaagtcatccttcaagcttgtcatctcccaggggctgcgaagctgcacccaggtggcaggctgcctggtgtccctgtccatgctgtcgacacgcctcacgctgctgctgatggtggccacaccagccctgatgggagtgggcaccctgatgggctcaggcctccgaaaattgtctcgccagtgtcaggagcagatcgccagggcaatgggcgtagcagacgaggccctgggcaatgtgcggactgtgcgagccttcgccatggagcaacgggaagaggagcgctatggggcagagctggaagcctgccgctgccgggcagaggagctgggccgcggcatcgccttgttccaagggctttccaacatcgccttcaactgcatggtcttgggtaccctatttattgggggctcccttgtggccggacagcagctgacagggggagacctcatgtccttcctggtggcctcccagacagtgcaaaggtccatggccaacctctctgtcctgtttgggcaggtggtccgggggctgagtgcaggtgcccgggtctttgagtacatggccctgaacccctgcatcccactgtctgggggctgctgcgtccccaaagagcagctgcgtggctccgttacatttcagaacgtctgcttcagctacccctgccgccccgggcttcgaagtgctgaaagacttcaccctgacgctgccccctgngcaagatcgtggccctcgtgggcccagtctgggcggaggaaaagaaccaccgtggcttccctgctggagcgcttctacgacccnacggaaggccttggggaatccctgc

SEQ ID NO: 177924 - DNA, 913 bp, Homo Sapiens; identical to SEQ ID NO: 51330
  misc_feature (830)..(830): n is a, c, g, or t
  misc_feature (840)..(840): n is a, c, g, or t
  misc_feature (848)..(848): n is a, c, g, or t
  misc_feature (851)..(851): n is a, c, g, or t

SEQ ID NO: 177925 - DNA, 464 bp, Homo Sapiens
cgccttctgcgtttggacataggactctgcagggccgccctctctaactggcctggctctggaagggctggtgaggactctgcctccttgcctgcctacaaggtgcctggtttgcagcaggctctccgctctttccagcaaagctgctcagagagggtgtccagcacagtggagaggccggaagtgagacgggcagacggcacctgcagcctgaaacgcaccgctcctgcgtgcgcccccacctggtccccggatgcccccaccacctggacagaggccacactgactgcccacccagctgtggcgggaggtgcagagcagagggctttagggagcagtgactgcggtcacccctttagttctctgggtgtagaccacaccacctcccactgggcaccccccaacacggtgtcctgccacccagcgcctggctccaggaaaacacgcttgccttccttcccggc

SEQ ID NO: 177926 - DNA, 713 bp, Homo Sapiens
gtggccctggcctggtgtgtatagaccatcgatgccagcgtgtggatctcctgggggcacaggaatgtcgaagcaaatgccatggacatggggtctgtgacagcaacaggcactgctactgtgaggagggctgggcaccccctgactgcaccactcagctcaaagcaaccagctccctgaccacagggctgctcctcagcctcctggtcttattggtcctggtgatgcttggtgccagctactggtaccgtgcccgcctgcaccagcgactctgccagctcaagggacccacctgccagtacagtctcaggggccagccaagcccccacccccaaggaagccactgcctgccgacccccagggccggtgcccatcgggtgacctgcccggcccaggggctggaatcccgcccctagtggtaccctccagaccagcgccaccgcctccgacagtgtcctcgctctacctctgacctctccggaggttccgctgcctccaagccggacttagggcttcaagaggcgggcgtgccctctggagtcccctaccatgactgaaggcgccagagactggcggtgtcttaagactccgggcaccgccacgcgctgtcaagcaacactctgcgggacctgcccggcgtaatttgcaccgggggcttggggaggggctgggggttggacgggattgaggaaggtccgcacagcctgtctctg

SEQ ID NO: 177927 - DNA, 750 bp, Homo Sapiens; identical to SEQ ID NO: 6953
  misc_feature (568)..(568): n is a, c, g, or t
  misc_feature (595)..(595): n is a, c, g, or t
  misc_feature (597)..(666): n is a, c, g, or t

SEQ ID NO: 177928 - DNA, 881 bp, Homo Sapiens
  misc_feature (815)..(815): n is a, c, g, or t
  misc_feature (832)..(834): n is a, c, g, or t
cccacaaagtggacatggacaagctcctggggggccagatcgggctggaggacttcatcttcgcccacgtgaaggggcagcgcaaggaggtggaggtgttcaagtcggaggatgcactcgggctcaccatcacggacaacggggctggctacgccttcatcaagcgcatcaaggagggcagcgtgatcgaccacatccacctcatcagcgtgggcgacatgatcgaggccattaacgggcagagcctgctgggctgccggcactacgaggtggcccggctgctcaaggagctgccccgaggccgtaccttcactgctgaagctcacggagcctcgcaaggccttcgacatgatcagccagcgttcagcgggtggccgccctggctctggcccacaactgggcactggccgagggaccctgcggctccgatcccggggccccgccacggtggaggatctgccctctgcctttgaagagaaggccattgagaaggtggatgacctgctggagagttacatgggtatcagggacacggagctggcagccaccatggtggagctgggaaaggacaaaaggaacccggatgagctggccgaggccctggacgaacggctgggtgactttgccttccctgacgagttcgtctttgacgtctggggcgccattggggacgccaaggtcggccgctactaggactgcccccggaccctgcgatgatgacccgggcgcaacctggtgggggcccccagcagggacactgacgtcaggacccgagcctccagcctgagcctagctcaacagcccaaggagatgtntaaagggggaagggggnnncccaactccccttccctgcgccccaaccgggccgctaatcccgccct

SEQ ID NO: 177929 - DNA, 994 bp, Homo Sapiens
gggaagccggtgactccatggttgcacacctgggacgcagtcacctgcctagccgtggaccccaacggcgcattcctgatgtcaggaagccatgactgctccctgcgtctctggagcctggacaacaaaacgtgcgtgcaggagatcacggcccaccgcaagaagcacgaggaggccatccacgctgttgcctgccaccccagcaaggccctcattgccagtgctggcgctgatgccctggccaaggtcttcgtatgatgcccacctggccctgccctggccgccacgctggctggggtgtagggccgggcaggtggggctgaggggactcccagcctcgctggaggtgcagaggcctggcctctgtctgtttgccatggagcctggtggtgctaacggccctttccccaggaatccctccccaacggctgccttccccaagcatccagcctggggatgggcccctttcaggaatcacccccgaggatggcctcggggtttccccctgtgccctgacagccgctcctggtatcagagctgctttccagagggcagcacagccagggccgggtgtctttagggatcagtttttccaagactccagaaggtgccaggttctccccttgagctcctgctcccccatcccccatcctcccaaacctgggcaggagctgtgctgggagaaagggtggcagccgggaaccctcagagctgagccccggcctggctgcccctcccccccggccctctccactgctttccagacactaaccaaggcttccaggccaggaattgccccaacactcctagggcagccctcccagagccccatgggggccccccatgggtaaaaaaggctttccttgtgcccctccccggggcatggaagggggcaatggggcctcaggtccccccgaaactccctggatatcctggatacataacggggattcccatgggggcccgccccacccgcaattatcaatgcggggac

SEQ ID NO: 177930 - DNA, 993 bp, Homo Sapiens
gttccctggcttagaacgccagggtggacaggcggccttgggggccaccttgtgccgggggtgcagggacctgggccccggaggcggaggggcgcccaccccacacttttttcgccattctccttatcggcttccacgtagcctagcaccttcacgctagtccccggctagacagcaagggcacaagcgcccttgggcccacctatgcagacacgaaagacctgaccacggagcccagggaggtgcaagagaacggctgttccacatcgatcacgtacttggggccctcccgcttcaccttgtaatgccggaccacgtgcgtcccgttgtgcatctgccgcgtggtgaccgacacgccgtcggcgccgtccccgctgggccgcagcagcaggttcccgcactcggggtagcgctccaggagcagttgtgcctccagccggctcaccttcaggaagcacgagggtgtctccagtgcacggcgcgcctcctctttggccaagacttcagacatcatgtataggtgcccaggaagcagggtcaagtcggtcgggacacggagctccaccaccgttaagatgaagcctttccacatttcccgacactccaaggtctctaccttgaacttgatctcctgattccggagaatcaggctgaagtgggtgccagggtcacgtgagcttccccagggaatctcatctgtgagtttctcaaatgctcccaagttgagcttctccacgtgctggaagtcccgattgctattgtagaaataaatggtgagaccctgcaggcctgcccagaacttcttgtaatcccggtcacagggccccttcttctctagaaagctctcatagtagtgtgaaggcaggacacccttaggcttggggacacggggtggcctcagggcagaggccatgacggagccagggtcttccgcctggcctctccttccagtgggtgccccagctgggccgggaagctgagaaacaggtttca

SEQ ID NO: 177931 - DNA, 1287 bp, Homo Sapiens
gcccggttaccccaggtccgtgcacatgaaaggtgtgtactctggcatgcgccgactgtaaccgccttggccagggaggaaggcgcttttccgtttaacaatccccacgtcccggatggcgaacgggtcgccaccagcctgccgcttccagacacgccaggccaaggtgtcctggactgtccccccgtgggcccccccgtagaggatctccccgcgttcgaaagtttctgtggcaggcccttggccgagcctggccggggggagcagccccagcaggaaggtcaggaccctggcagcccaggcggcctcttccagttgcgtggggtgggcccccgggctgcccgtggaggccctgttgcgcgaggggccggggaagcctgactcgtacagacacagccccctgggctgccttgcccgttgggcacctgagcctctgtcctggagctggcattgcctccaggcgcccccggcagcagggagacagtgggcacagatggggcattactctccctaccagggattcccgccatggactgcttggccttcaagctccctggggaagcagagggaaacctcagggctgagcgagtgggctggggaccaagggcagcccgcagcctccgcctcttggcaccactagaagagggctgcctgggcccttgagatgtcacctctgtgccagggggccgccagctccgcagagcaaaaggccagatgccaggccctgcacacaccctcttcggcacagcctccctctaccgggagttggctcggagggagcaggccctgaaaggctgttcacagtagatgccatgccttcttcttcctctgcttcctcctccgcctcctcatcagccagtgggcagcccaggctggctctacccgagaccatctccagcgccagcccccatgcagtcagcaccaggggccgatcctgcgtgaggctgaagtcaggggtgagggaagggttagccatacaagcataggccaggagggcaagctggagcttcagccagggatgggcacaggggtggtagaggaaggtgacatcctcagcctgtccctgggctcactcgtgtgtaggtcactcttggtgacacctgcggaggcagaggccacaggctctcgggacaatgggctcccgcctcctccgccggtccagccatcacctcgctgggacccaggagcctcgcgagggctgccaggagaagcagttggggcgaaggcggaggaggcgccattccaagcggccccgggcccggcccgccgcccagccgctccgccagc

SEQ ID NO: 177932 - DNA, 1145 bp, Homo Sapiens
aggcgggtgtgggccacgacactcctggtctcacacagtgtgaggtgtgcggctccatgcgctagcaacgagaggcgcgcggcggatacctgttaaacgggcgctgccgcgtgcgttgcttctatcttggacgcgcgtgcgtaggcggggctttttgtacactatcttcctcacaatgctcgtccatctaacacttgggcgcgggtatagatatagtgttcggtgccgcgggtcgcgggaggactgcatgtcggtttataggtcggtgcacagtcttgtagcgccgcgcgcgtcgggagcccacacgccctccccgtcgatgggtcccagaccctcggcacccaacgcggtcccggagctcgggctcgcgcccgccccgccatgcgtccgcacatctccgaggctacaaacaccagcccacgtgccaggaaggctcgcagcccagcagtcactggcgagagccagctccactccctaaatgaataaacgtgcttgcctcatggacaaagctggcggggcagcctcggagggacgcacgctcctggagacacggacacgcccacgcccgtcacgctccgccggcgcacagggcgcggcgcggaccctggccccaacgcagggagctcgtcgtttgtgctgtgaggcggcccagtggtctcaggtcccttggccagtcctccggggccgccctcgggtctagagaggggtggcacccacgcctgctgagccaggcagctggaggggcagaaattctgtgatccccacctgtaaaagatgggagacaccccccaagctgtgtggctccagatgtgctggttctgccccgtgagctgcagggaggccggcaggctgactgtccgtggggcccagggcagggctcagcaccagcgatcagcgccatgggcttgtcccgaggagtccagccagcacacagagcccactctgcagggctcggcaggacggggggcccagccaggccagaaaggtcaggcacagatgccagtcagcagcgccgagagtctccgctcaatgcacagcttgcacttggtgacgttctcgatgtcggcctggtccgagagcatgtgctgcagcccctccaggagcagcagggccttgtggtagcggggacgcagccctcacggtgc

SEQ ID NO: 177933 - DNA, 829 bp, Homo Sapiens
  misc_feature (51)..(68): n is a, c, g, or t
agcgaggcctgggtggcgaattcggcacgagggagagaactagtctcgagnnnnnnnnnnnnnnnnnnaagtaagaacaaaagctttactcgtgctcggcaacagcaaaagcaggagggcagaggggagatgacggcccctgtcccatttccctccatggaaggcaccaggcggggaggtgggtctgctgggaggggcaggtcagcggaacaaaaggctcctgttgtttatgggcccaggcacagtggggcaggagcacgacccagaaagtagtcctgagccacaagtcagagcggagaaaacatctctgtggtcccagtcaagaggcctccgaatgaggcgcctggactgggagcaaagctctggtcgagaacatgaccttcccgggcctgagtcccactgtggtgcccggccgtgcacccagcctgcggcagagagggcggcgtcccccacaaagcctgccaggctgagcccttgcaatggccgtggctgggccaggaccttggcctggagcctgctccttgacacccagccagcctagcacccgccttcagcaacaggtaatggagcccggatggcagctccctcccaggtgcgcaagtgctggggtggaagcctgttcccgtgggatcaaccttggggctgggccgggggggaggggcactgcggccctggccatcagcctggctgtcttcgttctcccaaaacacccatcaccgcagcccaccaggggctgggagagggggggctgcaggctagccagagggtctgccaggtgcctgcatctcactggtgcggccgtggcacctgagggagcccactgagcccc

SEQ ID NO: 177934 - DNA, 1284 bp, Homo Sapiens
ggacactcccgatggtatcttcctagtccgagatgcttctagcaagatccagggcgagtacacgctgaccctcaggaaaggcgggaacaataagctgatcaaggtcttccaccgagatgggcactatggcttctcagagccactcaccttctgctccgttgtggacctcatcaatcactaccgccacgagtctctggcccagtacaatgccaagctggacacacggctcctctaccctgtgtccaaataccagcaggaccagattgtcaaggaggacagcgtggaggcagtgggcgcccagcttaaggtctatcaccagcagtaccaggacaagagccgcgagtatgaccagctttatgaagagtacacacggacctcccaggagctgcagatgaagcgtactgcaattgaggccttcaatgagactatcaagatctttgaagagcagggccagactcaagagaaatgcagcaaggaatacctggagcgcttccggcgtgagggcaacgagaaagagatgcaaaggatcctgctgaactccgagcggctcaagtcccgcattgccgagatccatgagagccgcacgaagctggagcagcagctgcgggcccaggcctcggacaacagagagatcgacaagcgcatgaacagcctcaagcccggacctcatgccagctgcgccaagatccgagaccagtaacctcgtggggctcacccagaaaggcgcccggcagaagaaaatcaacgagtggctggggattaaaaatgagactgaggaccagtacgcactcatggaggacgaggacgatctcccgcaccacgaggaacgcacttggtacgtgggcaagatcaaccgcacgcaggcagaggagatgctgagcggcaagcgggatggcaccttcctcatccgcgagagcagccagcggggctgctacgcctgctccgtggtagtggacggcgacaccaaagcactgcgtcatctaccgcacggccaccggcttcggcttcgcggagccctacaacctgtacgggtcgctgaaaggagctggtgctgcactaccagcacgcctcgctggtgcagcacaacgacgcgctcaccgtcaccctggcgcacccagtgcgcgccccgggccccggcccgccgcctggcgccccgctgagcaccgaggaccccgccccaagcagagccgccccctggggcccgtcctgcgccccggaggcctggcgggcgggcgggaaagcccccgggaaccaggacccaagcccacaattcccaggggggga

SEQ ID NO: 177935 - DNA, 1106 bp, Homo Sapiens
  misc_feature (137)..(174): n is a, c, g, or t
  misc_feature (1052)..(1052): n is a, c, g, or t
ttccgcgggggccgctctatagggcaacgtgagagtatgggggtgggagaacgccccaaggccccgccttttttgtgtcccgtcccccaacttggcgggtggggggctgttcaagggccccccagggtgttgtttannnnnnnnnnnnnnnnnnnnnnnnnnnnnnnnnnnnnnttatgcccctgggcttgcagggatgtcccaaccccaaccaggggggccttgccacccagctctgggggctggaaagcccccccggcgatgccggctggacagggacccgatacaccctctctccctttgatggtccgagtctggagagatacaaggaaggctgggcagggaggaagttggcctctctgtgtgcctcagcccctgggaactctcctggccctcctcctggtgtcgggggcagccacaggctgggctgcttcccgggacaggccagctcctcgcctgctcatgcctcctgcccgctcttcacagacctctgaccacccctccacacaacagagctcccagcctagtgcagtccgggaagggccatggaactgtcccttgccctcctcagagtcgtctggcaagactgtccctggcctcacttctcctccccatctagacttcacccatggtcttctggtgtaatgggttaggcctttctaccagaaaaagccagagttggaacccaaccccacctcttccccacacctgttcccttacacgggacaaaccaccatctttggtctgaccccttctcccctaattgatggggacaagccagccccagctccccgggagaagggaggggctttctagcagcaaaaagggtccctccagccacctacctgtccccttccccccagttccttcctagagcccctcccccttaacccaacaaagttcatggcagcagcaggctgagacccgaagatgtttgaaaactcatggcacttgtgagaaaaggaggggcagagagatggggagaggtcagagcagaggtggaggggccacctctggggaaacggcaatgcaggggctgggctagggtggcnctgggctatgctgcccctagagttgagggaagggggctggggaggctggcctga

SEQ ID NO: 177936 - DNA, 954 bp, Homo Sapiens
gggctcagcacagaatcgccccgggtcctactacagaatcaatccttgaacactgcctccacgtcgccggctcaatctgggcgagaacccagacttccaccgcagccccgcaatctgcagacctcagcggcagcgcaggtggcagacctgcctcctttgcctgtgagtcatggcagctcccatgaatggccaagtgtgtgtggtgactggtgcctccaggggtattggccgtggcattgccttgcagctctgcaaagcaggcgccacagtttacatcactggccgccatctggacacccttcgcgttgttgctcaggaggcacaatccctcgggggccaatgtgtgcctgtggtgtgcgattcaagccaggagagtgaagtgcgaagcctgtttgagcaagtggatcgggaacagcaagggcgtctagatgtgctggtcaacaatgcttatgcaggggtccagacgatcctgaacaccaggaataaggcattctgggaaacccctgcctccatgtgggatgatatcaacaacgtcggactcagaggccactacttttgctcagtgtatggggcacggctgatggtaccagctggccaggggctcatcgtggtcatctcctccccaggaagcctgcagtatatgttcaatgtcccctatggtgtgggcaaagctgcgtgtgacaagctggctgctgactgtgcccacgagctgcggcgccatggggtcagctgtgtgtctctgtggccggggattgtgcagacagaactgctgaaggagcatatggcaaaggaggaggtcctgcaagatcctgtgttgaagcagttcaaatcagccttctcatctgcggaaaacacagaattgagtggcaaatgtgtggtggctttggcaacagatcccaatatcctgagcctgaagtgggtaaggtgctgcccatccctgtgaccttgctcgaa

SEQ ID NO: 177937 - DNA, 405 bp, Homo Sapiens
  misc_feature (36)..(37): n is a, c, g, or t
  misc_feature (88)..(88): n is a, c, g, or t
  misc_feature (90)..(90): n is a, c, g, or t
cgagcacccggtccatgagcctgccctggccccatnntatgtagagcgtgtctcgggccttctggaagtagtgtgaatagttgcgcangncagcggcacgttgtgtgtgagacgacacgcagggtgctgcctggcccacatccgcctcaaagcccacggtggggcactggttcatgcggaacacgcactcggcactgtcgatctcagcacccaggcctgagcccagcatttggccggagctggacaccacggcacagctgcggcagggcttcgcggaccagcggcttcccatctgggcacactgctatatccacttgaagtgcaggggtcccgggcacagtggggcctgggagcctgttgggggaagttggttgttccaggggcaggttggccaggggaagaagg

SEQ ID NO: 177938 - DNA, 1299 bp, Homo Sapiens
  misc_feature (431)..(431): n is a, c, g, or t
gtttcccccaaaaagagagaaaaggctcccattaagagcggggcttttcagggggaggttccccctgaagaagttccccccccaaagattggggagaaccccttagggcttggaagagaaagcccaaaggccttgtgaaggggccattcccaaagggggctggccctccaggtttttgtttcctgaggaacgaaaggcgtggcccccggagggctcagggcgtgctcagtgggggccagggccacccagccatgggagtggggccaggggctgccacctgtagggggccagcactgggctccggggacgccagcagaggggccgagaggccatcagcagagtctgtgtcgaggtccagcctcccgtaagcttcgcacagaggcaggtcattagcttcgcaaaggcttgagcttttccaccaccagaaaccncagggagaaacaggagcaggcagagaggaaagccaggggaggggagagcaagacagaagcaaaagttaagaaaacacgaccacaccccagacctgcccttgttcccttgtctccactcctgctcgcatcctgtcaccctgagttggcaggcctggcaaaggagagccggccagtggtgagagccaccctagcattctgaaaggaggaagccgccctggcccaaccaccaacagctgtgtgacctcagcaggcccttcctgcccagcctccacgtgggcctgtcctagcctatgcctcccagctggtgctggtccccctcctcttgcaaaaagctgtcagcctggccaccctccctcctccctgactgcagaaaccccagtgtcactacactgcaaagagctctctgagggcagactgtgttctttctgggtctgtccctgcctgagacttagcctgaagggggcgacagttgggaacacaggccctggcacttcccgatagccctacatcagccaggcggcctccagcaggcgtccccacctctaacacggggaatcctcacggcagccaggatgcaggtgaagagctcagctagcccttcccatgcccgcagctgtgacaatccacgctcgcctctttctaacctgcaggcaggggcctggctttcccgcggcctgcctcgcccctggcttcctcccttgctcctgccctcagtgttcagtctcagaaccgtcctgggcacagagtggcatcccgaggaacgcaaaggagaggcagagccagaaagagcaactaacaagcagagagggggcaggcgagcacagaggcgcagctcatgcggaacagggcagggcagggcagggagcgg

SEQ ID NO: 177939 - DNA, 934 bp, Homo Sapiens
gctggaggccgcctggctgatgtagggctatcgggaagtgccagggcctgtgttcccaactgtcgcccccttcaggctaagtctcaggcagggacagacccagaaagaacacagtctgccctcagagagctctttgcagtgtagtgacactggggtttctgcagtcagggaggagggagggtggccaggctgacagctttttgcaagaggagggggaccagcaccagctgggaggcataggctaggacaggcccacgtggaggctgggcaggaagggcctgctgaggtcacacagctgttggtggttgggccagggcggcttcctcctttcagaatgctagggtggctctcaccactggccgcctctccttgccaggcctgccaactcaggggacagatggagcaggagtggagaaagggaaaggcaggtctggggtgtggtcgtgttttcttaactctgcttctgtcttgctctcccctccctgggctttcctctctgcctggctcctgtctctccctgggggtttctgggtggtggaaaaagctcaagccttttgcgaaagctaatgacctgccctctggggcgaaactttacgggaaggctgggacccccgaacacagaaatccggctggatggccctctcgggccccctctgcttgggcggtccccgggaaaccccagtggctgggccccccctaaagggggcagcccctgcccacttccatgctggtggccctggccccactgagcacgcctgaaccctccggggccacgcctcgttctcaagaaacaaaacctgaggcagcccctttggatgccctcacagcccttggctctctcagcctaggtttcccatttgggggacttcagggacccccaaagccccttaggaacttcctttggggaagccccgttaaccccaggggtggggtc

SEQ ID NO: 177940 - DNA, 581 bp, Homo Sapiens
  misc_feature (75)..(75): n is a, c, g, or t
  misc_feature (351)..(351): n is a, c, g, or t
  misc_feature (501)..(501): n is a, c, g, or t
  misc_feature (515)..(515): n is a, c, g, or t
  misc_feature (546)..(546): n is a, c, g, or t
  misc_feature (556)..(556): n is a, c, g, or t
ctctccctggggtttctggtggtggaaaagctcaagcctttgcgaagtaaatgacctgcctctgtgcgaagttancgggaggctggacctcgacacagactctgctgatggcctctcggccctctgctggcgtccccggagcccagtgctggccccctacaggtggcagcccctgcccactcccatgctggtggccctggcccactgagcacgcctgagcctccggggccacgcttcgttctcaggaacaaaacctgaggcagccctttggatgccctcacagccttgcttctctcagcctaggttcccatttggggacttcaggaccccagagccactaggaattccttngggaagcccgtttagcccagggtgggtcccgccaggacagtagggaaacagttgttttcctaagccatttccgaattagcccatcatttccgagtcatcatctttgttttgttgcctttctgggggcagccaggttggaagaaaattttncaagttaggttttnggccctttggggatttttaagcaattggggnaagaaggttncttaattttggggaattctttaacc

SEQ ID NO: 177941 - DNA, 967 bp, Homo Sapiens
gagcgggtcccgggatgtgaccggggctctgcttgtggctgcggcggtggcttctgaggctgtcgggtctttgcgggttgcggaagggggccccaatacccttcttcttcaggtcttaagaagctggccgtggtgcaataaggaacttaaaacaatggaagagcggaaagtgaagaggaggagtcctaagtcttttagtgcccactgtactcaggttgtcaatgccaaaaaaaatgccattccagtgagtaaaagcacagggttttcaaatcctgcatcacagtcaacttcacagcgaccaaagttaaaaagagtgatgaaagaaaagaccaaacctcagggtggagagggcaaaggcgctcagtcaactccgatccagcactccttcctcactgatgtctcagatgttcaggagatggagagagggctgctcagtcttttgaatgatttccactctggaaaacttcaagcatttggaaatgaatgttccattgaacagatggaacatgttcggggaatgcaggagaaattagctcgcttgaatttggagctctatggggagttagaggaacttcctgaggataagagaaaaacagccagtgactccaatctggataggcttctgtcagatttaaaagaattgaattcttccatacaaaaactccatttgggcagatgcacaagatggttccaaatacttcctgcctacctaaaatgaaaatgtaagtttgccttgggatttgaaaaaagaaccagccaagtcttttacttttttccaccccaaatccaggaaacaagaaattcattctttcccccaaacaggggaaattaaaagggtaattttaaaagccggcaaaggtttccaaaggagatcccgtttttcccactttaaccgggcctttttttaaagaaaaaaggggggggacctccccctctgttaaaatttccccgcccactataagacttc

SEQ ID NO: 177942 - DNA, 384 bp, Homo Sapiens
  misc_feature (231)..(241): n is a, c, g, or t
ggggttctccggccggcggcgcgggcgcgggccgggccaggctgggtctcttcctcccggccccggactccggtgcccccgggacgcggcgctttacagacacatacgggagcagccccggtcccccgccccgcgcggccgaacaaatggttctctccagagcttgtgattatacgttttattagactcgggaggggtatggcagggcttcatcagtgttccttcaaattnnnnnnnnnnntacaaaagctacgtagaaaacgtcagatcagacgactaaactttcccgactcagggccaagttcttcttgagcctgcgctctcgggacgcctgcgagtcggtctccgagtacgggggcggcgcgggcgggtagtaggcctctt

SEQ ID NO: 177943 - DNA, 925 bp, Homo Sapiens
tggtggcctccccagcaggcaggagcgattgaggacgagacaccatggatttctccggcctgtccctcatcaagctgaagaagcaggagatggagacgcaggtgcgtgtcctggagctggagaagacgctggaggctgaacgcatgcggctgggggagttgcggaagcaacactacgtgctggctggggcatcaggcagccctggagaggaggtggccatccggcccagcactgccccccgaagtgtaaccaccaagaaaccacccctggcccagaagcccagcgtggcccccagacaggaccaccagcttgacaaaaaggatggcatctacccagctcaactcgtgaactactaggccccccaggggtccagcagggtggctggtgacaggcctgggcctctgcaactgccctgacaggaccgagaagccttgcccctccacctggtgcccaagcctcccgccccaccgtctggatcaatgtcctcaaggcccctggcccttactgagcctgcagggtcctgggccatgtgggtggtgcttctggatgtgagtctcttatttatctgcagaaggaactttggggtgcagccaggacccggtaggcctgagcctcaactcttcagaaaatagtgtttttaatattcctcttcagaaaatagtgtttttaatattccgagctagagctcttcttcctacgttggtagccagcacactggggaaaccgggcccagcggggggctccctggccttctggactcctgaaggtcctggattggatggaaagaacccagcccggggccgctgatgggacgaggggcaggcatccctggcctgttgccctctggggacccgtttctaccaaggccccccagctgggggtgctcccgcaaaccagcctctgggtggggccaaaaggaaagtcc

SEQ ID NO: 177944 - DNA, 960 bp, Homo Sapiens
  misc_feature (272)..(272): n is a, c, g, or t
tggcccggtcgccagcctcgagggccccgttcccttgtccactcgaatactcccccatgtggccttctgcctgttggtgactgggctcccggaaaaggcccgttggcccccctcgctcgcatcgggccctgaggcctggttttgggggagccacccaggccacagagaggggaggaggggggaatccttgatggccgggtgcctggagggaccttctgtaaaaaagccacaggtggactgcttctgggggacatcacccttttttctgcggnggtgcccagtcatcggaacgtccagaaaccctgaaagtgtcatctggggccatggacggagaggggtgggggctaccagtggacccactgacttcctggacatcaggatgctctgccatggcaaaggtgttatcatccatgttcttcgtcttcagttcctcctcggcaggcctgcgcctcaccggcttcatgcagctcttcagctgcctggcctcagcctccacgggaccctggcactcgggctgtggctccagctgcggcagctgctgctgctggggcagcccttcggcatcagtgggtgtgggagcgggtgcgatccggagcaggactgtgtagttgcggccgtggttgttggcccagaaagtgccctcaggggtctcatagcgcaccacgaagtcgaggcgcgccccatcgcccgcgccctcagcaaagggcagctggaaggcaaagcggtcggtgcggccgccgtcgtcgggcgaggaggcggatgcctggccgggacccaggccgagccccggatccaggatgggatctcctgctcctgttcctcccgctcctgcccacggcgggctgcgcgggacgtagcgcgctgggtggtcgcaaaaggaagcccagccgtcgtgtgaggcccgcacgtgcaccgccttctcgaaggagcggttcagcacgcgtaccaacccgcgcagca

SEQ ID NO: 177945 - DNA, 1121 bp, Homo Sapiens
  misc_feature (44)..(100): n is a, c, g, or t
  misc_feature (188)..(261): n is a, c, g, or t
  misc_feature (305)..(313): n is a, c, g, or t
tcacagcggctctggtattcatgggacgagtaaaggatccggcnnnnnnnnnnnnnnnnnnnnnnnnnnnnnnnnnnnnnnnnnnnnnnnnnnnnnnnnngggtatatgcatttgcaatgtggtgggtggttatttacatggtgtatagggggtactttggggcgaaaagggcggaatgcaagtactnnnnnnnnnnnnnnnnnnnnnnnnnnnnnnnnnnnnnnnnnnnnnnnnnnnnnnnnnnnnnnnnnnnnnnnnnngattgggagggagggatgactgcgggatagaagcggggccaaannnnnnnnnatggcgcaaaggaagtaattccaagggggcctggttcccttcgagagaaaaatgggggagggggaaatcgcgcggaagaggggttttagcgaggcagccaaggccgggggttataaggcccgggccgggatcaaggataggggaagagtttcgcagggtgtgggatggggttcagaggacctcggagtaaggcagggacttcccttctgggtgctctgcagcaggtgctgaaccagggagtggggctgtgtgcgcaggggtggccggggagtccagctctaccgctctccccggttgtagcaccagcgcccggtctgagttcaggatcgtgttgagcctatgggcaatggtcagcactgtcttgttggcaaagcgtttgcagatggtctgctggagcagctggtctgtcttgtggtccacacgtgctgtggcgtcatcgatacgcaggatcttggcatctgtgaggagagccctggccgaacacaacagctgcctctgcccaagagataagctccggcccccctcacccagctcaccatccagaccacccatggatgtaatcacctcactcaggtggcactgcttcagggcctgccacaaggccctgtccttatgtaggccctgggggtccaggttttcccgaacagtcccactgaacaaaaagggctgcctgggggatgatagccaactgggatctgagctggaccagctccagctgggggaagtccacgccgtccacccctttggggaatcgccacccaggctcggtacgttgggatgatggggtcgtgggcggggcggacaaggt

SEQ ID NO: 177946 - DNA, 1403 bp, Homo Sapiens
  misc_feature (1150)..(1150): n is a, c, g, or t
gtggctccagatctggaggtgtgtccatggcggcgcttgacctgcgagcggagctggattcgctggtcctgcagctgcttggggacctggaggagctggaggggaaacgaacggtgctgaacgcccgggtggaggagggctggctctcgctcgccaaggctcgctacgcgatgggcgccaagtcggtagggcccctgcagtatgcttcccacatggagccccaggtctgcctccacgccagcgaggcccaggagggactccagaagttcaaggtggtgagagctggtgtccacgccccagaggaggtggggcctcgcgaagcaggtctgcggaggcgcaagggccccactaagaccccagaaccggagtcctctgaggcccctcaggaccccctgaactggtttggaatcctagttcctcacagtctacgtcaggctcaagcaagcttccgggatggcctgcagctggccgcagacatagccagcctccagaaccgcattgactggggtcgaagccagctccggggactccaagagaaactcaagcagctggagcctggggctgcctgacatgcgcgcaaagaggcagggcagcgagcacagctgttctccgacatggctacgtgatctcaggccttcttccttcacaattagctcttgcccctaccccacgccagctaatgccccttctgtgtccctgctctgcatgtttccattttccttaggtgtgaagtttgaagaggcaaacagtaattttgaaagccactactttgaaaccattctaaggcctgagttcccataggacacactcacataggcaggtacacgttagtcaacaattggaactgcctcttggatcactcagctgtgctttcatggctggatgatggaacactgtgcgaagagagatgggggccaggaagtagcgcttcatgcttagtacatcctccaaattgtctttgctggaggagaaaaccgtactcagccaaaagatcaggacaatatgacttgagtccacaaggacacaaacacctgagtagctgggcagcccttggcagggtctaagccagggaagtaaaaaatgatctggcctagatatttaagggaactctaggaagaggcctagggtttttaaaaccctgtctcttttnccttacccaaaagaggctgagccctctccttcattttttttgaaggggcccaccttgggggttttctgggtcctggagaaactttcctttcaattttttccaactggggggtggttggaatcttttggcaggtaaattttcctatgggaacctgtggtttaattggtttgggaagaggaaaattggggcccccttttggcgccccatattaataattggagaaatgggtagggcctccttaattttttttcca

SEQ ID NO: 177947 - DNA, 913 bp, Homo Sapiens
  misc_feature (779)..(784): n is a, c, g, or t
ttagatgccacaaagcggttaggctgtgaggaatggaaggatacggacctcttaaagacacccgttcttcgagtccgtcacgtgggagaacctgcaccagcagacgcctccgaagctcaccgcttacctgccggctatgtcggaagacgacgaggactgctatggcaattatgacaatctcctgagccagtttggctgcatgcaggtgtcttcgtcctcctcctcacactccctgtcagcctccgacacgggcctgccccagaggtcaggcagcaacatagagcagtacattcacgatctggactcgaactcctttgaactggacttacagttttccgaagatgagaagaggttgttgttggagaagcaggctggcggaaacccttggcaccagtttgtagaaaataatttaatactaaagatgggccccagtggataagcggaaaggtttatttgcaagacgacgacagctgttgctcacacaaggacccacatttatattatgcggatcctgtcaaaaaagttctgaaaggtggaattccttggtcacaaaaacttccaccgaaaggccaagaattttaaaacctttctttggacacacgcccaaacaggacgcacctatctgagggacccccaccgggaacccacatcaagtggcgctaggaacgacccacgaaggttttgggacgcgagcgatactcagaagccaccccggacgccgccgtccagtacacccattgacctgcggttccgacgctgcccttcaggcggccaggacnnnnnngacctgcccccatgcgcggggccccgtatgagccggccatccgggaacggctttccagaccaccctgcccagccattcacaaaggggaaaccgcaaaagggcggaaaaacctttgcaagccattttttt

SEQ ID NO: 177948 - DNA, 1353 bp, Homo Sapiens
  misc_feature (898)..(1029): n is a, c, g, or t
  misc_feature (1039)..(1052): n is a, c, g, or t
  misc_feature (1138)..(1257): n is a, c, g, or t
  misc_feature (1272)..(1282): n is a, c, g, or t
gggactcagaagccaagctgcttcccgcctagactcggcgcagggccccgcaccggtgaggaaggtgcttttggccccattgcgaggggccttggccaggactggccctgtggccaggaggttagaaggtggctgttcccggattgacggctttttcccgggggcctttggaagatttggtggaaggacaagagggcctgtccctgtccccgtccccaggaggtaccgacagtccctgtgctggttagacacggagcgctgcacaccgaaagcccaaattgggagctctgcctgccggcaactttgctgatggggtgattgctgcttctggggggtaaggaaacaagttacagaaattaccgcgttctgtgtgaagggactgagggtgtggtgtcattggcagagggtcattttaggagagctgccccagcccctcgaacgcctggcttggggtgtcattctgcctggcggccaggcctccagcttcccctgccccgggcctggggctgtcactggccctgatccgaacacctccagattccggcttctacatgggacagacggggacgcacaggccaccttccttctggcagggactcttatttattcccattgctctagggctttcggtttccccttcttccggtaggccgcgtagaggcatgcaccgggtaggtttccgcggtgaccccgcggcggcctgagggacgctccctgccccatcccggctgttgggctgggccgctttgcctctgcttcgccctgtgctgtgttctccagctttgtagcagcagccttgacaaacccaggcgcactgtaccaaggcaatgtaacttttgattttcggtcaatttaagttcttttgtcaccaaatattaataaacaggttttgacttcnnnnnnnnnnnnnnnnnnnnnnnnnnnnnnnnnnnnnnnnnnnnnnnnnnnnnnnnnnnnnnnnnnnnnnnnnnnnnnnnnnnnnnnnnnnnnnnnnnnnnnnnnnnnnnnnnnnnnnnnnnnnnnnnnnnntgttgggcgnnnnnnnnnnnnnnaaaaaattttttaaaacttttttttgggggcgcggccccaaaaggaaaggaaaaggggccaaatttgttccaaagaaaacccgggnnnnnnnnnnnnnnnnnnnnnnnnnnnnnnnnnnnnnnnnnnnnnnnnnnnnnnnnnnnnnnnnnnnnnnnnnnnnnnnnnnnnnnnnnnnnnnnnnnnnnnnnnnnnnnnnnnnnnnnnttctatttaaatttnnnnnnnnnnntgcccttcttggaagaatgggtgaaattcataaaccttccggcggattgggaaccccccccaaacgggttg

SEQ ID NO: 177949 - DNA, 889 bp, Homo Sapiens
  misc_feature (91)..(91): n is a, c, g, or t
  misc_feature (159)..(159): n is a, c, g, or t
  misc_feature (455)..(504): n is a, c, g, or t
gggccttgcccttctgggggggctggcataccacggtggggtggggggcatagaccggtgccccgttgcctgtttggacttggtggcagcntgtggtgtgcagggccaggaggccaggtgggagggtaggaggagggagcctggcgcagaccatttagnggcctcgttatgacgctgggcagccaaggtgttgttgtcattgggggcaggtgggcagccctgattttcccagcgatgtggggtggtggctggagggctacctgatgcatggttggcattgaagttgccaggtgagctgcccagcttgtcatgggcgtaggtgaagatctctcgatgggcccgggccacctgggatatcacatcctccactgtgggctcagggcttggggatctgggaggcgtcagctgttgtggaaactgggagaagcccaccaggggtgaggggaccggagcannnnnnnnnnnnnnnnnnnnnnnnnnnnnnnnnnnnnnnnnnnnnnnnnnagtctccagcgggcactggctgctcaactggttgttggccaggttcatggcactctgcatctcagcaagcatccgctgcttctctcgtttggggatgcgcccaaaacgcacagcgtctcgagacatgcccacagagagacacttcttgaagcgacattgctggcagcggttgcgattgatgcggacgatggagcaattctcattcttcagacaccttttgtactggatgttctgctggatgctccgacggaaaaagcccttgcagccctcgcaggcgtgcacaccgtagtggaagcccgaggcaacgtccccacacactttacacagtaacaccatgccattcagcttggtgatgttgctggtgctcttgctgggggacactcgg

SEQ ID NO: 177950 - DNA, 1034 bp, Homo Sapiens
  misc_feature (42)..(52): n is a, c, g, or t
  misc_feature (55)..(55): n is a, c, g, or t
aggttgtgggcgcgtgggggtgaagaagttggggtaaggctnnnnnnnnnnntanaccgatggtttattaggtggggaacaaaaccggcggcgtgtggtgtttcgagtgtcccgtaggggagcggtaaatggtgaacccgttggcccgaaatgcccggggcccatgggagggtaatcgcggggacccgctggtggccatcgcttgtgggtcggtaggcgattgcgcaaaagccgttccgggggccgtgaccttaagacaggattgcccccggtggggggggccttgggcccaggagggtttttggggtatggccccgggggatccttcggcaaatccagccaagagggcagggggcaccgtggggggggaaaataggcgcagcaggcaatgggttcgcaagttatgtttggcgttgccgcaggtcccgggtcatttgctggaatgaggaactgggacttgccgtaaggggttggtacaacccccgtgggggtgggcctcatcaaggggcaggtactgggggttcccgtgcacagtggctgagctgttgaacaccaggttcttcaccccgtggggccttcatgatctccagaagctggatggtcccggtcaggttaactctgtaataatccagaggcttttgcaccgactcgcccacggccttgagccccgcaaagtggatgaccgccataaagctgtactttttgaagagacgctgtagggctccctggtccaaaatgtccatctcctcaaactccacagagcggcctgtcagctcctggacccgccgcaggctctcaggcagggagccccctccacggaaggcattatggaagttatcgatgaccacaggcaagtagccagcctccagcagctccagcaccgtgtggctgccaatgtagccagccccacctgttaccagcaccttctctgccatggcaccttggagttggaaaagatggaatctgaggatccacacttctttgtccaaggtgactgaggactggagagtcctgctcgggttcccgcgccccac

SEQ ID NO: 177951 - DNA, 721 bp, Homo Sapiens
gcggagtgactcggcggccattagctgtgtgtagttgcccgggactaggagcttaagtgaagaggtacgccttgttcggtggaaatcagccgtagccatgagtttctgccggggctagccctagagtacggagcaggcggacttttcggtttcccgccccgccaggtggcggggcctactaggcctccgggcatccccggtctcaagtaggcctcatctgccggcaagggcgcccgaaacgcgggaggcgccatgtcgctggttgcttacgccagcagcgatgagagcgagccggatgaggctgagcccgagccggaggaagaggaggcggtggctcctacatctgggcccgctttagggggcttgttcgcttctctccctgcgcccaagggtccggccttgctgcctccgccccctcagatgctggcgccagcctttccccacgaccggctgtaggcttcacaacacacaaacggaagaacccacagagccagcaacaacacacaaacaacagagacccggacagaacggccaaaaaaacacacaacaaaaaccagagaccagcaaaccacacacagaagaccagaagacactgggattggggttggcctcccccccgagcccggggcccaatctggccccctccaattcgcgggtgcccggtcccccgctgggggccttctccccgccaccaaacaccgcaacacccctgtgccgattg

SEQ ID NO: 177952 - DNA, 1221 bp, Homo Sapiens
  misc_feature (132)..(132): n is a, c, g, or t
  misc_feature (169)..(227): n is a, c, g, or t
  misc_feature (331)..(331): n is a, c, g, or t
  misc_feature (431)..(514): n is a, c, g, or t
  misc_feature (569)..(569): n is a, c, g, or t
  misc_feature (614)..(738): n is a, c, g, or t
gtggcatgcggcggcggcgggggggaggccaaccgtggcgcggcgggcgcacagcggagctcggcgcataagggcagcactgtgccggcgcgcgggatatataatccggggcgcgcacgcccgctctgcagngcgcaccacagtaagcgcgagggcaactacggggaannnnnnnnnnnnnnnnnnnnnnnnnnnnnnnnnnnnnnnnnnnnnnnnnnnnnnnnnnnctacgagcgcctttgggccgctggcaacacaggctgcgggggggagggcgactagagattattaggcggacggcgacggcgccaggctactgatcatatcgggnttccggcgcgggcgggccggcgggaaaccgcgctaacacaccgcgcaacggcacgcgtcgcacgcgctcactcgggcgaccggctgcaacggttggcgannnnnnnnnnnnnnnnnnnnnnnnnnnnnnnnnnnnnnnnnnnnnnnnnnnnnnnnnnnnnnnnnnnnnnnnnnnnnnnnnnnncacggacggcacccggggccgcggccagtgtcgggggtgcgggccgcgtcacgangcggcgcggggcgggtggcggcgcctcaggaggcctcctcccggnnnnnnnnnnnnnnnnnnnnnnnnnnnnnnnnnnnnnnnnnnnnnnnnnnnnnnnnnnnnnnnnnnnnnnnnnnnnnnnnnnnnnnnnnnnnnnnnnnnnnnnnnnnnnnnnnnnnnnnnnnnnncctagcgtcgcggcgggagcgggcgcccgggccccagaccccggtgcgtctctccggggctcgagtcggggggggccctcactgcaggacccacccagtgcatgcgcaaggagcgcccgggccctgcgcctcccgcgggatgcccggcctgttggaacgggcgcccgctccttgcatagcgcctccagggcgtcggcagggaccggccttgcccgtgaacttgcgcaccggctcctctgccacccgcaggaaggggttgtagaggcgctcctcgcccagagtcgacggcacagtgggcacgtcatcctcatccctcttgtggtcgttgcagggctccactttctgggcaacctccaggttgctaagcgtgtgctcgtggccgcagaacaccttcgtctcggggggcagggtacccagctcggccaggctctggtacatctgctgggcgctgccctccaggcacgagccgcagccggccaccga

SEQ ID NO: 177953 - DNA, 918 bp, Homo Sapiens
gcagatgtaccagagcctggccgagctgggtaccctgccccccgagacgaaggtgttctgcggccacgagcacacgcttagcaacctggagtttgcccagaaagtggagccctgcaacgaccacgtgagagccaagctgtcctgggctaagaagagggatgaggatgacgtgcccactgtgccgtcgactctgggcgaggagcgcctctacaaccccttcctgcgggtggcagaggagccggtgcgcaagttcacgggcaaggcggtccccgccgacgtcctggaggcgctatgcaaggagcgggcgcgcttcgaacaggcgggcgagccgcggcagccacaggcgcgggccctccttgcgctgcagtgggggctcctgagtgcagccccacacgactgagccacccagaccctcacagggctggggcctgcgtccctcctcgtgacctcggccagctggacccacatgagggccacctctggaaccttcttcgaggccctggccagccatctgcccagcctcggagggtgggcaacctggtgcttcccgggtggacacacaggaccactcagtggggcctgtgtgggcgccgagacctgggtgtctgggaaagtggggcacaccggggcctccgaactatgaaataaggctttggaaagcgcaaaataacaatcgttagacatacacgcctgatccactcctcatcactgttagtcaaggcggccctccgaggctcctctattacccggtgtccccaccaaccgggtcacattggttggccccccggtcataataacgtgatctctttgatcccccactttctctacgtcaccattagtccagtaatactcgccggcctcatctccctctaaaggggggccgctcatttcagtttcctgcatacaagccttgtttca

SEQ ID NO: 177954 - DNA, 1018 bp, Homo Sapiens
  misc_feature (810)..(819): n is a, c, g, or t
ccgacgagggaatcagcgagcccagctgtacggtggggggcaggctcccccatggcagggtccttggggtaccccttttcctctcagcccctccctgtgtgcggcctctccacctctcacccactctctcctaatcccctacttaagtagggcttgccccacttcagaggttttggggttcagggtgctgtgtctccccttgcctgtgcccaggtcatcccaaacccttctgttatttattagggctgtgggaagggtttttcttctttttcttggaacctgcccctgttcttcacactgccccccatgcctcagcctcatacagatgtgccatcatggggggcatgggtggagcagaggggctccctcaccccgggcaggcaaaggcagtgggtagaggaggcactgcccccctttcctgccccctcctcaccattaataaagacctgccttctcatctttaataaagacctgtttggtacagatcaagattaattgacgcccctgcatgcatcgaaggctctacccccgggggcgtaaaaaacacgcatttaaaatgtgaacatggcccatagctgctgtccggccacaagatttcctgataatagagggagagatacgacttttcccccctatactggcataaaaattaccttcccccacatacctttgactacccccgccattaagcacatcttccgcacgtacccggcaaacaccgccccagcaataagtaaaaattcccacattttcctgttgccaccgttcaatacatctgcgacacagcacaattcgacctacgttctccgnnnnnnnnnnaacgtattcccactcaccccttcaccgagtaaacttcctcctattacgttcattccaacgccctaaccacatttcttgttactacaaacaattttcacacccacatatcccacatacacgcaccccccgcaatcgccacattacaacagatggaaaagcggataatagtaaaccggtcgtccagccaatcatacttatg

SEQ ID NO: 177955 - DNA, 719 bp, Homo Sapiens
  misc_feature (249)..(287): n is a, c, g, or t
tgctcagatgagcagggcctggcagggacaagcctcttctcctttgggaagccctgcagcctcctagcaagaggctgattccccactctgcccccatctgaatgtccttttcatgttgcacgcagggaacctcaggaaggaggattgcctgatgcctgcctggctccatccttgagctctgggcaccacctagggtgagggagagcctgcagctctggggctaagtctgccctggggggaaagggctcnnnnnnnnnnnnnnnnnnnnnnnnnnnnnnnnnnnnnnnctggacgcacacggaggcttgcggacccatactcacaggcacatgtggcctggggactgggggagcaggaaagacccctccaacatttggcccttggaaggcaccattgccaatgagcctctttgctggttcccccgaccccacctgggggtcccatgggagcccagcccagccaggtgtggggatgggccaccggccattcctgttttccttgtacagacagattctcactacccacccgccatccccagacacattttatttaataacttgtcattgttaaattatttattagcgtttaccacaccaccacccccaccctgccctccactctcaccttccacctcttcccacaacagcagaaaatggaaacaacaacaaaaaaagatggagacatcagtatatttgtaaataaaccgacctgtacactcc

SEQ ID NO: 177956 - DNA, 951 bp, Homo Sapiens
gcctgggtggccgaccccggaagtccccgccgggtgcagcttggtcggttcgatcgccgccgacgacctgacaccgcccggagttggcgtcccttctccctctccgagtgctgctcctgtcattgtggccatggacgataccctgttccagttgaagttcacggcgaagcagctggagaagctggccaagaaggcggagaaggactccaaggcggagcaggccaaagtgaagaaggcccttctgcagaaaaatgtagagtgtgcccgtgtgtatgccgagaacgccatccgcaagaagaacgaaggtgtgaactggcttcggatggcgtcccgcgtagacgcagtggcctccaaggtgcagacagctgtgactatgaagggggtgaccaagaatatggcccaggtgaccaaagccctggacaaggccctgagcaccatggacctgcagaaggtctcctcagtgatggacaggttcgagcagcaggtgcagaacctggacgtccatacatcggtgatggaggactccatgagctcggccaccaccctgaccacgccgcaggagcaggtggacagcctcatcatgcagatcgccgaggagaatggcctggaggtgctggaccagctcagccagctgcccgagggcgcctctgccgtgggcgagagctctgtgcgcagccaggaggaccagctgtcacggaggttggccgccttgaggaactagccgtgccccgccggtgtgcaccgcctctgccccgtgatgtgctggaaggctcctgtcctctccccaccgcgtcttgcctttgtgcctgaccccgcgggggctgcggccggcagccactctgcgtctctcacctgccaggcctgcgtgggcccttagggttgttcctggttcttttaggttggcccggggggtcctgggtccccggggggttgagtttctgcaaatttttc

SEQ ID NO: 177957 - DNA, 526 bp, Homo Sapiens
  misc_feature (382)..(382): n is a, c, g, or t
  misc_feature (401)..(401): n is a, c, g, or t
  misc_feature (438)..(438): n is a, c, g, or t
  misc_feature (459)..(459): n is a, c, g, or t
  misc_feature (465)..(465): n is a, c, g, or t
  misc_feature (471)..(471): n is a, c, g, or t
  misc_feature (479)..(479): n is a, c, g, or t
  misc_feature (484)..(484): n is a, c, g, or t
  misc_feature (504)..(504): n is a, c, g, or t
  misc_feature (511)..(511): n is a, c, g, or t
catcttcaagatctatgccatcgaggaggaacagttcgtggaaaagctgaacctgcgtgtggggcgcaagccttcgcttaacctgagctgtgctgacgtggtctggcaccagatggatgagaacctgctggccacagcagccaccaatggcgtggtggtcacgtggaacctgggccggccatcccgcaacaagcaggaccagctgttcacagaacacaagcgcacggtaaacaaagtctgcttccaccccaccgaagcccacgtgctgctcagtggctcccaggatggcttcatgaagtgctttgacctccgcagaaaggactctgtcagcaccttcttcgggccagtcggagagcgtgcgggacgtgcagttcagtatccnggactaattcacctttcgncttccaccttttgagaacgggcaatgttgcagctctngggacatccggcgttcccganccgttncgagangatgtttnaaagnccacaaagggaccctttttnttgttgngatttggaacccctt

SEQ ID NO: 177958 - DNA, 940 bp, Homo Sapiens
tccgctgctgctgtcaggaccggagacatggagtcccagcgggacctgagcctggtgcctgagcggcttcagagacgcgaacaagaacggcagctggaagttgaaaggcggaaacaaaagcggcagaaccaggaggtagagaaggagaacagccactttttcgtcgccacctttgctcgggagcgagcggccgtggaagagcttctggagcgcgcggagtcggtcgagcggctggaggaggcggcctctcggctccaggggctgcagaaactaatcaacgactcagtttttttcctagccgcttacgacctgcggcagggacaagaggcgctggcgcggctgcaggcggccttggccgagcggcgccgggggctgcagcccaagaagcgtttcgctttcaagacccggggaaaggatgctgcttcgtctaccaaagtagacgcggctcctggcatccccccggcagttgaaagcatacaggactccccgctgcccaagaaggcggaaggagacctcggccccagctgggtctgcggtttctccaacctggagtcccaagtcttggagaagagagccagcgagttgcaccagcgcgacgttcttttgaccgaactgagcaactgcacggtcagactgtatggaaatcccaacaccctgcggctaaccaaggcccacagctgcaagctgctctgcggtccgggtgtctacctctgttttcctggaggactgcagtgactgcgtgctggcagtggcctgccaacagctccgcatacccagtacgaaagacaccccgcatcttcctgcaggggaccaacagggccatcctggaaggactgcagttgggatccagttccgccccttacaccgggagctacccggagaacgaacaaggacttcgaaagctctgggttagaatagggagcaaaaataactgggaaca

SEQ ID NO: 177959 - DNA, 526 bp, Homo Sapiens
ccgaaaagagctgctcaacttctacgcctggcagcatcgaggagagcaagatggagcatctagcgcagctgcgcaagaagttcgaggaggacaagcagaggatcgagctgctgcgggcccagcgcaaattccgaccgtactgagctgtgagagccgcagtgaatggctggaggtgcagggccaggaggaggcgaggcagggcctgcagcggtctctgagaggccgagctctggccaacgggccccaggttgaaggccaccgcgtccaacagccccatcagagtccacacaggccaggagggaaggaccaggccacccctcgggtcttgtgcttcagcagtcctggggacccaggcgtgccgagaggaggacttgtccttcctgcttcttgcctccacaccctcctctccaggaccctggatgaatccgttctgtgcttccttttccctcaatgcaaaagcccttgctggcaacgaaaaagcctcaaaagcagtgagaatacaagaaccttttattttacaagcgag

SEQ ID NO: 177960 - DNA, 1222 bp, Homo Sapiens
ggggcgcgctcccgggtggcaagatggtggcgcgcaggaggaagtgcgccgcgcgggacccggaggaccgtatccccagcccactgggctacgcagctattccaatcaagttctctgaaaagcaacaggcttctcactacctctatgtgagagcacacggcgttcgacaaggcaccaagtccacctggcctcagaagaggactctttttgtcctcaatgtgcccccatactgcacagaggagagcctgtcccgcctcctgtccacctgtggcctcgtccagtctgtagagttgcaggagaagccggacctggctgagagcccaaaggagtcaaggtcgaagttttttcatccaaagccagttccgggtttccaggtagcctacgtggtgttccagaagccaagtggggtgtcagcggccttggccctgaagggccccctgctggtgtccacagagagccaccctgtgaagagtggcattcacaagtggatcagtgactacgcagactctgtgcccgaccctgaggccctgagggtggaagtggacacgttcatggaggcatatgaccagaagatcgctgaggaagaagctaaggccaaggaggaggagggggtccctgacgaggagggctgggtgaaggtgacccgccggggccggcggcctgtgctcccccggactgaggcagccagcttgcgggtgctggagagggagagacggaagcgcagccgaaaagagctgctcaacttctacgcctggcagcatcgagagagcaagatggagcatctagcgcagctgcgcaagaagttcgaggaggacaagcagaggatcgagctgctgcgggcccagcgcaaattccgaccgtactgagctgtgagagccgcagttgaatggctggaggtgcagggccaggaggaggcgaggcagggcctgcaagcggtcctctgagaggccgagcttctggccaacgggccccaggttgaaggccaccgcgtccaacagcccccatcagagtccacacaggccaggagggaaggaccaggccacccctcgggtcttgtgcttcagcagtcctgggggacccaggcgtgccgagaggagggacttgttcgttcctgcttcttgccatccaaccctcctctccaggaccctggatgaaatccgtatctggtgctttccttttcccttcaattgcaaaagcccttgtctgccaacgataaagcctc

SEQ ID NO: 177961 - DNA, 965 bp, Homo Sapiens
  misc_feature (687)..(687): n is a, c, g, or t
  misc_feature (805)..(805): n is a, c, g, or t
  misc_feature (916)..(916): n is a, c, g, or t
gcgtgggttggtttgtgtagagaggcgtgagcgagcccgttgtccggagtgcacctgctgcctgttctgtccctcccgggagcccccgccgctgtcgccgtcgagtcgccatggaagtgcagaaagaggcacagcgcatcatgaccctgtcggtgtggaagatgtatcactcccgcatgcagcgcggtggcctgccgctgcaccggagtctgcagctgtcgctggtcatgcgcagcgcccgggagctctacctctcggccaaggtggaggccctcgagcccgaggtgtcgttgccggccgccctcccctctgaccctcgcctgcacccgccccgagaagccgagtccacggccgagacagcgacccccgacggtgagcacccgtttccggagccaatggacacgcaggaggcgccgacagccgaggagacctccgcctgctgtgccccgcgccccgccaaagtcagccgcaaacgacgcagcagcagcctgagcgacggcggggacgctggactggtcccgagcaagaaagcccgtcctggaagaaaaggaagaagaggagggagcgtcctccgaaatcgccgatcgcctgcagcccccctcggcgcaagcggagggcggcttttcccaacctgggcccaactcctgaaaaggcgctttctccggagcttttgaaatggcgcccccnaggacccatccaacggcaactttcatagaggatagataactcacattgtcagagccggcactacaacataacacagccaggacatatgtgagtctatcgacgggtgtttaagtaaagnagaagatcgtccagatagattttggttctgacggtgtataagtcgtcgcccacgactatctaggcgaccgcgtcgctcgtcgtcgaagagagcctgcgtgatcgaaaactnatagaccgaatggatatagtccgttgggaaagaggcaggtctcaggtat

SEQ ID NO: 177962 - DNA, 751 bp, Homo Sapiens
ccttctgggttacctttgcgtgttcgcccaatgcaagtgtaccagtaaatgattagcggttgtgcttggaaagcccaagtgcagtcgcttcaatagccaccatgctgggttcttttggcctttgggccgtttcttgccatcccagtactgccaagggatccggttgtgcccagacgtcccatatgggtcaccgttcttgtccttctgggcctgtcaaggtaagtaggttacaacgtgttgatgtccaaacctttgatcctgttggctttttgtccaattccatgaaatagcggaacttcttacgaaaattcaagctcaagtcagtttggccctgtatttccaggacatagtttgatgagagaatggaatggcaatgtacaaccccgttacacagtaaagtatcttcctcaggcgcaaccacacgccctttcgcctgcccagcgcccgcttcattcccgcgtcggctgcgcagcccggctcagccgccgccgggcccgtcaggcgtaggttctgcttcaggcggcagtcggcgtccagcgccgccggcggccgagccggaggaggacgagcccacaggcggcagcagcgctcatgctccaaggcgacgggctcggtccgcttcctcatcccgcggccgacagggccagccgccgacggcgcccgctggcctccgcacgcctgcgccgcagtgccgccgctccggacgcgtgggtcgacgatatcccaaaaattccggacctgaccagcgctt

SEQ ID NO: 177963 - DNA, 1529 bp, Homo Sapiens
  misc_feature (1509)..(1509): n is a, c, g, or t
  misc_feature (1512)..(1512): n is a, c, g, or t
aggctgtgatgcggctggctgccctggaacagaatgtagaacggcggtacctgcgggagcccctctggccaactcatgaggttgtgctggagaaggccctgcttagcacacctaatggtgcccctgagggcaccactacagagatatcatatgagatcacccctcgcattcgtgtctggcgccagaccctcgagcggtgccggagcgcagcccaggtgtgcttgtgcctgggccagctggagaggtccattgcctgggagaagtctgtcaacaaagtgacatgtctagtctgccggaagggtgacaatgatgagtttcttctgctttgtgatgggtgtgaccgtggctgccacatttactgccatcgtcccaagatggaggctgtcccagaaggagattggttctgtactgtctgtttggctcagcaggtggagggagaattcactcagaagcctggtttcccaaagcgtggccagaagcggaaaagtggttattcgctgaacttctcagagggtgatggccgccgacgccgggtactgttgaggggccgagaaagcccagcagcagggcctcggtactcggaagaagggctctccccctccaagcggcgggcgactctctatgcggaaccaccacagtgatctcacattttgcgagattatcctgatggagatggagtcccatgatgcagcctggccctttcctacagcctgtgaacccacgtttggtgagtgggtaccgggcgcatcatcaaaaatcctatggatttttccaccatgccggaaccggcctgctcacggggagggtacaccaacttcaaaggaatttgccggctgatgccctcctgggtatttgaaaactgccagactttccaccgaggatgactctgaagcaaggcaaggctgggcacatcatgcgccgcttcttcgagagccgctgggaggagttttatcagggaaaacaggccaatctgtgaggcaagggaggtggggagtcaccttgtgggatctccccccaccttccaaacgaaaacctgtcattttcacctgctgatgctgccctgagcccagactctagtcagataccaccctgatttttgaccttgcccttggcaagacccacatcctcttattctcaatcccgttctcccttccctcctcttgctccctcagtaataggcgcagaccatggggcccttctgggcttcagccccatttgcttggccgcccggcaccaataggcttggccgcccggctcgtaccccggaacacactttaaaaccagctctcctcccgggggcggcggggcctcccccagcccaacagaaacttggcggcaggaaccccgtccccgttttctcgcacacccacgccccggacaggaaatgttctctagcgacgcattccccgcggcggtaccaaaaccggcgcccggaagtccgccacgaaataaccccgcgccactataaacccaaccatctttacgctcccgcccccgcgacccgggggnggncatttttccaactaccc

SEQ ID NO: 177964 - DNA, 956 bp, Homo Sapiens
aggccgccacgtcattgggcccagatctgcctcgaggacaagatgctgatgagcagcgtcaaggacaacgtgggccgcgggctgaaacatcgccctggtgaacggggtcagcggcgagctcatcgaggcccgggcctttgacatgtgggccggagatgtcaacgacctgttgaagtttattcggccactgcacgaaggcaccctggtgttcgtggcatcctacgacgacccagccaccaagatgaatgaagagaccagaaagctcttcagtgagctgggcagcaggaacgccaaggagctggccttccgggacagctgggtgtttgtcggggccaagggtgtgcagaacaagagcccctttgagcagcacgtgaagaacagtaagcacagcaacaagtacgaaggctggcccgaggcgctggagatggaaggctgtatcccgcggagaagcacggccagctagcacggccagtgccaggaccgggccgagggaggccagaccaagggaggcacgcgcgctgccgggcggacagaggctgaggctcacaccccacacccgggcaggagcgctccctggccccaacacatcggggctccgaggcagtgaccagaacgtggtctcaaggtggtgggggctatgggggctgcagggggtagccctgccgcactttgtcacgggagcccagggtacccgcctccctttttcgtaaacactgttccccccggtcagcccatctagccctgttcctcatttcctcacgccatctccatcccccatctttgagtcctggaaacggccctggggtgcctgccccctccactgtgcaactctggggagcagccccggcaaggttgggggcgtctttccggaaccttctccctttctggaagccactctgcactggggggctaaacatggtttcagggggggattccctcccaggggaccaaacccc

SEQ ID NO: 177965 - DNA, 1372 bp, Homo Sapiens
  misc_feature (654)..(686): n is a, c, g, or t
ggcctggcgtgggaggatgtggcagtttctgtctccttctggggttcctggtctggaggagtctcccctactagcgccatagctgcttgtttcctgcccatagccccagaactttgaatgagaggctaatctagcctggatgcacctccctcctaggctgggtgaggtcacgcagacacagaagggcaggacagaactccccatcttctggggccaattcgtctggacactgtgcggtcagcttcctttttaaagtgccagtatcggtggggcaggaagggactctcagggctgagcagagccttctccagcgcgagcaaacactctgtcccgcctcggcaggcaccttctaacattcattttctaagggctaggtgagtaaaacaacaacaacaaatgctggaaatgctctgttcccaatgccagggagttccaagaccaagaagcccaactctcaccagcgggggcagatggggagctagggaaggaaccctcccagcctggggagggcacctgcacccctcccagagagagaagcccccatcccggccccccagctgggccccagcgctgctggaaccagccggcaggtggggcagaaaagcagcacctcccctcaccagggcgaggaggcaatattgaaccgtgaactcnnnnnnnnnnnnnnnnnnnnnnnnnnnnnnnnnctacagggctaagtaaacaccagcctgctgggtttatacaaaatgagtgaaatttaaaaggggcaggagagtttgtccagggactggctggcagccagaacccaccttcaagcaagttacaaggacttgggggaaagtgctgagagcagaggctttagtagggggcagggccagactgctccccactgggaaagcacaccccttaaaggagcccttcccccttgcccagaacgggggatgcttccagaggaaggctgaggcttttctggtaaggaagccagctccggaccagtccagccacagcccacctgcctctctggcatccgccccagtctgggcagctgaccctgagggcagagaaggactttgcttgctccaaccttcctgcaggaaaaccagctgctcaggacccagccctgggcagagggcacggtcggtgctcagacctttctcagcacgggtctcagacctgagctggagctaactggaggaagaggcagcacccgttcccgccgggctgctggaccctgggcctctgactgcacagcaggcagtgaccaggagtccttgggaaggagctcagggaaggggaggtgaggggccagtgggactgtgctgggggtgagcatgtgcaaagtgcaggctgcaagcagcgggaggacaattgccggggggaggcaggggtc

SEQ ID NO: 177966 - DNA, 965 bp, Homo Sapiens
  misc_feature (753)..(837): n is a, c, g, or t
gggttgaaggcctgggcctcgccccggggggagcatttccggctgaggggttctgggtttgccggagggagttgagatgctgaggtttgggtttgggtacccgtgggaaacccccgggtttttgacggtcccggttttcttttcctaccccgggtccctcttcctttttgccctgggctaatcaggatctccggttttcttccggggggtaggctcatttattttttgccagaaagagcttttccagagcttcttcccattaagactatgtcattctccacggcttgtgttagatgtaacaatttgtaaacatagtgttgaagtcctggatacattcctgagcattccagtaatagttgttttccaagcgcttctttattgttcccatatccataggcgttttaatgatcttatagtaatcagggaggttcagcttgacggcatccacaggctgctggaaaggccatgcaaactggtgtttccatagtgtcttgagcaccactctgagcaggtattgcagttggttggtctgcctcttgggcttgttagggttggaggtctctgggggcggggggttggtgctggctgcgttggctggctggggttgggcctgggcctgtgttgtagacatttgggaagtttctagtccatcccccattactggcagatttctcaatctcgtcccagggccgctctccgcagacatgctagtgatcccatcacattcttcaccaggcactctgagacgctagnnnnnnnnnnnnnnnnnnnnnnnnnnnnnnnnnnnnnnnnnnnnnnnnnnnnnnnnnnnnnnnnnnnnnnnnnnnnnnnnnnnnnctctgccgagctcacaggccgcgctcgcccgcgggcaccgccggcagccgccgcagccgctgccgccgccactgcttcggctcctcggctgcgggagaccagaacaaacagcccagccgccgccgccg

SEQ ID NO: 177967 - DNA, 925 bp, Homo Sapiens
  misc_feature (113)..(113): n is a, c, g, or t
  misc_feature (713)..(797): n is a, c, g, or t
agagggatttcgggctgaagggggttctgggtcttgcggaaggagtcggatgcctagagtttgtggtttggtccccgtggaaaacgccaaggtttttgctgtcccctgttttnttccctccccacgtcctcttccttttgcctggactatcatgatctcggtttcttctgtgggtagctcatttattttttgcaagaagagcttttccagagcttctgccattaagactatgtcatctccaggcttgttgtagatgtaacaatttgtaaacatagtgttgaagtcctggatacattcctgagcattccagtaatagttgttttccaagcgcttctttattgttcccatatccataggcgttttaatgatcttatagtaatcagggaggctcagcttgacggcatccacaggctgctggaaaggccatgcaaactggtgtttccatagtgtcttgagcaccactctgagcaggtattgcagttggttggtctgcctcttgggcttgttagggttggaggtctctgggggcggggggttggtgctggctgcgttggctggctggggttgggcctgggcctgtgttgtagacatttgggaagtttctagtccatcccccattactggcagatttctcaatctcgtcccagggccgctctccgcagacatgctagtgatcccatcacattcttcaccaggcactctgagacgctagnnnnnnnnnnnnnnnnnnnnnnnnnnnnnnnnnnnnnnnnnnnnnnnnnnnnnnnnnnnnnnnnnnnnnnnnnnnnnnnnnnnnnctctgccgagctcacaggccgcgctcgcccgcgggcaccgccggcagccgccgcagccgctgccgccgccactgcttcggctcctcggctgcgggagaccagaacaaacagcccagccgccgccgccg

SEQ ID NO: 177968 - DNA, 938 bp, Homo Sapiens
tgccccagcgtagccaggcaccagacggcatgcagagcttgcggctccgaaagttccccattgagcagcaggacggggccttcgtgctggagggctggggccggtccttccccagcgttcgggaacttggggctgccttgcagggctgcttgctgagggccggggatgactgcttctctctgcgtcgctgttgcctgccccaaccaggagaaacctccaatctcatcatcatgcggggggctcgggccagccccaggacactcaacctcagccagctcagcttccaccgggttgaccagaaggagatcacccagctgtcccacttgggccaggcacaaggaccaacgtgtatgagggccgcctgcgagtggagggcagcggggaccctgaggagggcaagatggatgacgaggaccccctcgtgcctggcagggaccgtgggcaggagctacgagtggtgctcaaagtgctggaccctagtcaccatgacatcgccctggccttctacgagacagccagcctcatgagccaggtctcccacacgcacctggccttcgtgcatggcgtctgtgtgcgcggccctgaaaatagcatggtgacagagtacgtggagcacggacccctggatgtgtggctgcggagggagcggggccatgtgcccatggcttggaagatggtggtggcccagcagctggccagcgccctcagctacctggagaacaagaacctggttcatggtaatgtgtgtggccggaacatcctgctggcccggctgggttggcagagggcaccagccccttcatcaagctgagtgatcctggcgtggggcctgggcgccctctccagggaggagcgggtggagaggatcccctggctgggcccccggaatgcctaccaggtggggccaacagcctaagcaccgccatggacaagtgggg

SEQ ID NO: 177969 - DNA, 816 bp, Homo Sapiens
ggggcggaccgcgcggagctaagtggaatcccggttggcttggggcgcaggcttccaacttcgtactctggcctctggcgtctcggctcgtcggttgggtacccgaacccagctactgctgcttgaagagaagatggatggggactcctcgccgtcgctgcgccgccggccttccctgggcggacgtacacctttgcgaagcgtcagtgaggacccagggcccctccttggaatagctcttatttctcaagcgctgcagcgtgaagctcgctctgcgggtccgagaggcctgcgatctgaagactgaaaactgggaagagacgctctaccctgtgctcctcgccggcttcgataggagccgcaggtgcctgggattttctcaaactttgtcccaaacttcagctgtgggagtggaggaacaaacaggcctctcccagaattgtgaaagagatcgccctggtggatgaaacaaaaacaaatgcacttgacttccaccgcctgcctggcgtgtcacccggggtttaatgtatgtgtcacatttaaattcaaagtattttcttctaagggcctggacacatttcttttctccctgtatcgtgaattggaaaataccttacgatattaaaaagtatctaagataacccccctttcttccggaaagttaaaatactaaacggccttaagaccgaaattttgggaatatacgagatgattgatgcagaactgcagtgaaattatccaaatatgcaattctcccctgtttctccccaattaaaacataatttttggttgccgcaaaattccatggtcacggaa

SEQ ID NO: 177970 - DNA, 986 bp, Homo Sapiens
  misc_feature (380)..(380): n is a, c, g, or t
  misc_feature (475)..(475): n is a, c, g, or t
ctgggtggcgaattcggacgaggcttaaaggagccgcgacccctttgcagaccagagggtgacccggatgatggcggccggcgcggccctagccctggccttgtggctactaatgccaccagtggaggtgggaggggcggggcccccgccaatccaggacggtgagttcacgttcctgttgccggcggggaggaagcagtgtttctaccagtccgcgccggccaacgcaagcctcgagaccgaataccaggtgatcggaggtgctggactggacgtggacttcacgctggagagccctcaaggcgtgctgttggtcagcgagtcccgcaaggctgatggggtacacacggtggagccaacggaggccggggaactacaangctgtgctttgaccactccttcagcaccatctccgagaagctggtggttctttggactgatctttgacagccctccaggatgacgaggaggtccnaaggatgggccagaggctgttgaaccccaaggagatgctggatggtaaaatgggaggacatccaaggaagtccattggagaccatggcggaacccggcttggaaccgcaaaatccaaatgctcacgccttacggcgggccttcgaaaggcacgggaacccccaaccctggcaaaaagggcaactttggggaagcgggtcaaacttcttgggggccaacttgtgcacacctgtggccggggccttcctctccttgggggggctttgtgctctcccaaaggcttgcacaccctctctaaaacgctttttccttcccaagaaaaaagaacggtgtccacctaagccccctgccatgggagggaagaaccggtacctaggagggggcaaccaggccgggtgcactacgaaactttgggggccccctcccccatttttttacttcccggaccccatatggaacggcgttcgctcggcccctttgtttttcggcccccattaatcccccttttcggt

SEQ ID NO: 177971 - DNA, 458 bp, Homo Sapiens
  misc_feature (358)..(358): n is a, c, g, or t
tagggcggggcctcaggatgtccgaggagcccacgggcggcatcccagcaccgctgccctgtccacctggctggcagctgcttcacaggactatctgatcactttagcaaaggaggagaacaaacgaagccaacacagggcaagtctgcatgcgtgcgcgacggggcccccgcctccggctcacccccccgacccctgcctcccctccttccgagggccgccagaggctgggctgacccgaagaggagacggtgcacccaggcgccccgaggctaagagacggtggcagcaaggaggccgagaggcacagcgaccctgccccagcccttctgtgcagtcaggcggcggtgctgctccnatccctgcgggttccggcggggcgcgggggccttgctgacatcagacgggatatccgaatatctgatagcaattaaaaggcagccttgtttcgtaaaaaa

SEQ ID NO: 177972 - DNA, 939 bp, Homo Sapiens
  misc_feature (735)..(743): n is a, c, g, or t
  misc_feature (761)..(804): n is a, c, g, or t
agcagctgacttaggggtggaggagcctaggaatgcctctctccaggcccaagtcgtgctctccttccaggcctaccctactgcccgctgcgtcctgctggaggtgcaagtgcctgctgcccttgtgcagtttggtcagtctgtgggctctgtggtatatgactgcttcgaggctgccctagggagtgaggtacgaatctggtcctatactcagcccaggtacgagaaggaactcaaccacacacagcagctgcctgccctgccctggctcaacgtgtcagcagatggtgacaacgtgcatctggttctgaatgtctctgaggagcagcacttcggcctctccctgtactggaatcaggtccagggcccccccaaaccccggtggcacaaaaacctgactggaccgcggatcattaccttgaaccacacagacctgggttccctgcctctgtattcaggggtggccctctggaacctgcagtccgcttaggacgaacatctgccccctttcagggagggacccccgcgccacacccagaacctctgggcaagccccccccgaatgcgaactggttgaacccctgcagaagcctggctggctgggaacgcaccgttggcttccctggccccgccaaaaagcgcgccactggtggctgggccggggcttcccgggtggggggaaccccctgtccccagccacctgggtccccacccgccttttcctgggggaaaaannnnnnnnnggggcggaaccaagggtnnnnnnnnnnnnnnnnnnnnnnnnnnnnnnnnnnnnnnnnnnnntttaaacctccccggggtttccccgcccttaaaccggtttctctggccaaaaaaccctgccccaccgctccaaggaaactggccctttcggcggggacccggcgatttctgtttcttgggcggcatcgcccgaat

SEQ ID NO: 177973 - DNA, 329 bp, Homo Sapiens
ttgacgcctgcctatatttctgacctcatcgtttactattgtttctccctgtctcctacactcctgccaccttagctttcttttggctcataacttttgcacacatatgctactacctctacatgaagcactggtaacatgattctttgcctggttagtttataactcatccaaatcctctcaactacactatgtcacttcctcacagagctcttcccctgactcagcaatctaaattctatgtcctgttaaactttctcatgacacactgttttttttacctccaccagtagcattaagacatgcatgcattcacttaaacagtcatt

SEQ ID NO: 177974 - DNA, 656 bp, Homo Sapiens
ggcggcattccaacacgagggggaacggagtggagcaaagacgggagcccagtgagagtcgagggagaggtgacctcagcttgggctgcggtgcaggccatgggactggcaggaggtggctggggttacgctgtcttttctaacattcagcattggctcaggggccaggtcagggctcacagactgttgctataaagggctgggtggctttcttccccacagctactcagcctaatgccattgcagagcacatgtagccatggacaacacaaggggcgtatccgtgttccaggacagccatattgacaggaataggcaggaggccagatttggtcctcaggctgtaatttcttggccccttgtctagggagaggtaaacgaggggaggagagatcagtcaaggatgacgtgagggtttgctgggagcaccaggaatcctggagaaggcagtggcaagagggtgcagcaagctcagctgggcggggatcaagtctgaggacttaatgtctcctctgatctccagacccataagggacacgctgagtagacaactggggcttatgggtctggagttcagaggagagatcgggaaggcgtcccatttggagtcatccacgcagagatgcgtgaaaggctgctcaatgattttgaggctt

SEQ ID NO: 177975 - DNA, 985 bp, Homo Sapiens
  misc_feature (555)..(575): n is a, c, g, or t
  misc_feature (635)..(643): n is a, c, g, or t
  misc_feature (884)..(896): n is a, c, g, or t
tcggacgaggcctgacctcaagtggaaccaacagcagctcgatgacttgtacttgatcgccatctgccatcgccggggcatcagatccctacgcgaccttactccggagcacttgccgctgctcaggaacatcctccaccaggggcaggaggccatcctgcagcgctaccggatgaagggagaccatctgcgagtatacctgcactacctgccctcctactaccacctgcatgtgcacttcaccgccctgggcttcgaggcccccggctcaggcgtggagcgggcccacctgctggctgaggtgatcgagaacttggagtgtgaccctaggcactaccagcagcgcacgctcaccttcgccctcagggctgacgaccccctgctcaagctcttgcaggaggctcagcaaagctgaattaactcaggcagaagagcacagatgtgtgggattgggggaggagtggggacaagattttttatctccaagtgaattttctaaaaatgtattttataccggcttattcctagtattgaataaactagcgggctcactcnnnnnnnnnnnnnnnnnnnnngaagacgaaagcactaagagaggggcggcggccgccacctcagaggaagtctcccccgcnnnnnnnnnccaccaaccatgatgagacatctgacaccccaacgattcgtgtagagcacacgaagcggcgggcccccacacaaaatgaggaagggctgcgtaaataaatagaacacacggacatcccgagccgcgcgacgatataacagaaaccgagcccggcagacagggcggacaaccgcacgcgtgcacagcagggagagacagaacctggcggtggaaagcagcacacaaccaaacaaatgagctnnnnnnnnnnnnncgaaacaaccaaatcgtggggcgcaaacactcacctcacgagcagagaatgacatcagacagccgatcgcagcaggacgacgccaatac

SEQ ID NO: 177976 - DNA, 924 bp, Homo Sapiens
  misc_feature (90)..(108): n is a, c, g, or t
  misc_feature (355)..(386): n is a, c, g, or t
cacctttcggggaaggcctttcccgtcccttggggccccctgccctttttggctgctgtttcctgttcccgggagcccctttgcagggtnnnnnnnnnnnnnnnnnnncttttaaaagaattttagagcagtggctgcaggccttgggcccggagggaaggccactgccggccacttggggcagacacagacacctcaaaggatctgtcacggaaggcgtcctttttccttgtagctaacgttaggcctgagtagctcccctccatccttgtagacgctccagtccctactactgtgacggcatttccatccctcccctgcccgggaagggaccttgcagggacctctccctccnnnnnnnnnnnnnnnnnnnnnnnnnnnnnnnntaaatgaggaaacgtgttgcagcacaggcagttttcttctccttctgctcccctgtttctcatacccccaaactcagatgctggagctcaggcccgccgtgtgtgcacccaggcaggagcgggcgctgtccaggctgggccgcccccttggctctccctcctgttccaggggagccataggagggaaagcaggtggcccgggggggatatgggggccccagccctgtcccaaagctccctgctcggctgcccctcgcccgcctttatataaattctctgaatcacctttgcatagaaaataaaagtgtttgctttgtaagaaaagtctggaaagtagcagaatcatctcaaggtgtcaaaggagccttcagtcatcgtctggggggcaggacaggcagaggggttggtccacttaggtgttgcctgtgggacccgggccttcctaggagggggccagggactgcggcaaggtaggggacagcgcgatgtttgagggcagagatgtgatttggggtggaggagccacgttctccggagg

SEQ ID NO: 177977 - DNA, 874 bp, Homo Sapiens
gggggggtatctcgaggtgccgggttgcaggcgctcaggagcgctagggtttgaggcctgctttctgctcgcgccagcagagcactacctgaggcagcgaggcgcagcgagcctagcctccccgcgccctgggcagtgtggccatggagaatcaggtgttgacgccgcatgtctactgggctcagcgacaccgcgagctatatctgcgcgtggagctgagtgacgtacagaaccctgccatcagcatcactgaaaacgtgctgcatttcaaagctcaaggacatggtgccaaaggagacaatgtctatgaatttcacctggagttcttagaccttgtgaaaccagagcctgtttacaaactgacccagaggcaggtaaacattacagtacagaagaaagtgagtcagtggtgggagagactcacaaagcaggaaaagcgaccactgtttttggctcctgactttgatcgttggctggatgaatctgatgcggaaatggagctcagagctaaggaagaagagcgcctaaataaactccgactggaaagcgaaggctctcctgaaactcttacaaacttaaggaaaggatacctgtttatgtataatcctgtgcaattcctgggattctccctggatctttgtcaacctgactgtgcgattctgtatcttgggaaaagagtccttttatgacacattcccatactgtggctgacatgatgtatttctgccagatgctggcagttgtggaaactatcaatgcagcaattggagtcactacgtcaccggtggctgccttctctgatccaagcttctgggaagaaattttaattttggttatcatcctttgggcacccatgggaaggaaatgccggaac

SEQ ID NO: 177978 - DNA, 914 bp, Homo Sapiens
cacgagggatagctccccgttggtgctctgcaggagctggtggtgcagaaaggctgtcggttgccggagtacacagtgacccaggagtctgggccagcccaccgcaaagaattcaccatgacctgtcgagtggagcgtttcattgagattgggagtggcacttccaaaaaattggcaaagcggaatgcggcggccaaaatgctgcttcgagtgcacacggtgcctctggatgcccgggatggcaatgaggtggagcctgatgatgaccacttctccattggtgtgggctcccgcctggatggtcttcgaaaccggggcccaggttgcacctgggattctctacgaaattcagtaggagagaagatcctgtccctccgcagttgctccctgggctccctgggtgccctgggccctgcctgctgccgtgtcctcagtgagctctctgaggagcaggcctttcacgtcagctacctggatattgaggagctgagcctgagtggactctgccagtgcctggtggaactgtccacccagccggccactgtgtgtcatggctctgcaaccaccagggaggcagcccgtggtgaggctgcccgccgtgccctgcagtacctcaagatcatggcaggcagcaagtgaagccccagctggactcatggatgtgcaccctttgctccctgctctttctgcctctgggctcatgtatctgcgcagctctggtaccctctgtgggtgccatctctacctctgacacagactgcctgccttgaagctgagaaggcacagggcaaggagccaaggaccacagagcctcagccagcccaggatccgtcctcattttattggtgatgatgaatgggaatgaaatcagggggctgtctactagagcctggaataaatatgctgctttgtgg

SEQ ID NO: 177979 - DNA, 984 bp, Homo Sapiens
tggacacctcggcccaagacttccgggtgctgtacgtctttgtggacatccggatagacactacacacctcctggactctctccgcctcacctttcccccagccactgcccttgccctggtcagcaccattcagtttgtgtcgaccttgcaggcagccgcccaggagctgaaagccgagtatcgtgtgagtgtcccacagtgcaagcccctgtcccctggagagatcctgggctgcacatccccccgactgtccaaagaggtggaggccgttgtgtatcttggagatggccgcttccatctggagtctgtcatgattgccaaccccaatgtccccgcttaccggtatgacccatatagcaaagtcctatccagagaacactatgaccaccagcgcatgcaggctgctcgccaagaagccatagccactgcccgctcagctaagtcctggggccttattctgggcactttgggccgccagggcagtcctaagatcctggagcacctggaatctcgactccgagccttgggcctttcctttgtgaggctgctgctctctgagatcttccccagcaagcttagcctacttcccgaggtggatgtgtgggtgcaggtggcatgtccacgtctctccattgactggggcacagccttccccaagccgctgctgacaccctattgaggcggccggggcttctaagggaaatttccgggcagcagcccctacccgatgggaattctacggctgggcagcttccttgggggccctgggaacggtgaaaccacggggccaggaacagccggtcccccacgcccccggggacctggacccccaaaccggggggaaaagggggcacaggaaggcgggtccgacaccgattcccacactttctcggtccgtgggagtttgggcgaaagaaaattgccaattctggccagggcgaacccaaaataataggggggggccgctcccccctggggagttt

SEQ ID NO: 177980 - DNA, 969 bp, Homo Sapiens
  misc_feature (128)..(128): n is a, c, g, or t
  misc_feature (132)..(197): n is a, c, g, or t
  misc_feature (951)..(951): n is a, c, g, or t
gtaagtttgggaattaccagggagcccggccccaccaatgccctgccccaaatttttttgccattttagttaggagatgggggtttcactgttgttgccccaggctggtcctcgaacttcctgaactncagnnnnnnnnnnnnnnnnnnnnnnnnnnnnnnnnnnnnnnnnnnnnnnnnnnnnnnnnnnnnnnnnnnggctctgtttcctaagacagggcccccatcacctgcccgggctacttgctgtgtctctgaacagcttggctgtcgctaagctctagcatgcagtgaaatctttctcctagaggccccagtcagcatgtcccattttagtctcttgggcacggaaaacacctcttaagcctgtattaatccagaacaacacagtcatcatcctgcttatcggcagcacatggagccagggtggggtggagtgggatgaggttggggaggttgtatcgcgcaatggttctgagccaggttctagacaagaggctcaaactccaggactacctcttactacctaagcggggtacttaacttcttggtgcctcattttgctcatttgtaagggccacattctagggttgctgcgaggcttccgtgagagaacgcaggtaaagtcccaaaattaatgctgtctgttacttacggttataaggcagggccctgaagcttctcaaaccttctgggcaagcaagggcatcttttcagagcttggagtttgctccagggtgagcagtttaaatgtgacttttataggaagtagatattttgaggagtagaatataaaattcacaggactatttaagatacaatcttaagactccaaagaactgttcagctggctacaccccatgagtacatatttattcatccttctctgctgttgggccacaagaaaccctattggtcaggtctgagaggccctcgtgcggaattcgccacncaggctcgctacttagac

SEQ ID NO: 177981 - DNA, 890 bp, Homo Sapiens
  misc_feature (820)..(820): n is a, c, g, or t
  misc_feature (874)..(874): n is a, c, g, or t
cgacgagggcgggcggacgatgaggacagcctgacttcagaggattccttcttctccgccaccgagctctttgagtccctgcagactggagattacccgatcccactctccagacccgccgctgcctatgaggaggccctgcagctggtgaaggaggggagagtgccttgccggaccctcaggacggagctgctgggctgctacagtgaccaggactttctggccaagctgcactgtgtgcggcaggccttcgaggggcttctggaagacaagagtaaccagcttttcttcgggaaagtgggccgacagatggtgacaggcctgatgaccaaggctgagaagagccccaaaggcttcctggagagctacgaggagatgctgagctatgccctgcggcccgagacctgggccacaacacggctggagctggagggccgaggggtggtatgcatgagcttcttcgacatcgtgctggacttcatcctcatggacgccttcgaggacctggagaaccctccggcctcggtgctcgccgtcctgcggaaccgctggctgtcagacagcttcaaggagacggccttggccactgcttgctggtcggtcctgaaagccaagaggaggctgctgatggtgcctgatggcttcatctcccatttctactccgtatcggagcatgtgagccctgtcctagccttcggcttccttggaccaaagcctcagcttgctgaagtctgtgctttcttcaagcaccagattgtgcagtacctggaggggacatgttcgacctggacaatggtgcgcctacaccgtcactgccccngcggctgggcagaacgaacatccctggcaacctggtccccgggcgcccgccagncgaaggaaaatttgct

SEQ ID NO: 177982 - DNA, 999 bp, Homo Sapiens
  misc_feature (16)..(16): n is a, c, g, or t
  misc_feature (44)..(44): n is a, c, g, or t
  misc_feature (52)..(52): n is a, c, g, or t
  misc_feature (60)..(60): n is a, c, g, or t
  misc_feature (85)..(85): n is a, c, g, or t
  misc_feature (88)..(88): n is a, c, g, or t
  misc_feature (92)..(260): n is a, c, g, or t
  misc_feature (262)..(263): n is a, c, g, or t
  misc_feature (266)..(289): n is a, c, g, or t
  misc_feature (291)..(340): n is a, c, g, or t
  misc_feature (569)..(579): n is a, c, g, or t
caccaaaacaacccancaccaccaaaaacacacacaacaccccnaaacccancccaacanaaaccaaaaacacaaacacaccacnacnaacnnnnnnnnnnnnnnnnnnnnnnnnnnnnnnnnnnnnnnnnnnnnnnnnnnnnnnnnnnnnnnnnnnnnnnnnnnnnnnnnnnnnnnnnnnnnnnnnnnnnnnnnnnnnnnnnnnnnnnnnnnnnnnnnnnnnnnnnnnnnnnnnnnnnnnnnnnnnnnnnnnnnnnnnnanncannnnnnnnnnnnnnnnnnnnnnnnannnnnnnnnnnnnnnnnnnnnnnnnnnnnnnnnnnnnnnnnnnnnnnnnnccccccaccaaaaaagagaaaacggggagaggagcctggcaggccagactctgatccccatggtccacacagggaaacccccaacagcggcctcggcccaccgcggcagagccgaggggctggcaggcctggccacctcccattgcccgatcagcctgctttagggtgtcatctggcccctcttcacaactgacaactgtggatgggggtgaattttaaaaaaaaggcnnnnnnnnnnnttcaggagggtgagcggtgagttcacggggccacgagacaccacagctgagtggggaaagggctatatgtacaggaggggcagggcttggggcgggcaggggagcctgggcccctgggggacatcttcaataaataaataaatagctacaataataaataagggtgacgggctaagtcaggagcaggggtcttgtgcccgtggctggtaggggccgggtcaggcccgggtagttgggggaaggtggggaagacagggaagaggggaaagggagtgggatggctctcagcaggcgcagtcctggtgcggtggcacctgctggtcactgagctgtgggccctgcttggcgcctgtgaccgcagggtccgccgtgtccaacgactcggacatcttctcgcagatgacatccaccctcgtcgga

SEQ ID NO: 177983 - DNA, 966 bp, Homo Sapiens
gggcctttagcccgttcccttcccctaaggagggaggcgtgccgccccccgggccaggttgggggccagacaaccatcggaggtcgcgccaagggaaccttgggggggccccccacgttcggagggcccagccttggcccaggcccggcccggggcttcttgtgcaggggggttggcgcccaagttcgggcccgctgctttcaggtttcccttgggtgtggatggggaccttcgctgaacgcccgggggcacgtcgcggcttgtagcccagtttttccaggcgcgcgctcagggccaggtagcgttgcgtcagctcgcgcagcttcctctcgtccacggagccgtccagagacttggtggaggtctgctcgatcttctcggggatgttggccaccgtgaagccgtagagccgcgtcacgcccgggaacacgtaggccaggatgcggcggtccagctggaaggcgatctcgcccaccacgcgcgcgtccttctcggcgcccgcgaagctctggatctcattgaggtagtagctcctcctggtcctgtccccggtgggcaggctgctctccgagaaacacaccttcttaggccggaccatctccctgggctccagcagggtcttgtccaccagtgaagtcttgcaaggggctcaggagcggggacagcttcctgtcggtgcctcggtggctatgtggctctgggggactgaggaaggccttgaagggtgcctgggagggggctgcacagcccggggaggtgtcgtcctcgctggacaggggggcatgtgagcacagcaggtcctccagggaggatgtctgcagttgggagggcgtgtcggcaacactcgtgaaccttccgaaatctggaactcagtgttgtttcttggctccgagggtcttgttttatcagcagccgggatgcaacagatgggtcatctcatcctcatgggcagggaccctcgtgccg

SEQ ID NO: 177984 - DNA, 442 bp, Homo Sapiens
  misc_feature (66)..(66): n is a, c, g, or t
ctggcccgcgaagccggcagcacactttcattcatcacagcaaacactatcgtcgtctcccacggncggaaccaacaaaagcaagtctctccaagtcaaaaataggttttggattcttggtggcggcagtatccgctgaaaaaatagactgaacttctgaaattatcttagtagcaaaacaattacaagaaaaaagttgcaacttcagtgctatgactggaaaagggccttttgccggcggcccctgttaccggcggcccctgtgcgcctgggagctctccgggcttgaggaagccgcccacgtgccctgatggagaaaatgggactccaacaggaggccgtgtcctcacacctcagactgcgctcacagctcgggaggatcaagttacaataaacagtccattaacttcttgctttcaggtttccctggagtcaggcatct

SEQ ID NO: 177985 - DNA, 700 bp, Homo Sapiens
gactcagaagacctctcctggaaggagcgtgaaagaagaggcccagaacctcatcaggcacttcttccatggccgggcccggtgcgagagcgaagctgactggcatggcctgtgtggcccccagagatgaccaactgctggctgggcagggcccgcgtcctcccccagattctagcatgggtcatcctgggcctcacctgctgatgccagggccatcgtcttttctcagtccttctcctttccaaccatacttggctttggggatgaccccagacaccccctgaatccaggtcagaggtcagcccacctttctttctgcttgcaaagcctatagacccttctcagagcggtcctcatggctgggttttctgggacacatgtcgaggacagaaggtggagggtggtggagctgctgctggaagaaggggaaggaagagtggcccctccccgagttctaagtcaggatgaggcccacctgtccaaggtatcggaacctacccaggggaccctcagatcctccacccactcccccatccattacgatgccagcttccagccttgcccaggtcagagctgtggcagaggagaggcagccaggccctgttcctgctcagctcctgctcaggaaagccaggcctgacagatgtttgggagaggaataaagttgtgtttgttgtgggggcatgcaggccgtgcacac

SEQ ID NO: 177986 - DNA, 1027 bp, Homo Sapiens
  misc_feature (621)..(621): n is a, c, g, or t
  misc_feature (768)..(778): n is a, c, g, or t
  misc_feature (972)..(972): n is a, c, g, or t
  misc_feature (995)..(995): n is a, c, g, or t
  misc_feature (1014)..(1014): n is a, c, g, or t
ccacctacagccagctctgggcgtcacttacgcctgccaccacccagcaggaaatgcgggctttccctgccttcctgggcactgaggcctccagctcaggcaatggctcctggctggagctgatgcccctgactgctgtgagcgtgcacctgctgacaggtaatgggacagaggtgccgctctcaggccccattcacctgtccctgcccgtgtcctccgagactcgtgccctcaccgtgggcaccaacattccaacctggagatttgacccccaagagtgggctgtgggtgcgcaatggcactggtgtaatcctgaacgacggccggcagctctactggaccttcgactccccccagctggggtattgggtggcctccatggccctcaccacggctgggctggtccccatcacctcgggcatccaggacatcggcacttacctcaccaacttcttgctcaccatcctgacacccctgggcctgctggcgcttatcctgctgtgtctgcgcatctactacgtgccggaagccgctgccctgaagcccacgcaacagaaccccaaactgccacaccacggcgaccatctgacggaaacaaacccaaaaccgggccaccctcgntatgacccacacctcccaccctcatctgggggaagggaaaccctctgaaaaacccacccccgtccgggggaacccccaaggctcccaccttcagaggccccccttccccgtcggaccttttagcaaaattccgagggaatttggggnnnnnnnnnnngggattgaaatactctccccgcacaaacccaccggtctcttaactgacaatctccagggccaacaacaagacctttcgaggactccccacagcgttgcccaaaataccctcagagcccacagtgtcgcgggaacacccatcacacgaagaggacccaccgtcattccttgggatatcccccatcccaccacagnaaaacatctactcctcaatcgtnccccccccgttagtgcctngccatcgacctcc

SEQ ID NO: 177987 - DNA, 772 bp, Homo Sapiens
  misc_feature (437)..(692): n is a, c, g, or t
accgttccttcagagttgatacagcgaagctccagcacagactgaaaaggacttctcagagaagcattcgaccctggtgaatggtgcctataagaccctcctggcccccctgagcagaggactgtaccttctaaagctccatggaatagagattcctgaaaggacagattatgaaatggacaggcaattcctcatagaaataatggaaatcaatgaaaaactcgcagaagctgaaagtgaagctgccatgaaagagattgaatccattgtcaaagctaaacagaaagaatttactgacaatgtgagcagtgcttttgaacaagatgactttgaagaagccaaggaaattttgacaaagatgagatacttttcaaatatagaagaaaagatcaagttaaagaagattcccctttaattgtggatagtttaaagtttannnnnnnnnnnnnnnnnnnnnnnnnnnnnnnnnnnnnnnnnnnnnnnnnnnnnnnnnnnnnnnnnnnnnnnnnnnnnnnnnnnnnnnnnnnnnnnnnnnnnnnnnnnnnnnnnnnnnnnnnnnnnnnnnnnnnnnnnnnnnnnnnnnnnnnnnnnnnnnnnnnnnnnnnnnnnnnnnnnnnnnnnnnnnnnnnnnnnnnnnnnnnnnnnnnnnnnnnnnnnnnnnnnnnnnnnnnnnnnnnnnnnnnnnnnnnnnnactgccactcccagccttggggcaacagaaggggagaacttaaatccttggaaaaaaataaattaatggggaaaattttc

SEQ ID NO: 177988 - DNA, 1031 bp, Homo Sapiens
  misc_feature (1)..(1): n is a, c, g, or t
  misc_feature (389)..(433): n is a, c, g, or t
ngcgcggcctacatgattgttgtacgtaggcctaattcatgatgttcccctcccccgttcctcggctacagatctttaaccgcccgttcgctccctagctgcccgcgtttcccgccccattgtgacttcatccaacgctttcttcccatcttatatctcccttttctcgctttatccatcgctcctaactgtcctactctctctccacaatacagctcactcacccacttctataactcaactcgctaatactttacccctctccactacacagcccacaatcacatccgcaactccctcccccttctcaccgtgtcttctcacacacccccatcctctccaattgtatccaccagctttctataaaaccgcgcttccctacctgctcnnnnnnnnnnnnnnnnnnnnnnnnnnnnnnnnnnnnnnnnnnnnnttcatcctgctccctctccccctcttcccacttatccgcactattacgcctcattctccccctaggtctatctctccctctgctgttacctcccctctatccctcactcatcttataccacacattctctacatcctctcccttaatcgccaccccactcacttacctcctctttctgtcgaccaatctcatctcacctcatctctcctgtctccttaatcagcccacgcccccactatttatctaccatcgttcgaacctcacctcttttctactacaggttccaccaacaagtttccaccactttttctcgcttcgcccctcttacatacaccccctctacaactttgcatacgcagcacagccctccccctcttacttgcttccgcccctcgcacagatccctgtctccaatcggcacgtgaccgtaccccgcctaacatgtatatcaccctcccactatctatatttcttccatgtttccctccgctcactctctcgcctccgctctacccgctgtgagggtctatcacatatgcgtgtggccgcccacagcgttttttatacctcgcccctccagctgtataccgcgatcctc

SEQ ID NO: 177989 - DNA, 568 bp, Homo Sapiens
  misc_feature (164)..(164): n is a, c, g, or t
  misc_feature (167)..(167): n is a, c, g, or t
  misc_feature (200)..(202): n is a, c, g, or t
caagcatttgagacagatgctcatttctaatgcaaagatggaagaaggtattgataggcatgtatggcctcctttatcaggacttcctcctcttagtaaaatgtctctcaacaaggacctgcattttaacacttccattgctaacttggtcattcttcgtgggnaanaaaagtaaaaaatgcagatgtggagggatttannnaagatccagctctgtatacttcctggttgaagcctgttaatgctttcaacgtgtggaaaacccagcgggcctttagcaaatatgagaagtctgcagtgttggtcagcaacagccagttcttagtaaaaccacttgatatgattgttgggaaggcatggaatatgtttgcttcaaaagcctacattcatcagtacacaaaatttggaatcgaagaagaggactttttagacagtttcacgtcattagagcaggttgttgccagttactgtaatctctgatcttgaacaatgggaaaagtataccttaaggcatttctggactaaaatattttcaatactattttctctgtaaagttttcaaagttct

SEQ ID NO: 177990 - DNA, 912 bp, Homo Sapiens
  misc_feature (47)..(47): n is a, c, g, or t
  misc_feature (134)..(134): n is a, c, g, or t
  misc_feature (147)..(147): n is a, c, g, or t
caaggaattcccccttccctaaaattggaaaaaccgcaaaagccacnccagcgatccattgtcaaagggcagtcatgtgaagaaaagaaacaaacaaaccaagtatcttgccacacccccaaatttacagacancagggcgcattcncctcatgaactccctaggggacctgcgggccccagggctgctgtcgctcagtcaaaggtgatccggaagctgcgctcctgctccttgcgccggccctcgcacaccttggtcacctcctccaccttcctttgcagcagggccgagttctggtcgatccactgcagtgagtccatgtgcgcattgaggatcttgcagatctgctgcagtgggtcactggtgtcggcgggggccccggacgtgttcaggtgctcgatgatgtccttgagatccggggccatgcgcttgagctgtgcgtcgatgttctcagccagcttgtaggttttctcacgctcctcatccgcgtgctgcaggtagatggtcccgctctgctccttgaccaactcctccagtgggctcagcaggtcttccagctccttctgctgggacaggatgaagtcgagctcctggtccagcctcttctggtccagcttcaccttctccacctcgcggtgcaggctggtgatcttttctccattctcgatcagcgtgcggtcccaggcgttgacctgggtggcctgctggaggaagtgccgctcctggtcctctagctccaggctccatttgttgatcaggctctccagctgcgcgtaggtcatggcggagctggcagccgcccctgcagctgcgccagggccaggtggagcggtcacggcagctgctgtattgctggggatcccggctggcgccagtggttttaaattcaaggcaaagccggtggtgctgccc

SEQ ID NO: 177991 - DNA, 931 bp, Homo Sapiens
  misc_feature (668)..(784): n is a, c, g, or t
cggcgcaggcagctgtgagcttttctccatcagccgtctgagaagagcagtgaggccagctgcttcctgtccttcagaacacttctctgtgctcagtgggagccaggaagcctcaggcttcacgactgaatgcacccaatatccgacctggctgcgtgtttctggctgggctgccgtgtgcacagcaagttaactagaggggctgtgggccatggaactgtcagcgttattctcagaaggcggccgtggcatgggcagggtatagtgaggagtggaaggagacgtgtgcctggtaatatggggcggaatttccactcagctccatttgctggggatttaaagagaacccttgtgctacgccaggcagttaccgagccgaagggagatgatgggccttcgcccctcagtgggatggcagctgagggggccctgcatttgaccgtcgagactgcagcagcgcctttcctgtctgtggtttaagtctttgcagtcaagtactgatgcatccaagccaggcccatgcctggtgtctccctgactgcagaggagccccagggcaaggacagctcagctgctggcagcctgcctggcccatagacatcccccaagtagtctcaggcctctgacatgtccctgaggggcccctaagaaagaaagtggaggggacnnnnnnnnnnnnnnnnnnnnnnnnnnnnnnnnnnnnnnnnnnnnnnnnnnnnnnnnnnnnnnnnnnnnnnnnnnnnnnnnnnnnnnnnnnnnnnnnnnnnnnnnnnnnnnnnnnnnnccaacaaacaaaccaacaaaaacagaacattccggggcacggtgggctcatgcccggtagtcccagccactttggggaaggccgaggcctggtgggattcacaagggcccggggagaattgaaaaacatcccggggctaaacacaag

SEQ ID NO: 177992 - DNA, 994 bp, Homo Sapiens
ccgcacaccgattaatagtggcgaactggggggggaaaaaaccgggcgaggaattgggcggaacaagtgtggtaccgcctaccgtctcgcggggaataatggcggttttccctgggaacgcgcgctggagtatgtaccggcgagaaggcttctcatcgagcagacggggtattatcgcgaaacaaagtcccttggggggatatttcacccggcgttcggatttaaaccggggccatagtgagccaatttgttcgcccaaccgtgttcggcaggggccaaattctaagcgcacggccgacattggacccatgggggcgtgcccccccgcccctccaaactggggattccccggggggagggtcccagccccccagcaccggccatttggggggacccccaggaggccatgctgccccagtcagggaccctcagttgaccctttgggggtggacccccagcccctgcaggtggggagggggcccacgccctgatccatggggaaagttccgatggtggggtcccggtcagtgggccctcagcctccgatcccctggacacccggccccggccttctcagatcctgggagggggtcacctgccaagcccagcaccaatggcacaacagcagccggggattcgacacggagcccgacgagttctctgactttgaccgactccgcacggcactgccgacctccgggagcagcgcaggagagctggagctgctggcaggagaggtgccggcccgaagccctggggcgtttgacatgagtggggtcaggggatctctggctgaggctgtgggcagccccccacctgcagccacaccaactcccacgccccccacccggaagacgccggagtcattcctggggcccaatgcagccctcgtcgacctggactcgctggtgagccggccgggccccacgccgcctggagccaaggcctccaaccccttcctgccaggcggaggcccagccactggcccttccgt

SEQ ID NO: 177993 - DNA, 483 bp, Homo Sapiens
tgctcaggggtgcgtggacacctctgctgtggtttgctgctgggggcgatgggagcgcctctccgtcctgtgccctggtccaggatgctgacagcagtgagaggcctgccgtgaggtttggtcttgtcagacctgtagcctggacctcgccgggggaccagggagtgcacgtctgtagatctgtacatatctgggcctttggaggccacgtgtggcatgggaggggctacctggtccctttcacagcccaggacacgcctggatgagaaagcctgaggtgcctggcatgcccaccggtgccactctgcagcctccacccctggcctgagtccccctccatccgtcttggtggacacctgtgtggctctcacctgcgttttgagtctgttcttccaggagtaataaattctggacatcatcactggactggcttacaacttttctttctcatttgaaactttgtttccactttagaaaataata

SEQ ID NO: 177994 - DNA, 993 bp, Homo Sapiens
  misc_feature (800)..(822): n is a, c, g, or t
cggagctcgtggccgcgcctgctcccgccgggggctccttgctcggccgggccgcggccatgggagaggccgaggtgggcggcgggggcgccgcaggcgacaagggcccgggggaggcggccaccagcccggcggaggagacagtggtgtggagccccgaggtggaggtgtgcctcttccacgccatgctgggccacaagcccgtcggtgtgaaccgacacttccacatgatttgtattcgggacaagttcagccagaacatcgggcggcaggtcccatccaaggtcatctggggaccatctgagcaccatgtacgacatgcaggcgctgcatgagtctgagattcttccattcccgaatccagagaggaacttcgtccttccagaagagatcattcaggaggtccgagaaggaaaagtgatggatagaagaggagatgaaagaggaaaatgaaggaagacgtggaccccccacaatggggctgacgatgttttttcatcttcagggagtttggggaaagcatcagaaaaatccagcaaagacaaagagaagaactcctcatacttggggtgcaaagaaggcgcagacaagcggaagcgcagccgggtcaccgacaaagtcctgaccgcaatcagcaaccctttcagtcccagtgctgccaagcggcgccgcacgtaaaccctcagccctggtggcggcatagatgcgggcgacgcactgtggtcgctgaaggggtttggctgggttcttgaatccctcctcccttgttctctgttgattccattttcttgaccttgaannnnnnnnnnnnnnnnnnnnnnnttgttttcttattggtaatccttggctcctttattcccggataaattcttgttctttcttcaccttactctccctggctgtccgacacacctgtgtgttcctaatctctcgttattccgcgcgccattatatcacactctctccatccactctttttatgctaccttcgtc

SEQ ID NO: 177995 - DNA, 833 bp, Homo Sapiens
  misc_feature (688)..(688): n is a, c, g, or t
gtgggcggcgggggcgccgcaggcgacaagggcccgggggaggcggccaccagcccggcggaggagacagtggtgtggagccccgaggtggaggtgtgcctcttccacgccatgctgggccacaatgcccgtcggtgtgaaccgacacttccacattgatttgtattcgggacaagttcagccagaacatcgggcggcaggtcccattccaaggtcatctgggaccatctgagcaccatgtacgacatgcaggcgctgcatgagtctgagattcttccattcccgaatccagagaggaacttcgtccttccagaagagatcattcaggaggtccgagaaggaaacagtgatgatagaagaggagcatgaaacgaggagatgcacaggaagacgtggacccccacaatggggctgacgatgtcttttcatcttcagggcagcttcggggaaagcatcagaaaaatccagcaaagacaaagagaagaactcctcagacttggggtgcaaagaaggcgcagacaagcggaagcgcagccgggtcaccgacaaagtcctgaccgcaaacagcaacccttccagtcccagtgctgccaagcggcgcccgcacgtagaccctcagccctggtggcggcagagaagcgggcgaggcactgtggtcgctgacggggtaggctgcgtctgagtgccnacccccaggcccaggggataccatcccagtgccatgagcccacacttgcccggcctcaggctctccgggtgaacgtggccgccagccgggaaacggggtgtgccacgtggacccatgtgggaccctgatggccctgcaaagacca

SEQ ID NO: 177996 - DNA, 463 bp, Homo Sapiens
  misc_feature (18)..(18): n is a, c, g, or t
  misc_feature (337)..(337): n is a, c, g, or t
  misc_feature (385)..(385): n is a, c, g, or t
  misc_feature (417)..(417): n is a, c, g, or t
gcaggcgaccgcagtggngcgggggtgctgagccgcctggccctggagcaggagcgtattctgaaccccctgctagaccgtgtcaggaccgccgaccaccaccagctgcgctcactgactggcctcatccgaaacctgtctcggaacgctaggaacaaggacgagatgtccacgaaggtggtggagccacctgattcgagaagctgccaggcaggttggggtgagaagtcgcccccagccgaggtgctggttcaacattcatagctgtgctcaacaacctgggttggttggccagccccattcgcttgcccgagacctgctgtattttgacggactncgaaagctcatctttcatcaagaagaagcgggacagccccgacagttnagaagttcttcccggggcagcattccagcttnttgggcaaacttttgggaattacaacaagtttcaacttgatttttt

SEQ ID NO: 177997 - DNA, 811 bp, Homo Sapiens
aggtagaatgttgtaaaacttttaatttacccatcatatttaacatttccaagactattttcctgcgccccatctgccctcagagagaatgatccccaccagtgatgaggggtcagcactctgaaagccagttgacgccagacaagctgctggaacagctggggcacagccccgcctctcctccagcccctcgggtcccatgaggccaaacaatgaggacagaggggctgaggggtgtgtccagggcccagtcccacctcagcaggaaggtggcgtcagcactcgcagtcccagcctcacgccgcatcgcagtcccaggggatcttcacacagggagggtgagctggttaagaaggcgggtgatcctccccccggatgcttcgatacttagccatgtcttccggaaatactttagaaagttcttgaatcaacaggcttttaaatttcttcatggtgtcgatcttgcctttaacttgctcatttttagctagagccctctccaggcactctttggtgtagagctggggatttcgaccttgatctatatattcaaaaacttctaacggtacagtaatatcatgaagctgctgtctgcacttgtcaatatcctgtaagccagtaacaataaaattcagcttttggttgagcccggcctggctgctgggctggaagtcactgacgatgatgccgagctgccgaatgttctccacgaacttctccaggtgctcctctaggtggtcaaacttctccgccatcgcctcggcccgtcccccacccacacagcctcaaccagcagcgccgcaggcgtccc

SEQ ID NO: 177998 - DNA, 913 bp, Homo Sapiens
ccatccaggactccctgactcgatggcaccgcatgcgtggggagaccaccctgtggaaccctggctgtgaccatgcaggtattgccacccaggtggtggtggagaagaagctatggcgtgagcagggactgagccggcaccagctgggccgcgacgcctttctacaggaagtctggaagtggaaggaggagaaaggtgaccggatttaccaccagttgaagaagcttggcagctccttggactgggatcgagcctgtttcaccatggaccctaaactctcagcagctgtgacagaggcctttgtccggcttcacgaggaaggcatcatctatcgcagtacccgccttgttaactggtcctgcaccctcaactccgccatctctgacattgaggtggataagaaggagctgacaggtcgcaccctgctctccgtgcctggctacaaggagaaggtggagttcggggtcctcgtgtccttttgcctataaaggtccaaggctcagcacctgaaggggaagaacgtgatccacccattcctgtctcggagccttcccattgtcttcgatgaatttgtggacatggactttggcacaggtgctgtgaagatcacccccgcacatgaccaaaatgactatgaagttgggcagcggcacgggctggaggccatcagcatcatgggactcccggggggccctcatcaatgtgcctccgcctttcctgggcctgcccaggtttgaggccaggaaagcggtgctggtggcgctgaaggagcggggactgtttcgtgggcattgaggacaaccccatgggggtgccacttttcaaccgggtcaaggaacggggtaaagcctctgtctgcaggccgcagtgggtaccgttcgtcctgcggggaagatgggctcctcgccttgcc

SEQ ID NO: 177999 - DNA, 1086 bp, Homo Sapiens
  misc_feature (394)..(394): n is a, c, g, or t
  misc_feature (961)..(973): n is a, c, g, or t
acagctccatggaacggcccggccatcatcacccaggtgaccaaccccaaggaggacgagggccggttgccgggcgcgggcgagaaagcctcccagtgcaacgtcagcttaaagaagcagaggagccgcagcatccttagctccttcttctgctgcttccgtgattacaatgtggaggcccctccacccagcagccccagtgtgcttccgccactggtggaggagaatggtgggcttcagaagccaccagctaagtaccttcttccagaggtgacggtgcttgactatgggaaagaaatgtgtgggtcattgatttagatgaaacattgggtgcacagttcgtttaagcctatttagtaatgcttgattttattgtttcccgttgaaatcgatnggaactattacatcaggtgtatgtgctgaagcggccacatgtggacgagttcctccagaggatggggcagctttttgaatgtgtgctctttactgccagcttggccaagtatgcagaccctgtggctgacctcctagaccgctggggtgtgttccgggcccggctcttcagagaatcatgtgtttttcatcgtgggaactacgtgaaggacctgagtcgccttgggcgggagctgagcaaagtgatcattgttgacaattcccctgcctcatacatcttccatcctgagaatgcagtgcctgtgcagtcctggttcgatgacatgacggacacggagctgctggacctcatccccttctttgagggcctgagccgggaggacgacgtgtacagcatgctgcacagactctgcaataggtagccctggcctctgcctgcctcccgcctgtgcactctggaacctctggcctcaaggggacctgcctgtcctcagctccctgagagctgaaagtgaggatactccgtgctccaggccacagggctgaatgtggcccatgccctacctgnnnnnnnnnnnnnaagaacacaaacacactatctttaaaaagaactcctttaaagaaattttccttaaaggggaaatgccatttcttaccggggcttttgccctttcccttaaaatacacatcccc

SEQ ID NO: 178000 - DNA, 287 bp, Homo Sapiens
  misc_feature (23)..(23): n is a, c, g, or t
  misc_feature (38)..(38): n is a, c, g, or t
  misc_feature (59)..(59): n is a, c, g, or t
  misc_feature (97)..(97): n is a, c, g, or t
  misc_feature (105)..(105): n is a, c, g, or t
  misc_feature (112)..(112): n is a, c, g, or t
ctggccactgggctgggctggantctggctggtccaanacagattctgcctggtccaanacagattctgcctgagcctccttatttattttctttanagtggcanctcaggntggcccagccagggcaggcagaagctagggcctggggggtggggcctccttcagccccctcctcctgggggatgctccccaggttagggtgctggtgtgaggggaaagggtggggtgttctttgtgtaaaatagaaacatggttttgtacagaaataaacagccttgtatagaga

SEQ ID NO: 178001 - DNA, 932 bp, Homo Sapiens
gaattgctggggatccagaatatgagcgctccaagcagcgtggcaacattctctttggtgtggtggctggtgtggtggccgtggccttgctcatcgccctggcggttcttgtgcgctactgcagacagcgggaggccaaaagtggttaccaggctggtaagaaggagaccaaggacctgtatgcccccaagcccagtggcaaggcctccaagggaaacaaaagcaaaggcaagaagagcaagtccccaaagcccgtgaagccagtggaggacgaggatgaggccgggctgcagaagtccctcaagttcaacctgatgagcgatgcccctggggacagtccccgcatccacctgcccctcaactacccaccaggcagccctgacctgggccgccactatcgctctaactccccactgccttccatccagctgcagccccagtcaccctcagcctccaagaagcaccaggtggtacaggacctgccacctgcaaacacattcgtgggcaccggggacaccacgtccacgggctctgagcagtactccgactacagctaccgcaccaacccccccaaataccccagcaagcaggtaggccagccctttcagctcagcacaccccagcccctaccccacccctaccacggagccatctggaccgaggtgtgggagtgatggagcaggtttactgtgcctgcccgtgttgggggccagcctgaagccagcagtggggaggtggggcctttagtgcctcaccgggcacacgggattaggctgagtgaagatttaaggggagggggtgccgctgtggttctccctcccctgccctctcccccactgggggagaagaccttgttgattttgccaagttcccctggaacccttgggaacagcttactgggggccttttatttgggtttggggcgggcgggt

SEQ ID NO: 178002 - DNA, 455 bp, Homo Sapiens
  misc_feature (267)..(267): n is a, c, g, or t
  misc_feature (339)..(339): n is a, c, g, or t
  misc_feature (390)..(390): n is a, c, g, or t
  misc_feature (423)..(423): n is a, c, g, or t
  misc_feature (433)..(433): n is a, c, g, or t
gagccggattccgcgagcggattggaccctccagtccatctgcgtctctccatttgtggctgccgtttctgtccagtgcccctgaggccctcggctgctggggtccgcagaagccgcgccatgaatgaccggagcagtcggaggcggacaatgaaggacgatgagaccttcgagatctccattcccttcgatgaggcaccccacctagacccacagatcttttacagtctgagcccctctcggagaaacttcgaggagcctccggangcttgcgtcctccgccctggctctgatgaacagcgtcaagacccagctgcacatggctctggagaggaactnctggctgcagaagcgcattcgaggacctgggaggaagagagggacttgctngcggttgccagctgggacaaatttcatgtgttnctggttcggnttggaaggcagaggaccattgg

SEQ ID NO: 178003 - DNA, 918 bp, Homo Sapiens
  misc_feature (357)..(357): n is a, c, g, or t
  misc_feature (605)..(617): n is a, c, g, or t
  misc_feature (619)..(619): n is a, c, g, or t
gccgggtcccgtcccccgggagcatcgctcggctcagcaccgtggctcccagtgggggccccgtggagggcgcccgtagtgataagcacaccggcacgaacgtcaggtccattcctcgaagtcggagccctcactctgccctgtcctggggctggctgagggcgaacgccccacctcactttctagagccctgtctgtcctagctcctatctgaccttgtgtgtaaatacgtacatctgtttttaaagtggatgggcccctgagaactcagtgaaatgcagagttctccatgcacctaaagctcctttgtcgctctcatggctgtcagatcctggtccctccacactgggtgctggnggagggaggaccctcggggctaccgcgcgcccccccatcccacagatcaggagccaaggagggagaacagggcagcctgtgggactctaggatgcttcagaagaagcgacggcaccgtcaaccctctgttttttaaaggtggttggagactgttaacactgagctcattgacttctagcagatttcatttttactggttgatctcttggtggtatacaacttcctgctggaaactagaggtggggcannnnnnnnnnnnnancctcgcactgtgtccttggggaaggcccgcccccatcctggccggtgtcactgtggcccggccacccctgagcgcccagctccctacctcctggacgtctctgagaagccaggcagaccagagggcagcgctcggccgggcatgctgggctcccttggccttgcaccgagccccgggcccaccccgaacgagggatgccttctcccacaccatggtcactccccccggcatggccaaggtgggggccccccgggcaaatggcgagagggtaaaaacgcctcacactttggtcgcgggcc

SEQ ID NO: 178004 - DNA, 787 bp, Homo Sapiens
  misc_feature (647)..(697): n is a, c, g, or t
tcggcctccaggtgcctttcttcttcttcgcggccatctgcttggtgagcctggtgttcacaggctgctgtgtgcccgagaccaagggacggtccctggagcagatcgagtccttcttccgcacggggagaaggtccttcttgcgctaggtcaaggtccccgcctggagggggccaaacccccagtggctgggcctctgtgttggctacaaacctgcaccctgggaccaagaggcagcagtcatccctgccaccagccagagcacaggaagagcagtgtgatggggcctcagcagcgggtgcccctggctcgggacaggtagcactgctgtccagccacagccccagcccaggcagcccacagtgctgcacgtagccatgggccgcaggagtgcatacaaccctgcatccagggacacggccctgctgggtgacctcaggcctagtccctttcccttgcgtgaaggacacgccccacagaaggctacggggaggactgagaggacagggctggaggcagccaagtaacgtagtcatatcatcgcgctctgatctggtggcatctggctgtgcaaggaagacccggctttgccctcacaagtcttatgggcaccacagggaacatcctggacttaaaagccagggcannnnnnnnnnnnnnnnnnnnnnnnnnnnnnnnnnnnnnnnnnnnnnnnnnnaagcaagtgggattacccaaagggcccaggaagttcaaagacccagccctgggccaaacaatgggtggaaaaccccccgtcttcttaact

SEQ ID NO: 178005 - DNA, 598 bp, Homo Sapiens
  misc_feature (132)..(250): n is a, c, g, or t
  misc_feature (328)..(374): n is a, c, g, or t
  misc_feature (387)..(396): n is a, c, g, or t
tgagaggaaagtaaagagctttctttaaatattagtttttttgtactcagcggggcctcaaactttttgggttcaggagacttttttcactcttaaaaaattattgagggctggccaggtgtggtagctcannnnnnnnnnnnnnnnnnnnnnnnnnnnnnnnnnnnnnnnnnnnnnnnnnnnnnnnnnnnnnnnnnnnnnnnnnnnnnnnnnnnnnnnnnnnnnnnnnnnnnnnnnnnnnnnnnnnnnntggcacacgtctgtggtcccagctacttgggaggctaagatgagggaatcacttgagcccaggcaattgaggcctccnnnnnnnnnnnnnnnnnnnnnnnnnnnnnnnnnnnnnnnnnnnnnnnagtccctgtctcnnnnnnnnnnttattgaagacctcaataattttttatgtgagttatatctattaacatgctaggaggccaatacagccttggggaattgagggactataacaaaagatctagtatttgtgttatcacaaaagatggggagagactgaaaagtattgaaataaataatgtctgaaaagttaccagtttggcaaaaggcagaaagctatagatt

SEQ ID NO: 178006 - DNA, 849 bp, Homo Sapiens
  misc_feature (131)..(178): n is a, c, g, or t
  misc_feature (270)..(270): n is a, c, g, or t
ttccacaggggccctattagggaatcccaaagaaggggaatttggtcccctttccctttttcccggtaattcccaggttattagggagggttgaggcagggagaatcccttgaaattccagaagccggagnnnnnnnnnnnnnnnnnnnnnnnnnnnnnnnnnnnnnnnnnnnnnnnnaggcaagactctatgtcagtgtaagttccagcaactctctgtgccatcacgtgggtagcgtgataccccaaccagtactcccactctacccntgataggtcagctgttctgcttcccatccctccagcactctcaggcctcagatgtgcctatgggtcccctgctgctactcatcgtctctgttttccagagatgcggaggccaggacagctgggcacatgcagactctggctgacttcaggcagctgcctgcccggactctctctacccactggccacgtgagttttctccttaatccccaccgctagagagaatgcatacacgaggggccaggagggaagccagacagaaagctcctaggattagggataagaggaggggaaaaagcagagtccactgtttaggagaggagttggccaacggtggcgggtgggatagaataaggtgggggaaaggggagaggcaaggtgacaggagggctgggctgagggagccaagggctagaccctcccctaacccctgtgtgtcccctcctattacagcccaaagatccctgtgcagctccgattttattcgcatccttgtgatcttctctggaatgttccttgttttcaccctggccggggccctgttcctccatcaacgaaggaaatatagatcaagtaagaga

SEQ ID NO: 178007 - DNA, 924 bp, Homo Sapiens
aggagtgacatattcgatgccatgtaccctgtcactcacatcgctggggagactgttatacagcaagggaatgaaggagacaacttctatgtcgttgatcaaggggaagtggatgtgtacgtgaacggagagtgggtgaccaacatcagcgagggaggcagcttcggggagctggcgctcatctacggcacccccagggctgcgaccgtgaaagccaagacggacctcaagctctgggggatcgaccgggacagctaccggcgcatccttatgggcagcacgctgaggaaacgcaagatgtacgaggagttcctcagcaaggtctccatcctagagtccctggagaagtgggagcgtctgaccgtggcggatgcgctggagcccgtccagtttgaagatggagagaaaattgtggtccagggagagcctggggacgacttttacatcatcacggagggcaccgcgtccgtgctgcagcgccggtcccccaatgaggagtacgtggaggtggggcgcctgggaccctctgactacttcggggagattgcactgctgctgaaccggccccgggcggccactgtcgtggcccgggggcccctcaagtgtgtgaagctggaccggccccgcttcgagcgtgtgctggggccctgctctgagatcctcaagaggaacattcagcgttacaacagcttcatctccctcaccgtctgagcacagctcccgccctgcagccccagctcccccagtgtggtggccgtgccctgctcgtcctgtgtcggggggcccgggaacccgcttgtgttgaagtgtggggccggttgggggctgggtcccgggcagcggtaagggaatgccccctttccccgggacttcactttttttgggaattaatggattacccctttgttggcatttcccaaaatc

SEQ ID NO: 178008 - DNA, 963 bp, Homo Sapiens
  misc_feature (126)..(126): n is a, c, g, or t
  misc_feature (197)..(197): n is a, c, g, or t
  misc_feature (248)..(248): n is a, c, g, or t
  misc_feature (466)..(466): n is a, c, g, or t
cttggggggttgaaaccagggcccctggaatttccccccaagcccccattccagggagccttcttgggccccggcttccaagattctcccaccacaaggcgctgaaccctgctgcggggggagccntgggggatgttccagggggcagcggtcccctcggggctgaggcttcccaggcttcctgcaagaggggttgnccaggtaatttctctaaataccagggagaccactcggccccacgaggcccnttgggtggcttggctggcaccatctctttctggaccatgaagtaggggtacagcacgtcaacgggcagctccacaaacaccggacctggggtgcccgactgggcggcagccatcgcggccctcagggtgggcacaatgtcccgcaccctccgcacagacacacaaaacttacagagtggccggaaaagggacagctgatcaacagcctggagcgcacnccggttctgcagcagagtgctggccaacccccaccccccagaaaaggcagggatttggggggacttgagccatctttgaggcatttcttcaccccccagtcaccggtgttgggtgaaagccagggccctgctgtcactggccgccaacgcccaccgtcccggacaggcgggccatagcatcagcagcaaagacggccgtgacctcatggcgtgtgtccaccacacggatgcccagtttctcacaggccaccagcagcggggaaatgtgcccaccgaccagcgtgaagatgaaccgcacaccatgggccctcagcacagcggccacgttctctccgccatgccggacgcttgccttgtccaccttgtgcagcagctgatagaagagccccagcaggtgagcggcgcccagcaaggcggccaccagcgtcccgcaggccaggagcaggaaggaggggaataagctcccagcgggggcggcggccgcgggggtctccatg

SEQ ID NO: 178009 - DNA, 641 bp, Homo Sapiens
  misc_feature (461)..(461): n is a, c, g, or t
  misc_feature (509)..(509): n is a, c, g, or t
gggactggggctgagatttggggtccggttgtggaaagagaggcggggcttccgcctgtccattgacaagtggacaaggcaagcgtccggcatggcggagagaacgtggccgctgtgctgagggcccatggtgtgcggttcatcttcacgctggtcggtgggcacatttccccgctgctggtggcctgtgagaaactgggcatccgtgtggtggacacacgccatgaggtcacggccgtctttgctgctgatgctatggcccgcctgtccgggacggtgggcgtggcggcagtgacagcaggccctggcctcaccaacacggtgactgcggtgaagaatgctcagatggctcagtccccaatcctgcttctgggtggggctgccagcactctgctgcagaaccggggtgcgctccaggctgttgatcagctggtttggagtctcatcattgcttgccctgngcctatcccatgaggcccagtgactccacaacctccctgaggaggggnatggaggggtcaaatctcagagaggctctcttgtgagctcttggaccctcctcttcacggacccaactgtgccgtttgtcccctctcttatggagactgaataaaccacctctggcccatgtaggcccaagt

SEQ ID NO: 178010 - DNA, 923 bp, Homo Sapiens
  misc_feature (868)..(868): n is a, c, g, or t
  misc_feature (907)..(907): n is a, c, g, or t
ggaacatggggctgtatgctgcagctgcaggcgtgttggccggcgtggagagccgccagggctctatcaaggggttggtgtactccagcaacttccagaacgtgaagcagctgtacgcgctggtgtgcgaaacgcagcgctactccgccgtgctggatgctgtgatcgccagcgccggcctcctccgtgcggagaagaagctgcggccgcacctggccaaggtgctagtgtatgagttgttgttgggaaagggctttcgagggggtgggggccgatggaaggctctgttgggccggcaccaggcgaggctcaaggctgagttggctcggctcaaggttcatcggggtgtgagccggaatgaggacctgttggaagtgggatccaggcctggtccagcctcccagctgcctcgatttgtgcgtgtgaacactctcaagacctgctccgatgatgtagttgattatttcaagagacaaggtttctcctatcagggtcgggcttccagcctcgatgacttacgagccctcaaggggaagcattttctcctggaccccttgatgccggagctgctggtgtttcccgcccagacagatctgcatgaacacccactgtaccgggccggacacctcattctgcaggacagggccagctgtctcccagccatgctgctggaccccccgccaggctcccatgtcatcgatgcctgtgccgccccaggcaataagaccagtcacttggctgctcttctgaagaaccaaaggaagatctttgcctttgacctggatgccaagcggctggcatccatggccacgctgctggccccgggctggcgtctcttgctgtgaaactggctgaggagaaacttccntgggcggtctcccccctcgggatccacggctacccatgnaggtccccactacatc

SEQ ID NO: 178011 - DNA, 938 bp, Homo Sapiens
  misc_feature (813)..(852): n is a, c, g, or t
  misc_feature (854)..(860): n is a, c, g, or t
gcagggctccgctgcgcctcagctgtgggggcctcaggcaggtccctcagttctcacgccttcctgtccagtggaatgggggccaggagtgctggctcctcgtgtttggtgagggtggagtgaggcccctgcagagctgctgatgaggtgggcacagcggccgttggcagctgctgttgtgggttgctttgtcaatctctgccccggtctgatgtttcctacagggagatgccttggatccaggttcagggactaaatacacttggcagctgaagatgaattggaatggtcacgttttttaggctggacagcgtcccgccacagctactacctgacactgagctcatgcagagagatgatggctgatgttccttctcccttgggacatgggtctggcacctgtgggcctgtcggatagtgcccctctgaagcagagggtcacggtcatgtcagtttgggggaattctctgttgtgccctcacagactcccccctttctttcctccctccccttctcattttgatgtctaaagcatcaagtccctcttcctcggagtttctctagctgcagtggaagattctgttttcctgtggggaaaatgctcacttgagattttgcagggacccgggtctgtctggtttctgatgacatagtaagagaaaggtcttttttcaggttggctggtgaaaggaattgcatgtgactcacacaaacaggagctagcccaatcatacactgactcgcgtgggtgttaaaatgtttatcatgccctaagggagacatttataattaaacccatttatgctacatttnnnnnnnnnnnnnnnnnnnnnnnnnnnnnnnnnnnnnnnnannnnnnnaaaaactcggaggcattccatgcccgggttggcggaaaaaagagggttattggaaatgggcccattgggctaatactt

SEQ ID NO: 178012 - DNA, 715 bp, Homo Sapiens
cgggtgccgcgcggggggcgggcggcgcggagtaggtggcggcggccatggccgaggcgtcgccgcatcccggacggtacttctgccactgctgctccgtggagatcgtcccgcgcctgccggattatatctgtccaagatgcgagtctggttttatcgaggagcttccggaagagaccaggagcacagaaaatggttctgccccctccacagctcccacagaccagagccggccaccgctggagcacgtggaccagcacctgttcacgctgccgcagggctacggacagtttgctttcggcatcttcgatgacagcttcgagatccccacgttccctcctggggcgcaggctgacgacggcagggaccctgagagccggcgggagagagaccatccgtcccggcaccggtacggcgcccgacagccccgcgcccgcctcaccacgcggcgggccaccggccggcacgaaggcgtccccacgctggaagggatcatccagcagctcgtcaacggcatcatcacgcccgccaccatccccagcctgggcccctggggagtcctgcactcaaaccctatggactacgcctggggggccaacggcctggatgccatcatcacacagctcctcaatcagtttgaaaacacaaggccccccaccggcagataaagagcaaaatccaggccctccccaccgtccccgtcactgaggagcac

SEQ ID NO: 178013 - DNA, 1182 bp, Homo Sapiens
  misc_feature (150)..(170): n is a, c, g, or t
  misc_feature (459)..(483): n is a, c, g, or t
gggccctgttgtacagagtcctcccgggaccgaggccaacttctctgcttcccgtgcggcctgcgacccatggaaggagagtggtgacatctcggacagcggcagcagcactaccagcggtcactggagtgggagcagtggtgtctccannnnnnnnnnnnnnnnnnnnnaggccagccccaagtatttgggggatgcttttggttctccccaaactgatcatggctttgagaccgatcctgaccctttcctgctggacgaaccagctccacgaaaaagaaagaactctgtgaaggtgatgtacaagtgcctgtggccaaactgtggcaaagttctgcgctccattgtgggcatcaaacgacacgtcaaagccctccatctgggggacacagtggactctgatcagttcaagcgggaggaggatttctactacacagaggtgcagctgaaagaggaatnnnnnnnnnnnnnnnnnnnnnnnnncgcaggcaccccagtccctgggactcccacctccgagccagctcccacccccagcatgactggcctgcctctgtctgctcttccaccacctctgcacaaagcccagtcctccggcccagaacatcctggcccgggagtcctccctgcccctcaggggctctcagcaagtcagctcctggggccttctggcaacattcagggcagatcatgcataccagggctctgccatcctttccagatcccagtctcaccacacatctacaccagtgtcagctgggctgctgccccctccgccgcctgctctctctctccggtccggagccggtcgctaagcttcagcgagccccagcagccagcacttgcgatgaaatctcatctgatcgtcacttctccaccccgggcccagagtggtgccaggaaagcccgaggggaggctaagaagtgccgcaaggtgtatggcatcgagcaccgggaacagtggtgcacggcgtgccggtggaaagaagccctgcagcgctttctggactgagctgtgctgcaagttctactctgttcctggccctgcccgcagccactgaacagaagccagtgtgtcaccagcccctcagcagaaaaccgaaagaagaaagaaacgggaaaccccggaagtttggggcttctggttgggctaaaggggtaaacaatttaaaagccaattta

SEQ ID NO: 178014 - DNA, 1210 bp, Homo Sapiens
gacggaagaggatggccgcggcggctctgaggagattttggtcccggcgccgcgcagaggcgggcgacgcggtagtggcgaagccgggagtgtgggcgcggctggggtcctgggcccgcgcgctgctccgggactacgccgaggcctgcagggacgcttcggcggaggctagggcccggccggggcgcgccgctgtgtatgtgggtctgctgggcggcgcggcggcctgcttcacgctggcgcccagcgagggtgccttcgaggaggcgctgctggaggcgtcggggaccctcctgctgctggcgccggccacccgcaaccgcgagtccgaagccttcgtgcagaggctgctctggctgcggggccgtggccgcctgcgctacgtcaacctggggctctgctcgctggtgtacgaggcgcccttcgacgcccaggccagcctctaccaggcgcgttgccgctacctgcagccccgctggaccgacttccccggccgggtcctggacgtgggcttcgtgggtcgctggtgggtgctgggggcctggatgcgcgactgcgacatcaacgacgacgaattcctgcacctgccggcgcatttgcgggtggtcgggccccagcagctgcattccgagaccaacgagcggctcttcgatgagaagtacaagcctgtcgtgctcaccgacgatcaggtggaccaggcgctgtgggaggagcaggtcttgcagaaggagaagaaggacaggctcgccctgagccaggcccactcgctggtgcaggcggaggccccgagatgaaaccctgaggcccccgagtcctggcaaactgcttgcctggggtggtgcagttctgagtgtgcctcacctgcagaacagctgagacagatgatgtgcaaagtgttttctcactggatttgcacaagtttggggaagctttctgccccccgtctttggtcctttttagctgaagctaattcaaagccacctggggtccgggagtgggggacagcagaaacaacttgacacctgtttcttccctggcaaaacttggtccatgaaccttttaataataagcctttttttcatcgggccctcaagagggcccctcctttaaagggaaggtacccacatttgggtccaactgtgaacttggcaaaacctctttctaaagggcccactctaaaaatttttctctttttttcaaaagttgtggt

SEQ ID NO: 178015 - DNA, 935 bp, Homo Sapiens
  misc_feature (33)..(33): n is a, c, g, or t
  misc_feature (89)..(89): n is a, c, g, or t
  misc_feature (100)..(100): n is a, c, g, or t
  misc_feature (108)..(108): n is a, c, g, or t
  misc_feature (121)..(121): n is a, c, g, or t
  misc_feature (223)..(232): n is a, c, g, or t
  misc_feature (527)..(582): n is a, c, g, or t
ccggctgggggtataggcccagatgggccaagnacagggggcaagaagaacaagccatgccctgccagcaaatgtgggaaaaaaccaanctgtttcaaancgcaaggntgtggaatggtgncccgaccaggccgggccttgaaggaatcagagctgggggctgtccggggtggtttgaaaaataaaccttagaaaaggaaacagaagtcagtgttcaaagttnnnnnnnnnnggagacagtctctgtatcttcacgggaggtcagggaaacctccaaggcactcgaaaggccaaaattacaggagcaatgaggcaggagggctccggagagacgggcacagcggaggaggagatggggggagggagggagagcaggccggggcccctctctcttaaggctgcagggtttcagcgtggggagcaagccagagacataatgaggcctccagactcccccacaccccttgggctcctggggctccggctgattggtcagtaaagtctttcagagatttttctattaccgnnnnnnnnnnnnnnnnnnnnnnnnnnnnnnnnnnnnnnnnnnnnnnnnnnnnnnnncgatttggtgcaggcccttgagttatctctggtgccagccacttagaaatcctcttccgcttcaggtaggagtccgcgtagtggccgccgaggccctgggagtgctggcccacatagctgccttctgggctgggctcgggcgagggcagcaggtgggcaaagctgcgtttctggccgcccagtggggtcttcagcaggtggctgtgaccattaggcccggggctgaggcccaggagcccttctccggaccccagcggggaagagccgattgccttactgaggtggctctgcttgaggccagcctgcaggccgctggtgaagtaggaagtgggcgagcctgaatagaagtgaga

SEQ ID NO: 178016 - DNA, 930 bp, Homo Sapiens
ccaggaagtggacaggttgaagtgtttgaagagattgccatgcttgtccagtcagccctggatggctatccagtatgcatctttgcctatggccagacaggcagtggcaagaccttcacaatggagggtgggcctgggggagacccccagttggaggggctgatccctcgggccctgcggcacctcttctctgtggctcaggagctgagtggtcagggctggacctacagctttgtagcaagctacgtagagatctacaatgagactgtccgggacctgctggccactggaacccggaagggtcaagggggcgagtgtgagattcgccgtgcagggccagggagtgaggagctcactgtcaccaatgctcgatatgtccctgtctcctgtgagaaagaagtggacgccctgcttcatctggcccgccagaatcgggctgtggcccgcacagcccagaatgaacggtcatcacgcagccacagtgtattccagctacagatttctggggagcactccagccgaggcctgcagtgtggggcccccctcagtcttgtggacctggccgggagtgagcgacttgaccccggcttagccctcggccccggggagcgggaacgccttcgggaaacacaggccattaacagcagcctgtccacgctggggctggttatcatggccctgagcaacaaggagtcccacgtgccttaccggaacagcaaaactgaacctacccttgctgccagaaactcctcctggggtgggtaagtggcttaaagaatggcttcatgggtttgggtggaaacaatttttccttccccactggaagagaacgtctccgagtccctcaactctctatgctttgcctccaaggtgaaccagtgtgttattggtactgctcaggccaacaggaagtgaagacggatccagatc

SEQ ID NO: 178017 - DNA, 813 bp, Homo Sapiens
  misc_feature (570)..(570): n is a, c, g, or t
  misc_feature (638)..(638): n is a, c, g, or t
  misc_feature (676)..(700): n is a, c, g, or t
  misc_feature (704)..(705): n is a, c, g, or t
  misc_feature (707)..(707): n is a, c, g, or t
  misc_feature (720)..(720): n is a, c, g, or t
ttttttctcttgggctgagactggatactgcccggggcagctgccagagaagcatcggagggaattgaggtctgctcggccgtcttcactcgcccccgggtttggcgggccaaggactgccgaccgaggctggagctggcgtctgtcttcaagggcttacacgtggaggaatgctcccccatcctccccttccctgcaaacatggggttggctgggcccagaaggttgtgatgaagaaaagtgggccagtgtgggaatgcggcaagaaggaattgacttcgactgtgacctgtggggatttctcccagctctagacaaccctgcaaaggactgttttttcctgagcttggccagaagggggccatgaggcctcagtggactttccaccccctccctggcctgttctgttttgcctgaagttggagtgagtgtggctcccctctatttagcatgacaagccccaggcaggctgtgcgctgacaaccaccgctccccagcccagggttcccccagcccctgtggaagggactaggagcactgtagtaaatggcaattctttgacctcaaccntgtgatgaggggaggaaactcacctggctgggcccctcacctggggcacctgggggagtggggacaanagtctggggtgttatttatttttcctccccagcaggtnnnnnnnnnnnnnnnnnnnnnnnnnttgnnangtatggttttagnatgtggtttggttcttggggccccctttttttactcccctttgagctgagaatggaaaccctttttggcccccccaacctggggggccattga

SEQ ID NO: 178018 - DNA, 587 bp, Homo Sapiens
  misc_feature (46)..(54): n is a, c, g, or t
  misc_feature (76)..(84): n is a, c, g, or t
  misc_feature (363)..(363): n is a, c, g, or t
  misc_feature (372)..(372): n is a, c, g, or t
  misc_feature (389)..(389): n is a, c, g, or t
ccccaactccccctgaatcccccccaaaaattccccccctaaaaannnnnnnnncgccccttttcaaggttttatnnnnnnnnnacaccccctttgggtttttttaggcggttaaaaggaacaccctttttgggccaagcctcaccccctgggagggtttaaaaaaggaccctgggcctttccaagcgggttttcccctgtttttcccgaaaaggcctggacctttactatggccattacactgctcagcctcctgtccccgggataagctttatcgtagcggaagcccagactcttccccaggtcctggaagcgcgggatgcgaactcctcgagcggttgtttctctcgttgctcctgggcnactggcctncagatggtgccttgcgngggctgcttcccaggagcgcgcttctgttccaccacctctccggaaggaaacaccactttcactgggctccgccgcagcgcccggacccagcgcctcgcgtcaaggtcccaagcctggaccacctgcagcaacggtcgcacgacaaacctcgagggtctcaccagcgccgccatgttccctgagacccgggctgcccc

SEQ ID NO: 178019 - DNA, 892 bp, Homo Sapiens
  misc_feature (649)..(790): n is a, c, g, or t
  misc_feature (803)..(817): n is a, c, g, or t
  misc_feature (845)..(853): n is a, c, g, or t
agatccgcctgactcagaaggccgactacgccactgcgaaggcccctggctcacctgcagctccccggatctcgcctggggaccagcggctggcacagagcgcggagatgtaccactaccagcaccaacggcaacagatgctgtgcctggagcggcataaagagccacccaaggagctggacacggcctcctcggatgaggagaatgaggacggagacttcacggtgtacgagtgcccgggcctggccccgaccggggaaatggaggtgcgcaaccctctgttcgaccacgccgcactgtccgcgcccctgccggcccccagctcaccgcctgcactgccatgacctggaggcagacagacgcccacctgctccccgacctcgaggcccccggggaggggcagggcctggagcttcccactaaaaacatgttttgatgctgtgtgcttttggctgggccttgggctccaggccctgggaccccttgccagggagacccccgaacctttgtgccaggacacctcctggtcccctgcacctctcctgttcggtttagacccccaaactggagggggcatggagaaccgtagagcgcaggaacgggtgggtaattctagagacaaaagccaattaaagtccatttcagaatnnnnnnnnnnnnnnnnnnnnnnnnnnnnnnnnnnnnnnnnnnnnnnnnnnnnnnnnnnnnnnnnnnnnnnnnnnnnnnnnnnnnnnnnnnnnnnnnnnnnnnnnnnnnnnnnnnnnnnnnnnnnnnnnnnnnnnnnnnnnnntttcttggggcgnnnnnnnnnnnnnnntaaaaaatttttcaaacccctttcgttnnnnnnnnncccccaaaagaaaaggcaaaggggccaccttttttcccc

SEQ ID NO: 178020 - DNA, 899 bp, Homo Sapiens
tctggcccatttcaggccatcttcagttgaagaaacaccctcttaggctgtgcaaggcatgggttatcaggggattgaggtcacctgggacttcagggaggctcagcttgctccctgccccagacctgtttcttctaagggaggaggacatggtggagaccagggacaggagagccagcagggtggatgcaaggggcctctacccacacctggacctccgtgccctcaccccagccctaggtgtgcacctaggcctcattccttaccccccagcccctgcccaccttcagcaggatgaggccctgggttgccgtgctctcgctgttcccctctcggggctgggctggggccgctcttggccccaaggttgccccgggccagcagcccagccagcagcacagtctctatggtgctgaggaagagcagcagcagcaggatggtgaagtagtaaactgggggaggcagggcacagggagatgctcaggggccagtccctgtgtctctggtgcccagcgagctgagcaccagtgggtggaccgggagaaacagggcagactgggtaagggagcagggcttactgagcagtgggttgcaggaggaggagctgggcaggggctgcaccagggaggagtggaggacaaggtaactccacagcaatgtcaccttgtagcctatgcgctcaatggcccgggagggggcaacaacccccccgcacacgtcagccaacagcagtgcctctgcaagcaaccaagaaaagcgaagatgggacttgaacgcccatggttcttccaccctccagctgggaaggggaaaaaggctagggccctttcccggccgggggggaaaagcaggcgggacgtttcaggggcctgtggtcgccgggtaccatgagacacgta

SEQ ID NO: 178021 - DNA, 957 bp, Homo Sapiens
  misc_feature (18)..(18): n is a, c, g, or t
  misc_feature (893)..(893): n is a, c, g, or t
  misc_feature (926)..(926): n is a, c, g, or t
gtcaaggagcgaggctgngtggcgaattccgcacgagggtttagctcccatctgcacacctggatcaaggtagcctctctgccaagggcaggtggaggcacaagatggcagttgtgcaggggcagctgttcgcggtgggtggcttcgacggcctgaggcgcctgcacagcgtggagcgctacgaccccttctccaacacctgggcggccgccgcgcccctcccggaggccgtgagctcggcggcggtggcgtcctgcgcgggcaagctcttcgtgattgggggcgccaggcagggcggcgtcaacacggacaaggtgcagtgctttgaccccaaggaggaccggtggagcctgcggtcaccagcacccttctcacagcggtgtctcgaggctgtctcccttgaggacaccatctatgtcatggggggtctcatgagcaaaatcttcacctatgatccaggcacagatgtgtggggggaggcagctgtcctccccagccctgtggaaagctgtggagtcactgtgtgtgacgggaaggtccacatccttggcgggcgggatgatcgcggagaaagcaccgataaggtcttcacctttgaccccagcagtgggcaggtggaggtccagccatccctgcagcgctgcaccagctcccacggcttgtgtcacccatcatccagagcttgggcaggtgattcagatttggacagccctgagccaaggaggcggaaaggcaggcggagctcagatgcacactctgctccctcatggcacctccacccaaacagccccttaacttaatgggccccttttcttgtataaaataaaatcttggtggggcctggggttccaagctgcagtcctgcccctgccctggaaatgggaatgttcttncccaataacactctcaacactcaacatctaatnatcacccctcagggcaatctattgtcggggg

SEQ ID NO: 178022 - DNA, 902 bp, Homo Sapiens
ctgcccgcggctgcagtcggggcggcagctgaggcggaggctgacgaggaggcggatcccccggcgtcagatctgccgacaccccaggccatcgagccccaggccatcgtgcagcaggtcccagcccccagtcgaatgcagatgccgcaggggaacccgctgctgctgtcccacaccctgcaggagctgctggccagggacaccgtgcaggtggagctcattccggagaagaagggcctcttcctgaagcatgtggagtatgaggtttccagccagcgcttcaagtcctcggtatacagacggtacaatgacttcgtggtcttccaggagatgctcctgcacaagttcccctaccgtatggtgcctgccctgccacccaagagaatgctgggagctgacagggagttcatcgaggccaggaggagagccctgaagcgcttcgtcaacctggtggcgcgacaccccctgttctccgaggatgtggtcctcaagctcttcctgtccttcagcggctcggatgtgcagaacaaagttaaaggagtcagcacagtgcgtcggggacgaattcctaaactgtaagctagctaccaagggccaaggacttcctcccagctgacatccaggctcagtttgccatcagccgggagctgatccggaacatctacaatagctttcacaagcttcgcgacagggcccgagcggatcgcgtcgcgggccatcgaccaagcggcagatcttctcatattccgggaaggagctaattggcaatagggtctgacacgaaccccgctggccctcctggggccgctctgataacccacccccggggggggtccccctgaaaccaaggcttctgaaaaggccttggtctgggggaatttctccgcgtactcccccaaaaa

SEQ ID NO: 178023 - DNA, 1132 bp, Homo Sapiens
  misc_feature (427)..(441): n is a, c, g, or t
  misc_feature (852)..(864): n is a, c, g, or t
  misc_feature (884)..(884): n is a, c, g, or t
  misc_feature (886)..(886): n is a, c, g, or t
  misc_feature (1084)..(1084): n is a, c, g, or t
ggggagcctagagcgccgcggccccgagatgaagccggcggtggacgagatgttccccgagggcgccgggccctacgtggacctggacgaggcgggaggcagcaccgggctcttgatggacttggcagccaatgaaaaggccgttcatgcagacttttttaacgattttgaagatctttttgatgatgatgacatccagtgagatgccctctggctgcaggcggggccaagcccttggtacagagccgcagtgtgagcctgcgcaggacagtttcaggtggttttaaagaacacgtggaaatcccttgaatttaggacctggttaaccagaaagataagactgttcttaacgacctagatgattctgttcatctctgaacgggatcaggttttgtcctcactccaattaaaagaaagcaatgccacnnnnnnnnnnnnnnncactcgaggaatctatgtccggtgcggataaacaaggtacggaaatgcgcacatgcccttaccctgttcccctgaccccggcttttccttgcaacacagtgggtagaatccggccggtgcctccattatgatggtgctcttaattaacttgccgcatcaccgacactcctaaccccctgcacttttattgtatatccgcactgccatacacacactcggaacctgtaatcccaagcccatgattggaccacgccgcccttaccttttctcgtgtaataccaaaaaggaaaccctccctgtagaacgatcccctctctttcttctcctaccccatctgaaatattgcctcccctccgccttccctataaatcaacgaaccttggcggtataacgacactgtccatgcggtgnnnnnnnnnnnnngacacaaggaaccacaccanangcgcctaacctcaaaccatcctattttgtccacccaatggggtccacctcgggtcccgctcttcacctcaccactcttggcccagaatgtagcgaacgtgctgggcgccgctagtacgagatatgtacacgcctaggttatgatttctcgagacctagaacactctgctgtcaaggctatcgaagctccgacgattcnccacctcgctctcgtatacagtgatagcccttagagcgagtactttgg

SEQ ID NO: 178024 - DNA, 495 bp, Homo Sapiens
  misc_feature (11)..(11): n is a, c, g, or t
  misc_feature (24)..(24): n is a, c, g, or t
  misc_feature (34)..(34): n is a, c, g, or t
  misc_feature (65)..(65): n is a, c, g, or t
  misc_feature (179)..(179): n is a, c, g, or t
taaaaaagggnaaacctccaaccnacccgccttnaggggaggaaatggaactctctgggggaagntgccaaaaaattgcccccccaagtggccccgggctgggcccggcctctaaagagccttttagggggagggggtactcatgtggatgccctacttggaacccgggcctctgaganatgtcctgacccacccccccagggcatttgcctccatcttcaccccagattgtgggtttcccatccccctgactttacccctttcaagcctggggttgtctatacccacagcccttagggacttaaagttacggggcttcgttgaatgctccttcccctaggcagctggtaatagaggggtaaagctctgggcccctcctccctgctgccacttatcccagctccaagtttttcttaaacaataactactcacttacaaaactgctacacgacaaacaaacaacacaccacacggccgcgccgcccccccacacct

SEQ ID NO: 178025 - DNA, 886 bp, Homo Sapiens
gatggctgcgtccatggcgcggcgcttgtggcctttgctgactcgtcgggggttccggccccggggaggctgcatctccaacgatagtccaaggagaagtttcactacagagaaacgaaaccggaacctcctgtacgagtatgcgcgcgagggctacagcgcactccctcagctggacatagagcggttctgcgcatgcccagaagaggccgcacacgccctggagctccgcaagggggagctgcgctcggcggacctgcccgcgatcatctcgacatggcaggagctgaggcagctgcaggagcagatccggagcctggaagaagagaaggcagctgtgactgaggcagtgcgggccctgctggcaaaccaggacagtggtgaagtgcagcaggaccccaagtaccagggtctgcgggcacgtggccgggagatccggaaggagcttgttcacctgtaccccagggaggcccagcttgaggagcagttctacctgcaggcgctgaagctgcccaaccagacccacccagacgtgcccgtcggggatgagagccaggctcgagtgctccacatggtcggagacaagccagttttctccttccaacctcggggccacctggaaattggcgagaaactcgacatcatccgtcagaagcgcctgtcccccgtgtctggccaccggtcctattacctgcgcggggctgggaccctcctggcacacgggcctggtcaacttcacattcaacaagcttctccgccgggggcttcacccccctgacggggccagaccttctccgccggagcagtggtttgaagggctgggggggatgacaccaaatggccaacccctttcccaattttacaacattctaccccggccccgctt

SEQ ID NO: 178026 - DNA, 710 bp, Homo Sapiens
atttcatgaagtgtagatcattgtattcagagattgtaaatgaaaaaaatatagaaactatttagttttggtagattttttttctgacaatgtgaccagactgaatttcctcataaagaaaaaatggcgtgccttgtgtctgtgtttctcttttctctgaaaggattaatagatctgaagctttgggccactcagagccttccttgatgctgccagagtcttcttatttagattttctgtcttaaaccattggaagcaaaaccgttttcccatgacattctggccttggacagattctgttgtcctcgacgcgtctctttataaagtggtaaaagcctgaaattcagggcagctctccatgaggggctgaagggctcttttcataaaaagctaaggcacctgctgcctgccccaagtgtcccgctcctctcaaagtcctccccctaccaggtaaggtgtacctccatttcagaatgttaaccctccagtgaagagctaatgactggttagaaagattgacaaactaaaccaaaatttctacccccctccggggtatggtgcggggaaaggcattaaaagggaattgccccggttgtccgtggctttcaccccctggaaatccccaaacactttttgggaaggcccaaaagcacggttggaacccccctggaaggttcagggagtctttaaaaaccatggcccggtgcaca

SEQ ID NO: 178027 - DNA, 931 bp, Homo Sapiens
ctgctacggcctcttcggggacctggccttcgccgccaaggagagcctcgtggctgccgagtcggggcgcaagccctacactggcgaccggcgccaccccatcttctttaagcgcaagctggaccctgccgagcccttcgcaggcctcgcctccagtgccctcagtgtctttgagacggagccaggtggcggcggcatgcgctggtttgtggacacagctgagcgttatgcgctggctggccggccactggccgagctctgtgaccacaacgcaaaggtggctcgagagcttggccgcaaccaggtggcgcaaacgtggaccatgctgcggatcatctactgcagccctggcctagtgcccactgcaaacctcaaccacagtgtgggcaagggtggctcctgtggcctcccgctcatgaacagtttcaacctgaaggatatggccccaggttgggcagtgagacgcggctggaccgcagcaaaggagatgcacggagcgacacagttctgctcgactcctcggccacactcatcaccaatgaggataacgaggaaaccgagggcagcgacgtacctgccgactacctgctgggtgacgtggaaggtgaggaggacgagctgtacctgctggatccggaacacgcgcaccccgaggaccctgagtgcgtgctgccgcaggaggcctttccgctgcgccacgagatcgtggacacgcctcccgggcccgagcacctgcaggacaaggccgactccccgcacgtgagcggcagcgaggcggatgtggcctccctggcccccgtggactccctccttctcgctcctgtctgtctcacacgcgctctacgacagccggctgccgcccgactttcttcggcgtgcttggtgcgcgacatgctgcacttctacgctgagcagggcgacgtgcgattgg

SEQ ID NO: 178028 - DNA, 1444 bp, Homo Sapiens
  misc_feature (1422)..(1422): n is a, c, g, or t
ccgggggaggcgggaggaggagacaccagggtggccctgagcgccggcgacacctttcctggactataaattgagcacctgggatgggtagggggccaacgcagtcaccgccgtccgcagtcacagtccagccactgaccgcagcagcgcccttgcgtagcagccgcttgcagcgagaacactgaattgccaacgagcaggagagtctcaaggcgcaagaggaggccagggctcgacccacagagcaccctcagccatcgcgagtttccgggcgccaaagccaggagaagccgcccatcccgcagggccggtctgccagcgagacgagagttggcgagggcggaggagtgccgggaatcccgccacaccggctatagccaggcccccagcgcgggccttggagagcgcgtgaaggcgggcatccccttgacccggccgaccatccccgtgcccctgcgtccctgcgctccaacgtccgcgcggccaccatgatgcaaatctgcgacacctacaaccagaagcactcgctctttaacgccatgaatcgcttcattggcgccgtgaacaacatggaccagacggtgatggtgcccagcttgctgcgcgacgtgcccctggctgaccccgggttagacaacgatgttggcgtggaggtaggcggcagtggcggctgcctggaggagcgcacgcccccagtccccgactcgggaagcgccaatggcagctttttcgcgccctctcgggacatgtacagccactacgtgcttctcaagtccatccgcaacgacatcgagtggggggtcctgcaccagccgcctccaccggctgggagcgaagagggcagtgcctggaagtccaaagacatcctggtggacctgggccacttggagggtgcgggacgccggcgaagaagacctggaacagcagttccactaccacctgcgcgggctgcacactgtgctctcgaaactcacgcgcaaagccaacatcctcactaacagatacaagcaggagatcggcttcggcaattggggccactgaggcgtggcgcccgtggctgcccagcaccttcttcgacccatctcaccctctctcattcctcaaagctttgtagttatttcccgggctggggggcgggaagggcagacgtgcaaacgggggggctgcgtacgtgcaggaggcgcggtggggctgcgtggaggagggggccaccgtgtgagagagaagaaaatggtggccggacatgggagggcccaaggaacctcctgggagggggcctgcattctatgttggtgggaatgggactgggctgacgcctgcattcagcctgtgcctttcctggggtttcttttctgttcttttcggaggagagggcccgagaaggggcattaccagggccgcggcgctgggttgccacacttngggaaagcagcccggagctggg

SEQ ID NO: 178029 - DNA, 375 bp, Homo Sapiens
  misc_feature (315)..(315): n is a, c, g, or t
aaacccctgggggccccaaccctgtggggcccctgggggcaagttgttccctcaatgggcgaatgcgctccaggggcgtgaggggcgcatgcaggccacagtgggggcaggtccagaaggttcggagacagtcgctgtacaggtctgtgtcattcgtgaggcagttgtaggtgaggaagtcagtgactgcgtagacccccctttgtggggtggggggacagggtggagctgccaaagaggccaggaagatggggggtggctgggatggtctggggtcccacatacatgttctggacttctagccctgtgaagacncggaggctgtaaggaatcttggatgccgtaaattgcaggagttcccctcatgccgaatat

SEQ ID NO: 178030 - DNA, 741 bp, Homo Sapiens
  misc_feature (193)..(193): n is a, c, g, or t
  misc_feature (196)..(196): n is a, c, g, or t
gttggggcttgatgaaggcgtggatagcctgaaggcagccattcagagcagacaaaaggatcggcaaaaggaaatggacaattttctggctcagatggaagcaaagtactgcaaatcttccaaaggaggagggaaaaaatctgctctcaagaaagaaaagaaataatggaatttttctcttcaaaggtccttnagngtgtaaattgatgcccatcgtaggcaaaggtgcaggcaggatttgaaggcaaaagtcaattcagctcttgagaaaaggtgtctttccagcctgaatttttcagattgactagaccaagcagaaatctctcaacctgatcttagtatttcctagaaagcacttgacattgtgtgaggtctcacctgaaggaacttggtggtgacatttgggagggtggagggaggcagtgtccttcctgacagcacttgcctccatggatcttctgtacacagaactcttatctaggatgtggttctgttcatgctgctttctgcgatgtgcgtgtctgttagaataggctctctacccagctagaacaccttccagacacttgctggacagctatcttccacatacttcccagtttacatttggtcttaatgatcttgaatagatcctctcttcattttactcagccaggttttgtactgatgtacaggtgttaaattacttcaagcatttttgtaagaggtgtatataattcaataaaaaaggtaaaacatgaa

SEQ ID NO: 178031 - DNA, 1582 bp, Homo Sapiens
ggggtattccggttaatggcggccgtgcgaaggttatgaactgtgtaggtcatctcactgtagcgacgaccgtcgtggcggagacggtttggagttatgtgtgtggggatggcgggtgtgagagatggtgtgtctacgggggttggcgttggtggtctagttgcttgcgcatctgtctgtcttcgggaaaggtaatctggatcgcgaattgcgggtttgtttgaaggagtgttggggtaggtggtaggtaacgtgaatgggacggggggcggtgtaaggaagggtggggttgggtggcctatgtataagtgttgtgaggggtattattggtaatgcagttgtagtgaagggaggtggtatgattggtggagagtaggccggacggggagagaatggtgtgtgtcgggaatcagccgcaggggttaggtagccccgagaatcgtgttcaaatgcgtcagtgcacggtgccagtgcagtgagtgtggggtccttcaggtggccgtctaggaagggcaggcttgagacgcgcgtctctgcttccctctgacttgagaccatctcccttgcaccaacagcagcttctccaagataggctgccacagccaagcacacactctgcaaacctatcactgcgagtagtacagttccctttaaaatcgcagcagcaggtgctcagggaggagagggagccagggtggctctggtggcgtgactgccagtggaggcgacacaggtggcagaaggctgccctccctctcattctatatgctggataattaaaaatcacaagtcccaatacttgacaaatgaaaagtccattgggcgaatccggacattcccctcctgatccacaatcacagttctgtgtggtgcgtcccatccctgcccaccaccccccacccccagggctgactgtgatgatggtaactcgccaagtgtggaggtacctgtgggtgcagcccagagcctcggaggaggaagacagctctctgcccccaggcaggtccctgggtgccagggtcagcaggggctctgaggccaggagctacagcagcttgacgtagttctgtggaatcagccccctcttgccgttcagagtcccttctagccagccaggttccctggaggtttgtacatcctcaaaaattgctcctatttcaaaagataattccgagctgtgttctgcttcacacggatacacggctcgagccttccgactgcggatgatagtggatgcccagtctccaaagctccctccatctgccagaaggtggtttttgtctggtccaggaggcccagggacagctgtagtcacgggagacggggaggaaagtgagtccagactgctggtaggggtgtcctccttggaagggtaaggattgtcaccatcttccagctccagacaaagattgtagacggccacgggcctcttggttctctggccttgtctcttcgactgccttggtggcgcatttgggggtgatgctgacaggcaggtgggctcagggaatgtagtatcgggcggcgtccgaaaaatcttttcatggttttcaattaagatttccacacaatattctgaaac

SEQ ID NO: 178032 - DNA, 893 bp, Homo Sapiens
  misc_feature (161)..(221): n is a, c, g, or t
cggcctgaggcgagcggcggggcgtggggcggtgcctcggcccgggctcgccctcgccggcgggagcgtccatggcccccgggcgccggcggggcgcggccgcggcctgaggggccatgtccggggtggtgcggaccctcagccgctgcctgctgccggcnnnnnnnnnnnnnnnnnnnnnnnnnnnnnnnnnnnnnnnnnnnnnnnnnnnnnnnnnnnnngcccggaggcgtagtcgcgacatcgacgcgctgctggcccgcgagcggcgcgcggtccggcgcctggtgaagatcctgctgctgggcgcgggcgagagcggcaagtccacgttcctcaagcagatgcgcatcatccacggccgcgagttcgaccagaaggcgctgctggagttccgcgacaccatcttcgacaacatcctcaagggctcaagggttcttgttgatgcacgagataagcttggcattccttggcagtattctgaaaatgagaagcatgggatgttcctgatggccttcgagaacaaggcggggctgcctgtggagccggccaccttccagctgtacgtcccggccctgagcgcactctggagggattctggcatcagggaggctttcagccggagaagcgagtttcagctgggggagtcggtgaagtacttcctggacaacttggacccggatcggccagctgaattactttcctagaaagcaagatattcctgctgggctaagaaagcccccaaggggaaattgtgggaagcatggacctctctttattaaagaaaaatccccccttttaaaaaatggttgggaatgttggggcacgggctcaaaccgggttccccagagtggccccaggaaaacgggggtttccccaggtgggccctttcc

SEQ ID NO: 178033 - DNA, 985 bp, Homo Sapiens
ggggcccgcggcaggcctgtgggctgcgaggaggagctttgcctagcttgcaggcagcgcagggcagacggcggcaggagaagcaagatgaatgcaggctcagatcctgtggtcatcgtctcggcggcgcggaccatcataggttccttcaatggtgccttagctgctgttcctgtccaggacctgggctccactgtcatcaaagaagtcttgaagagggccactgtggctccggaagatgtgtctgaggtcatctttggacatgtcttggcagcaggctgtgggcagaatcctgttagacaagccagtgtgggtgcaggaattccctactctgttccagcatggagctgccagatgatctgtgggtcaggcctaaaagctgtgtgccttgcagtccagtcaatagggataggagactccagcattgtggttgcaggaggcatggaaaatatgagcaaggctcctcacttggcttacttgagaacaggagtaaagataggtgagatgccactgactgacagtatactctgtgatggtcttacagatgcatttcacaactgtcatatgggtattacagctgaaaatgtagccaaaaaatggcaagtgagtagagaagatcaggacaaggttgcagttctgtcccagaacaggacagagaatgcacagaaagctggccattttgacaaagagattgtaccagttttggtgtcaactagaaaaggtcttattgaagttaaaacagatgagtttcctcgccatgggagcaacatagaagccatgtcccagctaaaagccttactttcttactgatggaaacggaacagtcaccccagccaatgcttccagaataaatgatggtgcttgcagctggcgtttcttatgaaaaaatcaaaaaactgataaaccttgggcttaacacccttttaccacgggatagtttccctgggcccccaaggggggtggtggaaccctttcccttaatggg

SEQ ID NO: 178034 - DNA, 1263 bp, Homo Sapiens
  misc_feature (85)..(85): n is a, c, g, or t
  misc_feature (179)..(179): n is a, c, g, or t
  misc_feature (228)..(228): n is a, c, g, or t
  misc_feature (843)..(860): n is a, c, g, or t
gctactatctggctagtcggcgtggcgcgggatgtacggaatatgggtacgtctgtgcgtccgcgaggcacggataggagcggangggggcgggagcagcaggatgccccggagcctcttggtctgtgctaggcggtgactgggtaatcaagcgtgcgggcagtgcgcatccgctctgnggaacggaagcatctatttcatgggtgtgtcgcgtcgcggcggcggtantggtttggctcgtccgatccgggcgcctgacacggcggcattgcgatgtggggctcgtacatggcgcgcggtgggcgtagacgtacgggcatattaccgcgtccctggtgcgttagacgtcgaaggcggggaggatagggccgttcggaactcagccgggcgctggacgtcgtgcctgcgggagtgatgttcattggtatggcttgggtgtttggctatgaatatgggcggcgctgacgttcgacaccgcggcgggcggccctggttggtgcgcggggtcgtcgcgatcgacgtactggtggcttagtcggttgctctgaggctgtgcggcgggagtcggtgacggcgcgcgctaggaagaggcaggatttaattcttgtctgggtgcgttgtcccgtgtctattgcccccggaatcagagagccttggggcccaccaatccttacccagtccttggagttgggcagggtaggacgctggccaagggccagtgctgtctcttgcttacagcctgaggactacgggagcagcagctgtggcctggccgctcccaatgctgggggcttggcttggtgccccatccccttcctgactgagctctatgaaggactcttnnnnnnnnnnnnnnnnnngcaaagcaaagtgctttgaaagaagggaggacaccctattcctgctaaggggtagaggaagaaggtgaaggcggctaggtgcccataagagaaggctggcacaatcttcattcccgccagtgtgatttcagtctcaaaagatgagtatttggctgagaaatggaaggatactccaggctccctacggagttgtgctggggccatgctcgacgtgcccttgcaggcagccctgggtgctgggggcagacatgcaggacactgggaagagtcagaaccacaggtgggagggaatctcaagagcccaggctccccactgagcctggccagcagctttgaactccttcagaggaccctaaaagtgaaggaagatgacatcctcatttctacctgagttgtgctcgcc

SEQ ID NO: 178035 - DNA, 469 bp, Homo Sapiens
  misc_feature (14)..(14): n is a, c, g, or t
  misc_feature (54)..(54): n is a, c, g, or t
  misc_feature (153)..(153): n is a, c, g, or t
  misc_feature (179)..(179): n is a, c, g, or t
  misc_feature (194)..(194): n is a, c, g, or t
  misc_feature (199)..(199): n is a, c, g, or t
  misc_feature (204)..(204): n is a, c, g, or t
  misc_feature (215)..(215): n is a, c, g, or t
  misc_feature (278)..(278): n is a, c, g, or t
  misc_feature (335)..(335): n is a, c, g, or t
  misc_feature (339)..(339): n is a, c, g, or t
  misc_feature (351)..(351): n is a, c, g, or t
  misc_feature (457)..(457): n is a, c, g, or t
cctcccaaatcctnaagcccaaaaaactcaacttttgaaaactgaaaaatcaanactggcggggaaatgaaagaattgtgccaagcccttctccttaatgggcaccctagccgcccttcacccttccttccctcctacccccttagcaggaanagggtgtccctccccttctttcaaancactttgccttgcantttantttanttttttaagantccttcatagagctcagtcaggaaggggatggggcacccaagccaagcccccagcattgggancggccaggccacagctgctgctcccgtagtcctcaggctgtaagcaagagaccaggncatngcccttggccancgtcctaccctgcccaactccaaggactgggtatggatcgctgggccctaggctcttgcttctggggctattggagggtcagtgtctgtgactgaataaagtttantttttgtggtca

SEQ ID NO: 178036 - DNA, 1088 bp, Homo Sapiens
atggggtccccaggcatccccttcaaaccccaagtttttattcaccgcggtcctagggccccagggtcccaggggctctggggcctcccttccgatgctccccaccccctggccccctgcaccttttggtttctgcagggaccgctgggccctggatgaggcctctcccacctcgcgggaagaccagagacaccttcggatgccaccttgacgctggagcggatctggacctagcccagcagctcccaagagactgtgtttccagcagcctgatccttgttgaggcccagggaagtgtcccaggccccgacttgccagacgaggctctattccggctgctgcagcccacttttctcctttatttaaataaatactcattctgtgctgtacacgtcccaagcagcaggggcaggcagcccgggtggcctgcgtggcaggggagcagctgggcagcccctcacttgggcgactcccggcctggggagagggctcgctggctctccagcccactcaccagtctctggatgctctgcagttcattggccgcctccttggccgagccactgggcgacagggcaccgcgggatggggcccctactttgcggagagccagctcgggcagggggctaggctcccggctgtttccaccagcggccttggagccctcagaggccagcccggtggtgaggaggctagtgctaggcgggatggtgaccgggatctgataggggctgaaacgcagtcggggccgggcactgcccaggaagggactccgggagagggagccggcggctgcggcggcggcagctgcagcactagtggcgggcaaagccgaggcggctgcggctgctgctgccatgtaggagtacgggtaggggaagaggcctccgaaagtgggcattggaattccctgagatgccagcatgtgctgggagaggtggaacgggaagggcgcggcggtgcttgctgcgctggccgcgggacccagcccgcctgcgtccagccccgcggcggtcccaggcccgccacctccgccgttgccgccgcctgccaccgaggccagtaggtgacccatgcccatggcggag

SEQ ID NO: 178037 - DNA, 629 bp, Homo Sapiens
atgagccactgtgcctggccccttcctgtaaaatttttaaatggagaattgggtgcgagatgtggtttccagcctggtgcctggggtgctgagctagtgagtggtgcagtccaggacacctttgctttatctcacttacacggtcacctgggagccggctcaagtggctaaagcatcctgggggcccagagccaggtgataggtccctctggccaactggacagttgaggcctgtggttacccgaagcccagctggggccctgggtccagccttcgcctcccagactcttgcacctgcttagcacagctgttccacgtctgtgtgagctgctctaggccgagggcctcagtttcaagagtgtgttggggtgggatggggcaggccgtggtcctccagcatgaggaaggagccatgaggagttcccatgaacctcccggagacttgccataaagtgtttctaagtccaccatattaaggggtagggggttggggatttacccattttaactggacccaccattttggtggagggtggccccgagccttgggggtgcctttggaacattccattttgtgccttggggaaggaaaagcccagccttgggcttaaatgtagaaaaccccccat

SEQ ID NO: 178038 - DNA, 385 bp, Homo Sapiens
gacaatcggttctggactcacccctcatccgggcccccagccccgccagagcctccgtggctgcgggtgttgggaaccatgcctgccagccagtatgtgcccctcacccaggcctggctgggccctggagagtcctgtttgcacagcccaggggtgtccggcctctggcccgccccggagcagggagggtggctggggccaagccccgagggcccctgcaagcactttacttcctgttcctccccagccttaaccccaaagccctcctgcaccccaaagaagccactgaggctggccgagccacactgtctccccaggggcgtcgacctggcccagctgggtccccagggccagcacatggaataaaatagccagggccacactc

SEQ ID NO: 178039 - DNA, 1029 bp, Homo Sapiens
  misc_feature (770)..(797): n is a, c, g, or t
ccgggccgggcagggccggggcgtgggccggcaggaagatggcgaacgtggggctgcagttccaggcgagcgcgggggactcggacccacagagccggcccctgctgctgctcgggcagctgcaccacctgcaccgcgtgccctggagccacgtccgcgggaagctgcagccccgggtcaccgaggagctctggcaggctgccctgagcacgctcaaccccaaccccacggacagctgtcccctctacctgaactacgccaccgtggctgccctgccctgcagggtgagccggcacaacagcccctcggccgcccacttcatcacgcggctggtgcggacctgcctgccgcccggagcgcatcgctgcattgtgatggtctgcgagcagccggaggtctttgcttccgcctgtgccctggcccgggccttcccgctgttcacccaccgctcaggtgcctctcggcgcttggagaagaagacggtcaccgtggagtttttcctggtgggacaagacaacgggccgggtggaggtgtccacattgcagtgcttagcgaatgccacagacggcgtgcggctagcagcccgcatcgtggacacaccctgcaatgagatgaacaccgacaccttcctcgaggagattaacaaagttggaaaagagctgggggatcatcccaacccatcatcccgggatgagggaactggaagacagcagaggaatttgggacggaatcctatcggggcttggccaaaagcccgcccctgcattcnnnnnnnnnnnnnnnnnnnnnnnnnnnngccagaacggagccaccgcgaacccttcgcctggggggggcaaagggcaatcctccatggaaactggaaggccgcccccatcgagcgggaaacaattcccatgtccgggtgaatccaccgaagaccggcccggatgggctctgccgcccattctggggggggccccccgccactcctaaatgcaggcggggccttccccccagaaaaacgcgccccccgtgcgcgatacgtg

SEQ ID NO: 178040 - DNA, 882 bp, Homo Sapiens
gaaaatgctgtccagtggggtgtgtacatcaactgttcagcttcctgggaaagtagttgtggtcacaggagctaatacaggtatcgggaaggagacagccaaagagctggctcagagaggagctcgagtatatttagcttgccgggatgtggaaaagggggaattggtggccaaagagatccagaccacgacagggaaccagcaggtgttggtgcggaaactggacctgtctgatactaagtctattcgagcttttgctaagggcttcttagctgaggaaaagcacctccacgttttgatcaacaatgcaggagtgatgatgtgtccgtactcgaagacagcagatggctttgagatgcacataggagtcaaccacttgggtcacttcctcctaacccatctgctgctagagaaactaaaggaatcagccccatcaaggatagtaaatgtgtcttccctcgcacatcacctgggaaggatccacttccataacctgcagggcgagaaattctacaatgcaggcctggcctactgtcacagcaagctagccaacatcctcttcacccaggaactggcccggagactaaaaggctctggcgttacgacgtattctgtacaccctggcacagtccaatctgaactggttcggcactcatctttcatgagatggatgtggtggctttttctcctttttcatcaagactcctcagcagggagcccagaccagcctgcactgtgccttaacagaagggtctttgagaatctaagtgggaaatcattttcagtggactggtcatggtgggcatgggggtctctggccccagcctccgtaatggagactataagcaaggccggctgtggggaaccgtcaagttggtggac

SEQ ID NO: 178041 - DNA, 1306 bp, Homo Sapiens
  misc_feature (104)..(104): n is a, c, g, or t
  misc_feature (324)..(324): n is a, c, g, or t
  misc_feature (417)..(428): n is a, c, g, or t
ataatcgctccgttggaacgtacggggcgaagaaaaagagggcccagacctccatcaataggaggcgcgtgctgtaaaaatattccacggcgtggttatatgtngtacacgccgcggggggtttcgacatatacaaatgctcacagccgttttaaacacagtggcggccgttattgttgatgaaaaacaataatatagtggggcgagaacacgcgagcggcgtagatagaggaaagacacacggggcgcggagaaatatcgggggaccgctcaacatatatagggtgttgcataggggaaaaaatcagcgtagcgcgggctgtncacaagggagagacgcacgcgcggtctgtataggggagccaccatataaagtgcgggcgccgagtgtttgccacagttttgtaccccgtctcnnnnnnnnnnnnctcacgggcgccaacacccgcgcggaacaccacatacagagagaaggccccccattctcgagatgcgcgtcatacgagattgcgtatcatcgcgatcgggcttactcttagggtttgcattctgcgtccacgaatgtcctggggtcttatttttccccctgagtggggggttttgtcaaccaaagatgggttttgtgcgcggttggggaatcccctgccaacgccccggcggggtttcccttccctggacccggacggcgtgccggaagggttccccggggtcccagcacgtttgttcttgacggggagtgataggcgtgaaacaccagaccagccccccagtttggggggcctgcctttttcctcttcgggacatcggcggcgcgggcccacgggagccacttgcgctcccccagccccagcagccggtccacgcccttctcctcggggtggcctccttcccgcttgcagacctccgcgaagtcctccttgctcaggcccgtgggatgcttcttcacgttcttgtagccaagggcggccagcagcgcctcgcgctccgcctcccgcacggctgccagttcctcctcgcggctcgggcccgcgcatggcgcccggcccttggcgtaccaagtgaggtcgcggcccttctgccagcggcctaccggcgccatcagcgagttgcccaggtagttctcccgctgcttgtcagtctccacgtcctcccagttgaactggtcctgcccgccgcgcacgcctccacgactggagccgaacacggcccagggaaggcagttgcctggggcctgcggcttgcaacctgcaacccgcaaacccgagacccgctacccactaccgtcggacccaggcccgaccccccc

SEQ ID NO: 178042 - DNA, 882 bp, Homo Sapiens
  misc_feature (46)..(46): n is a, c, g, or t
  misc_feature (68)..(68): n is a, c, g, or t
  misc_feature (133)..(167): n is a, c, g, or t
ttaatcaagttggaaggaggaaaaaagtttaaacccaaggacctanaaaattgttcccacccaaaaancggtacgtgggaattgattattcgttacaattaaattttttctcattataccataccatccaccnnnnnnnnnnnnnnnnnnnnnnnnnnnnnnnnnnnacacaaccatacaaaatggctctacagcatacgtagtgtacggacagcatgacggggccttgctttctctcatactgccagtgtttcatgcttacataaaaacgtgaaattccatcatataaataatacgtacatgcttcatcccagactcaaacgtcctctgcgtgcaccttgcctttgagtccttgcttccaagaagcacagcatctctgaccaagtgtgtgtgagtgtgtttaaaggaaccacaaagcaaagataaggtttctctttttttcagagttcatgatcctaagactttctgtgttctctcctgtgactgagctgagtggggcttgtttgtttctcttctgtaaacaaggataatgtttttccccttttaggagtagagtcatcatttcaatcacatgaaagaaactagcttctccctgtgtccgtctggtccggagagcttgcgttttaggaacgtggtaacgtagtagctgaaaggagccaacggcttgatgggatagtctgtgccgaaactcccgatcccaacatgctgcgtacagacacacgagcgaaaacggttcgccctcccctgggtatccaaggatgaggacgtgagtatgaaagtggtccccgggcccagtatccattccgtcgtgtgacagacaggctaactgaccatcccttctccaataccaaaacattcttttttgttgttggggttggttgc

SEQ ID NO: 178043 - DNA, 1045 bp, Homo Sapiens
  misc_feature (528)..(528): n is a, c, g, or t
cgtctacttcgactctgtgcgggactgctacgaagcctttgtcatttacagcttcctgagcctgtgtttccagtacctgggaggcgagggcgccatcatggctgagattcgtggaaagcccatcaagtccagctgcttgtacggcacctgctgcctccggggcatgacctactccatcgggttcctgcgcttctgtaagcaggccactctgcagttctgcctggtgaagcccgtcatggccgtcaccaccatcatcctccaggcatttggcaaataccacgacggggacttcaatgtccgcagcggctacctctatgtgaccctcatctacaacgcctccgtcagcctcgccctctacgccctgttcctcgtccacttcacccaccagggagctcctgcggcccttccaaaccgccctcacgtgtctcaccatcaacagcgccccttcctgttctctgccgcgctgccgtggcatcgaacgcgggcacggaaacgaggttccacataccggacatgcagaccagcggncgggaacaagctgggggctggcacgctggccgccggctaccagaacttcatcatctgcgtggagatgctgttcgcctcgcatagccaccagaaaagccttcccctgccaggtctacccaaacaagaaggacaacccaccagcccccccggcacacacccagagcatctccagcggcatcaggggagacagtgagccccccaggacatcgtgcagggacgccattccacaaacttctccccccgcctaaccagcaactacacgccagcaaagcccacgacacgaggctaccactccgtagctgtacctccccccccgcccgacccactatcgcattccacaaccaacacccatccccataccccgcccgtataccctgcccccacctcactcgaatcctcccacacgaccaaaaccccctccgacaatacagaacgataacgccgctcaccgacaaacacacaacacgcgtcccggcctccagcctacatctaccctctcatcactcctactacccta

SEQ ID NO: 178044 - DNA, 948 bp, Homo Sapiens
cttagataatatatattaaaaaataaacctccaattccagggtataaaaacagagcgaaggcacttggggctgggggtggaggggtggcccccaccaggccaatactgagatggcccgggtcaccgtggtgccctccagaatggagccctgagtcccccaagcagagggcaggagggagagatggccgaggctcatgcggggccagtaaccccagctgggcccctcccagggcgtggcccacagctccctctcctaaggccctcggggtgtgagatgctgcggcagctgtgtgggtgggggtggtccctcacgtcctctcccccattcctctccttcttgcaaaaggccttcctgggcgggaacctcaagtgcagccaggctggggaacagagttcccccaaagctgagaacaggaggggtctcaggcggcaaaaattcctcctccaaactcctccagctgcttcatggtctcctccaagctgagcaggttctcctggatttcctgggtccgtgctgggctcagggggccgccccctgggaccccatccccatctcgaggaggccccgccccattgtcttcctccgccggaaacagaagctgcttcagggacagcactttccgaagggccgtggcagcgaactcgccctcggggcctggtctgcagaagggcaggaggtcactgaggattctctcggtccgggcatcagctggagacgtctctcggccaccattgccgttctcagagctgctgaggaggggttctcgggtgctgctcgggctgggccggggcttagggcgagaggcaggggcagggactttcagggatccggcagtctcagtgatgagagcacaccagtttttccgctccgacacagtctgtgccaccagctcgtatatctgggcctcctggtcccaggtaaaaaggacgtagaaggctttgtgattt

SEQ ID NO: 178045 - DNA, 1343 bp, Homo Sapiens
  misc_feature (1214)..(1224): n is a, c, g, or t
gcgaggaggtagagggggcgggggtcgcactagggtgtccctagagaacgaggactctgaaggcgggacatttgggcgacccccgggcggggccagccattaaacagtcccacttctgtgccagacactgaactgggctcttgacgggcatcatctcttaatcctcagaacatcccagggagctccacaggatccccatatcctgggccatgagtgagttgaaagactgccccttgcagttccacgacttcaagtctgtggatcacctgaaggtctgtccccgctacacggcagtgctggcacgctctgaggatgatggcatcggcatcgaggagctggacaccctgcagctggagctggagaccctgctgtcttctgccagccggcgcctgcgtgtgcttgaggccgaaacccagatcctcaccgactggcaggataagaaaggtgacagacgattcctgaagctgggtcgagaccatgaacttggagctccccccaaacatgggaagcccaagaagcagaaactggaagggaaggcaggacatgggccgggccctggcccaggacggcccaaatccaaaaaccttcagcccaagatccaggaatatgaattcactgatgaccctatcgacgtgccacggatccccaaaaatgatgcccccaacaggttctgggcttcagtggagccctactgtgctgacatcaccagcgaggaggttccgcacacttgaggagttactgaagcccccagaagatgaggctgagcattacaagatcccacccctggggaagcactactcccagcgctgggcccaggaggacctgctggaggagcagaaggatggggcccgggcagcggctgtggctgacaagaagaaaggcctcatggggccactgaccgaactggacactaaagatgtggatgccctgctgaagaagtctgaggcccagcatgaacagccggaagatggatgcccctttggtgccctgacgcagcgcctcctgcaggccctggtgggaggaaaatattatttcccctatggaggattctcctattcctgacatgtcggggaaagaatccggggctgacggggcaagcacctcccctcgcaaatcagaacaaccccttcagggtgccccatactaaatcccctggaaagccgcattcaaggaggagcctaattgcccacgggccttttggaagtctgaaggannnnnnnnnnntaaggaattcccaaggatagaggctcctcgctgaacattccccaaaacgaccaggctgaaacttcaaggacccttggagtgctccaccaaccggactcaaaaaacgacgccacctggtt

SEQ ID NO: 178046 - DNA, 1003 bp, Homo Sapiens
  misc_feature (67)..(67): n is a, c, g, or t
ctgcatctgcgtcggggtcctccgctctgcctagctcgcgcctagctgtcgtccccggtccgcccgncgctctacgccgccgcgtcttcgctctgacgctcccgtaggcgtctcgtcgtccgcctgcgtcttgctcggctcctctcgacgccgttggctcctactcccctcgcgtcgatgggcccccgtccgccgctacgttttcgaaagtgcgaccggtgggccgcgcgtacgcggcgccctcctcgcactgctgtaagccccgcgtcgcgttctcgcccttcccccgttccgcgctatacgggaccccgcctttccgccgctcgccccctcctccccctctgcgctcccccgcagtctctcctcccacccgcgcggtgccattcttcgcgcgcttcggccctccccagaggttctgggattcccaggcacgaccccattgccctctgcccgcagtagagaagaacttcctctcgatgaaggtcggtttttcaaccctgcaatcccgagaccctcagaataaagattacctgaggttgctatgaaaaatacagattcctgtcctccccctggctgaatcagaatctcataaggtgaggctcaggtttctgcacttttcacaagctctgtaatggttacagtgcaccctaatgtttgagaaccagtggcctaaagagaatgcaacctaagagggcaaggctagtgcatagcttaaatcgctccagcctttggtaatcccttctaaacacagtaccacccatgtggaggagactgcaaggaagctgttattcaaagtagaacagtcagccttgtgcttgagtcctgctttatgcttgcgtgtttcataacaaaacacaaaggcaagtcttcatatcagcacttagtcttgatatccaagtagctgactactgtacttatgataacagcttgaagaggactgcaactctcccctcacgaatggtgacagagttggcttgtcacacctggctcagggaagaaaaat

SEQ ID NO: 178047 - DNA, 185 bp, Homo Sapiens
gcacccggctgccgccgccgccttcgctcggccagcggagcccgaaggcggaacagatcgctgtagtgccttggaagtggagaaaaagttactcaagacagctttccagcccgtgcccaggcggccccagaaccatctggacgccgccctggtcttatcggctctctcctcatcctagttcttta

SEQ ID NO: 178048 - DNA, 1211 bp, Homo Sapiens
  misc_feature (472)..(472): n is a, c, g, or t
  misc_feature (475)..(475): n is a, c, g, or t
  misc_feature (477)..(477): n is a, c, g, or t
  misc_feature (484)..(484): n is a, c, g, or t
  misc_feature (486)..(486): n is a, c, g, or t
  misc_feature (489)..(489): n is a, c, g, or t
  misc_feature (491)..(492): n is a, c, g, or t
  misc_feature (494)..(494): n is a, c, g, or t
ttcgctccccccgtgtgccgtccgcgtgtcagctggacactcctgtttgcgggtcccctgaccgccatcggtgaatagtcggctgatgccgcgcctcggtgctgacgccgcgttgcctaccccgtgtgagtcgatgcatgcgtggctctggcgctggtatgttggctgcttgccgtagttcccttcatttgacgcgcctgcgagctttactgcgcccagagccaaatcctcgtccagtgcgtcaccaccctctcagcgccgtctctaggggtacccctgtattgtgtcgagtaatcctcttccgacagtagaccgagcatggcttgcagaggggtccacttgtcaaccgggcgggcccgaacctgttgccagatgttcccgggggtcgtctcgtatgaggattcggtcgagtcctctgggagcctagaccccaccggggtacccatggagcttcgggggctccaccgccagngangncagtccncnccngnncnggaccccaccccaccctgggtctgtccatctcagtcccggcctgagcctctggcccaaagccaccctcttctgagcagggcacgcagagcgagagactgggagcagcagacaggggcaagagcacggcccatgagcccaccctccacttcccagattggtcagagttacatggtcacctccctgcacctggcaccatcagggcagactgcaagcttgccagttgtcttgcctgtccctgctccgagggtcaaagaacacaggtagaatggtcccaggaggggaagggagagacagatccaggctggcctccaagctcgactttctgaggggcccaggggaacatgctgcacctcccacatctcaggtgctccgtctctgaaaggggcacacgcaggcttccccggccatcattcaggtcaagacctttcggggagagctggcccgaccccagcatgcgagggctgcccacactgagaggctccacaaagaagaggctgctagggcaaggttagagtctgggacactggctccacctccccttcccaagcccagcccttttctgacagcagttgtttaccagtcagggttcagcagatgggggctcagggggtgtcaggcagcgggcccgatggtgatgctgctgttgtgaccctcggccgtacagccggcccagtaatgagtgtccaccccgccgtgatgaaaccagccacgcgtcc

SEQ ID NO: 178049 - DNA, 824 bp, Homo Sapiens
ggggcgcgttgtttccgcggtagtcagggcagtttctaccgcaggcttaaggaggcttcgggctcctgggatttctgtccgcgctcctggccctcgtccttcgcgccagagcaggttcgcaaactcctcagacccttctgctcccggccgccgctttccgccggggcgagacccccaggttcaaaatgagcctgtttggaacaacctcaggttttggaaccagtgggaccagcatgtttggcagtgcaactacagacaatcacaatcccatgaaggatattgaagtaacatcatctcctgatgatagcattggttgtctgtcttttagcccaccaaccttgccggggaactttcttattgcaggatcatgggctaatgatgttcgctgctgggaagttcaagacagtggacagaccattccaaaagcccagcagatgcacactgggcctgtgcttgatgtctgctggagtgacgatgggagcaaagtgtttacggcatcgtgtgataaaactgccaaaatgtgggacctcagcagtaaccaagcgatacagatcgcacagcatgatgctcctgttaaaaccatccattggatcaaagctccaaactacagctgtgtgatgactgggagctgggataagactttaaagtttagggatactcgatcgtcaaatccctatgatggttttgcaactccctgaaaggtgttactgtgctgacgtgatataccccatggctgtggtggcaactgcagagagggggcctgattgtctatcagctagagaaacaaccttcttgaattcaggaggatagaaatctccctgaaa

SEQ ID NO: 178050 - DNA, 834 bp, Homo Sapiens
  misc_feature (666)..(700): n is a, c, g, or t
gggagaggccacgcccccggaagcggcggtgcagaacccagggaccatgggcgcctccaggctctataccctggtgctggtcctgcagcctcagcgagttctcctgggcatgaaaaagcgaggcttcggggccggccggtggaatggctttgggggcaaagtgcaagaaggagagaccatcgaggatggggctaggagggagctgcaggaggagagcggtctgacagtggacgccctgcacaaggtgggccagatcgtgtttgagttcgtgggcgagcctgagctcatggacgtgcatgtcttctgcacagacagcatccaggggacccccgtggagagcgacgaaatgcgcccatgctggttccagctggatcagatccccttcaaggacatgtggcccgacgacagctactggtttccactcctgcttcagaagaagaaattccacgggtacttcaagttccagggtcaggacaccatcctggactacacactccgcgaggtggacacggtctagcgggagcccagggcagcccctgggcaggagacgtggctgctgaacagccgcaaaccatcttcacctgggggcattgagtggcgcagagccgggtttcatctggaattaactggatggaagggaaaataaagctatctagcggtggaaannnnnnnnnnnnnnnnnnnnnnnnnnnnnnnnnnnaaacctccaggcattctatgtccggggggcggaaaaagagggtaatgaatgggcacctggcccatacctggttttcctgaccccagcttttccttggtacaaggggggaaaaatttgcccgggcctccccataa

SEQ ID NO: 178051 - DNA, 1030 bp, Homo Sapiens
  misc_feature (456)..(660): n is a, c, g, or t
ggagttgagtctgtgtgtgtagtggacttgaattgggtcagtttgtcggttggttcggcggtgctgcaatatgttggtgctcgttccagcgcgccgcgtagtcgtttcactgtgtcggctgttgtctgtttcgtctcgtcctagattggttccccggactcgaccctgtgtggcgtgaggtctctttctgttgagctgagtgtccttgtctctgttactaggttggttggctcgtagttcccgcgtgggtgccccttttgcgcgcgagagggcttgggttgtggcgggtcctcgtcgtaggatatatgctgtatggtattttccgttttgcttcgtgtggtgggggctcgctcatgcgtggtcagtttgtgtgggggactgggggcgttggttgtggtagggcgggcgtggctttggtgttggtggcggttcggtagcgtaccacgtcttggggtnnnnnnnnnnnnnnnnnnnnnnnnnnnnnnnnnnnnnnnnnnnnnnnnnnnnnnnnnnnnnnnnnnnnnnnnnnnnnnnnnnnnnnnnnnnnnnnnnnnnnnnnnnnnnnnnnnnnnnnnnnnnnnnnnnnnnnnnnnnnnnnnnnnnnnnnnnnnnnnnnnnnnnnnnnnnnnnnnnnnnnnnnnnnnnnnnnnnnnnnnnnnntgacttggaggttctcttacatttggtattttttcatgacacctatgactatgctttggagagagtggctgcccccacgaccctggctgggaccaagaccatcagcacttctccatcaccaggctgagccaggatgaggtgggtggtcgcagtaggtgaaaaggggccaaagatactcaaatgaaagccacagaagccacacccatgaggctgctgcctgggcagaaggcccagaataccctcctaaatggaaaaacgcaaagcacacagcgatcatgtcaagggcagtcatgtgaaagaaagaaacaaacaaacaagtatcttgccacaaccccaaactacagacaacagggcgcattcccctcatgcc

SEQ ID NO: 178052 - DNA, 951 bp, Homo Sapiens
  misc_feature (856)..(856): n is a, c, g, or t
gtggcgaattccgcacgagggtcaagtggggcaatcgctggtggaggtggcggagagcaaggtggcagccgggagcccatcagaggaaaagtccgaggcgctggaaccctgcgtccaggcgtgacggtcatcccgaaaggccggccccagtttcatccttttatcctgtaagctgccaccatgaccctgacaaaaggttccttcacctactccagcggggaggaataccgcggcgagtggaaagagggccgcagacatggctttggtcaactgatgtttgcagacggtggcacctacctgggtcacttcgagaatgggctctttaatggctttggagtactgaccttctcagatggctcaaggtatgagggggagtttgcccagggcaagttcaatggcgtcggagtcttcattcgatatgacaacatgacctttgagggggaatttaaaaatggcagagtaaacggttttggcctgctgactttcccagatggttctcatggaataccccgcaatgaaggtctctttgagaacaacaagctgctgcgacgtgagaaagtgttctgccattgttcagcgggccccagagcgcctccaagtcagcccagaaatctcaactgcctggacagcgccagaggggcacccagtggataacgtattgggtataaaccaagtgccacctgattgaagaattccgaaggtaaatcaaatgcattcaccagcttgatattaaacagaccaatgaaagccggcaaccgaacgcccatatccatatgagcactgccatccattccacattccagaccactgccgccaccagattagaagagccctcagagatagatgtggcacaacnaaaactctcgcgtcgcgattaacagtcgcggcggtatatacttgaacccaaaagccaataacctcacaagtccaagacactactggagacgaact

SEQ ID NO: 178053 - DNA, 202 bp, Homo Sapiens
  misc_feature (1)..(1): n is a, c, g, or t
  misc_feature (117)..(117): n is a, c, g, or t
ntcaactcttgaagaggcccagacagggaggattgcttgtggcccgaaatttggagaccaaccctgggcaaagtaccccaaacctccttctctacccaaaaaattcgcgagaagacnacgagaactccgagggatcctttgttcgggggcgggcaaaacgaaggggatggaaaggggccccggggccataaaccggttccca

SEQ ID NO: 178054 - DNA, 1098 bp, Homo Sapiens
cctgctctgtgcgtatgtccaacggcaccttcatctaacttccgtacacgaccgccgacggagatcatgtaccgctggcttctcatcggctgatcactgcacgctgtcgcgcactgctgtttatcgtcgcacctcctgcgcgtattgaaattcatctctccttctgatcctcgctgcgcacctatcaccaccctgttcgagggggtgcgcgcgtaccggtctcctatgccattcgcactgagagtaactcgtccgtacccacccctatttctctagctcaccgcgggggtcttctcttcttcctgcctcagggctttgcacctcgcaattctttacgccccagtttctgtcgagtttgttttgcctggtccatcctcactgctccactcagggatgtcttgtcgccagcctctcgcacctcgctcccagggtccctgtgcttcccagaagaaggtctggtggggcctcagaccttgcagctcccggagtgtgtcggtcagcgtggcgttgaacagcagtgtctgcctgcgggccggcacagccgccaggatggcctccaggtccacggtgaagtcagtgcagccctgtttccagcagccgggtctgcctcatccatcaccaggaagcggatcttctttatactaaaagtgttggagctgcgcaggtgatctgccaggcgccccggcgtggcgatgaccacgtgtggtttccgagagagctccagcgcctgggccaccatgtccatgccaccgacgatgatgcagtctttcagccctagaggcttccccaggacccggaactgctctgcgatctggtaggccagctccctggtgggtgtcaggacgaggcagaagatgccatagggatcctcagacagcttctgcaagatgggaaggacaaacgctgctgtcttcccactgcctgtcttagcacagcccaagcagtctcgaccctccaggatggcggggatgcagccgagctgcacgggcgtgggctgcttcaaacccagctgccgacattgttccacgagccacgatgacagcccgagctccgcgaagcctgccatccttgtggccgcttgtaggggccccttgtccc

SEQ ID NO: 178055 - DNA, 407 bp, Homo Sapiens
ttgcatgcaaagttgcatgcagcccgtgggtatgactgtctcaggcccccagctcatttgccaagaggaaaccttaacccccctgagagggtctgcgtttcttctagagctcctacctcagtggtgtgcacagagttggagacacctgagggctggtccacgtctcacctttgccatacgggtcatttcttgatcaaatatatgactggggtcctggtttactcccgcccaccgtttcttttaaagtattcttaacatgaaatccacaaaagcggaaacaatgaaccattcttgcactttacagaatcattgtccttagctttagaggttgttaatttcttgtttttaacatgaacagaatgtgtggttctgaaggtgtgtgggggtctcaagaaattgtcctttgg

SEQ ID NO: 178056 - DNA, 271 bp, Homo Sapiens
ggggttcgaggttcgtttacgcgccgcttcgccgtgcaggtggtggcgaagcgctcctccgaaaggtttcggaagctggtggtagctctgaagataacgctgcgttagggcatactgcggcggaggatggaactccgattgaaagcagttgctggagtggagcacgaatttcaacaagccgcatgttgaagtgtgaggcgtgaaagggtatgtctgatatttgctttaaaatgctccagcaaagaaattaagggatggatgaagcaaaaga

SEQ ID NO: 178057 - DNA, 886 bp, Homo Sapiens
ggggggttttcttttccaaaactagggaaagcaaaccagggtttatttttaatacaagggggccagggccggggggttctgccaagtgaattaggggctttgggccctagggagagggtcagtctccaggcccaagttcagaaagggagggagccctgggctcaccccgtccctatcccgaagggcccccaggtttaatgctgacagtccctgttgggcatgcctggggggaggccacccacaacgtccctttctgtgaaagaggcacgatgattcgaggacccattcctgctgggaaaaagctcagccacccagtgatgaagagcggttgtcctgtctggaggctcacttttgcctcagctttttgatgaaggaaacctcgtctcgattccggatgccgtagtctcggagcttctttctgtcttccgtgagtttctctcctgcagaggtcagatggtacgtcctccacacgtaggaccagctgatgtgctgaatgcccccttcacgctcctgcttgagctgcacgtatctctggatggccttcttcaggtccaggactgtggcactctgcactacaaccacgggcattacttctccatccatcttgcacactcggaccgtcattgcctggccgtattctagggctatttgggagttgacttcttccagagtaacctggatcggcagatcgcagagcagcgggtcctgcaccaccatagccagaccctcctggaacacgtccatggcctcggagtgcggcagcgcctcttcttcgtcctcatcttcctcttgcgcctcgggcccacccgcggcctccgtctcctccagggccgcccctctcagccgggctctgcccgcactgccagcccgcactagggaggccccc

SEQ ID NO: 178058 - DNA, 890 bp, Homo Sapiens
  misc_feature (28)..(28): n is a, c, g, or t
  misc_feature (68)..(68): n is a, c, g, or t
  misc_feature (85)..(85): n is a, c, g, or t
  misc_feature (462)..(575): n is a, c, g, or t
  misc_feature (583)..(602): n is a, c, g, or t
  misc_feature (685)..(694): n is a, c, g, or t
tccccctcttgcaggcccctacgtgtgnaggacgtacccatctgacctctgcaggaaaaaaaactcanggaaagacagaaaaaanctccgaagactacggcatccggaatcgaagacgaggtttcccttcatcaaaaagctgaggcaaaagtgagcctcccagacaggacaaccctcttcatcactggtggctgagctttttcccagcaggaatgggtcctcgaatcatcgtgcctctttcacagaaaggacgttgtggtggcctcaccccaggcatgcccaacaggaactgtcagcataaacctgggggccctcaggactaggacagggtgagccagtgctccctcctttcatgtacttggcctgagactgacctctccctaggtccaaatgccctagtcacatggcagacccacggcctggcccactgtataaaataaacctgtttgcttcttagtttgnnnnnnnnnnnnnnnnnnnnnnnnnnnnnnnnnnnnnnnnnnnnnnnnnnnnnnnnnnnnnnnnnnnnnnnnnnnnnnnnnnnnnnnnnnnnnnnnnnnnnnnnnnnnnnnnnncactctgnnnnnnnnnnnnnnnnnnnnaaaaaaacttttcaaaccctcttcttgtgtgcggggcgccccccggcgcaaagaaaattttctaaaactttttctcggggagnnnnnnnnnntagaaaagggcatcgggccccaccccgtataaccacaggaagcgcgaaaacccaaaatgtttggtacaaatcccccaacaaaataaaacggggccgctggccgggaaccctttttttaggaaacacaccccagggcgtctttttgaagtataattcccggggctcctaaacaacgaggcgaccaaaagggggggcg

SEQ ID NO: 178059 - DNA, 1219 bp, Homo Sapiens
  misc_feature (202)..(202): n is a, c, g, or t
  misc_feature (223)..(223): n is a, c, g, or t
tgcataacaggcgggagaagactgatggaacacagatgtacataggattcaaggacgataacgcacgcggtgagaagcgagggaagatacaggaggcggccgagcgaggtcgaagacaacgccgcggtagcccgacttgccggcggccgctcgctcgaggtcggacagttcagagtactcgacgaagtcgtgcctccgtgcnagccgcaggagctcacgccanacgcgtcacagatcgaggagggcgtcagggtagtgagacgcgcggagaaggcacgtagtcacgaccccgaacaagccggcgcgccgcaaggataaatccatatatgagcgacgagctcaccgcaacacgcgctggtctaagacgacataccgggaatagcgtcgtgtaccacatatacgacggaagaggtgaacacgaatatcctcccagcacacagcaaagggataccaaaaatactccggggggcccattaattgggaggcctccctaaaacggggcgcggtaccagccaggcgtgcgccagcataacgctggagttagaagacactctcatattggcaccgcctagggaaccggtactcatctgaggaaaaggggtgcccgggggagggacacagccgcaaaccagccgtaggcggcggggccaagtggctgagacccccgccagccgagggtgcccagagtcagtctccagaccgggcgctgccctgccccgcgtccgagaggcccggctccctcggcccccggccctccgcctccggaagcccccttcctcccggctcgaggccccggggtcggctcccgcggctcgcagggccccgccgggggtcacccggaggagccttctgccgggggcccagaaccgtaaccctgcagcgggggtgtccgggagggcgtcccaggaaacagccgctccccaaggactccgggcctgggttgccagggggtttcgaaggcccctgccggctcccgccttctttcggcagcggggcaaactcgctgccgggcagctcccccggggtggcgcggcctcctcgcgcggggcccggcctcgaacccgcggcacccgggccccgcggctcgtccggcccactccacccctgcagccactcggctgcgccccgagtcccgcggcagcccctgggccgcccggccgccgcccgccgaacgctccgcaccacaacagttcgctccccccgcccttcgcgggacccc

SEQ ID NO: 178060 - DNA, 642 bp, Homo Sapiens
ccacagtgggaggtggtggtgggtggcggtggcggggcctcacgacagcttggtgctggtaagaggaagcccgtggttctggctaggctctcatgtccagacagcggggaccaggggaaaacccagccccttctgtaatcccccttcatttcctaccttccttcctcctctgtttagcaaggagggcagctcacttggatgtccttacaacgcccctggccccaggttgagcaataagaaaccagaaccttgcggcccagtggcccgggccagttcaggccgcctccccctcctctgcctggggccattgagcccagcctccagggcccgggtgcgtttgcaggccagtggccactgtccgggctgtgatggcaccaaggcaggtggagcaccaggtaccacacagctgggcttcccaccaggctttcccgcgggggtctcagggagcttctccccagcgctgctcggagtctgcaggaactggccttgttctccttagcccgtcactccatacagtattaggtgaggatggatgcgggcgctgtccttgccgggaagtcactgttgaagttgcagtggcttgttcacacctgtgggaagagaagtgaagactttctccttgcattaaaaagtctgaactgt

SEQ ID NO: 178061 - DNA, 354 bp, Homo Sapiens
taccctggtgcttccaacctgccttggtgcccatcaacaaccccggaacaagttgcaactggccctgcaaaacgcacccgggcccctggaggctgggctcaaatggcccccaggcagaggagggggaggcggcctgaactgccccggccactgggccgcaaggttctggtttcttattgctcaacctggggccaggggcgttgtaaggacatccaagtgagctgccctcctttgctaaacagaggaggaaggaaggtaggaaatgaagggggattacagaaggggctgggttttcccctggtccccgctgtctggacatgagagcctagccagaaccacgggcttcctcttacc

SEQ ID NO: 178062 - DNA, 872 bp, Homo Sapiens
caaccagccaaacctaggttagctgagcggatgaccacacgagaaaagaaggttctggaagcaggcatggggaaagtcacctcggcatcatttggggaagagtccactccaggccagactaactcagagacagctgtggtggccctcactcaggaccagccctcagaggcagccacagggggagccactctggcccagaccatttctgaggcagccattgggggagccatgctgggccagaccacctcagaggaggctgtcgggggagccactccggaccagaccacctcagaggagactgtgggaggagccattctggaccagaccacctcagaggatgctgttgggggagccacgctgggccagactacctcagaggaggctgtaggaggagctacactggcccagaccacctcggaggcagccatggagggagccacactggaccagactacgtcagaggaggctccagggggcaccgagctgatccaaactcctctagcctcgagcacagaccaccagacccccccaacctcacctgtgcagggaactacaccccagatatctcccagtacactgattgggagtctcaggaccttggagctaggcagcgaatctcagggggcctcagaatctcaggccccaggagaggagaacctactaggagaggcagctggaggtcaggacatggctgattcgatgctgatgcagggatctaggggcctcactgatcaggccatattttatgctgtgacaccactgccctggtggtcccatttgggtggcagtatgccccatacctggcagcaggcctagacgtgacccaacccttgtggggggactggtggaacaatccaaggagaaattggggt

SEQ ID NO: 178063 - DNA, 1315 bp, Homo Sapiens
  misc_feature (301)..(349): n is a, c, g, or t
  misc_feature (1001)..(1001): n is a, c, g, or t
  misc_feature (1108)..(1108): n is a, c, g, or t
tcccggcaggaggcggtgggatcaggccgacccgggtcccaggggtgacagcgtcccttctccactgcagaatatcgagaccagccggttcctgctggaagctcctggtctgatctggggataccatgtccaagccccccgacctcctgctgcggctgctccggggcgccccaaggcagcgggtctgcaccctgttcatcatcggcttcaagttcacgtttttcgtctccatcatgatctactggcacgttgtgggagagcccaaggagaaagggcagctctataacctgccagcagagannnnnnnnnnnnnnnnnnnnnnnnnnnnnnnnnnnnnnnnnnnnnnnnntccaggcaacatcttcttcctggagacttcagaccggaccaaccccaacttcctgttcatgtgctcggtggagtcggccgccagaactcaccccgaatcccacgtgctggtcctgatgaaagggcttccgggtggcaacgcctctctgccccggcacctgggcatctcacttctgagctgcttcccgaatgtccagatgctcccgctggacctgcgggagctgttccgggacacacccctggccgactggtacgcggccgtgcaggggcgctgggagccctacctgctgcccgtgctctccgacgcctccaggatcgcactcatgtggaaagtcggcggcatctacctggacacggacttcattgttctcaagaacctgcggaacctgaacaacgtgctgggcacccagtcccgctacgtcctcaacggcgcgttcctggccttcgagcgccggcacgagttcatggcgctgtgcatgcggggacttcgtggaccactacaacggctggggatctggggtcaccaggggcccgcagctggctcacgcgggtcttcaaagaagtggtgttccatccgcagcctggccgagagccgcgcctgccgcggcgtcaccaccctgccccctgaggccttctaccccatcccctggcanggactggaagaagtactttgaggacatcaaccccgaggagctgccgcggctgctcagtgccacctatgctgtccacgtgtggaacaagaagagccagggcacgcggntcgaggccacgtccagggcactgctggcccagctgcatgcccgctactgccccacgacgcacgaaggcatgaaaatgtactttgtgagggggcccgccaggtcacctccccaacctggctcctgaagggggcactgggccgcccctttcccggggaggcaaaattgaagggcccccggaaaaggggagcccccaacctgccacccgg

SEQ ID NO: 178064 - DNA, 650 bp, Homo Sapiens
agcagatgaagaaactgaggccctgtgatgtgaagtgacttgccccccagccacacagctggaccattctggctgctgtctggacaagaagtcgtagggggtgagggtggaagctgggaaacccacaggaggcaaccacactagtttagatcttctggtgaccccacttctcgctgctcatgccgctgggactggggcggcggaaaaaggcgccccctctagtggaaaatgaggaggctgagccaggccgtggagggctgggcgtgggggagccatgggcctcttgggccggagtgttgggtctggggtggcccccaaatagggacttgcccccctgaccatcaacacacatagacctgcaaggacccacgaccctcgtgtatcccaacagcccaagcatgtgacacattggcaagtcccacctggcccgaacaatcgacgcgcattcacagccaacggtccacaggagtctgcactgggcaagcatcgaccgaggcctttcctggcatggcctaacttggccagatggtagatagtctctgcgaaccatgcaacactgccagtaatgctggatcatgcgccatagcttccttgagggcggactagatcggggatggaaggactgtcctcgtgcgcccaagtgaatgggt

SEQ ID NO: 178065 - DNA, 670 bp, Homo Sapiens
  misc_feature (54)..(54): n is a, c, g, or t
  misc_feature (227)..(227): n is a, c, g, or t
  misc_feature (236)..(236): n is a, c, g, or t
  misc_feature (243)..(252): n is a, c, g, or t
  misc_feature (254)..(254): n is a, c, g, or t
  misc_feature (263)..(264): n is a, c, g, or t
  misc_feature (279)..(279): n is a, c, g, or t
  misc_feature (285)..(285): n is a, c, g, or t
attctggccaggaaggatttgggggaaaatttacaggatagggggttgattttnggaggggttcccttaactgtccagtggaccccaaccccgaggagggaccagccacccaggcggggccccccggccaaagggcgggggcggaacgggcggcaaccccttacagcttcccgagccttaccccttggcccttctggtgcttttcgcagtttcggagaacccagaangggaagggncgaggtnnnnnnnnnngnccccggtgnngccccacatcccccntaatantccttcccacccacccagcacccgaatcactcgaagccagcccaaccacacacctgcaggcccgcctggcccttccagcaaccctgttagtaacggcaaagaaacccggaggagcagcaagagatagcatgacattctttcttcctgccaccaaccacatcccaagtgtcccctggagagcaagatagccttccactgattggctggtgtagcagtattttagccactgaacttcagtggagggtggtgagcagtgtccttatccaccctaatctcatactccctcattgtccagctgaactacctgtcccctgggagtcaggaccctctgcctgctctctttcctctttagaaatggcagttactggctgggcgcagtggctca

SEQ ID NO: 178066 - DNA, 1140 bp, Homo Sapiens
cccttaatggagaaaaatggggactcccaacaggagggcccgtgtcctcacacctccagaattgcgctcacagctcggggaggatcaagtttacaataaaccagtcccattaactcttgcttcagggtttccctggagtcaggcatctctgcacagtccaggccagccaggggctgcagaggggtctgtgacaccccgcccacgatgcagcagtggggacacaagcctgagggaacctggagtgtggagaggcaggagaaggtgcaaggagaggctgccatggtgtgcaaggaacctgggattgcgtctttaaatagttctcagtcattcttaaagtcctccctcaagacacaatgggacctagattaaagagaagccgtctctccgctgtcccagggcgcaggcggaatgcccgagcggtcttcggaggcacgggtgctggtggcacctcactgaagctcagccgggctgtcgccagcccatcatggcctggcagctctgtctgctgtgaaggtgacaatgccacagtcctcggggcaggaacgcccctcactgcatcctgtcaggctgcagctgcggcgcctggtactgcacgaaagtggtgcccgcgggtgctgcggctgagagggcctggggcacggcggcagggtagctgtagcccacgaagctggcagccgtggcaggcgaggcggcgtatgggtactggtcataggtggccggtgggtactgggcgtaggccgggctggccggcgtgtactcaatgtagggcgaggacagcgacgggacaggggcggctgggatcaccacgctgggctgcacgatggctggtgggtagatgtagtgcggggtcagcccgtaagtccgctggatcaaggtggggtgcagctgctgcaccccaatggcaaagcccgtctggaggctccgcggcttggcgcccagatatgccaggttcacgttggccttgcggccgtcgatgatggggttcgggtctttgcaagccctctcagctgccgcccggtcggccatggtcacgaagccgtagccgcgggacttgcccgtctggcggtcggtgatgaccacggcctcctcgatgtcgcccccagccctcgaagtacttcctgagcgaggcgtcggtagtgt

SEQ ID NO: 178067 - DNA, 1658 bp, Homo Sapiens
  misc_feature (441)..(441): n is a, c, g, or t
  misc_feature (1037)..(1037): n is a, c, g, or t
  misc_feature (1068)..(1068): n is a, c, g, or t
  misc_feature (1198)..(1462): n is a, c, g, or t
cttgtctgtgcaaaagccgcatgtttcccttttggaccgtggggggggaatgaccgggcgggcatccatccttttaacgccaaggggggccaggatccaggtttgcctgccagccttttcccacctgcccccgaccaagggccgcagccacggaccctctggaaagtcaagactgggagaagctcaagggcggcccaggctcaggcgacttcccacccacgatggggcccgccagcccgacccggaggagggtccgggaaaccagccggccccgccagggacggctttgcccaccaacgggaggggggcttcatcttcccagatccatggagtcttccagaattgtgctcggctccagtgtcccacatcagaggccatgggaggcgcggggagcctcagggttcctgccccatctgcccagagcctgcagccctgaccaanggagggttccccatacacgggcagaagctgtggacccagggagcctatcccacgccgtcctccgcatgtggcccgtggtgcaggaggggccctgggcaaaccaaggtgcggcccccaagtcccccgtacccaggggtcaccatgcctcagctggcctcacgcccgctccttcccaggggtcaccatgcctcagctggcctcacgcccgctccttcccaggggtcgccatgcctcagctggcctcacgcccgctccttcccaggggtcaccatgcctcagctggcctcacgcccgctccttcccaggggtcaccatgcctcagctggcctcacgcccgctccttcccaggacccaataatgctgccctttatcaacccccagagcagctcccgggccacaggtggggcctcctccagtcagaggcacctgtgccaggggctagggaacatggatctatgccagacagctaagggaggaggaccgagcaggagggctgaggggaggaggtgctgagggaggaggggcccaggctctcccaggcagctgggtcagggcatccaggagagcccagcttccacaccactcagggtggcgcncgtccccctcccgggaaggtgcccaaagccntggacagtcacctcgaggtgactgtgggcagaaactgggcttggcctgccctccctgccagccaccccacccaggcctctccacaactggtctattcggggctcctctgaccaccactttatttttatannnnnnnnnnnnnnnnnnnnnnnnnnnnnnnnnnnnnnnnnnnnnnnnnnnnnnnnnnnnnnnnnnnnnnnnnnnnnnnnnnnnnnnnnnnnnnnnnnnnnnnnnnnnnnnnnnnnnnnnnnnnnnnnnnnnnnnnnnnnnnnnnnnnnnnnnnnnnnnnnnnnnnnnnnnnnnnnnnnnnnnnnnnnnnnnnnnnnnnnnnnnnnnnnnnnnnnnnnnnnnnnnnnnnnnnnnnnnnnnnnnnnnnnnnnnnnnnnnnnnnnnntgaccatcagtttaatgccagggcaaagggggaggaggagacctaccctcgacccagcagaaggcccatgggagccggcacagcgacgccaagagcctccttggtgaggacactcggacctggcccttgggatgctggccgctgacagggccaagcctggtgtggtggggccgtggcccacggtcggacgcgtggg

SEQ ID NO: 178068 - DNA, 952 bp, Homo Sapiens
  misc_feature (825)..(825): n is a, c, g, or t
aaggatttgagggctcaaacgtaggcgtctgtgtttcgcaaaagttggagacgttctaggctgcctctcgttgcctccatctcgctctgcgcgggttttggaggacattagcattctttcttgtatctccgttgattccagaatcgtccgcactaaagtcccctgcagcgtgaccatgtcgagaccccggaagaggctggctgggacttctggttcagacaagggactatcaggaaaacgcaccaaaactgagaactcaggtgaggcattagctaaagtggaggactccaaccctcagaagacttcagccactaaaaactgtttgaagaatctaagcagccactggctgatgaagtcagagccagagagccgcctagagaaaggtgtagatgtgaagttcagcattgaggatctcaaagcacagcccaaacagacaacatgctgggatggtgttcgtaactaccaggctcggaacttccttagagccatgaagctgggagaagaagccttcttctaccatagcaactgcaaagagccaggcatcgcaggactcatgaagatcgtgaaagaggcttacccagaccacacacagtttgagaaaaacaatccccattatgacccatctagcaaagaggacaaccctaagtggtccatggtggatgtacagtttgttcggatgatgaaacgtttcattcccctggctgagctcaaatcctatcatcaagctcacaaagctactggtggccccttaaaaaatatggttctcttcactcgccagagatttatcaatccagcccctgacccaggaagaagttttgatttggnttttgagccttggaggaaaaagaacccaagttaactggagatactgctgctggaatgggccgagacattgctgcaaagaagtcaagcttttttcagacaaaaggtgtgagggggcttgcttggtatg

SEQ ID NO: 178069 - DNA, 869 bp, Homo Sapiens
ggggcagcggaggcggaccgcagtcgagtctgcagagtgttgggtctgtagccagcaaattacttcatcatctagattatccattcagttgatcctaattagcaaggataacaagaatcgtccgcactaaagtcccctgcagcgtgaccatgtcgagaccccggaagaggctggctgggacttctggttcagacaagggactatcaggaaaacgcaccaaaactgagaactcaggtgaggcattagctaaagtggaggactccaaccctcagaagacttcagccactaaaaactgtttgaagaatctaagcagccactggctgatgaagtcagagccagagagccgcctagagaaaggtgtagatgtgaagttcagcattgaggatctcaaagcacagcccaaacagacaacatgctgggatggtgttcgtaactaccaggctcggaacttccttagagccatgaagctgggagaagaagccttcttctaccatagcaactgcaaagagccaggcatcgcaggactcatgaagatcgtgaaagaggcttacccagaccacacacagttttgagaaaaacaatcccccattatgacccatctagcaaagaagacaacccctaagtgggtccatggtgggaggtacagttttggttccggatgaaggaaacggttttcatttccccctgggctggaagctcaaaatccttatcattcaaaggctcaccaaagcctacctggtggggccccctttaaaaaaataattgggtcctcctttcaaattcgcccaagaagaatttattcatttcccagcccccctgggaccccacgggaaagaagagtttggagaattttgggtttttttgaggcc

SEQ ID NO: 178070 - DNA, 879 bp, Homo Sapiens
  misc_feature (854)..(854): n is a, c, g, or t
aggactggtgggggcgggaggcctccctccagccgcacagctgcctccagttgcttttgcctgcattgatgaggcccactgcctctcccagtggtcccacaacttccggccctgctacctgcgcgtctgcaaggtgcttcgggagcgcatgggcgtgcactgcttcctgggcctcacagccacagccacacgccgcactgccagtgacgtggcacagcacctggctgtggctgaagagcctgacctccacgggccagccccagttcccaccaacctgcacctttccgtgtccatggacagggacacagaccaggcactgttgacgctgctgcaaggcaaacgttttcaaaacctcgattccattatcatttactgcaaccggcgcgaggacacagagcggatcgctgcgctcctccgaacctgcctgcacgcagcctgggtcccagggtctggaggtcgtgcccccaaaaccacagccgaggcctaccacgcgggcatgtgcagccgggaacggcggcgggtacagcgagccttcatgcagggccagttgcgggtggtggtggccacggtggcctttgggatggggctggaccggccagatgtgcgggctgtgctgcatctggggctgcccccaagcttcgagagctacgtggcaggccgggggcccggcccggccgtgacggccagccttgcccaccggccaccctcttcctgcagcccccaggggcaaaaaacttgccaacaagctgcacagaaatgtgcaaacccacagcacggactttcctggctgtggaagaagctgggtacagcgcgtggttcccagccctgcaccctgcaccctgcaccaggcccgnccctccggaccaagaaagggggccc

SEQ ID NO: 178071 - DNA, 877 bp, Homo Sapiens
  misc_feature (131)..(192): n is a, c, g, or t
ccgtccgggggcgttcctgggagctgggggccggcgaggctggacccgacgcgcccgggaggagccggccggcggccacgtgacccaccgcggcggggccagcggcccagaaatagcagcggcggcggttnnnnnnnnnnnnnnnnnnnnnnnnnnnnnnnnnnnnnnnnnnnnnnnnnnnnnnnnnnnnnncggccccggaggatgctgctgagccccggcactgcctggctgcgagcacatgatggcgatacgggagctcaaagtgtgccttctcggggacactggggttgggaaatcaagcatcgtgtgtcgatttgtccaggatcactttgaccacaacatcagccctactattggggcatcttttatgaccaaaactgtgccttgtggaaatgaacttcacaagttcctcatctgggacactgctggtcaggaacggtttcattcattggctcccatgtactatcgaggctcagctgcagctgttatcgtgtatgatattaccaagcaggattcattttataccttgaagaaatgggtcaaggagctgaaagaacatggtccagaaaacattgtaatggccatcgctggaaacaagtgcgacctctcagatattagggaggttcccctgaaggatgctaaggaatacgctgaatccataggtgccatcgtggttgagacaagtgcaaaaaatgctattaatatcgaagagctctttcaagggatcagccgccagatcccacccttggacccccatgaaaatgggaacaatggaacaatcaaagttgaaaaagccaacccatgcaaacccagccgcccggtgcctggttgaccccaaggggcccctggtcccccggttaccttgaaacaagcc

SEQ ID NO: 178072 - DNA, 1608 bp, Homo Sapiens
  misc_feature (18)..(18): n is a, c, g, or t
  misc_feature (264)..(264): n is a, c, g, or t
  misc_feature (1463)..(1488): n is a, c, g, or t
gtctaagagcgagcctgngtggcgattcggacgagggtgggtcgccgggcccgcccggcgccagattaggagtggggctagagaaggggcgaggacgcgaggtgtggcgtcctggggtctggggatgtgaggccagggcctccgaggtgaactggtcctgccctttcgaccccgtgtgtgccctccctcaggccaagtttgagctgatcacctccgaggcctcctacatccacagcctgtcggtggctgtgggccacttcttangctctgccgagctgagcgagtgtctgggggcgcaggacaagcagtggctgttttccaaactgcccgaggtcaagagcaccagcgagaggttcctgcaggacctggagcagcggctggaggcagatgtgctgcgcttcagcgtgtgcgacgtggtgctggaccactgcccggccttccgcagagtctacctgccctatgtcaccaaccaggcctaccaggagcgcacctaccagcgcctgctcctggagaaccccaggttccctggcatcctggctcgcctggaggagtctcctgtgtgccagcgtctgccccttacctccttccttatcctgcccttccagaggatcacccgcctcaagatgttggtggagaacatcctgaagcggacagcacagggctctgaagacgaagacatggccaccaaggccttcaatgcgctcaaggagctggtgcaggagtgcaatgctagtgtacagtccatgaagaggacagaggaactcatccacctgagcaagaagatccactttgagggcaagattttcccgctgatctctcaggccccgctggctggttcggcatggaaaagttggtagagctggcaccactgcctgcagcaccccctgccaagctgaagctgtccagcaaaggcagtctacctccacctcttcaatgactgcttgctgctctctcggcggaaggagctagggaagtttgccgttttcgtccatgccaagatggctgagctgcaggtgcgggacctgagcctgaagctgcagggcatccccggccacgtgttcctcctccagctcctccacgggcagcacatgaagcaccagttcctgctgcgggcccggacggaaagtgagaagcagcgatggatctcagccttgtgcccctccagcccccaggaggacaaggaggtcatcagtgaggggggaagattgcccccaggttcagtgtgttaggacatacaaggcactgcaccccagatgagctgacccttggagaagactgacatcctgtcagtgaggaactggaacccagggacggctggctggaaaggggtccccctgggaaatggtgaaaaagggtggggtgcccccagcccaagtgggaagaaaacagcaagcctcaaggccccgccttccaaaacctccggggggaataaaccgagtccccagatggccccccgcaaaacnnnnnnnnnnnnnnnnnnnnnnnnnnacaccctgggccctaagaaccccccactccagtggccgggtctcttggaaggcgccccggagagggcctgtgacggccctccattttcccccaggctggctccttgcggtggacctttct

SEQ ID NO: 178073 - DNA, 771 bp, Homo Sapiens
  misc_feature (677)..(696): n is a, c, g, or t
ggggaggttgtctgaaggccgaggccaagatggcggtgctgtcagctcctggcctgcgcggcttccggatccttggtctgcgctccagcgtgggcccggctgtgcaggcacgaggtgtccatcagagcgtggccaccgatggcccaagcagcacccagcctgccctgccaaaggccagagccgtggctcccaaacccagcagccggggcgagtatgtggtggccaagctggatgacctcgtcaactgggcccgccggagttctctgtggcccatgaccttcggcctggcctgctgcgccgtggagatgatgcacatggcagcaccccgctacgacatggaccgctttggcgtggtcttccgcgccagcccgcgccagtccgacgtcatgatcgtggccggcacactcaccaacaagatggccccagcgcttcgcaaggtctacgaccagatgccggagccgcgctacgtggtctccatggggagctgcgccaacggaggaggctactaccactattccctactcgggggtgaggggcttgcaaccgcatccgtgcccggggacatctacatcccaggctgcccacctacggcccgaggccctgctcttacggaatcctgcacctgcagaggaaaatcaagcgccagcggaggctgcagatctggtaccgcaggtagnnnnnnnnnnnnnnnnnnnngagcctgtcgccgtcctgtccccagcctgcttgtgtcccgtgaggttgtcaataaacctgccctcgggctgcccc

SEQ ID NO: 178074 - DNA, 1031 bp, Homo Sapiens
  misc_feature (943)..(951): n is a, c, g, or t
ggggtctgaaggccgaggccaagatggcggtgctctcctggcctgcgcggcttccggatccttggtctgcgctccagcgtgggcccggctgtgcaggcacgaggtgtccatcagagcgtggccaccgatggcccaagcagcacccagcctgccctgccaaaggccagagccgtggctcccaaacccagcagccggggcgagtatgtggtggccaagctggatgacctcgtcaactgggcccgccggagttctctgtggcccatgaccttcggcctggcctgctgcgccgtggagatgatgcacatggcagcaccccgctacgacatggaccgctttggcgtggtcttccgcgccagcccgcgccagtccgacgtcatgatcgtggccggcacactcaccaacaagatggccccagcgcttcgcaaggtctacgaccagatgccggagccgcgctacgtggtctccatggggagctgcgccaacggaggaggctactaccactattcctactcggtggtgaggggctgcgaccgcatcgtgcccgtggacatctacatcccaggctgcccacctacggccgaggccctgctctacggcatcctgcagctgcagaggaagatcaagcgggagcggaggctgcaaatctggtaccgcaggtagcgccgccgccgcagccgccggagcctgtcgcccgtcctgtccccaacctgcttggggccccgggaagttgtcaaataaacctgccctccggctgccgccaaaatgcccgcaggtcaaacaaaactataccctgtcggccggcctcggccccccaagaaacctttctaaaaccattcttttgggccgcccgggcccccaaaaggtaagtgaaccatgggccaataggcctgttttccctagaaaaaccccctgggccatcgaaaaagggggctttgggaatttnnnnnnnnnaaataaaaaaagccggcccgcggacgggccaaaacccgtagcccgctcttctggaaaacaaaaacttccctggacaggac

SEQ ID NO: 178075 - DNA, 673 bp, Homo Sapiens
  misc_feature (21)..(21): n is a, c, g, or t
  misc_feature (522)..(530): n is a, c, g, or t
aggtctaagtacgaggcctgngtggcgaattccgcacgagggcgtggacaggaacaccgtggcgctgaccacgcccatcgccgagctgctcattgtggcccccgagaagctggccgaggtgggcgagttcgacccctccaaggagcgcctgctcgagtactcccgccgctgctttctggccctggacgacgagacgctcaagaaggtgcaggcgctcaagaagagcaagctgctgctgcccatcacctaccgcttcaagcggtgatcgcaccacgcctccgcgcctccacccgggccttcctcccccgtggaccccggtggatgacctgcccctctccccgccgcgcccctgcccctcctcctcgctccctgggttgggggctcccttagccgggcccccaagcgcgacggccccggaccggccgcggccccttcccgaacgccggcacccccttccgcttgggctgcccagccctgtcctcgccgggccccttcctcctggaaaaccaggcaggcgggtgnnnnnnnnntcgagtgggggactgtacagaccccgtctccgccctggccccgcggaggagctgcccacctgattcccggacagacctccccaactccgcgtgagacagagaattattcagataatttaaattaaaaaacgacgtgaaaatta

SEQ ID NO: 178076 - DNA, 1609 bp, Homo Sapiens
cgacgaggggagagcgacacgggcctgtggctgcacaacaagctgggggccacggacgagctgtgggcgccgcccagcatcgcgtccctgctcacggccgcggtcatcgacaacatccgtctctgcttccatggcctctcgtcggcagtgaagctcaagttgctactcgggacgctgcacctcccgcgccgcacggtggacgagatgaagggcgccctaatggagatcatccagctcgccagcctcgactcggacccctgggtgctcatggtcgccgacatcttgaagtcctttccggacacaggctcgcttaacctggagctggaggagcagaatcccaacgttcaggatattttgggagaacttagagaaaaggtgggtgagtgtgaagcgtctgccatgctgccactggagtgccagtacttgaacaaaaacgccctgacgaccctcgcgggacccctcactcccccggtgaagcattttcagttaaagcggaaacccaagagcgccacgctgcgggcggagctgctgcagaagtccacggagaccgcccagcagttgaagcggagcgccggggtgcccttccacgccaagggccgggggctgctgcggaagatggacaccaccaccccactcaaaggcatcccgaagcaggcgcccttcagaaacccccacgcgcccagcgtcttcagccccacagggaaccggaccccccatcccgccttccaagacgctgctgcggaaggaacgaggggtgaagctgctggacatctctgacctggatatggttggcgctggccgaagaggcgaagccggagaaggaaaactctccatgccgaggtggtggagaaagccggcccaaggaggaaacgggggtggagaacgccaccccggactacgcagccggcctggtgtccacgcagaaacttgggtccctgaacaatgagcctgcgctgccctccacgagctaccttccctccacgcccagcgtggttcccgcctcctcctacatccccagctccgagacgcccccagccccatcttcccgggaagccagccgcccaccagaggagcccagcgccccgagccccacgttgccagcgcagttcaagcagcgggcgcccatgtacaacagcggcctgagccctgccacacccacgcctgcggcgcccacctcgcctctgacacccaccacacctccggctgtcgcccctaccactcagacacccccggttgccatggtggccccgcagacccaggcccctgctcagcagcagcctaagaagaacctgtccctcacgagagagcagatgttcgctgccccagagatgttcaagacggccaacaaagtcacgcggcccgagaaggccctcatcctggggcttcatggccggctcccgagagaacccgtggccaggaaccggggggacgtgatccccaatccaggctggagcgagcacacgggaggaccctggccccagggcggacgcgcccagggtaacccaaccccttgctgggggggaccccgggggtttggaaatggaactttgcccccgggccccaaggggaaccgcccttcttaagaaaaagtcccggcccccacgtggct

SEQ ID NO: 178077 - DNA, 933 bp, Homo Sapiens
  misc_feature (837)..(837): n is a, c, g, or t
ggtgttgccaggaggctctttgggaaggagtgtcgcccggtcaggtggtgcgctcccggtcactaggggtgtacacgtgaagttgggtgaacacctgctgctcatggtacccagtgattcttgcccgagtgggcagctgagcagaggcccctctgggtcttgcagtccaaagaaccgcagagtagcccaaggggctgtgggtccattttgagtggcagccaagtctgggagcccgtgtgcatcatgtttgggtcaggttggcgtggccaccactgaaataagcaataagtacgggctcctggtacctgcggatctcctgcaaacaggcccagagaacagccttgaagccacctttcccctcaaggggactgaccctgtctttaatgctgcagtggcatccagggatcagtggaacattgctttgagaaccctcctgctgttacggaggcagcacaaagctggtgacccctgagccaacacggcactgggatggctttctaggacagaaccctgtcggcgactgtcacatctcaaactaatagctgattttaaaagccagcagcagcgacgccatgtacctgagtacaggtggcagttgcagagccgtgggctgtagaaggtcagatggggcttcccacaggggaaatctgggcgtgctgtagctcagggtgactcccagctccgtcactagcagggcgacccccttccttctggagccttagctctgaaagcccccagggggggtgccctttcagatgcccccctttccatttcaaaggctctgactctttgatctttgaagcccggacgcgggcactggggcactcggctttcagntttccactgggggaacgaatgggaggttctcctttttcgcccccaagcccaggttgggcccaggccccattccctgggccttcagaaacatgcctg

SEQ ID NO: 178078 - DNA, 1008 bp, Homo Sapiens
  misc_feature (106)..(106): n is a, c, g, or t
  misc_feature (139)..(139): n is a, c, g, or t
aggggggctgtggttcttgctgtggcactgcaggaaagtgcaggggctccagctttcacagcagggggcttgccatcggagccctgccacaggggctgccctccancctgggccgaccgggaggcacacgcccgctttnctgggagatgaggctgactgggacgtctgtctggccgtttcaaggccgccagtccggccctgggcctgtgggcagctccagcttctgggggcttctctgggctgtaagccttttgcacctgggtcctactggcggccaccagctcctcagagatcatccgcacccgccactgggtgaactcgctgagggactcgggcccgtagcggacatccctgacagccgacttcacaaagtccgcctgggccttctcagcctcctcgtcaggacccagtgtggccatgaacttctcccagtgagctgtgaccctgctggtcagctcccgatccaggttctccacctgagagtaagttgaggacgcatccttgccatttgaccttacggagcgtgggcaggagaaaggagactttcaggttgtcattgaccgtcaggaaggggttgccctccaggctgagttcctcgagcttggggaactggcacaaggcagtaacatcccccagctggttgttggcgcatgcggaggacacgcaggtgggacaggcccaggttgtccggcagcgtctccaggtggttgttagacaggtcaagctcctgcagctgcgtcaggcggcacaggagcttggggtccaggtgatcggaaagcagctccaatcctgacaggtccagactccggatcttccccagccggtcgctcttggggcgcccgcgctgcattagcagccgcgccgagagggggcccatggcgaggaggcgcagcccgcgctgacccagtcggccaccccggcgtgtggcgtcgcactgcgtctcctgatcgcgatctagaactagtcgacgcgtgggtcgacgatatacaaaacggccggaccgtacca

SEQ ID NO: 178079 - DNA, 954 bp, Homo Sapiens
ccaaactcgagggtaccaccgacccaggcctccccagatactcgcccaccaggagatggtctccaggtcaggccgagtcaccaccacggtcagcgccgccagggaagtgggccttggctgggccgggcagcccctcagcgggggagcatggcccaggcttggggctggccccacgggttctcttcccgcccgcgcctctacctcacaagctcctcagcagaagcccagagacctgcgcctccccgtggcagaaggccgagtcccgaagtccctcctgctcacccggccctgctcatcctctctcctcccgacccttctccgccctccatgacttccacggccacatcctggcccggacagaggagaacatcttcagccacctgcctctgcactcccagcacttgacccgtgccccatgtcccttgattcccatcggtgggatccagatggtgcaggcccggccaggagcccaccccaccctgctgccagggcccaccgcagcctgggtcagtggcttctccgggggtggcagcgacctgacaggggcccgggaagcacaggagcgaggccgctggagtcccactgagagctcgtcagcctccgtgtcgcctgtggctaaggtctccaaattcacactctcctcaaagctggagggcggggaatacccccaggaaaagggaaaggacccgcggaggcccgggcaggcctcctgaatggaaacccccggggaacggggcacctggaaaaaccaacacccacgccaaacccccgggaacccaacacaaaacccctggcccccgggcccacccaaaggaaagcccggggcaaacgcccaatctcctggaaaacccccccgccttggggaatcaccccgaggtgggcccccagggaaataaacccccagagaagccttttcgtgggtacacgaccccgccaggggttggggaaatcaag

SEQ ID NO: 178080 - DNA, 1502 bp, Homo Sapiens
  misc_feature (18)..(18): n is a, c, g, or t
  misc_feature (754)..(760): n is a, c, g, or t
  misc_feature (763)..(763): n is a, c, g, or t
  misc_feature (786)..(838): n is a, c, g, or t
  misc_feature (879)..(879): n is a, c, g, or t
  misc_feature (884)..(899): n is a, c, g, or t
  misc_feature (901)..(901): n is a, c, g, or t
  misc_feature (915)..(928): n is a, c, g, or t
  misc_feature (1057)..(1077): n is a, c, g, or t
  misc_feature (1169)..(1177): n is a, c, g, or t
  misc_feature (1367)..(1367): n is a, c, g, or t
  misc_feature (1396)..(1411): n is a, c, g, or t
gtctaagagcgagcctgngtggcgaattccgcacgagggggcatcgtgacccaggtgccatggactggagacctggggagacggacgagggctggcacagtcagggaatcctggaagaggtgcagagagagccaagggaggcaaggcctccagtccatcttccccacaggatccacctgatggctggccgagtaccccagggagctgatcgaatagcagtcaaggctgagatggaggccgtttttctggagaacctgaggcatgcagctggggttttggctcaggaggacctcgtgggactgctggagcccatcaacacccgcatcactgatccccagtacttcctggacacgccccagcaggcggcagccatcttacagaaggtaggaagacccaacctccaattacaaatggacatattccactggcagatcatggatgggaacctgacaggaaacatccgggagtttctgcccattgttgggcatgtgcaggtggcacaggtcccaggccgaggggagcccagcagccccggagagctgaatttcccctatctgtttcaactgctggaagatgaaggctacaaaggcttcgtgggctgagacacagtagagggcttgagttggctacgttcatactgggataggcggggccacccagaggctggccagtgagggcccgcacaccacccacgtgcctccagacagcgagtgacatcccatctcctcctctgcattaaagatgacctgctgannnnnnnacnaaaaaccgcaaccaaacaacccnnnnnnnnnnnnnnnnnnnnnnnnnnnnnnnnnnnnnnnnnnnnnnnnnnnnnccaccccagacaccaacaaaaacacacaaaacactttcacnaaccnnnnnnnnnnnnnnnnanccccttggcgccgnnnnnnnnnnnnnnaaaaaaccttttctaacccttttttgtgggcgcggggggccccccaaggggaaaggcgccaacggggccaaattttgttttccccaagaaaaaacccgcggggcacgagaaaaagggggttggggcctnnnnnnnnnnnnnnnnnnnnnccgcccccgggggggggaaaaccggaggggtgtgtttgaagaacaaaaaacctacgaagagggggcgctcccgggggagggttccctctccnnnnnnnnncgttttacaacagcgggaggggggagctccctccagggcgggagcccctcccgagaataataacacaaataaactcaccgcccccccgccggcccggcgggcgcaaatatatctttgtgtaagagaagaagagagggggtgtgggtaaatattctctcttataaaactcctccctcctccgccgccccgnaggggggggaagacacccctccccacaannnnnnnnnnnnnnnncggaacaccccgtgactcgccccccccgcggggttattattacgcgccccctcggttgggccccgccttggagagagaaaaacaatctttg

SEQ ID NO: 178081 - DNA, 1162 bp, Homo Sapiens
  misc_feature (1058)..(1058): n is a, c, g, or t
ggagaggacttagaggtcatattctacctcggtccatcctgacagcgacgctacatttctcgtctcgcatcggactatctaatgtctaacggtaactgggccgcggcgtaccctgcccagttgtccgcccctcacagtgccgagcggtagtcatatacctggtgcggaaggctgctgcccgagaaaagcaaacaagtagggcttataagcattgagtctatcggcatgccgctgctactttaatgtgcatcgcggtaacgatacggacgctccgctacccgggccgtgcggtatactttcacactactgtgcggcgcaacgtagatccctttccccccgccgtaatgttataaaacgggggacgaaaatccaaggacaatacatcccctgtaagggggggtggcaccccaatcccctgaggttgtgaacccccgcctggggccgttcttcagagcccaagagggggtccagaaaggcccacccccttcgaaagctgttcagggagcctcacggccccgtgtttgccacatgggtgtgtgccagggccaaggggacacagaagatggcaggatgacactaatggggtgagcagggcacactggtgcctcccatactgccctccagcaccaggcagggtcaccacagccggcaagcactgggcctggggatgtgtgaagagatagggttattgagaagagaaaacagaacgctggtcatccgtggcactcagggctaggcagtccagggagcagaaaacaggggtcccgggcccagtctccctcctggaggtcagagcggacccctggcactgtgccctggcccagaaccaggctgtgggctccacgctgcacaccccaactcaggagcagaaagcaaacccctgactgtccacactccctgtgactggtccccttcctgccggctcttcacccccagcccatggtggcttcaccccatggcaccagccactgactgcctgcccctccctcccatagtgacactttcctggggtctgcaggtctccggtccacttcatgcagacaggccctgtcccccanctggcccaaggcccaggctaaactacagcccagccatcccaccccaggccgtgaatgccttctccaggagggcaaccaaggatggtgccacatgtgagcacaag

SEQ ID NO: 178082 - DNA, 930 bp, Homo Sapiens
  misc_feature (780)..(780): n is a, c, g, or t
gattacgtggcgacgtcggggccatggggctggccccggtcttcctgcttctggctggcatcttcccttttgcacctccgggagctgctgctgagccccacagtcttcgttataacctcacggtgctgtcctgggatggatctgtgcagtcagggtttctcactgaggtacatctggatggtcagcccttcctgcgctgtgacaggcagaaatgcagggcaaagccccagggacagtgggcagaagatgtcctgggaaataagacatgggacagagagaccagagacttgacagggaacggaaaggacctcaggatgaccctggctcatatcaaggaccagaaagaaggcttgcattccctccaggagattagggtctgtgagatccatgaagacaacagcaccaggagctcccagcatttctactacgatggggagctcttcctctcccaaaacctggagactaaggaatggacaatgccccagtcctccagagctcagaccttggccatgaacgtcaggaatttcttgaaggaagatgccatgaagaccaagacacactatcacgctatgcatgcagactgcctgcaggaactacggcgatatctaaaatccagcgtagtcctgaggagaacagtgccccccatggtgaatgtcacccgcagcgaggcctcagagggcaacatcaccgtgacatgcagggcttccagcttctatccccggaatatcacactgacctggcgtcaggatggggtatctttgagccacgacacccagcaanggggggggatgtcctgccctgatgggaaatggaacctaccagaacctgggttggccaccagggatttgcccagggaaaagggagcagaagggttcacccctgctacctggggaacaacagcgggggaaattcacagcaacttcaaccctg

SEQ ID NO: 178083 - DNA, 742 bp, Homo Sapiens
  misc_feature (530)..(530): n is a, c, g, or t
gagaccccaccctgccttcccggagactcctgctcttcctctgacagtctcatctttggactcatcacctgcctgaccggagtcctgggtgtgggcctgggtgtggagatcagccgccggctccgccactccaacccccgggctgatcccctggtctgtgccactggcctcctgggctctgcacccttcctcttcctgtcccttgcctgcgcccgtggtagcatcgtggccacttatattttcatcttcattggagagaccctcctgtccatgaactgggccatcgtggccgacattctgctgtacgtggtgatccctacccgacgctccaccgccgaggccttccagatcgtgctgtcccacctgctgggtgatgctgggagcccctacctcattggcctgatctctgaccgcctgcgccggaactggcccccctccttcttgtccgagttccgggctctgcagttctcgctcatgctctgcgcggttgttggggcactgggcggcgcagccttcctgggcaccccatncttcattgaggccgaccgccggggggcacagctgcacgtgcaggccctgctgcaccaaagcagggtccaccgaaccaaccggaattgtggtggcccccagcggggggccgtttccaccccgcgttgccccgtgggccccagggggggttcctttccggaaaaaggttggcccgccttcaccttaaccctgggaaaattttgtgcccacaaaa

SEQ ID NO: 178084 - DNA, 952 bp, Homo Sapiens
ggtgcatggccttagctttctaggccactgggagttgtggctgggcttcccatcttccacagagacatctccctgtgggatgggcagatgggcctggccttgagaaaggcattggccattggttgccatggtgaccagggaccacgttgctgcctgtgaatgctgagtgagcgagtaagggaggaggggcgattgagggttcacctctgccttggggaggctgatttctcacacactggctggccctctcattctcactcctccttgggccctgaggctgctggatccagtctgcctgcctccctgtgcagtccagccctgccttgctgcagccccagcccagatggcactcagcgctctcccctgagggagtccctgggcctagccatcccctcactattcccgacccaaagggtgacttttcatctgaacttaaggtgggagatatttttaacttttttccactttggaaaatgtcactgtgacaaaagccagcatactttccctgcacccatctgctcaccagatctcaggcaggaaaagcccctctctgttgaagtcaggggctatcttttggtatacttgtgtgaaagtggctggttgggagcagagctaagtggcttcccattaacctgagggctctttctttactctgggtcagacctgaggttggggaagggcgactgagccatgcttcaaaatgtctggtcctggcttgggcctgagtagggcagagagggcctttcatggctgatcagagcttaccagccccaccccaccatggtagccttagggtgctgagtgcctgatactgcctgacaagtgcctgacacgcagcctagttccttcctggcccctctctcactggctgggaaaccctagaccatgtcagataggacaacacctgctggggttttacatccagatagtaataaacaccatttcatcattt

SEQ ID NO: 178085 - DNA, 943 bp, Homo Sapiens
  misc_feature (654)..(654): n is a, c, g, or t
  misc_feature (672)..(673): n is a, c, g, or t
  misc_feature (675)..(725): n is a, c, g, or t
acgcagtgagtaccttgatctcctgcgtggcctcgtccctggtcttagttccaccgggcagcgggagtcaggaccgcctgtcctcagacccctccgcagcgactgtggcggccgcaggcggttctgagaagtccaagggttgctgggagaggttggttgcacgccagggcctgtactgaccacctccacgtgccactggggctgtaaggaggaatggcggccgtgggcagcctgcttggcccgctgaggcagagcaccgtggaaggccaacggacctgcactccgccgcctgcacacatcctcctggcgaactgacagcagcaaggcctcactcactcgtgtgcaccggccaggcttatgcacgactctaccccgtgctgctggtgaagcaggatggctccaccatccacatccgctacagggagccacggcgcatgctggcgatgcccatagatctggacaccctgtctcctgaggagcgccgggccaggctgcggaagcgtgaggctcagctccagtcgaggaaggagtacgagcaggagctcagtgatgacttgcatgtggagcgctaccgacagttctggaccaggaccaagaagtgaccgtggctccagccaccccgggacattgctaagatgggagggctgttcttanatcactcgttcttgaaannannnnnnnnnnnnnnnnnnnnnnnnnnnnnnnnnnnnnnnnnnnnnnnnnnnctcccggggctttctatgtcggggggccggaaaaaaagggaagtgaaatgggcccctggggtcattagctgttttccctggaaccccgcctttctttgggaacaaagggtggttaaaattctggcccggggtcccccccttataagggggagccggatatttaatttttccaaaaagaggcccgcgggtataacccctggctatttaaagtggagaca

SEQ ID NO: 178086 - DNA, 741 bp, Homo Sapiens
gggagtgacgtcgtgggctgcagcgcagcagcacccaacgcagtgagtaccttgatctcctgcgtggcctcgtccctggtcttagttccaccgggcagcgggagtcaggaccgcctgtcctcagacccctccgcagcgactgtggcgtccgcagtctagcaggaaaggagagggagctttccccgaagaccctcctggaccagccccaggctcctgtgctggttgcacgccagggcctgtactgaccacctccacgtgccactggggctgtaaggaggaatggcggccgtgggcagcctgcttggccggctgaggcagagcaccgtgaaggccaccggacctgcactccgccgcctgcacacatcctcctggcgagctgacagcagcagggcctcactcactcgtgtgcaccgccaggcttatgcacgactctaccccgtgctgctggtgaagcaggatggctccaccatccacatccgctacagggagccacggcgcatgctggcgatgcccatagatctggacaccctgtctcctgaggagcgccgggccaggctgcggaagcgtgaggctcagctccagtcgaggaaggagtacgagcaggagctcagtgatgacttgcatgtggagcgctaccgacagcttctggaccaagaccaagaagtgaccgtggctccagccaccccgggacattgctaagatgggagggctgttcttaaatcactcgttcttgaagctgcc

SEQ ID NO: 178087 - DNA, 731 bp, Homo Sapiens
  misc_feature (564)..(594): n is a, c, g, or t
gggagtgacgtcgtgggctgcagcgcagcagcacccaacgcagttgcacgccagggcctgtactgaccacctccacgtgccactggggctgtaaggaggaatggcggccgtgggcagcctgcttggccggctgaggcagagcaccgtgaaggccaccggacctgcactccgccgcctgcacacatcctcctggcgagctgacagcagcagggcctcactcactcgtgtgcaccgccaggcttatgcacgactctaccccgtgctgctggtgaagcaggatggctccaccatccacatccgctacagggagccacggcgcatgctggcgatgcccatagatctggacaccctgtctcctgaggagcgccgggccaggctgcggaagcgtgaggctcagctccagtcgaggaaggagtacgagcaggagctcagtgatgacttgcatgtggagcgctaccgacagttctggaccaggaccaagaagtgaccggggctccagccaccccgggacattgctaagatgggagggctgttcttaaatcactcgttcctggaagctgccgnnnnnnnnnnnnnnnnnnnnnnnnnnnnnnnccttggtggggcggccctcggccccttccaaaaggtttttcaaaaaccatttcggttggggccgcgcgggcgccccctaagggaaaagggaaaaaggggcccaaaaactgggttttcccaaaagaaaaaacccgggg

SEQ ID NO: 178088 - DNA, 423 bp, Homo Sapiens
ctgaaggtcaatgcccttgcctttcctaaaggtcattgcctaagttttaaataaaaaactcagtgaagtgaaggattgtcaatgcttgccttaaaaggaaaaatggaaggccccagggctgctttgctgtgaccctggattcccatgggagtctgtgctgaggtgtgcgaagtaaaagcccagttttcaatactcagattcccaggagatgaggctgcacagaggccgagcgcccagcttcctctggcgtacccctgtctctcaccaaggaagggacctgaagacaggtccggctgcctctaaaatggaaatcctgctacgtgtcctatgcccacatccctctccctcggcctcaccagcacaggagcctggggctggtccaggaggaacttcggggaaagctccctctcctttcctgctaga

SEQ ID NO: 178089 - DNA, 383 bp, Homo Sapiens
  misc_feature (65)..(65): n is a, c, g, or t
  misc_feature (291)..(291): n is a, c, g, or t
  misc_feature (326)..(326): n is a, c, g, or t
ccctcctggaccagccccaggtcctgtgctggtgaggtccgagggagagggatgtgggcataggnacacgtagcaggatttccattttagaggcagccggaacctgtcttcaggtcccttccttggtgaagagacaggggtacgccagaggaagctgggcgctcggcctctgtgcagcctcatctcctgggaatctgagtattgaaaactgggcttttacttcgcacacctcagcacagactcccatgggaatccagggtcacagcaaagcagcccggggccttccatttntcctttaagcaagcatgacaattcctcactttcantgagtttttatttaaaactaggcaattgaccttaggaaagcaaggcattgacctcag

SEQ ID NO: 178090 - DNA, 761 bp, Homo Sapiens
  misc_feature (441)..(441): n is a, c, g, or t
  misc_feature (641)..(641): n is a, c, g, or t
  misc_feature (662)..(688): n is a, c, g, or t
gggtgaaatgatgattcagtttatccattcgctgagtgcgctgcactgaccttcttccaagcctcagttcctgttctaggaacttgaggctatgtagcctgaaaatgccctgcagtctgcagtgttctactgtgaactgcttgtgtgttggcaggctaccggtaagaatggttggtgtcagcagggacggggccctctgagacccatctcacaaagatgagtggtgaaaatctgatcacttgctgcagccctttagttttttattaagccgatgcctgagtagctttaatagctattagctatgttagtagactgagatcttctgttagaagtctttagttctgttttccttgggggactaagaaatatattgcaggcctgaattacaggaaggggagaaccaatggctagggaatgagagccaaatacctgtaaaaacanaatttgggctggccgcggttggctcccgcctgtaatccccaggaactttttgggaaggccttaaaggccggcccaaaatcccccaaaggtccagggaatttataaaaaacccaacccctggaccccaacattggggggaaaaaacccttgtttcttcttatcttttaaaaatttccccaaaaaattttttccctttgggntttgggggtttggtttggggnnnnnnnnnnnnnnnnnnnnnnnnnnnaaattttaaattttcgggggaaagagggtttttagagggccccacgggagaattttttttcttggggagaaaa

SEQ ID NO: 178091 - DNA, 707 bp, Homo Sapiens
agcctaaggcccccggctctcgcactctgtacagcccaccttccctgcctcacagataccaatagagaggttttcttaattaacaaaaggacgtatgccatgggagaaacacacccgcgcacacagctgctctctacagaggctgcaggctccgccgagtcccccctcagtgttattttatttatgacttacgctcccgtctgcccatgcaccggcatgcagtggtaattattttagaaatattgttccttggtgtcagcgtagctgtctgtcttaggagctgggtcggcgttccgacagcacttcctgtccgcccttctcctctgccatccagaaccgtccagaactgttgcctgagacccctcctctctcacacagccctgccatgctgactcggtttcccctcagagtcattgttgtctgggctcgagtttctgccccaggttgtgtgctggaatcggggggtggctctcctgccacccatggggagcgccaggagaggagggtcatggaggatgttggggctctgaccccaggagtggggtggagggcggagcctgctggaggccctgccttcacagagatgccgcgtgctgggaaggctcttggggtcccctgagcgtcttccagggtggctggagagcacagacgcgccaaggagccccctctgtgctcctcagagttcaataaatgtcggtggccccctc

SEQ ID NO: 178092 - DNA, 1298 bp, Homo Sapiens
  misc_feature (1255)..(1255): n is a, c, g, or t
gcctgggtggcgaattcggcacgagggctgagtcacaagagggctcgagtggagctggagagagcagccagcaccagtgccaggaactacgagcgtgaggtcgaccgcaaccaggagctcctgacgcgcatccggcagcttcaggagcgggaggccggggcggaggagaagatgcaggagcagctggagcgcaacaggcagtgtcagcagaacttggatgctgccagcaagaggctgcgtgagaaagaggacagtctggcccaggctggcgagaccatcaacgcactgaaggggaggatctcggaactgcagtggagcgtgatggaccaggagatgcgggtgaagcgcctggagtcggagaagcaggagctgcaggagcagctggacctgcaacacaaaaaatgccaggaagccaatcagaaaatccaggaactccaggccagccaagaagcaagagcagaccacgagcagcagattaaggatctggagcagaagctgtccctgcaagagcaggatgcagcgattgtgaagaacatgaagtctgagctggtacggctccctaggctggaacgggagctgaagcagctgcgggaggagagcgcgcacctgcgggagatgagagagaccaacgggctgctccaggaagagctggaagggctgcagaggaagctggggcgccaggagaagatgcaggagacgctggttggcttggagctggagaacgagaggctgctggccaagctgcaaagctgggagagactggaccagaccatgggcctgagcatcaggactccagaagacctttccagattcgtggttgagctgcagcagagggagcttgccttgaaggacaagaacagcgccgtcaccagcagcgcccgggggctggagaaggccaggcagcagctgcaggaggagctccggcaggtcagcggccagctgttggaggagaggaagaagcgcgagacccacgaggcgctggcccggaggctccagaaacgggtcctgctgctcaccaaggagcgggacggtatgcgggccatcctggggtcctacgacagcgagctgaccccggccgagtactcaccccagctgacgcggcgcatgcgggaggctgaggatatggtgcagaaggtgcacagccacagcgccgagatggaggctcagctgtcgcaggccctggaggagctgggaggccagaaccaaagagcagacctggctgggagatggagctgaaaaatgctggaagtctcanttccaggctctgtccgaacagaagctttccctgtttcctccca

SEQ ID NO: 178093 - DNA, 956 bp, Homo Sapiens
ttcctataaaaccaaagggccaaggggcccttgggggttaccccgggggtccggaatcccgggattcgtcgaccacgcgtcgcccacgcgtcggagaaacgcggggtcgcggttcctgcggtcctggacttggccccagacagccggcagggtcgtggccagaacgccggccgggaccatctgcacaggcgctcgacagctccaagacgctgcggccaagcagaaagttgaacagaacgcggctcccagccacaccaagttcagcatttaccctcccattccaggagaggagagctctctgaggtgggcaggaaagaaatttgaggagatcccaattgcacacattaaagcatcccacaacaacacacagatccaggtagtctctgctagtaatgagccccttgcctttgcttcctgtggcacagagggatttcggaatgccaagaagggcacaggcatcgcagcacagacagcaggcatagccgcagcggcgagagctaaacaaaagggcgtgatccacatccgagttgtggtgaaaggcctggggccaggacgcttgtctgccatgcacggactgatcatgggcggcctggaagtgatctcaatcacagacaacaccccaatcccacacaacggctgccgccccaggaaggctcggaagctgtgatgggaaggaggcctgcacttggacctgacctcaagcctcagctccagtgggaccttgtaaaatgctccctgtcagagctctccagaatatgcttgttggagatccttcaggcagtaagggagagttttgcctccttacacagttggcctttgctttgcacctccagctggagatgggtgtgccccagaagtaaagctttgcatctcttacaagaggggagctacaaggggcagccgtggcctaggcccaaactctgctctggagaaaataaatatctgtaccacctgtc

SEQ ID NO: 178094 - DNA, 760 bp, Homo Sapiens
ggggcagctgtgactgtcgctgcagacggaaactgactggggtcaattcaagtcatgcaggctgtgagaaacgcggggtcgcggttcctgcggtcctggacttggccccagacagccggcagggtcgtggccagaacgccggccgggaccatctgcacaggcgctcgacagctccaagacgctgcggccaagcagaaagttgaacagaacgcggctcccagccacaccaagttcagcatttaccctcccattccaggagaggagagctctctgaggtgggcaggaaagaaatttgaggagatcccaattgcacacattaaagcatcccacaacaacacacagatccaggtagtctctgctagtaatgagccccttgcctttgcttcctgtggcacagagggatttcggaatgccaagaagggcacaagcatcgcagcacagacagcaggcatagccgcagcggcgagagctaaacaaaagggcgtgatccacatccgagttgtggtgaaaggcctggggccaggacgcttgtctgccatgcacggactgatcatgggcggcctggaagtgatctcaatcacagacaacaccccaatcccacacaacggctgccgccccaggaaggctcggaagctgtgatgggaaggaggcctgcacttggacctgacctcaagcctcagctccaggggggaccttgttaaaatgctcccctgtcagagctctccagaaatatgctttggttgggagatccttcaggcaa

SEQ ID NO: 178095 - DNA, 929 bp, Homo Sapiens
ccgtcaggcctgtctcagggccccacctcctggctccgtccaccccccacctctcctggacctcaggcccgctccttcactgggggactgggccagctggtggtgcccagcaaagccaaggcagagaaacccccactgtcggcctcctcacaccagcagcgcccaacagagcctgagaccggtgagagtgcgggcacatcccgggctgccacgcccctgccctctctgagggtggaagcggaggctgggggctcaggggccaggacccctccactgtcccggaggaaagctgtagacatgcggctgcggatggagttgggtgctccagaagagatggggcaggtgcccccacttgactctcgccccagctccccagccctctacttcacccacgatgccagcctggttcacaaatctccagaccccttcggagcagtagcagctcagaagttcagcctggcccactccatgttggccatcagtggtcacctagacagcgacgatgatagtggctccggaagcctggttggcattgacaacaaaatcgagcaagccatggacttggtgaagtcccacctcatgtttgcggtccgggaggaggtggaggtgctgaaagagcaaatccgggaactggcggagcggaacgctgcgctggagcaagagaatgggctgctgcccgccctggccagcccggagcagctggctcagctgccctcctcggggggcccccgggctggggcccccctgcggcccaatgagcccctccgtctgagcccccccttcccttaaaatggtgccctttgggagctggcccgggcttgtcgataaagcggcctgcccccctcctttccaatgcagctttttatggtccccgcgtgtcccccggggttggggagtttcaggggctcccgcaaaggggccggggaccc

SEQ ID NO: 178096 - DNA, 978 bp, Homo Sapiens
cccacgcgtccgcggacgcgtgggtcgacccacgcgtcgcatgcggctgcggatggagttgggtgctccagaagagatggggcaggtgcccccacttgactctcgccccagctccccggccctctacttcacccacgatgccagcctggttcacaaatctccagaccccttcggagcagtagcagctcagaagttcagcctggcccactccatgttggccatcagtggtcacctagacagcgacgatgatagtggctccggaagcctggttggcattgacaacaaaatcgagcaagccatggacttggtgaagtcccacgctcatgtttgcggtccgggaggaggtggaggtgctgaaggagcagatccgggaattggcggagcggaacgctgcgctggagcaggagaatgggctgctgcgcgccctggccagcccggagcagctggctcagctgccctcctcgggggtcccacggcttgggccccctgcgcccaatgggccctccgtctgagcctcccttcccttacaatgtgcctttggggctgcccggccttgcgtcagccgcctgccccctcttcctatgcagctttaatgtccccgtgtccccggggtgggagttcaaggctcagtaatggcctggtcccccggcccctgccccatctcctcatcatccccagccttgatggaggagggagggcttcaggacggggcgtcagagggagccccctctgggagggaaaccaaccccaaccctccctcctggggaccccccagcagtagacggcttgggggagtcggaggctccccggcagacaccccacccccatcttgttcccttgaggtgcctcctctcctctgcccaggggagggagtgtggacagtatctggaaggtactgggattccaggctgtcatcacacataatactcactaatttaaaaacctctgaagaaacttgaaaaaacacacacacacaga

SEQ ID NO: 178097 - DNA, 941 bp, Homo Sapiens
ccgagatcttcattccccacgcgctcggatgtgcggctctacggcatgatctacaagccccacgccttgcagccagggaagaagcaccccaccgtcctctttgtatatggaggcccccaggcccgtcctgcccggcatctcgtgctggactgctggccctcacctccccacaggtgcagctggtgaataactccttcaaaggcatcaagtacttgcggctcaacacactggcctccctgggctacgccgtggttgtgattgacggcaggggctcctgtcagcgagggcttcggttcgaaggggccctgaaaaaccaaatgggccaggtggagatcgaggaccaggtggagggcctgcagttcgtggccgagaagtatggcttcatcgacctgagccgagttgccatccatggctggtcctacgggggcttcctctcgctcatggggctaatccacaagccccaggtgttcaaggtggccatcgcgggtgccccggtcaccgtctggatggcctacgacacagggtacactgagcgctacatggacgtccctgagaacaaccagcacggctatgaggcgggttccgtggcccctgcacgtggagaagctgcccaatgagcccaaccgcttgcttatcctccacggcttccctggacgaaaacgtgcactttttccacacaaacttcctccgcctcccaactgatccgaacaggggaaaacctttaccagctccccgatctaaccccaacgtagagaccccagtaatttcgcttgccccccaaactaggggcgaacacactaattgaagtccaccgtttggctggcaccttttcctaacaaggaattacccctcctgaagcccctgcgccccccccgggtgtaagccgcccccaccattcacccagcctaccaaatgtggggccttggccaagcccttccccc

SEQ ID NO: 178098 - DNA, 897 bp, Homo Sapiens
ggaggaacagcctgcagctcactccatgccacacgggtgggccaccagcctgctgtcagaagtctctgggctccaactggtcttgtaaccactgagcactgaaggagagaggtcttggtcagggctggacagcatgcccgggaggaccagcagaggattaaaggtgactgggaggaccagcggaggataaaagacactgctcagggcagggcttctaccctgcatccctggccaagaaaagggcagtccccatgtgggcttgcagggtcactctcaggggcctctttcagctggggctggcaacttgcgtctgggggacacctccaggtgtgtggggtgaggatttcctataaccagggctcccagaagctttgcttatgtaaggaggcctgccagcccgcccactggacgccaccacccattcggtgcttcaaaggaccccacccctcacccagctctcagcgcaaccggcgcacagccataccctcaccgagcccccggcaaaccccatacccggggcgcgcccagactaccccagccacacgacacgtacacgctcgacccctggcatccagaggaagagccaggagtgtgggaaggccgacggtggggggctggggcttctgacgctcaggtcatagcctcagaggtctgaagtcaggccccacagacccatccggcccgccccccaagtccctgcgaagagcacttagagtgtatgggcccagggcctgggtccaccgtttcccctggtggcgcactccggctgggattttgcccaaggccagggaagcaagggctgggcgacaaggggaatttgccaaaaaaccgagggggttataaataattggagcaaaggggcgggccggcttcacaagcgctggggcccagaaacag

SEQ ID NO: 178099 - DNA, 901 bp, Homo Sapiens
  misc_feature (876)..(877): n is a, c, g, or t
caggaagcctggtaccggtcggaattcacgggatatcgtcgaccacgcgtcgggcttacgaaaattatatgaaacgaaaagaattgcagaatactgtttcccagcttttagaaagtgaaggatggaacagaagaaatgttgatcctttccatatttatttctgcaatctaaaaatagatggtgctttgcacagagagttagttaaacggtatcaagaaaaatgggacaaattgcttttaacatcaacagaaaagtctcatgtagatttatttccaaaggacagtattatctatttaactgcagattctcccaatgttatgactactttcaggcatgacaaagtttatgtaattgggtcttttgttgataagagtatgcagccaggcacatccctagccaaggcaaaacggctgaacctggcaactgaatgccttccattagataaatatttacaatgggcaaattggtaacaaaaatctcaccttagatcaaatgatacgtattttgttatgtctgaaaaacaatggtaattggcaagaggctctgcaattcgttcccaagagaaaacatactgggtttactggagatttctcagcattctcaagagtttatcaacagactaaagaaggcaaagacttaattcattttcaaaaggtactctgaatgtgcacagaacacggtggctcaaatgagaacattttgatggccttaaacaagtaaatgcgttagaaatacagttctgttaatgtatttctttcccaaacaattcatttttctccttctaaaggtagtcttttcccaactgactgtagggttgtggtcttttcccaattaaatatctgcagaaactttggggatatacttttgtttactgtnngaaagattataaaaagagttgtac

SEQ ID NO: 178100 - DNA, 631 bp, Homo Sapiens
  misc_feature (51)..(51): n is a, c, g, or t
  misc_feature (175)..(176): n is a, c, g, or t
  misc_feature (179)..(179): n is a, c, g, or t
  misc_feature (401)..(446): n is a, c, g, or t
acatgctcctggctacaaaacagatatgcaaagagttcaccgacctgctgnctcaggaccgatctcccctggggaactcacggcccaaccccatcctggagcccggcatccagagctgcttgacccacttcaacctcatctcccacggcttcggcagccccgcggttgtgtgccnngtncacggccctgcagaactatctcaccgaggccctcaaggcatggacaaaatgtacctcagcaacaaccccaacagccacacggacaacaacgccaaaagcagtgacaaagaggagaagcacagaaagtgaggctctcctcccgccccgcccctcccacgcctcaccagccccccgcgcgcccaccctccggcgggtgacagctccgggatcagcaacccttcnnnnnnnnnnnnnnnnnnnnnnnnnnnnnnnnnnnnnnnnnnnnnntgcccttgggtccccccgagtctccgggactgccctctcgactgtcagtggggcagcctctccgactctgcacccgcctcgacctccccacccgctcccacacccctgtgccctcatgtggagcctaagagaacagaacaggccgtgaagccagcagagaaaagttctgccaagtttgtgaaccc

SEQ ID NO: 178101 - DNA, 1434 bp, Homo Sapiens
  misc_feature (430)..(497): n is a, c, g, or t
  misc_feature (513)..(566): n is a, c, g, or t
  misc_feature (578)..(587): n is a, c, g, or t
  misc_feature (899)..(899): n is a, c, g, or t
  misc_feature (933)..(933): n is a, c, g, or t
  misc_feature (983)..(983): n is a, c, g, or t
  misc_feature (992)..(992): n is a, c, g, or t
  misc_feature (1122)..(1122): n is a, c, g, or t
  misc_feature (1178)..(1178): n is a, c, g, or t
  misc_feature (1201)..(1201): n is a, c, g, or t
  misc_feature (1251)..(1263): n is a, c, g, or t
aggacagcctgaaggcagaggccgaggccaaggcggcgtcccggggccggcaggacggctcggagagcgaggcagtggcggtggccctggcaggtcggctgcgggagctcctgcgggacctgccgcctgagaaccgggcctcgctgcagtacctgctgcgtcacctacccaggatcgtggaggtggagcaggacaacaagatgacccccgggaacctgggcatcgtgttcgggcccacgctgcttcggccacggcccaccgaggccaccgtgtccctctcctccctggtgtattatccccatcacgcccgcctcctcgcgactctcatcgcccactacggcctggccctcgaggaagagtcggacgacaccccccgggggccaggacgagccgtcccgcccccgttctcgatgacacccttccaccgtannnnnnnnnnnnnnnnnnnnnnnnnnnnnnnnnnnnnnnnnnnnnnnnnnnnnnnnnnnnnnnnnnnntttactttaatctatnnnnnnnnnnnnnnnnnnnnnnnnnnnnnnnnnnnnnnnnnnnnnnnnnnnnnnttatatttacannnnnnnnnntccattgacgaccccccacacccgcattcctcctatcctaacgtcaaatcgtaggtgcattcactccgtaccgccctcgtactcccgccaacctagcggcgtttcgcgggccttgttctctcatgcccttccccaatccccttttccacttcccctaaaccgactgatcacaccccgagtatgtgatctctatcctcagtctcgcactaccttgcattctcccaaagagaccataagagacactgtgccgtggccggccataagtagctgagtacagcatagaagcacgaaaagcttacaccatgccgccanacactccacgcgttccaacgcgccgcctcacacnaattatctcaccgttcccccaccctgatcctttcgtcataatctggtagntgttccaancgtgtggaggcctgcgaaacaatgtcggaggacccctgccggcttttccttttccctccctatcccaccgccgctacacccctacccgaataattctacgcaaccccgaccgttagtgctgtctttcccncaagtgatgttgaggtagaaccctttgcttccgcgcgctcgttcatcctcgtactntatcaactcgctcctctctgacntgaccaccccccgccacgccattccgtctgttctccttttcctcttccgnnnnnnnnnnnnngtgcctctctcagcgtcacctgcgccctctggatcacacgcccagagctccctatcccccgttagtgcccaggcgcgccgattactcttccttacgtctatcgattgagtccacgaataaatctctatttaccgaaccccactgccacgtcatgagtgtattacacgcgcc

SEQ ID NO: 178102 - DNA, 807 bp, Homo Sapiens
gtccccctggccccggggtcttttttgggctccctaataggccgggccccccaagagtttcccccttggcctggggagaaggaaagtggggggcccggggaggggccccagagaccctgagaggttcccccgcctggtggggccgcagccccctcaccgggctgggcccactttcacttgccagggggaagggttgggccaaccgggggtgctggcggtagtgtaagaggctggagttgggccccccatagggagacgctgggagcggcgaggctggatttggcttcagggagcccgtgcggtaggcaggaggtggcgggggctcatatgcctgtcggtctggtcgccgtgacgcatgaccccgacccccattcagctcggccagcgtgctgctcagcaagtctatctcggcgtccaggcttccagggcgaaggccccccctgtctgcagggagcccctgcgtgtgctggagtactccatgggaccccacccacgccggcccccgatcctccggtccccctggggcctggtaacactgctcagatggaagggggcaaaaattgaccctggggtggggctggagtgctgctccgtgggccggtggtggccccggggtgccgcgggggatcgccctcccctgaggggctctggcgggctccggctgcttcgggggcagccaggtgggccccgacatggcctggaaagggggactccagacagcggtcttgaagccccgagcctctggccttcaccccctcttccgtcccgcacctcgtttgggactccagaaaagaaaactttttctcc

SEQ ID NO: 178103 - DNA, 1894 bp, Homo Sapiens
  misc_feature (189)..(189): n is a, c, g, or t
gcccactccctgtcgcagaggagaaacaggcggcttactaagggaaggcccgatgtattctcttcattgcgtcccagttgcaagtcaccgccatattctacctgcgaccctaccatagagtagcgcccgggggctctatctgagtgtatcagtgcatatttgtttgctcgcctatctgatattggatgncccgtcaaccaggagaataagctatataactttttcctttcttaagaaaagaaaagaaaagaataaaaccctctttgtagggaaagccctccccccttcccctaagggtggggggctgtgtgaaagcaagctgggaaatcaagtacaagggggtggggacagagactatcttgccacccttaacactgcccagccacgtggggtgaaggggaaggggactgtgatgatccccatttccatgacaaccagttgcctaccccctactttggtgggaagaagggagaaggcccctatgtctccctggaggctttccccctcaagacttcaagtagtggttaacagagtcaggcctggtcatggagggagtggccacggtggaaagcctaggtggaggggcagcccactcacgtcttggccttgcggcctctgtgactaacagcagggccagccagggagggaggggcgctgctgcgcaggatgcgctggtccccttggttggtggtcccaacaagccggcgggggccaggacgtcggcgtggggtcccatccccttcctcctcctcacctgaggcttcagcctcagactcctctactgaaccctcaggccccaaggggacttgggggctgtaggcggccccgctttgccagccccaggactcccaccaactggggcccctgctcgtttgcgaggcaacttctcagtctctagtggggggactagagaccctggacgcagccgggtcgagcgcagttttggggttagtgagaccacaggtggtgtccattgccgacccgcctggcccgctatctgctaagtccaggtcatcctgaattacagccaccaccatggaccctccactcttccgtcctcgcattccttctgcttcaagccgaaggcgggccaggcggctgagggggcggcttccatcctcatcagaggaactaccctcactctccccttggacctggggttgccgtcgcctccccaatccacagctctcgagaacagaagtgctgtcacggtccaagacggggagctggctgggccgaggtgatggaggattcttgggaggtcggcccctcttccgtttgggtggggacgttgaaatggtgacagtggtgacagtgttggcaacagtagcagtgggacaaactagcagtggtgggagtggggttaggggtgatgggtgtgggggtggctgtgtccgactttcggagttgccatcccctgcagaggaaatggtcccagggatgggcaaatctcgtgctttagggggtcgtcctcgccttcttttctccacaggtgacaggaggggattgggtctgtgaactggctggggtccaagaggctggggcccaggaataagctgtggttccaggacaggatctgcaacaattagggtctcaggcccagggactgggtcagccccattggtttttcccttcaaggtggatgagggtgcctcatccacacctctcccagcatctgctggagacctgttcttcttggggggcctccccctccgacgtttcacagcaggtggggtgatggcgagcagtgctccgtctccattctcggggctgccaccaccagtcacccccagctcaatgtgacggcgagcaatgaagggctgctggggtggagtgggcagtgaggatgaaggagcagcttcacagggcccaccaatgggaggggaggattctg

SEQ ID NO: 178104 - DNA, 1335 bp, Homo Sapiens
  misc_feature (42)..(88): n is a, c, g, or t
  misc_feature (97)..(159): n is a, c, g, or t
  misc_feature (181)..(189): n is a, c, g, or t
  misc_feature (720)..(760): n is a, c, g, or t
  misc_feature (906)..(914): n is a, c, g, or t
  misc_feature (925)..(925): n is a, c, g, or t
  misc_feature (1181)..(1181): n is a, c, g, or t
ccggcctggcgcgcggctgcgcccaccggctccgcgctgctnnnnnnnnnnnnnnnnnnnnnnnnnnnnnnnnnnnnnnnnnnnnnnnaggctagtnnnnnnnnnnnnnnnnnnnnnnnnnnnnnnnnnnnnnnnnnnnnnnnnnnnnnnnnnnnnnnngcgtggatggagggaaacccannnnnnnnngagatccacccatgcatttgccaaagaaccaagcatcctttatccgctgttcgaggctctctactatctgaaatttaaaaacgccccacgaaacaataacaacaccccctccaccaagaagcacccactaacaagaccaccctaaaaacacaaccgacaaacaaaaacaccgaccgcaagccacctcagtggatcaatgagccccccccgtgttcagtcacttgacccagtcacaaaacctgtcccccgccgctaaaccccccctttttttagcccaacacaccataaaccaaatagccttccccccactcatcaacccaccatttaaccaacatatctcgacgtccccttcagcaccattacacccctccgctacccccccggttgacccgtttagcccgtgtggtatacgctcctcctcggttctctggccctcccctcccccatacgttcccccaatcttatccacagagtcgacccccattatatacccaccccagcaagctgttatccgacgatcgtccgcacaannnnnnnnnnnnnnnnnnnnnnnnnnnnnnnnnnnnnnnnngacggagaccgttttcgcccgccatctagtccctatctgtccccctagagcaccatcacccgcccttaacacacaaacccgcacgacttacccagacgccagatatccccttctccgcctcccatatccttgttgccgtattaagnnnnnnnnnacacttgcgcnataacgtcccccccacgcatataccaatcgagagctccttgccgccatggcttgctgcaatgatcttcgaccttcgaatcttcccctacttagtgatgccctgtttgtagagccacccccacccacataatttcttcctgcgcctttatcacactagcgcacgcacgatctaaccctgttgacgcggtccctggcaccgtgtatattcgtcaatccgctcacacataataattatcctgactccacctcaccacanatatattatataccccgtatcattgacagaccctcagcgcgctctcttgttgcgctcgcgggtcgtcaaatgtatgagtaccccaaacgctccatcattattcatgtccactctctgcaccccgccctcagttccctgcgtctcctcttttggg

SEQ ID NO: 178105 - DNA, 945 bp, Homo Sapiens
ggggttgcctgagcagtgggctgcttaggaagagaaggtcagagttcgcgggggcagaggcattcttgccgctggcccagtcactatgtagtggaggggcagacaccctcccgcaaattctggaaggttcttagtctcgactagggcagtagccccaggactcctagtcgccggcttcaggtcactgccggctgaacggagctgccgtcgccatgtttggctgcttggtggcggggaggctggtgcaaacagctgcacagcaagtggcagaggataaatttgtttttgacttacctgattatgaaagtatcaaccatgttgtggtttttatgctgggaacaatcccatttcctgagggaatgggaggatctgtctacttttcttatcctgattcaaatggaatgccagtatggcaactcctaggatttgtcacgaatgggaagccaagtgccatcttcaaaatttcaggtcttaaatctggagaaggaagccaacatccttttggagccatgaatattgtccgaactccatctgttgctcagattggaatttcagtggaattattagacagtatggctcagcagactcctgtaggtaatgctgctgtatcctcagttgactcattcactcagttcacacaaaagatgttggacaatttctacaattttgcttcatcatttgctggcctctcaggcccagatgacaccaagccccatctggaaatgttcattcccggcaaatgtgggttctgaaaatggtatgaaaaactttcaaagaacgactagcacagaaccctctcttttggaaaacataattttgaataaaataatttttaatggattctgaaatttggcatgttttgaagaatactgactccatctaaaagtatgaaggtcaaaggaatcccaaacctaagttttaaaaattggcttaagacttgaacct

SEQ ID NO: 178106 - DNA, 939 bp, Homo Sapiens
attgggtagccctccaggctggttcattggggttcgcttgccggaatcgaaaagggaagaaaactgccctctaagtaaaggtaaggggcccataggagccaattttttggtgcatgggcttggaccattcgggcctggggaggcccagatacccaccaggaaagcatcccccaatggtctccacccttgtagacatcaaagttgtcaattatggcatcaaaggcaggtatacaggtcattaagaagtgtcactacttgcatgggggtgctctctgctgacaatgctgtgaagcccaacaatgtcactgaagtagatggtaacactgtcaaaggcctcagcctgtacagtctctccccgttttaactgctctgccactgaatggggtaggatttggtagagcagagcttcagccttgcgtttttcctccagataggcctgtgtgcgttcctccaccagcttctccaagttattggcatactgttccatgcgcagcaggaggttgtccaatatgctggtgccaccctccttgttaaagcgccgaatgaagcccttaatctgtccaaagtctggccgctcagctgggtcctgagcccaacatcgctccatcagcaaaactagctcttcattcagttgggtccggtcaatgcttggccggaaatatggccgctgaccatttcgtaccttctggacaatctctttggggctgaggtccaggccctccaagtagaaaggaccactgcgaagtgctatctcctgcaggatgatcccaaagctatagacgtcagccttctgcatgctggcatagagggcatggctgtcatcaggttcagcagttgatcggaagctggccaggccatagtctgtgattttgagcacaaaacgactatccaccacacagttggaggacttgagactcccatgcgatgaaataatgctgt

SEQ ID NO: 178107 - DNA, 603 bp, Homo Sapiens
ccccccccttcccttctttttttccctaaattcccgccggaatttcaaaaaattggggcggttggggggcaagttgggaaccgcggggggctgggggaattccggtttggttcccggccggggaaacccccggggttcccccttttgggtgagaaggaaacttttagcccgacttccggcttgcgcacttctggcgggtctccttgggacatttcccacacgggacgcctgtgttcaagctcgctgactttccttctttaatctctgatggtcgttatctgtgggcccactggactatctcgcgcgtgcacgcggaaccggaggtgggtggagggtggaatgagagagaaacccatccgcagaaggaggggccctaccttactcagtcttcagcccggacagaagcaaaaccacaggccccctctcccaccccactcgcgccgcgtttcctttccagcctcttccctgagacactagatcaggaccatttgccttttcttatctctgtgtgtttcctaacacaattttaaaacacctctgaggcttcatagaggggtaaagtgtcaaaagaaatacacgaataagagtaaaacgtgccgtctt

SEQ ID NO: 178108 - DNA, 1033 bp, Homo Sapiens
aaaaaaggcgggggtgcgcccacctcttatcatgaggctcgccccacttcatccgtcgaatgtatcggggccccggtcctcttggggcccccggaaaatgcgtagcaaagagaacggcttttcccggatgagaacccggccccttccttccctggaagcgccccccttgaaggccctgttccgtaggaagccaaggcccccaggcggcctgaagccttcttggaaggtctctgcgggaagaaaggactctgcgccgcgcttggggtcataccctcaggggctcttgcatgagtcgtagtgagggcccttcgctctccggaaatgacaccccgccggggctgcagcatggtgccagcctcgggatccgaggatgggaagaggcgtgctgatgggaatgcgtgcccttggacagggggcaggatgtgggagggctccggcatgagcctcctgggcctcttgagggagtatccaggttctgcgttgtcggaagtaggctgggactgggatggggctccactcagaggtggcgggctgccctccgtgggcatgggcatggccagtgcaggaggccgttctagcatgactggcctggccctacagcctcagtggtgggacgggtggaggcaggtagcaggggctcccacgtgaatccagggtgtccctgagctaaggccaggcgggggtgacctccgcagcttccggggccctgggcgatcgggccgtctcgcctcaccctctcaccaggcccgacactatctgctggccacctttcccggtagacaggtaagttcctcccaggcaggcctgcggctgacttcacttccgtgggtgtggggaagccctggggcgactgggcggggcagcgggtccagcgagggccctagattccgggtccgcggaggccacgggacccctcgggtggctcagcgggcacggagtctgccgtcgacatgttccggacgcccgggcggagactcccgtgcgacgcgtgggtcgacgatatcccgtaattccgggccagtaccagcctgca

SEQ ID NO: 178109 - DNA, 898 bp, Homo Sapiens
tcgtgccgctcgtgtcagtcaacatggaggcagaggaatcggagaaggccgcaacggagcaagagccgctggaagggacagaacagacactagatgcggaggaggagcaggaggaatccgaagaagcggcctgtggcagcaagaagcgggtagtgccaggtattgtgtacctgggccatatcccgccgcgcttccggcccctgcacgtccgcaaccttctcagcgcctatggcgaggtcggacgcgtcttctttcaggctgaggaccggttcgtgagacgcaagaagaaggcagcagcagctgccggagggaaaaagcggtcctacaccaaggactacaccgagggatgggtggagttccgtgacaagcgcatagccaagcgcgtggcggccagtctacacaacacgcctatgggtgcccgcaggcgcagccccttccgttatgatctttggaacctcaagtacttgcaccgtttcacctggtcccacctcagcgagcacctcgcctttgagcgccaggtgcgcaggcagcgcttgagagcggaggttgctcaagccaagcgtgagaccgacttctatcttcaaagtgtggaacggggacaacgctttcttgcggccgatggggaccctgctcgcccagatggctcctggacatttgcccagcgtcctactgagcaggaactgagggcccgtaaagcagcacgggcaggggggacgtgaaccgggctcgcctgggcaactgccccaggaacaagccccgctccaacaaaagggctccttggcccaggaatctttgggaagccccggccacccctcaaagaagcatgggaagggactttcccccttggtcgggggactccttgaaggggcccggggtggggcccccttccatttttccc

SEQ ID NO: 178110 - DNA, 1124 bp, Homo Sapiens
  misc_feature (132)..(132): n is a, c, g, or t
tgtagaatatagaacagtcgagtaatatgcaggctggtacggtccggaattctttggatatcgtcgacccacgcgtccgaccattgggtgctccagttgctcgagcctgatggagcacttcgaggacaccanggagaagaacgaggccttgctgggggagctcttctctagcccccacctgcagatgctcctgaatccagagtgcgacccgtggcccctggacatgcagcccctcctcaacaagcagagtgatgactggcagtgggccagtgcctctgccaagtccgaggaggaggagaagctggcggagcttgccaggcagctgcaggagagtgctgccaagttgcacgcgcttagaacggagtactttgcacagcatgagcaaggggctgctgcgggcgcagccgacatcagcaccctagaccagaagctgcgtctggtcacttccgacttccaccagctaatcttggcttttctccaagtctacgacgacgagctgggcgagtgctgccagcgcccaggccctgacctccacccgtgcggccccatcatccaggccacgcaccagaatctgacttcctacagccaaatccccagaggccaacctaaaaagccggctttagttacgatgactacagttcccacgtgcgcaactctgcccttggctcaaggattccgtgatgttcatttgggttttctaagcgagaggctccgagccttccaacctctgactgggctggtcctgtgagacccctcgatcagggatgctgctgcaagtggtcatggcagttgctgacacctctgcgaaaggccgtggagaccgtgaagaagcagcaaggcgagcagatctgctggggtggcagcagctccgtcatgagtctagctaccaagatgaatgaactaatggagaaatagaaagtcttcagtgatggcctacgccaaagcacaggatggggcgggcaggaagccctctcccaagatcgagttggccgaggatggatgattgtggcagcagaagccgttgcagccccacgttgtgctctaggcagggacctttggcccctttggggagggagagacagacgggcggtttgacttggacacaaagaaagccttggtttcta

SEQ ID NO: 178111 - DNA, 868 bp, Homo Sapiens
ggggcggggcgcggctcggagcgcgaaacatggcggggcaggacgctggctgcggccgtggcggcgacgactactcagaggacgaaggcgacagcagcgtgtccagggcggctgtggaggtgttcgggaagctgaaggacctaaactgccccttcctcgagggtctgtatatcacagagccaaagacaattcaggaactgctgtgcagcccctcagagtaccgcttggagatcctagagtggatgtgtacccgggtctggccctcactgcaggacaggttcagctcactgaaaggggtcccaacagaggtgaagatccaagaaatgacgaagctgggccacgagctgatgctgtgtgcgccagatgaccaggagctcctcaagggctgtgcctgcgcccagaagcagctacacttcatggaccagttgctcgataccatccggagcctgaccattgggtgctccagttgctcgagcctgatggagcacttcgaggacaccaggcagaagaacgaggccttgctgggggagctcttctctagcccccacctgcagatgctcctgaatccagagtgcgacccgtggcccctggacatgcagcccctcctcaacaagcacgagtgatgactggcagtgggccagtgcctctgccaagtcccgaggaggaggcagaaactggccgaagcttgccaagcagctgcaaggagagggctgccaagtcgcacgcgccttagaacggagtactttgcacagcatgagcaaggggctgctgcgggcgcagccgacctcagcaccctagaccaaaagctgcgtctggtcacttccgacttcccccagctaatctcggcttcctccaagtctacgacgac

SEQ ID NO: 178112 - DNA, 390 bp, Homo Sapiens
  misc_feature (18)..(18): n is a, c, g, or t
ctccagcagaaagctggngatagacttcaggtatctaccctgactacccgtgccaacctttggcttcttgggcccttctttttcgcgtcctccaaagaaagtttctctacaataattggagttggtgttggagctggagcctacatcctgggcgagatatgctcttaaccacccggacactgttgaaagccttgtcctcatcaacattgatcccaatgccaaagggttggatgggattgggcaacccacaagctaacagggcctcaccctcttccattccgggagaatgatccttgggacatcttttcagccagggaggagctctttggggaaattcttgagtttgatacaaaagtacaggaaatatcctttaccacatggcaccccaac

SEQ ID NO: 178113 - DNA, 934 bp, Homo Sapiens
  misc_feature (420)..(420): n is a, c, g, or t
  misc_feature (463)..(463): n is a, c, g, or t
accagatgaccacggcagggcccgtgctgggtgagggccggggctccgatgccttcttcgacgcgctggaccacgtcatagacatacacggacacatcatcggcatgggcctgtcgcccgacaacaggtacctgtacgtgaacagccgcgcctggcccaacggtgcggtggtggccgaccccatgcagccgccaccaatcgcggaggagattgacctgctggtgttcgacctcaagaccatgcgggaggtgaggcgggctctgcgtgcgcaccgcgccaacacgcccaacgacgagtgcttcttcatcttcctggacgtcagcagggacttcgtggccagcggggcgcaggaccggcacggctacatctgggaccgccactacaacatctgtctggccaagctgcagcacgaggatgtgngtcaactcagtggtcttcaattccccaggagcaggagctgctngctcaacggccagcgacgacgccaccatcaaagcctggcgctccccacgcaccatgcgcgtcctccaggcacctcgcccacggcctcgcaccttcttctcctggcttgccagccagaggcgctgaggtgtgctgggtgcactggagccaccgggaccccttgaggacatcgccaggctctgtggctttttccccagcgggagaaggggacatgcttatagcagttacgccctaagaaaggggacaacccaggcccccgccaacacgctcacataaaaaaacctgcttcacgccagctggtaatggctttggcaccgggggtggccccagtggcaaaatgggaggcccaagggcccccctccgggcccccctgggggcaaacttgggggtgaccacaaggaatcctggggggggcgccaatatcctttcttctaaaacttctatatctaagggggccatacctttgttctta

SEQ ID NO: 178114 - DNA, 1080 bp, Homo Sapiens
  misc_feature (987)..(996): n is a, c, g, or t
ggaactgctgcaggaggtgataattgtcctggaaaggagtgagtcctggaacctgaaggacctggatattacctctccagaactcaggagtgtgtgccatgtgccagggctgaagaagatgctgaggacatgtgcagtccacatcactctggatccagacacagccaatccgtggctgatactttcagaagatcggagacaagtgacgcttggagacacccagcagagcatacctggaaatgaggagagatttgatagttatcctatggtcctgggtgcccagcactttcactctggaaaacattactgggaggtagatgtgacaggaaaggaggcctgggacctgggtgtctgcagagactctgtgcgcacgaaggggcactttttgcttagttccaagagtggcttctggacaatttggttgtggaacaaacaaaaatatgaggctggcacctacccccagactcccctccaccttcaggtgccctccattgccaagttgggattttcctggactatgaggctggcatggtctccttctacaacatcactgaccatggctccctcatctactccttctctgaatgtgcctttacaggacctctgcggcccttcttcagtcctggtttcaatgatggaggaaaaaaacacagcccctctaaccctctgtccactgaatattggatcacaaggatccactgactattgatggctttctctggacactgccactctccccattggcaccgcttctcagccacaaaccctgcctcttttccccatgaactctgaaccacctttgtctctgcagaggcatccggatcccagcaagcgagctttagcagggaagtcacttcaccatcaacattcctgccccagatggctttgtgattccctccagtgaagcagcctccttatatttggcccaaactcatcttgatcaaccaaaaacatgttttctgcccttctttatggggacttaaattnnnnnnnnnnctccctctccatctctaagaatgtcgtcctttggtgaagatcctctataaaaccttgaatgggtttgcaaaaagggccttcctt

SEQ ID NO: 178115 - DNA, 737 bp, Homo Sapiens
ggggtgcctggaggggactcgccgccatctcaggtctcttggctttgccagggcccaccggagaaaactgacgacccgtttctgtaatccttatgggagaccaaccttgtgcctccgggagatccactctcccacctggaaacgcacgggaagccaagcctccaaaaaagcgctgcctcctcgctccgcgttgggattatccggaaggaactcccaacggaggtagtaccactctaccctccgcacctcctcctgcatcagccggcctgaagtcgcaccctcctcctccggagaagtagagaaataaatttctcccaccctaaaccagtctttgagtgattgcagtatgactccatttccctggtgcattcatataatagttcacctggtgaaaacaatgaagattatttacaatgctaccctgctttttctggtgtcctgaacctggaagttgtgctttttaagtcttatgatgtaatcagcgcgatttcacttcctgaatttcgatgaattctaagacatgggcaagatcggggttgtaagaacctctgaggatttaagggccatgcccctgggatcatgggtgaactttaccaaagcaaacaatgccctgtgagatgggtcctgcagccaaccaaccagtggaactctttttgggggacatcccggttcctggtggaataactttatattccctataaatcccattaaggccccaaataaaggtttggtctctt

SEQ ID NO: 178116 - DNA, 861 bp, Homo Sapiens
  misc_feature (632)..(693): n is a, c, g, or t
  misc_feature (698)..(699): n is a, c, g, or t
  misc_feature (704)..(728): n is a, c, g, or t
ggtccttatgggagaccaaccttgtgcctccgggagatccactctcccacctggaaacgcacgggaagccaagcctccaaaaaagcgctgcctcctcgctccgcgttgggattatccggaaggaactcccaacggaggtagtaccactctaccctccgcacctcctcctgcatcagccggcctgaagtcgcaccctcctcctccggagaagtagagaaataaatttctcccaccctaaaccagtctttgagtgattgcagtatgactccatttccctggtgcattcatataatagttcacctggtgaaaacaatgaagattatttacaatgctaccctgctttttctggtgtcctgaacctggaagttgtgctttttaagtcttatgatgtaatcagcacgatttcacttcctgaatttcgatgaattctaagacatgggcaagatcgggttgtaagacctctgagatttaaggccatgccctggatcatggtgaacttaccaaagcaaacaatgcctgtgagatggtcctgcagcagccaaccagtgaactcttttggtgacatcctgttcttgttgtataactttatattccctataaatccattaaggccccaataaagtttgtctctnnnnnnnnnnnnnnnnnnnnnnnnnnnnnnnnnnnnnnnnnnnnnnnnnnnnnnnnnnnnnnccccnnaaaannnnnnnnnnnnnnnnnnnnnnnnnttgtgggcccgccctcggccccccaaaaaatcttttctaaacacttctctttggggcgcggcggccccccaaaggaaaagagaaaccggtggcataagttgttttcccaagggaaaccccggggcctagtaat

SEQ ID NO: 178117 - DNA, 897 bp, Homo Sapiens
  misc_feature (491)..(491): n is a, c, g, or t
cgtaatcgtggtatgggcatgagacaggggggtgttgcgtaaaggttttaccgtctgggcccccggggggttgtttcgggcaagggcaaaaaaaggtttgtttcggctttttttccctgggtgggttggtttaatagggctgctttgggttgcgaagttcaggtttctgtggctggggcggcccgaagcagtacagagccaccatggtggctcttgggcctcaggagcagcaaggcacagaggggagtcttgcatcgggtggcacggcgtgggcgtgtgagcaccggaaggggagaggcaggcgcttgccatgcctggggcacggggcctcttcagggacagagcagctccagtgtctactgagagggcacagactgacccaaacacgcattccacagccagttccttgggatattcacagcacatgcagccagtagacagctgcaacaccactaagaacacctgtaagcgcccaagggctcagctccaanagcaagccccaccccatcctgctgggggaaaacccttgctcccaggcttcctcacaggacctggtcaaaggaaccaagtcacaccccccatgctagaggatccccctgtagctccgggaagggctgcgaagctggagctgtctcaggttcccgttgaggcccagtaccctgagttccatgactccttgggggacagagcacaggagggaaaaggggaatggacttctacaggatggggtgggggacggcctgtcccggggacaccctggttctttctacgcgatggccgctctggcctggggagaagctggcaaggagagggcaccgggtaaggatggggtgctgcatgacccagctctgcccaaggtggccagggagaccactatgaaggctgcctggtgtgagc

SEQ ID NO: 178118 - DNA, 854 bp, Homo Sapiens
  misc_feature (619)..(775): n is a, c, g, or t
  misc_feature (777)..(779): n is a, c, g, or t
  misc_feature (787)..(805): n is a, c, g, or t
gggaacccggggcgcggcgcactgcgcaggcggccggactccgctcagtttccggtgcggcgaacaccaaagtccgggaacttaagcattttcggtttctagggttgttacgaagctgcaggagcgagatggaggtggacgcaccgggtgttgatggtcgagatggtctccgggagcggcgaggctttagcgagggagggaggcagaacttcgatgtgaggcctcagtctggggcaaatgggcttcccaaacactcctactggttggacctctggcttttcatccttttcgatgtggtggtgtttctctttgtgtattttttgccatgacttgttcgctgatatctaaattaagaagttggttcttgagtgaattctgaaaatggctacaaacttcttgaataaagaagacaggactctcaatagaagaatttcacatctccaagggacccttcctttcattttacactttgttactaatttgcagaactctattaattgggtaggatttcacccattcctagctaagttcttaaaattaaaccctttggttcgtgtttaaaaactttcaaacatctgatggctttacaggggctgaatataaaagcatttgtacttannnnnnnnnnnnnnnnnnnnnnnnnnnnnnnnnnnnnnnnnnnnnnnnnnnnnnnnnnnnnnnnnnnnnnnnnnnnnnnnnnnnnnnnnnnnnnnnnnnnnnnnnnnnnnnnnnnnnnnnnnnnnnnnnnnnnnnnnnnnnnnnnnnnnnnnnnnnnannnaaattttnnnnnnnnnnnnnnnnnnnaaaaaattttttcaaaccttctctttgggggccgcgcccccccaagaag

SEQ ID NO: 178119 - DNA, 1074 bp, Homo Sapiens
gggaaattgcaggatttggtgaataggaccccatggaagaaatgttgtttctctggggatggggaatacatcgtggcaggttctgcccggcagcatgccctgtacatctgggagaagagcattggcaacctgggtgaagattctccatgggacgagaggagaactcctcttggatgtagcttggcatcctgttcgacccatcatagcatccatttccagtggagtggtatctatctgggcacagaatcaagtagaaaactggagtgcatttgcaccagacttcaaagaattggatgaaaatgtagaatacgaagaaagggaatcagagtttgatattgaagatgaagataagagtgagcctgagcagacaggggctgatgctgcagaagatgaggaagtggatgtcaccagcgtggaccctattgctgccttctgtagcagtgatgaagagctggaagattcaaaggctctattgtatttacccattgcccctgaggtagaagacccagaagaaaatccttacggccccccaccggatgcagtccaaaaccctccttgatgggatgaaagggctagttcagagaagaagaggcagtcctcagcagatgggtccccagccacctaagaagaaacccaaaacaaccaatataggaacttcaaggagtaccaaatgatgaagtccatccactactggggtgtgaaagggggatggcaaatcccaagaagaaaccaagcaaggccggccctaaaggattcaaaaggtaaaagagaaagaattctccattttaaaccgaaaactctacaaagggggaaagagggtttacctcctgggaagggatcagccgaaaggggtaaagtggcagggcgggaattcagcccagcccctttgaacaggcaggaaggaagccatcctccgaaactgtttttgaaagaaccctttccaaggttccttcctttccttttccccacttttggcccttcagtgggggccctctggggaaaccttgggggttccggcccattttggaaaaaattggcctttttaattttaaaaacccaaaaggcgccgtgggg

SEQ ID NO: 178120 - DNA, 885 bp, Homo Sapiens
  misc_feature (204)..(264): n is a, c, g, or t
  misc_feature (872)..(872): n is a, c, g, or t
gagggccatagagtggatgccgtcgagaggaccgatcgaggcggggggggtgatgaaggtcctcgtaaaccgaggtggaggatgcttcgagtggtgagggggggcgttatggggcccgggggcagccgcgtgcgtcgttccgaggcggtaggggagcggaagttgcgtcgacttatgggccgggttgtgtaagatggaatttcnnnnnnnnnnnnnnnnnnnnnnnnnnnnnnnnnnnnnnnnnnnnnnnnnnnnnnnnnnnnnagcggggtgcgcgaggggcgggcatggggtccaccgagcccgggcagattcccggaggaatcaatggcccgggtgttccgggagctgcaggacctccgggaggcccatagctccatccgggccggttccccaccctcagagcccaactgcctcctggagcggcagacgtgaggcccgccctacgctccccttgctgagtcccctgccaagcgctcggagcccccccaggacactttgcaccccctcaccccggtcctcctcattagggtgcagggcctaggtctcttccaggtgggggaggggggagagtcaggaataaggggatccccagaagtgcagagctgagcaggcttgggcctgtcatggctggccggaagtgtccccagctccctacagacgctgtagccatcactgcctctccagggaccctcctctcctgcccaggacagacccagccagaaccactgctaggatgggccgcacccaggggtctggcctccagggacctagagaatgggagggagaacggggccccaggagacccggccgccaccccacccgctacccttgggtgccacagggctgtgctgttgccaacagtaaacaantcactaactgacc

SEQ ID NO: 178121 - DNA, 957 bp, Homo Sapiens
ggggtgcggagtttggctgctccggggttagcaggtgagcctgcgatgcgcgggaagacgttccgctttgaaatgcagcgggatttggtgagtttcccgctgtctccagcggtgcgggtgaagctggtgtctgcggggttccagactgctgaggaactcctagaggtgaaaccctccgagcttagcaaagaagttgggatatctaaagcagaagccttagaaactctgcaaattatcagaagagaatgtctcacaaataaaccaagatatgctggtacatctgagtcacacaagaagtgtacagcactggaacttcttgagcaggagcatacccagggcttcataatcaccttctgttcagcactagatgatattcttgggggtggagtgcccttaatgaaaacaacagaaatttgtggtgcaccaggtgttggaaaaacacaattatggtaaaataaagtgttctccttttaagggtgggtttaataacatattatgaaagtagtattttgtactatcgtcaggaaaccaaataagatatatatgtgctcttaattttaagtgtgtatgtgcattaaacaaaaattaagcttaacacaaaaacaaaacccttcgcggcatctatgccgtgggcggagaacaccgccatcgaacggccccctggctataacctgctcccctgacccaagctttctaggacaaagcggccaatatcccccggtcccctagacagaactagcaacttcacccgcaccccaggcagagattacctcccgcatccaagcaataccccgcaagatacctccccgttagccaacaataccccgcgtgaaatggcactcccgcctacctactactcccgccccaccacaggcaacgccggacaggagcaacgccctggttaccgccccggcccacactcacgtttctgcccactctgacgcctcactccaccgc

SEQ ID NO: 178122 - DNA, 955 bp, Homo Sapiens
ggggacgtcacgccgcacgccccagcgagggcgtgcggagtttggctgctccggggttagcaggtgagcctgcgatgcgcgggaagacgttccgctttgaaatgcagcgggatttggtgagtttcccgctgtctccagcggtgcgggtgaagctggtgtctgcggggttccagactgctgaggaactcctagaggtgaaaccctccgagcttagcaaagaagttgggatatctaaagcagaagccttagaaactctgcaaattatcagaagagaatgtctcacaaataaaccaagatatgctggtacatctgagtcacacaaggaagtgtacagcactggaacttcttgagcaggagcatacccagggcttcataatcaccttctgttcagcactagatgatattcttgggggtggagtgcccttaatgaaaacaacagaaatttgtggtgcaccaggtgttggaaaaacacaattatgtatgcagttggcagtagatgtgcagatacccacaatgttttggaggagtggcaggtgaaccagtttttttatttgatacagaggggaagttttatggtttgatagaagtgggtagaccctttgcctactgggcctggaattccgccacctttcaggctttataagcaagaaaaacctccagggtgaggagggaaccacccggaaaaggctttgtggaaggattttcacctccttgaataatcattcctttcccccatattaaattaatttttccgcttggtccccgaacttaccacacgagggttacctgggcaccaagggttttatcctctcttctcccagatattttcctttttcagggaacacgcttcacaagggttctccacacttagcggatatgtgggggaatggagtatttgggcttttttcccactttctcgcgccattgaaccctaaagatagggaccccttgcctc

SEQ ID NO: 178123 - DNA, 895 bp, Homo Sapiens
  misc_feature (604)..(604): n is a, c, g, or t
  misc_feature (859)..(859): n is a, c, g, or t
cctgcctctccctggttcccacagtgttagcgtccctgaaaagacaatattctctctaaagcaataaggggtgacgggccggggggagtgtttgctgctgctggcccccagctccccttccctcttgccaggtgtgggggagactcctgttgtgactgaatgtaacccccccacccctgccgcagccaatgcaggggaagggggacactcttcctgtctcttctccccagctaaagagactttggacttagggggcccatgagcctgggagaggccttaaccctgtgaggaagtatagggggagccctctcccacccccatccccttctgagagtggtatgtttacaagcccctgagcccccctgccccagggactcagaccctgttgctgtccttccccggccccggtcttccctgggccctcgctgctcccctgcccttcctggggttggggtggggtgcaggggtcaccgtgttccctgtctgccttgtacccacagtctccccgccccctctccaccctgtgtgacttccctctcttttacctgctcctgtaaatactcccttctcccaataaaacttggtgtgtgttctcccaaaaaanacccaactgacccccttctcacccgtaacttctaaacacaccccgcccttttgcttgtttttatgttccccgcgtcgggaaaaaacggcattgaaaatgggacatgggccttcaatggtttcctgccccaatttctcctttgtagaaaatggttatatatttgcctgggcctccccctaaagtggaagacgaactccattttcccagaaagccgtggccataccccggacttcattgataatccggcctgaattnctaccttgggcaaaatttacccccctctcatttata

SEQ ID NO: 178124 - DNA, 913 bp, Homo Sapiens
ggggacctggcccggacgccagaaaatgttccacgtgggataccctgcgtggggttcactgtagtagctgcactaggtgattcttggagcgggcctgagagacaaggacatgtggatcccagtggtcgggcttcctcggcggctgaggctctccgccttggcgggcgctggtcgcttttgcattttagggtctgaagcggcgacgcgaaagcatttgccggcgaggaaccactgtgggctctctgactcctctccgcagctgtggcccgaaccggatttcaggaatccgccaaggaaggcgtctaaggccagcttagactttaagcgttacgtaaccgatcggagattggctgagaccctggcgcaaatctatttgggaaaaccaagtagacctccacacctactgctggagtgcaatccaggtcctggaatcctgactcaggcattacttgaagctggtgccaaagtggttgcgctcgaaagtgacaaaacttttattccacatttggagtccttaggaaaaaatctggatggaaaactacgagtgattcactgtgacttctttaaactagatcctagaagtggtggagtaataaaaccacctgctatgtcttctcgagggctctttaagaatttgggaatagaagcagttccttggacagcagacatccctttacaagagttgggaatgttcccaagtagaggggagaaaagggcactttggaaactcccatatgacctgcattcctggacttcccatatataaatttgggacgaatacaagtaacataggtttattgggtgaaaaagaattcccaaaaacctaatgggcagatcccccgaaaatccaggacctgggatccatggtatttacggggctaaccctgggcaaattaccccttggtgaaaaatt

SEQ ID NO: 178125 - DNA, 412 bp, Homo Sapiens
  misc_feature (112)..(112): n is a, c, g, or t
  misc_feature (220)..(220): n is a, c, g, or t
aatgaacaaattgggtcaagggggcaaataaccagggctgtaaggcgctggggaatctcaagaaaacttcagccggggacaatcaaaaaatctgctggaaatacttgtcccnattgatgtattccttgtcatgggagtcctgcagccctgttggtcttcacatactgccacagggcctggacaatggctgagcggctctgtgtatgcagccccagcagcncgggctagccggggatccagtttgaactggggaggctggtagtccagcatgaggagcagcgtgcagcgcacactcaggtccccaggccgtttcacctggaagccgtccgtctcctgggtcgtgggtgtccgatgccactcaacgaggtggttgtcagggccataaagatctttgtccagctcgatgaccaac

SEQ ID NO: 178126 - DNA, 943 bp, Homo Sapiens
  misc_feature (790)..(790): n is a, c, g, or t
gggatgccctgcgatagaaacacagttacctctcccctttcacgtagttttcatttgtggtgagattctctcccaggccacaagacatttcctgctcggaaccttgtttactaatttccactgcttttaaggccctgcactgaaaatgcaagctcaggcgccggtggtcgttgtgacccaacctggagtcggtcccggtccggccccccagaactccaactggcagacaggcatgtgtgactgtttcagcgactgcggagtctgtctctgtggcacattttgtttcccgtgccttgggtgtcaagttgcagctgatatgaatgaatgctgtctgtgtggaacaagcgtcgcaatgaggactctctacaggacccgatatggcatccctggatctatttgtgatgactatatggcaactctttgctgtcctcattgtactctttgccaaatcaagagagatatcaacagaaggagagccatgcgtactttctaaaaactgatggtgaaaagctcttaccgaagcaacaaaattcagcagacacctcttcagcttgagttcttcaccatcttttgcaactgaaatatgatggatatgcttaagtacaactgatggcatgaaaaaaatcaaatttttgatttattataaatgaatgttgtccctgaacttagctaaatggtgcaacttagtttctccttgctttcatattatcgaatttcctggcttataaactttttaaattacatttgaaatataaaccaaatggaaatatttttttcccccgggacaaanacgtatcattaaaaatttccttggggggccggccttcgggccttgaagaaagctttctaaaaccattccgtttggggcccccggtgccccgttagggaaaagtggaacattggtccattaactggttttccctaggaggattcctgggcacac

SEQ ID NO: 178127 - DNA, 566 bp, Homo Sapiens
  misc_feature (49)..(163): n is a, c, g, or t
  misc_feature (171)..(205): n is a, c, g, or t
  misc_feature (275)..(287): n is a, c, g, or t
  misc_feature (319)..(423): n is a, c, g, or t
agtcgacggtaccggacatatgcccgggaattcggccattacggccggnnnnnnnnnnnnnnnnnnnnnnnnnnnnnnnnnnnnnnnnnnnnnnnnnnnnnnnnnnnnnnnnnnnnnnnnnnnnnnnnnnnnnnnnnnnnnnnnnnnnnnnnnnnnnnnnnnntctccagnnnnnnnnnnnnnnnnnnnnnnnnnnnnnnnnnnntaagcgtaacttccctcaaagcaacaaccccccttgcccatgcctccagctacaaaacaattcaattgcnnnnnnnnnnnnnggtccaaaataaaacctcagctagctctgccnnnnnnnnnnnnnnnnnnnnnnnnnnnnnnnnnnnnnnnnnnnnnnnnnnnnnnnnnnnnnnnnnnnnnnnnnnnnnnnnnnnnnnnnnnnnnnnnnnnnnnnnntttttgtggggccgccttgccctccaaaaacttttcaaaacctttctttgggggcccgggccccctaggaaaggggacccggggccaaaaccggttcccaagaaaaacccgggcaagaaaaaaggggttgggatttccccccc

SEQ ID NO: 178128 - DNA, 1196 bp, Homo Sapiens
taccccattggaaaaggttttaaaatattttgaggttttccccatttatccttttttaaataaaagtttaaccgtttgataggctccttacttctcttgattagtgagcatggagaaatcaacttcaaatggttagaaagattctaccaggtggtcatcagtccattcttcctcctcatgttgggatttctgtgagacgtaatcatcatcttcatagcctttcctcttcttcgtgattacgttaagtgcaagctcaccagaatgacatcgctccaacttctgtttcagaacagcaacttcttcagatctggctggttcatacttctttactaagtttctcatgcttttcattatatctagtaactgtgacaggcaagttctgttctctttcagcatcagactctctgataaataactttccatagtaattccagccctggaggcactagataaaatggcagtcagggcaatttgggaaggtgtgtataaaaggtaagcatccgtcaatgcaattctattaagaaagtcatcagctgttttcctcaaaatctctggattctccatatgggatagcgggtctttaagtcgatgaggaagccctcaaatggtctgtaaggattgtggacaataaggtggaaattaagttgctgtataagaagtagttcatattccagtatctgttcaagtgccttctcctgtccaagaggactctcccggaggtttccaacaaactgaggactagatacattgaattcatctactttgcaggccaaaaatgcacaagtgagcattattatcctggggtgatattccattactgagttattaagataaaaacgtttgaaatacatacaagccgtacccacacagatcttggcattgctggcttaaacaccgaacagaattccataaccttttctcatagtatttgcagagtgtcatttcttcatgaggctcaagaaagactggatcattcggaagaaccttcccgttggccacggctttgcatctgaatttgcggttggcgtcagcccgcagtcttgccagctgctcctcgctggagaaggtccagtgccgcttctgactactgttgtggtacattatggaatcgtgaccaggtccagagggtctgcagacgagaacccaaacgcatcagcgtcctggcgtaaaacacccgtacccccaccgaagatccc

SEQ ID NO: 178129 - DNA, 866 bp, Homo Sapiens
gggggggaaaacaaaaggagacgaaggacgcatgcgtttggtgagtcccggattctggtgggttcttccgctcaggctgggtgaagcgcttccgggtcgccgccggcagcagcctcccggcgcgatgaagacactgaggctcagagaggttaagtgactcagccaaggtcaaacagctagtaagtggtggagccaggactcaaagccagtctaggagccatgtccactttgttcccctcactcttccctcgtgtgactgagactctgtggtttaatctggatcgaccctgtgtggaagagacagagctgcagcagcaggaacagcagcatcaggcctggctccaaagcatcgcggagaaagacaacaacctggttcctattggcaagccagcctcagagcactatgatgacgaggaagaagaggatgatgaagatgatgaggatagtgaagaggactcagaggatgatgaggatatgcaggacatggacgagatgaatgactacaatgagtcaccggatgatggagaggtcaatgaggtggacatggaaggcaacgaacaggatcaggaccagtggatgatctaggtagacaaggcagggtggcctcagggagattccaggccagcccaaactaccctgcatcccaacccccaacccctgcccacagaaccagctgatggccccagtgcctgaaagtgcccttgggcacctcctcagctgctgccaggatctggtctctttggccccctcccaggccatcagtctgcacttgaaatccccagggcctgaaacctactccaccttcctgggccagtacctccaccccttggattgcccgagtccggggccaaagtttctctttaaaa

SEQ ID NO: 178130 - DNA, 452 bp, Homo Sapiens
  misc_feature (82)..(91): n is a, c, g, or t
  misc_feature (133)..(216): n is a, c, g, or t
tgaggcacctggcctcagatttttgatactcttaaaccttctgatccttagtttctctctccaaaatactctttctaggttnnnnnnnnnnggctcttatatttggtgctatgtaaatgaaaatgttttttannnnnnnnnnnnnnnnnnnnnnnnnnnnnnnnnnnnnnnnnnnnnnnnnnnnnnnnnnnnnnnnnnnnnnnnnnnnnnnnnnnntgtcttgggcctcgcaaagtgcttaagtaggattacagggcgttaagcaaccaaacccgggctgtaaaaatggtactttattccccaagccctcttttggataaacccttaagtaagggatgggaagtaaatgatggttatccggggaaaaataagccaccctttttacccgttaaggacccaaactttgttaaaagccctccctgaagtcctaaaccctaaaattactttcaggg

SEQ ID NO: 178131 - DNA, 952 bp, Homo Sapiens; identical to SEQ ID NO: 15293
  misc_feature (545)..(560): n is a, c, g, or t

SEQ ID NO: 178132 - DNA, 546 bp, Homo Sapiens; identical to SEQ ID NO: 85157

SEQ ID NO: 178133 - DNA, 745 bp, Homo Sapiens; identical to SEQ ID NO: 97918
  misc_feature (343)..(347): n is a, c, g, or t
  misc_feature (349)..(350): n is a, c, g, or t
  misc_feature (354)..(402): n is a, c, g, or t
  misc_feature (405)..(485): n is a, c, g, or t
  misc_feature (488)..(489): n is a, c, g, or t
  misc_feature (494)..(588): n is a, c, g, or t

SEQ ID NO: 178134 - DNA, 796 bp, Homo Sapiens
  misc_feature (696)..(708): n is a, c, g, or t
  misc_feature (710)..(711): n is a, c, g, or t
  misc_feature (714)..(716): n is a, c, g, or t
  misc_feature (719)..(723): n is a, c, g, or t
gggatgtggaaatactgatgtttccagtaagggaatattggtgagctgcatatataaatttgacagatagctatttacatagccttctaagtaaaggcaatgaattctccatttcctactggaggatttatttaaataaaatatgcttattaaacactcctgcaaagatggttttattagtaccctggtcattttgttcaaggaagggttatattgcattctcacgtgaaatataaaaagcaagtcttgcccaataaaaacgctacattgtgtgtattttttgttcagctaagaattggaaaagtatttgcttgccttttaagttactgacatcagcttccaccagtgtaaaaattgagtaaaacctgaagttttgcataaaatgcaaatcggtgcctgtgcttgaaggttgctgtagagcatctgaccccttattaccaccttaagcaatgtatatgccatgcattaccatgcactaattcaatcacaggtgtttctatctagatttaaatatatttgtcaatgaatgtggaatagaaaatctaaacatgacaataatagacatatctttgtatggtaccagttagttttgccgtggatcagatggtttataaaagtaataacccataaagcaaaaaataatttgaaagcccgtctattccctatgctcaaaaaagtaaagttttttctacaaannnnnnnnnnnnnannaannnaannnnnaacatggtcggccgccttcgggccctcggagaaagctttcttaaacccatttcgttttggccgcgccgggccc

SEQ ID NO: 178135 - DNA, 825 bp, Homo Sapiens
  misc_feature (476)..(476): n is a, c, g, or t
ggggtcatgcatagtgctgcttctccaacacaggcaccaatccttaatccctctatggttacaaatgaaggacttggtcttacaactacagcttctggaacagacatctcttctaatagtctaaaagattgtcttcctaaatcagcacaacttttgaaatctgtttttgtgaaaaatgttggttgggctacacagttaactagtggagctgtgtgggttcagtttaatgatgggtcccagttggttgtgcaggcaggagtgtcttctatcagttatacctcaccaaatggtcaaacaactaggtatggagaaaatgaaaaattaccagactacatcaaacagaaattacagtgtctgtcttccatccttttgatgttttctaatccgactcctaattttcattgattaaaactcctttcagacatataagtttaataaataacttttttgttgactttcaagtaaagtgatttttntttaattttaacataaagtcttcagaaagcctttctatgaaagaattttaacctataatgtaaaggatgtattctgagagaacaaagcagaatgaaacttgagtcacttactaaatatagtggatataaaatagaacacctgactttgctcttagaccataacccccgaacttactatgttcatatatttgtattgaacaatcttttaaaagcaaaaatgtaaatgatgtgtagtttatttgtgcttttattgttttccctgcgtctcagacatgttgagaatcatggacaaaacctgctggaattttggaatttttgaagatgtaaataatgtgtatttatgttataa

SEQ ID NO: 178136 - DNA, 619 bp, Homo Sapiens; identical to SEQ ID NO: 7124

SEQ ID NO: 178137 - DNA, 1404 bp, Homo Sapiens
ggggatacagttccggtgggagaacgcggctgcgaggttttcggctttggctcctgatatgcagcgacagaattttcggcccccaactcctccttaccctggtccgggtggaggaggttggggtagcggaagcagcttccggggaaccccgggcgggggcggaccacggccgccctcccctcgagacgggtacgggagtccgcaccacacgccgccgtacgggccccggtctaggccgtacgggagcagtcactctccgcgacacggcggcagcttcccggggggccggttcgggtctccgtcccctggcggctaccctggctcctactccaggtcccccgcggggtcccagcagcaattcggctactccccagggcagcagcagacccacccccagggttctccaaggacatctacaccatttggatcagggcgtgttacgagaaaaaagaatgtctaatgagttggaaaattatttcaagccttcaatgcttgaagatccttgggctggcctagaaccagtatctgtagtggatataagccaacaatacagcaatactcaaacattcacaggcaaaaaaggaagatacttttgttaacatttctgaaattcaactggaagcttcatgtgtcaggaacatcttggacaaaactttaagttgtgttgatataaatttacccaaagatgatgactttgattggataattagtaaggtctttttgttatttttcatcgtatcaggtattgttgatattagagaaaaaagtaggataacttgcaacatttagctctggaagtacctaccacattttagagatttaccgtttccatatatttaacattcctggttacataatggacatttgtcttttaatgttttttcaatgttttaaaataaaacattttgtcttccaaaaaccggcccgcgccacctgtgattagccccttgccggcccggccccggccccctccaaaaaccttttcttagacaccttctgttgtgggggccgccgggtgccccccaagggttaacgtggaaaccccggggcccaataaccgcgccctttccctaaaggagaaatcccctgcgcccctggacattaggggcgcttgggacatttctttccaccaataacaaataaaccggccccgcgggggggcacccccgaaccccgctgtttttgaaacccatatttcacacaaagggcaagcttctggcgaggcgccctatacctggggactccgagtccacccggggaaatcgccagccgcgaggcttctgataataccaacattgacagcccccggggcgggtggcgcgagtccttttaccaggcacgcggggtgggaaacccctcttcacacacgcgttcctttgcgccccacgccggcgaagccccacc

SEQ ID NO: 178138 - DNA, 859 bp, Homo Sapiens
ggctggctgagtactggggtccagaaagtgatcgctgccggtggtcgccatggggaagtcggattttcttactcccaaggctatcgccaacaggatcaagtccaaggggctgcagaagctacgctggtattgccagatgtgccagaagcagtgccgggacgagaatggctttaagtgtcattgtatgtccgaatctcatcagagacaactattgctggcttcagaaaatcctcagcagtttatggattatttttcagaggaattccgaaatgactttctagaacttctcaggagacgcttggcactaaaagggtccacaacaacattgtctacaacgaatacatcagccaccgagagcacatccacatgaatgccactcagtgggaaactctgactgattttactaagtggctgggcagagaaggcttgtgcaaagtggacgagacaccaaaaggctggtatattcagtacatagacagggacccagaaactatccgccggcaactggaactggagaaaaagaaaaagcaggaccttgatgatgaagaaaaaactgccaaatttattgaagagcaagtgagaagaggcctggaagggaaggaacaggaggtcccctacttttacggaattaagcagagaacaatgatgaagagaaagtcacgttttaatttgagtaaaggagcatgtagctcatcccggagcaacatcttccaagtcaaagtactctggggaccgagtgcactggaagacgataggaagttcagcatcagtgaaacgaaaagaatcttcccagagctcaactccagtcttaaagaaaagaagaaaaagaaatctgcactggatgaaatcatggagattg

SEQ ID NO: 178139 - DNA, 1070 bp, Homo Sapiens; identical to SEQ ID NO: 15304
  misc_feature (705)..(705): n is a, c, g, or t

SEQ ID NO: 178140 - DNA, 814 bp, Homo Sapiens
  misc_feature (398)..(518): n is a, c, g, or t
  misc_feature (526)..(539): n is a, c, g, or t
  misc_feature (621)..(742): n is a, c, g, or t
  misc_feature (759)..(769): n is a, c, g, or t
gggtcggtgatgatggcttgctggaagcagaatgaattccgcgacgatgcgtgcagaaaagagatccagggcttcctcgattgtgccgcgagggctcaggaagcccgaaagatgagatcaatacaggaaaccctgggagagtctgggagtttacttccaaataaattgaataagttgttacagaggtttcctaacaaaccttacctcagctgaaaatggacaagtattttcaatgactgaaatatagcttctgacaactatgcagaggcattttagagacattggcattgccatgccctctttggagggtagaagaggcaaaacacttttttcaccctttggaatcatagtatgggtagaagttatgatttatcttgaaataaaatcctctgaacagnnnnnnnnnnnnnnnnnnnnnnnnnnnnnnnnnnnnnnnnnnnnnnnnnnnnnnnnnnnnnnnnnnnnnnnnnnnnnnnnnnnnnnnnnnnnnnnnnnnnnnnnnnnnnnnnnnnnnnnnntttggggnnnnnnnnnnnnnnaaaaaattttttaaaactttttttgggggcgggggccccaaagggaagggaaaaggggccaaatgtttccccaggaaaaccnnnnnnnnnnnnnnnnnnnnnnnnnnnnnnnnnnnnnnnnnnnnnnnnnnnnnnnnnnnnnnnnnnnnnnnnnnnnnnnnnnnnnnnnnnnnnnnnnnnnnnnnnnnnnnnnnnnnnnnnnnacttcttattaaatttnnnnnnnnnnngggcattttttggaaaaagggggggaaatttattaaaaacttctc

SEQ ID NO: 178141 - DNA, 699 bp, Homo Sapiens; identical to SEQ ID NO: 2868

SEQ ID NO: 178142 - DNA, 833 bp, Homo Sapiens
  misc_feature (777)..(777): n is a, c, g, or t
  misc_feature (779)..(779): n is a, c, g, or t
  misc_feature (795)..(795): n is a, c, g, or t
ggaatcttttgaaactaagaaaatgtgtcaaattgtgtgcattcattctgtaggtaaaattcttaaggattgccatgtcagtccttcagttgtacagtgaactgttgtacactggttcaatgaaaggaagttaaaagtaccttttacatattgtaaaagtggatacagttgatttgtgagtaggcactctttaatccattacctggcactagcaacattagaattttaaaataaaataattgggaaagaaggtgggtcatgtattaatcagtgaacagagatttacctaaccaacagacttggattgtcttttgacataatcaaaatgcaacacatgcactttgtgtgtctcctcttaattgaagggagggctgagggatgttttctcttcttgtcttgtgtataattctctattgcttaggatattaaagtagagcactcaagtgtgggtttctgtgttattgaggatttgtttggaattcaaattacagttatgtactggatgctacagacttataacagcatagtgaatggtaagactagtgcaaaacagttatttctgaaaattaaagaccattattgctaccaaatcaatgtgactatttcatatgcattttgcctttgttaattttaaacaaacaaagtatcattagtgatcagctagctaccttctactttccatttttcaagtggattgttctcttaatgtgtatataacctgttgcctaaattttatggacagtctttttataataaaccattctcctatatgaaaangnaaacaaaacaaccaanaaaaccatgggcgggcgccttcggccctcgaaaagcta

SEQ ID NO: 178143 - DNA, 852 bp, Homo Sapiens; identical to SEQ ID NO: 2938
  misc_feature (621)..(623): n is a, c, g, or t

SEQ ID NO: 178144 - DNA, 960 bp, Homo Sapiens; identical to SEQ ID NO: 2949
  misc_feature (406)..(406): n is a, c, g, or t
  misc_feature (408)..(408): n is a, c, g, or t
  misc_feature (437)..(451): n is a, c, g, or t
  misc_feature (478)..(478): n is a, c, g, or t
  misc_feature (508)..(517): n is a, c, g, or t

SEQ ID NO: 178145 - DNA, 791 bp, Homo Sapiens; identical to SEQ ID NO: 2950
  misc_feature (150)..(157): n is a, c, g, or t
  misc_feature (159)..(175): n is a, c, g, or t

SEQ ID NO: 178146 - DNA, 692 bp, Homo Sapiens; identical to SEQ ID NO: 2962
  misc_feature (498)..(498): n is a, c, g, or t
  misc_feature (500)..(500): n is a, c, g, or t
  misc_feature (502)..(502): n is a, c, g, or t
  misc_feature (507)..(507): n is a, c, g, or t
  misc_feature (515)..(515): n is a, c, g, or t
  misc_feature (517)..(521): n is a, c, g, or t

SEQ ID NO: 178147 - DNA, 739 bp, Homo Sapiens
  misc_feature (494)..(509): n is a, c, g, or t
  misc_feature (512)..(514): n is a, c, g, or t
  misc_feature (518)..(520): n is a, c, g, or t
  misc_feature (524)..(578): n is a, c, g, or t
  misc_feature (580)..(581): n is a, c, g, or t
  misc_feature (632)..(644): n is a, c, g, or t
gggaagccgagctgggcgagaagtaggggagggcggtgctccgccgcggtggcggttgctatcgcttcgcagaacctactcaggcagccagctgagaagagttgagggaaagtgctgctgctgggtctgcagacgcgatggataacgtgcagccgaaaataaaacatcgccccttctgcttcagtgtgaaaggccacgtgaagatgctgcggctggatattatcaactcactggtaacaacagtattcatgctcatcgtatctgtgttggcactgataccagaaaccacaacattgacagttggtggaggggtgtttgcacttgtgacagcagtatgctgtcttgccgacggggcccttatttaccggaagcttctgttcaatcccagcggtccttaccagaaaaagcctgtgcatgaaaaaaaagaagttttggaattttatattactttttagtttgatactaagtattaaacatatttctgtattcttccnnnnnnnnnnnnnnnnccnnnctcnnncccnnnnnnnnnnnnnnnnnnnnnnnnnnnnnnnnnnnnnnnnnnnnnnnnnnnnnnnanncttgtgggggccccctcggcccctcaaaaagttttttaaaaccttttgttnnnnnnnnnnnnncccccatagggaaaggggaaactggggcctaaacttggttcccccagggaaaacccggggcacagggaataaggggggtgggaatctccccaccc

SEQ ID NO: 178148 - DNA, 787 bp, Homo Sapiens
ctgggccacccctacgacgtggccattgacatgtggagcctgggctgcatcacggcggagttgtacacgggctaccccctgttccccggggagaatgaggtggagcagctggcctgcatcatggagattccaaaggttttcctaaaaatataaccaacaacagggggaaaaaaagatacccagattccaaggacctcacgatggtgctgaaaacctatgacaccagcttcctggactttctcagaaggtgtttggtatgggaaccttctcttcgcatgaccccggaccaggccctcaagcatgcttggattcatcagtctcggaacctcaagccacagcccaggccccagaccctgaggaaatccaattcctttttcccctctcagacaaggaaggacaaggttcaaggctgtcatcactcgagcagaaaagcagatgagatcaccaaagagactacagagaaaacaaaagatagccccacgaagcatgttcagcattcaggtgatcagcaggactgtctccagcacggagctgacactgttcagctgcctcaactgggtagacgctcccaagaagtcagaggcagctgtcggggcggaggtgtccatgacctccccaggacagagcaaaaacttctccctcaagaacacaaacgttttaccccctatggtatgacctttgctgagggtatgtcctgctcctttccaccagtgatttgtattaagacagcacttatattgtacaatacttcagactgtttttttaaaattacataaactttatggtt

SEQ ID NO: 178149 - DNA, 877 bp, Homo Sapiens
  misc_feature (514)..(515): n is a, c, g, or t
  misc_feature (517)..(518): n is a, c, g, or t
  misc_feature (594)..(638): n is a, c, g, or t
  misc_feature (645)..(656): n is a, c, g, or t
  misc_feature (672)..(736): n is a, c, g, or t
ggggccgactcctcccgctaaggcgggaacacgcggggcccaagatggcggccagccggtaccggcgttttcttaagctctgtgaggaatggccagtggacgagaccaaacggggccgggacttgggcgcttacctgcgacagcgggtagcacaggcctttcgggagggagagaatacccaggttgcagagcctgaggcctgtgatcagatgtacgagagcttagcgcgactccattcaaactactacaaacacaagtaccctcgccccagagacaccagcttcagtggcctgtcgttggaagagtacaagctgatcctgtccacagacaccttggaagagcttaaggaaatagataaaggcatgtggaagaaactgcaggagaagtttgcccccaagggtcctgaggaggatcataaggcctgagctcaggccttacctcgtgcacatacctaggtgtggagtcttgtacattgccatcgtcaataaaactgccccagtttccccttcgaacnncnnacgcttcccactcccctcccttccgtttcacccgtttccgccttcccgttcgtccctttcggctcctcctttccannnnnnnnnnnnnnnnnnnnnnnnnnnnnnnnnnnnnnnnnnnnngtgccgnnnnnnnnnnnntttttctaatacctannnnnnnnnnnnnnnnnnnnnnnnnnnnnnnnnnnnnnnnnnnnnnnnnnnnnnnnnnnnnnnnnttcgcctccgttttccgttccgcgttttcccgccttcccttcgtatgccgcgcccggcccccgttcgccgccgttataccccatccgccccacagcgtccgttcctcgccgtctcgccgattcactcacccgctatccccc

SEQ ID NO: 178150 - DNA, 191 bp, Homo Sapiens
gaaaagccattatttctattcaattttgggtacttaactacagtgctggatgtaaagtttatgcagtaaaagcttattgaatgaatgaatcataggataaataatacaactagtaatttcttaagatcataaattccattacagtaaccctggtaggcaactctataaagttctgggctccaagaagaggt

SEQ ID NO: 178151 - DNA, 664 bp, Homo Sapiens
  misc_feature (164)..(176): n is a, c, g, or t
  misc_feature (465)..(474): n is a, c, g, or t
gataatagcaaaatgtttttcggtaataatatcacactaatgcttcttttaaacattaaacctattttccttttttacagaataagggaaaatgtgataagaagtttgtatacatttctggattatagattattatttatcttttgaaccagagctaaatggtnnnnnnnnnnnnntcagtgatgattgttatgttgatctcccacaattaatttatcttttgacaaaggggataaagagtttcagtttagctccttttgattgtatattattttttgcttttttattgtgaaaagaggtaggttttatttgtggagagagagttgaagattagggaaccagtgattttaattatgctactttttcttctaagagataaattgatatatcattcagtgtcatgaaaaacatgaatgttgtacaattttcttcctcaaaaaactttttaaatgtaagtatccttannnnnnnnnnaaaagagcacaatgcaggcgtattggagtattttcaagaaacagaataaagaacattaatggcagtattaggcttaactggaatatcaactaaagcccgtgttaacagttaaagtattataaacttttttttactttctgaaaattaaaaataaaatttatttctgcaatttcaaaaacacgacaaaaag

SEQ ID NO: 178152 - DNA, 486 bp, Homo Sapiens; identical to SEQ ID NO: 3444
  misc_feature (11)..(11): n is a, c, g, or t

SEQ ID NO: 178153 - DNA, 444 bp, Homo Sapiens; identical to SEQ ID NO: 3469

SEQ ID NO: 178154 - DNA, 280 bp, Homo Sapiens
atcagccactatgcccggctgggatcatatgttccacacatgtttgttcaataagcatggactgcaaccaccctacatgaatattcatagctcctcctgtagcctgttgaatatgtatgtttagccaacctcttcagcataaagctcctgcccaaacccctcctgctcctaaatgtctgtctctggtgttaaccagaggctgctcttcccaggctgctggatggctaccttgcaggctgtcacccttaacaagaaataaagtgtcctttgcaaatgcata

SEQ ID NO: 178155 - DNA, 555 bp, Homo Sapiens
  misc_feature (100)..(120): n is a, c, g, or t
gggtccccacacagtgatcgccccacgggagggtgacagaatatgccaggaattgtcttggacatgggccccagtcaccacaatcagatggcttatttgnnnnnnnnnnnnnnnnnnnnnccttgattacgacacaccaaagctgttccaatttgtaaaaaactgtagttattacattgcaatgaaatctctttaccaaatcttgggccagtgttttacctggatagtgcttacattataaatattggtttttgcccttagtgctaacataagaaaaatcagttccttgtatactcaataacagagcttggaccagccaatgctgtctattcactcatggctataatgcagccgacagaattgttcaccatggaatgttttataaacctgttcatattccagagagacaaagactcaaaactacaagtgcaaagttgggtagagagagctgccagaaacactagctcattaggcatagaggccacagcaaatcaaattgttccacaaactcattcttcacacaaacatttaaaacactatgcagccaggtgtggt

SEQ ID NO: 178156 - DNA, 827 bp, Homo Sapiens
  misc_feature (683)..(683): n is a, c, g, or t
ggggtctggtgacagatgccttcaagctgaaacgcaaagagcttaaaacacattaccaggcggacattgagcgaatgtatggaagaaaataattattctcttctggcatcagtttgctacagtgagctcagatcaaataggaaaatacttgaaatgcatgtctcaagctgcaaggcaaactccattcctcatattaaactattacttctcatgacgtcaccatttttaactgacaggattagtaaaacattaagacagcaaacttgtgtctgtctcttctttcattttccccgccaccaacttactttaccacctatgactgtacttgtcagtatgagaatttttctgaatcatattggggaagcagtgattttaaaacctcaagtttttaaacatgatttatatgttctgtataatgttcagtttgtaactttttaaaagtttggatgtatagagggataaataggaaatataagaattggttatttgggggcttttttacttactgtatttaaaaatacaagggtattgatatgaaattatgtaaatttcaaatgcttatgaatcaaatcattgttgaacaaaagatttgttgctgtgtaattattgtcttgtatgcatttgagagaaataaatatacccatacttatgttttaccacgtcccatgcgtatttcccctaantcttccttgccggcccccctccggcccccccaaaagttttccaaaacactttcctttggggggggcgcggcccccgttagggcaaggggaacaatggggccataaccttgttccccccaagagcaaacccccggcccaagaacc

SEQ ID NO: 178157 - DNA, 797 bp, Homo Sapiens; identical to SEQ ID NO: 3514
  misc_feature (86)..(86): n is a, c, g, or t

SEQ ID NO: 178158 - DNA, 967 bp, Homo Sapiens
gaattcagaaggagctagctgaaataacccttgatcctcctcctaattgcagtgctgggcctaaaggagataacatttatgaatggagatcaactatacttggtccaccgggttctgtatatgaaggtggtgtgttttttctggatatcacattttcatcagattatccatttaagccaccaaaggttactttccgcaccagaatctatcactgcaacatcaacagtcagggagtcatctgtctggacatccttaaagacaactggagtcccgctttgactatttcaaaggttttgctgtctatttgttcccttttgacagactgcaaccctgcggatcctctggttggaagcatagccactcagtatttgaccaacagagcagaacacgacaggatagccagacagtggaccaagagatacgcaacataattcacataatttgtatgcagtgtgaaggagcagaaggcatcttctcactgtgctgcaaatctttatagcctttacaatacggacttctgtgtatatgttatactgattctactctgcttttatcctttggagcctgggagactccccaaaaaggtaaatgctatcaagagtagaactttgtagctgtagattagttatgtttaaaacgcctacttgcaagtcttgcttctttgggatatcaaaatgtattttgtgatgtactaaggatactggtcctgaagtctaccaaatattatagtgcattttagcctaattcattatctgtatgaagttataaaagtagctgtagatggctaggaattatgtcatttgtattaaacccagatctatttctgagtatgtggttcatgctgttgtgaaaaatgttttaccttttacctttgtcagtttgtaatgagaggatttccttttaccctttgtagctcagagagcacctgatgtatcatctcaaacacaataaacatgctcctgaagat

SEQ ID NO: 178159 - DNA, 1171 bp, Homo Sapiens
  misc_feature (335)..(347): n is a, c, g, or t
  misc_feature (539)..(548): n is a, c, g, or t
  misc_feature (702)..(702): n is a, c, g, or t
  misc_feature (838)..(838): n is a, c, g, or t
  misc_feature (1023)..(1023): n is a, c, g, or t
  misc_feature (1031)..(1031): n is a, c, g, or t
ggggcggaactggctttgttgaccgggagaaacgagatgggggtgaagctggagatatttcggatgataatctacctcactttccctgtggctatgttctgggtttccaatcaggccgagtggtttgaggacgatgtcatacagcgcaagagggagctgtggccacctgagaagcttcaagagatagaggaattcaaagagaggttacggaagcggcgggaggagaagctccttcgcgacgcccagcagaactcctgaggcctccaagtgggagtcctagcccctcccctgatgaaatatacatatactcagttccttgttattcaaaaagcggnnnnnnnnnnnnncagggaacatgtcggggcgcctccggccctcggagaaggttttcctagacccattccgtttggggggcggcgggcccaggtagggtaaggtgaaacatgggcgccatagcctggtgttcctagggaggatccctggggcccatgacctagcgggctttgggattccctcacccaactaaaaacaaccgcccnnnnnnnnnncaaacgcgggaggcggtctcttgggaacaaaaatccccaggagtgggagggttcctggaaggggtccacttaacttgggggagtcttaattcaaacgaggcgaaggtccgagaccgcgcgaggccctgcgcgattaactctacgacatatcacncggcgcccccggcgcccctggggccacgctttcagtgcgcggagaggaaagggtggtgtggagaaagcttcccatttatagaggcccattctctggcgccgccaaccatggtgagaaacacctcactccgcccaanacgccgggcgcgttgagattggagaaacctcctggagaattcgcgcccccagcgcgggggagatttcacgagcccaaccccctctgggtcccgcgcgcttcggcgtcgggaacataagataatttctttgcgcgccacgttgaggctgggaaagaaaaacggcgcggcgtgccacacaacacaanagtgtggngtctcaccataattcggggggcgccagcgggttgttaaatcactcccacacggacctggggtggcgagacaacctctcgccccccacgaggggaaggtgggcgttgttggaagaatgtcggacaccatgctctatatttc

SEQ ID NO: 178160 - DNA, 1908 bp, Homo Sapiens
  misc_feature (84)..(84): n is a, c, g, or t
  misc_feature (122)..(185): n is a, c, g, or t
  misc_feature (286)..(345): n is a, c, g, or t
  misc_feature (555)..(636): n is a, c, g, or t
tggtctaggcggggggtaaggcgttaatagcggggcaataaacggcggcggcgggaaaagaagcggccgcataaaacgtcgggntggggcgcaatgtgggatggcgagaacggtaaaatcgnnnnnnnnnnnnnnnnnnnnnnnnnnnnnnnnnnnnnnnnnnnnnnnnnnnnnnnnnnnnnnnntatggggaaagtcaagtagggtcaagggggctgccggtgagatgcgtgcggtggggaaaggccaagctgtatgggcgccccaatggtggcacaggttaaannnnnnnnnnnnnnnnnnnnnnnnnnnnnnnnnnnnnnnnnnnnnnnnnnnnnnnnnnnnaaaaaggggtaacttgcgtaaggggcgcggaggttcgatcgggggggaacggcgtaaggtacgatgcggatatcgtggggtcggggcgcggggaggtaggttaaagttatggtgtggtgtttttgtaggggggcggggtctgcgctctggttatggcaggcagggggggcagtggccatgatcttaggccattaaagcgtcgagctgtgnnnnnnnnnnnnnnnnnnnnnnnnnnnnnnnnnnnnnnnnnnnnnnnnnnnnnnnnnnnnnnnnnnnnnnnnnnnnnnnnnntttactttgaaggccatgctagaaacttgctgctgctctaattcacgacttggagagacaaaactaaaaaagctgttgctgggttcaggtgctgtgggagaacccgcaaaaaatggtctgaactgaaaatctccatctccatcgccccgatttcgaacaggtgtattatccaaaggaaacttggagttgttacctaatgggaagccaagaacaccagactgtgcaatcatggatggttcaagggtgccttcatggttagcaatagtgatgtttcgtagcctaaggctatcatagaggccttggagcttttgatactgacgattgcgctccataagtttctcagagatgtcactgaactttttcttgtattcttctagtactttcttcatggaggtaacctccccctttcatagaggtcaattctacatccttgctttgtatttgctgagtatatatcttctccatctgtttcagatggccctcagccttgctgaaattgtattcttgatagagacgttcctgatgtacctgatatgtccagaaggccagcgctcgggagctaatgtccaacacgatctctggtcgcagtcctgccaataccatagctttatattcctctgatggactgagttctgtgcggacaatatctagctttccagaaagggtactgttgcaggcaggacagatagctggtgagcgactaaactcaccactgccatgctgatcacagaagatgtgagagcaggcagtgacccatgcatagccagagagtttgatgcgacactttcgataattacaaagcagcatgtcttcacacaaagacataataggatagtgaggtctccagaagctgaagagagtccataaaagaaaaacgcagtactcatctacagtatatccaggatttacagcaccaaagaggtccagactggaacagcgaaactcagatctggtttcagtctcttgaaattttactcctctggcatcacatgaatccagcttctatctagaaatccagttgaaccacaggatctatcaattatctaggatcatttgtgtaatgaagagaacttaaggcagcttatcttgatcaaaattcaagtaccaggctttaggtaccatcagcctttaaccctttctgttgagaatatccaaatccaagcccatatgattttcagggggtctacagatgggccagttctggactggcacacagggtgctggacttccctcctcagtggatttcatcttcaaccagcccaccaaaacccc

SEQ ID NO: 178161 - DNA, 533 bp, Homo Sapiens
gggaggttttcagggtcgtaggacgccgttgggcaccacgctcggagaaggacaggacaatggcggccttagggtccccgtcgcacacttttcgaggacttctgcgggagttgcgctacctgagcgcggccaccggccgaccctatcgcgacaccgcggcctatcggtaccttgtgaaggctttccgtgcacatcgggtcaccagtgaaaagttgtgcagagcccaacatgagcttcatttccaagctgccacctatctctgcctcctgcgtagcatccggaaacatgtggccctacatcaggaatttcatggcaagggtgagcgctcggtggaggagtctgctggcttggtgggtctcaagttgccccatcagcctggagggaagggctgggagccatgaacatggagaatatccttggatgctgcattcataggagaattgaataatttctatcaatatgtatttatcattaaattttttttaagtataaaacaaaacgaaaacgcacaacaaaaaattggcggccggcct

SEQ ID NO: 178162 - DNA, 469 bp, Homo Sapiens
ggggcaggcaagcgcgtacgcagaagcgtgcgcgcgcccgttcaacgtccggagcatcggtgcagtttcgagggtaaagcctttggcgcggtgatgtggacttttgttctctaactacaactcccagcatacgtcacccctcacgtgggcgctaggtgtggtttcgtgggatagggtcaccagtgaaaagttgtgcagagcccaacatgagcttcatttccaagctgccacctatctctgcctcctgcgtagcatccggaaacatgtggccctacatcaggaatttcatggcaagggtgagcgctcggtggaggagtctgctggcttggtgggtctcaagttgccccatcagcctggagggaagggctgggagccatgaacatggagaatatccttggatgctgcattcataggagaattgaataatttctatcaatatgtatttatcattaaattttttttaagttta

SEQ ID NO: 178163 - DNA, 1224 bp, Homo Sapiens
  misc_feature (796)..(796): n is a, c, g, or t
  misc_feature (806)..(806): n is a, c, g, or t
  misc_feature (940)..(1017): n is a, c, g, or t
  misc_feature (1020)..(1051): n is a, c, g, or t
  misc_feature (1053)..(1053): n is a, c, g, or t
  misc_feature (1058)..(1058): n is a, c, g, or t
  misc_feature (1128)..(1129): n is a, c, g, or t
ctgcactaaggatttagaaacacttggaagctcataacctcatcagaaactgcctttagccacactcctgaccttctagatgagtaacaaaaaaatgaaataagttcttggaaattaagccatttattttaattgctatttttttcaatgttctaggtatctttaaatttgttattgtggaatcattttcctgccagatacctttatcaaaattattggcctcatgagagctgaagtaagtcagcttttggtgaactttagtggacttctgtgagattgtagttgtactttgtatctctaaatctaaagatagttttttaaaactcccaaagaaaatctgctctcctttctgatctaaaaactcatctttggggtaaagagttaagtgtccaaaggttgtcacagttcatgaggtcagagggagctagcctggcacctggactctgcccatccacagctgacagattccaacagaagtgtatttaaattctccagtagacaatgctgggtaagggagggggtagggctgggttattaagatacaggctgctgtattttacattggttgtgggggaaggggagcctggagaaaacaaagtcactattcccttttttgaaacaggaaaaaaaattattttttgttcagtaaaaatggtagagaattccaatgtccctagccacaagggaccagttccactgagaagtgaacagtgggaactcaaaatttcagaaacattgggggaagggaaaattggctttctcttaattggcagatggtccagtggggcgggggggnctctgttttntgttgggatgtgttatggtgtatgtacgcatatatggaccgaagtctgctgagtttataaggttccaaaaatatggtaaaaatcttggtttttggtaatttatctcaataaaagcccactggaactccaaaaannnnnnnnnnnnnnnnnnnnnnnnnnnnnnnnnnnnnnnnnnnnnnnnnnnnnnnnnnnnnnnnnnnnnnnnnnnnnnccnnnnnnnnnnnnnnnnnnnnnnnnnnnnnnnncntgggngggcccggctcgcgcccttccaaaaaatttttctaaaaaccttttcgttgtggcgcccgcggcccccccnnaagggaaagggggaacccgggggcccaaaactcttggtttctcccaaagagaaaaccccggggcccaaaaaaacaaagggggggtttgggaattt

SEQ ID NO: 178164 - DNA, 457 bp, Homo Sapiens
ccttaagcaggctcctattccttacccactaaatggttccctttttcacccagaagttagaactcccccagatattcacactataggatctgaattcccgagattctaaaatatcttaaacccacaagagagaaaatctagttctgcctcagccccagtcagcaggccatctgtcccttcctctcctctgagtcagacagctctggcaagcaaggctccttggctagttcctaatgcactgacaggagccctcccattaaggacgacttctactcaaaatgcgactctccctctgaacttcagatgcctctgttagcaggaaaaggcattgattggattggatatatttatgtgactgcgggcatttgtggctgtagaatccgtgaccgtaatgttatatgtaatgggaactatcttataaacttgaaaaaaataaagtttttattttctatagtta

SEQ ID NO: 178165 - DNA, 663 bp, Homo Sapiens
  misc_feature (390)..(390): n is a, c, g, or t
  misc_feature (393)..(547): n is a, c, g, or t
  misc_feature (552)..(553): n is a, c, g, or t
  misc_feature (563)..(581): n is a, c, g, or t
ctaggacccccagggctggccttcctaagtttcccgtcccagtccttcaggcaagttcctgtgttagtcatgccacacacataccctatgaaaccttggagtttacaaagaattgccccagctctgggcacccctggccacccctggtccttggatccccttcgtcccaccctggtccaccccagatgctgaggatgggggagctcaggcggggcctctgctttggggatgggaatgtgtttttctcccaaacttgtttttatagctctgcttgaagggctgggagatgaggtgggtctggatcttttctcagagcgtctccatgctatggttgcatttccgttttctatgaatgaatttgcattcaataaacaaccagactcagaaaanaannnnnnnnnnnnnnnnnnnnnnnnnnnnnnnnnnnnnnnnnnnnnnnnnnnnnnnnnnnnnnnnnnnnnnnnnnnnnnnnnnnnnnnnnnnnnnnnnnnnnnnnnnnnnnnnnnnnnnnnnnnnnnnnnnnnnnnnnnnnnnnnnnnnnnnnnnnaaaannccaattttgnnnnnnnnnnnnnnnnnnnaaaaattttttaaaacacttcttttgggggggcgggcccccccacaaggaaagaagaaaagggggcaaaacgtggttccccc

SEQ ID NO: 178166 - DNA, 427 bp, Homo Sapiens
  misc_feature (24)..(24): n is a, c, g, or t
ctgatgggatcccagctgcttctnaggggaagatccaggctgccctgaaactggaacacattgatggggtcaatctcacagttccagtgaaggccccatcccgaaaggacatcctggaaggtgtcaagaagactctcagtcactttcgtgtggtagccacaggctctggctgtgccctggtccagctgcagccactgacagtgttctccagtcaactacaggtgcacatggtactacagctctgccctgtgcttggggaccacatgtactctgcccgtgtgggcacttgtcctggggccagcgatttctgctgccagctgagaacaacaagccccaaagacaggtcctggatgaagccctcctcagacgcctccacctgaccccctcccaggctgcccagctgccctttgcaacttcaacttacatc

SEQ ID NO: 178167 - DNA, 1072 bp, Homo Sapiens
  misc_feature (180)..(181): n is a, c, g, or t
  misc_feature (201)..(202): n is a, c, g, or t
atatttgggggaggggattccccaaggccccttggtcaagggacccagggtttttcctgggggaaacacgcgttatgacccaagttcccctttaccctacgggggccccgccgcgccaaaacgaaatggttttagaaaaactttcttcgggggccggagggcggccgaccatgttttganntgtggggtgggggaatgggnnggaacattcacacagggtctctttccaagaagtttggtgagtcacctacatgtcttcaattctcaaggcaacagtgggggcaacaaggaggttgacagccaggtcctgtgagagctgtttgtcaaagcccactctcagtgagtcagtccctggaagtggggttcagtgcacggaggcaggcgccactgactggcttagcaacgtgtccatcatgctgattttagcatcttgcttctcaatgtcctcatacggagtccaggacaagtcatgctgtagtttgtaggcaccaaggaagtcatgtggacaacttgtcccccattcctttggagaaatgatggaaaaatactgctgaccactctcccgtttatagagatagtaaatgttgccaggttttttcactatattacaagctacatggtgcaggttggcatctctgtgagcatcttcccagtaccttcctggcttgttcttgcaaatgttggatttgctcagctatgactgtcagcttgttggtggcatttgctcggatgaattcatcagccttctgcacctgctctgcgagcgccacgaggtctaaggggtccccggcccggtgggtgtggtaggggctcaccagggccaggccgccgggggtcggggtgagctccaccagggctcctgcgacacacacccaggaacacaagccgtgagctcccgccgtcggcctcccgcggagccccgagaccggctgcctcgcgggagctgacttccccctgctgactcccgccccgcatacctccatggcctgcagctggcggcgctccttgcctttcaaggaccccctcggtccgccccggcgcggcggcgtcctccatgacagcgccttatcct

SEQ ID NO: 178168 - DNA, 648 bp, Homo Sapiens; identical to SEQ ID NO: 4082
  misc_feature (425)..(473): n is a, c, g, or t

SEQ ID NO: 178169 - DNA, 491 bp, Homo Sapiens
atggtctttagattaatactgattatatagagcacggaaagataaagaattgaacattttctttgtatacttttttacactaattttattgttatacataaatggtagtcttcatttttgaagtcttacattttcactctttttttaatgaagtatttcatactacaaaaatacataaacgtatatataaagggataataaatgtaaatatctgtgtactcatcagccagcttaagatacagatgttgtcgacattttagaagttccctaaggccctctccctctcaaataattatttggaattttgtgtttgtcatttgtctattatagttttacaacatacgtatgtatctgtaagtgaaatgttaattttgtatgtttctgaattttatataaatggcaaaatgtttacttctgtgactttctttcatttttattgctatatagtattatataaatatactacaacttattcattcttgatggaaaaa

SEQ ID NO: 178170 - DNA, 318 bp, Homo Sapiens
  misc_feature (12)..(12): n is a, c, g, or t
  misc_feature (27)..(27): n is a, c, g, or t
  misc_feature (44)..(44): n is a, c, g, or t
  misc_feature (64)..(64): n is a, c, g, or t
aattgccctatngatagtaccttttangacctgtaaatacctcnggctttcccccgtgtgaatnctcacattagactttaattcgagcgcgtgtgaactgaacgctgatcagtattttttatcaacacctgagaactgttacaccttttattttgtcttttaggaaatccctgtctttccattttttcatgtaaattttgcacagttacttgttcatatgtaaatattttactttcagaaatgaagtttttaattgctattgttttatataggattgaaagaaaattaactcctttattaaaaacaaatttatctgta

SEQ ID NO: 178171 - DNA, 1583 bp, Homo Sapiens
  misc_feature (1482)..(1482): n is a, c, g, or t
gggagatgaagtgtggctctatcttgtatgtgagcacacccacattttcactgccattatctgggacagcagaaccaggtttggctcaacagatttctctttccacccatctattgcaggtgtagtggtcttgctgcttctccagggaggatctgcctacaaactggtttgctactttaccaactggtcccaggaccggcaggaaccaggaaaattcacccctgagaatattgaccccttcctatgctctcatctcatctattcattcgccagcatcgaaaacaacaaggttatcatcaaggacaagagtgaagtgatgctctaccagaccatcaacagtctcaaaaccaagaatcccaaactgaaaattctcttgtccattggagggtacctgtttggttccaaagggttccaccctatggtggattcttctacatcacgcttggaattcattaactccataatcctgtttctgaggaaccataactttgatggactggatgtaagctggatctacccagatcagaaagaaaacactcatttcactgtgctgattcatgagttagcagaaagcctttcagaaggacttcacaaaatccacccaaggaaaggcttctcttgactgcgggcgtatctgcagggaggcaaatgattgataacagctatcaagttgagaaactggcaaaagatctggatttcatcaacctcctgtcctttgacttccatgggtcttgggaaaagccccttatcactggccacaacagccctctgagcaaggggtggcaggacagagggccaagctcctactacaatgtggaatatgctgtggggtactggatacataagggaatgccatcagagaaagtggtcatgggccatccccacatatggggcactccttcacactggcctctgcagaaaccaccggggggggccctctgcctctggccctggagctgctggacccatcacagagtcttcaggcttcctggcctattatgagatctgccagttcctgaaaggagccaagatcacgcggttccaggaccagcaggctccctacgtagtccaaggggaaaccagtggggtggggcctatgaatgatgcgcaacagcaattggacgaccacaggtcccattctctttaaacaaattctacaaccttgtgccaggagcccatgcatcctggctctcatttgaccatgcgattgacctttcccctgcggcaaatatccctcgcaaaccacgggcccccctgtacccttttctctggtcccaaagccagttccaaagcaataaacgccctttgggtttccccttgccgcacagggcattcaaccctttcaccacaagtaaagccaagggtccaaaactgcaccctttgccttgcgcctggagggccctggcttcttccctcccaaggacaattttccccctcggcgcggaattctccctttggtctacccatatgcgcttttttcgnatttcccttcctttccaaggcccttttccctggaccttcccttcttcaagaaccaccaaaatttgcgaacccggggttttctggttctctcccgtgccccc

SEQ ID NO: 178172 - DNA, 377 bp, Homo Sapiens; identical to SEQ ID NO: 4147

SEQ ID NO: 178173 - DNA, 839 bp, Homo Sapiens
gggcgctcgcgctggaagaagcggaagaagatggcgctcaccagctttttacctgcacctactcagctatctcaggaccagcttgaggctgaagaaaaggcaagatcccagagatcacggcagacctcactggtctcctcccgaagagaacctcccccgtacggataccggaaaggctggatacctcggttattagaggattttggagatggaggtgcttttccagagatccatgtggcccagtatccactggatatgggacgaaagaaaaaaatgtcgaatgcgctggccattcaggtggattctgaaggaaaaattaaatatgatgcaattgctcgacaaggacagtcaaaagacaaggtcatttatagcaaatacactgacctggttccaaaggaggttatgaatgcagatgatccagacctgcaaaggcccgatgaagaagctattaaagagataacagaaaagacaagagtagccttagaaaaatctgtatcacagaaggtcgccgcagccatgccagttcgagcagctgacaaattggctcctgctcagtatatccgatacacaccatctcagcaaggagtggcattcaactctggagctaaacagagggttattcggatggtagaaatgcagaaagatccaatggagccctccaagggttcaagattaataagaaaattccccgggggaccacccttctcctcctgcgccctgtcatgcatttctcctagcccgaaagatgactggtaaagggaacaaccaagagtgggaagaattccctccctgggattttcctaactgggaaaaaatgccaaagggggttattacaaatt

SEQ ID NO: 178174 - DNA, 978 bp, Homo Sapiens; identical to SEQ ID NO: 4168
  misc_feature (529)..(542): n is a, c, g, or t
  misc_feature (784)..(786): n is a, c, g, or t
  misc_feature (788)..(788): n is a, c, g, or t
  misc_feature (790)..(790): n is a, c, g, or t
  misc_feature (792)..(792): n is a, c, g, or t
  misc_feature (796)..(796): n is a, c, g, or t
  misc_feature (799)..(799): n is a, c, g, or t
  misc_feature (809)..(810): n is a, c, g, or t

SEQ ID NO: 178175 - DNA, 1176 bp, Homo Sapiens
  misc_feature (359)..(376): n is a, c, g, or t
  misc_feature (536)..(537): n is a, c, g, or t
  misc_feature (949)..(973): n is a, c, g, or t
ctatacaaggggaaggtcgggacgggtgagcggccgaaagggaaatacgtcgtacaaagggtagtgttccgccggcgcaatagaccggctgggcggaaaagaacgagaggggacagaacacgcggagcggcaacggggggatgtgtggggtatcaagggagagggggcgtcgaatgaccgtatgtagcgcgtctcgcgcgggtgtggcgaaggcgggacagcgcgcacacggatgatatataaagcgcgccgcgtacagacaggtataagtcgccccatttgggggaagacaaacgtattgtgtgtagcgccaaagaagcgcgcgcgtatcgcggggggtattgtgcgaacggcaatcnnnnnnnnnnnnnnnnnntatttcgtatatacgaggggcgcgcggcaaaggggggagcggaactcgcccccagcaaaaagcggcgttgtggtaatcgttacccggctataaagggtaccgcgcgggaaggtcggtggcgccatagggcgggagaaaacgcgaatatctttatgttatnncggccggcgcgattaacaaccgtgtagcattggtacggaggggcgaccgcgaagcacccgcagggaacgagaatgcggttgcgttgaagagaaatgtttggggggaggtggggagcggaacgcaaaaccagggttatgtgggtggttcggcgggggtgactgtaggggtcgcggatcggttatttcgtggatgcggagaagggggaggcggggggagaaaaagaagaaaggcgacggaacggagagggaaggtcaaagctcctcattccacttctttatttcagtttatgtgaatattagagctacggaacaggtgagatcagaataaggcccgttaacaatgaaactgaagcagaggacttagtcctgatttctgtctcttgctttctcttttctctttttttaatatgcnnnnnnnnnnnnnnnnnnnnnnnnntgacaacacaacatcagaaagacatttttttaacttcattcgctacaacagtcacgaactggttgaactctacctgccatccaactttaagaaacgaagacccggcactgtgaaaaagaaacaaaacccaaacaaaacaatgatacaaagcaactgcgaattaatgtaaaaatgggagtgccaaatgcggactacaggttggc

SEQ ID NO: 178176 - DNA, 589 bp, Homo Sapiens
  misc_feature (517)..(517): n is a, c, g, or t
  misc_feature (534)..(534): n is a, c, g, or t
  misc_feature (539)..(539): n is a, c, g, or t
  misc_feature (571)..(571): n is a, c, g, or t
ggattcagcaagaagttagttggtggttccccatggccccaaggtctgcagggctggattgtccacttttcctcctcaccaccagcactggctgctgctactgagaaaggcacagtggactcatgtgtgtgtcatgactttaatggttagctacagtatgcatacacatacaagaagtaggggagctgaagcccaggaaaaggctacaaaatacaacacagggaccaatacatttgcaaaacattcaaaatccttataaaaggggctgtattggtcctttcaactttgtcattattcagcttagcctgtatggccattcattcagtggggtaatgggggagaacaattaattaatgagatttggttccctttcctatattcccactgtttttaagtttcaggagaggattgtgggggtgagggtagggggtgggctttaggcctgggtctggtttccctttatataaagagctgacccccatctcaggcggctgaggtgtataatccccaaaagaantaagatggtacaaatgncagtncagctttggaatacgtttgggtagagacaaantgggaacccatggggttt

SEQ ID NO: 178177 - DNA, 737 bp, Homo Sapiens
  misc_feature (612)..(612): n is a, c, g, or t
  misc_feature (686)..(686): n is a, c, g, or t
gggactgcgacggcaggctttgagtgtagcacttggtagttcttcctctgctctgcttcccttcggaggaaaatttcaggctgaaggtttagcgggtgccgcctctaaagagagcaatcactacacttatggctgggattttgcgcttagtagttcaatggcccccaggcagactacagaccgtgacaaaaggtgtggagtctcttatttgtacagattggattcgtcacaaattcaccagatcaagaattccagaaaaagtgtttcaggcctcacctgaagatcatgaaaaatacggtggggatccacagaaccctcataaactgcatattgttaccagaataaaaagtacaagaagacgtccatattgggaaaaagatataataaagatgcttggattagaaaaagcacatacccctcaagttcacaagaatatcccttcagtgaatgcaaaattgaaagtagttaagcatttgataagaatcaagcccttgaagttgccacaaggacttccaacagaggagaacatgtctaacacgtgcctcaaaagcactggggagttagtagtacagtggcatctgaaaccctgtgggagcagaaagcacatggagntcctaatgccccccagcagcttcccgatttgggaaaaatgcaaaatttgtttttttattttaaaagattggtgnagaaaaagtggttttttccattataaaaataatggttttttccaaaaaccc

SEQ ID NO: 178178 - DNA, 556 bp, Homo Sapiens
attgatttaaccccagtggaatacattaattcttaaagcggctcttttcagtagtgtgacttttagaaagtgtctcagtagttaaggaagctaacagtcttagatctacttttaaaacggatggccttcttaagaataaagcaaaaggtgattttctacataatttttgctttccaaaagtgatgatatgctctcctacagcaacatatgagaagaaaaaaggcttatctagattcgaaaattaacagcaattatagtaatatatcccctccttctaaatagtaaaaagctctgattgtacaagaattacctgtgctagtcaagttgttgtttttccttgaacaactttgggaaaaatggatttgacagtacataatcagttctacttaaccaaagctttgttatttggaaatttacttttttgtacaaattgaattatataatgcttaaaataccttgtcactttataagcaaaatgcatagtacttaatttgtttatactgtaaagtatatgttaaatgcttttatcactttgagaataaaaagttactaatgg

SEQ ID NO: 178179 - DNA, 341 bp, Homo Sapiens
ggctccaagatgcttttcatatagagtgaaatatcccaggataactgcttctgtgtcagtcgcatttgacgcataactgcacaaatgaacagtgtatactcttggttgtgcattaacttacatgtataatttttggcatctgtgttcacaaatgcatgtgttagcaaatcacctttatttataagtgacaataattgaagttaaggatataaagaaacctgcatttgtagtccagcgttttcatttggtccataacacaatgtatggaaatgtgaaagacaattttgtacatttgtttgttactaactcaggatcattaaaatgaaaacaattttttcgaa

SEQ ID NO: 178180 - DNA, 440 bp, Homo Sapiens
  misc_feature (380)..(400): n is a, c, g, or t
agataatggtgtttgccatgttaaattgcagagaaaacaaaaccaaagctgattggaaacaattaattgtgggtgtctgagggggaaggtcgcagctttgggcagctttgagaagcggtacaagagttctgtgcctgtgtgtccagcccctggagccagccagtgcatttattttaagctcttagaagcaactccttggcccaggaatgcgtgacccctgagatgggtccacgcatctctctacacttccttctctccgtgggatactggactcgtgcctctgcgcccattctcttctcacgcatatccatgagctttaatttcactttctgatcacggtacgtccataaagccagtattacacttaaatgaagtattcnnnnnnnnnnnnnnnnnnnnnagaaggtaaacaaatttaataaagctaccaataatgcaaa

SEQ ID NO: 178181 - DNA, 378 bp, Homo Sapiens
tgagtacatgttcagttagggtttattttggtatctgtcatagaaaacccccaaaaccagcagcttacacaaggtagaagttgagattggttctccccttctctctcccatttaaataagtttgtgctgatatctggctctgccatcatcagggaaccaggctcctgtcatccctaaaggacggcactcgtctgtacacgtggcagtatggctgccaggactccagccatcacacccacattccaggaaataggaagggggaagaaagggtgtatttgtctttaaagaatccttctagaagtgtcatgtaacatttccacatacatttcactggccagaccttaactataagggcagctgggaagtgttgtattttaa

SEQ ID NO: 178182 - DNA, 561 bp, Homo Sapiens
  misc_feature (67)..(67): n is a, c, g, or t
  misc_feature (74)..(75): n is a, c, g, or t
  misc_feature (77)..(109): n is a, c, g, or t
  misc_feature (111)..(111): n is a, c, g, or t
  misc_feature (442)..(442): n is a, c, g, or t
  misc_feature (477)..(494): n is a, c, g, or t
  misc_feature (525)..(525): n is a, c, g, or t
  misc_feature (537)..(537): n is a, c, g, or t
ttggggccccgcgcggccaaaaccgaaatgggtcttagaaaagctttcttggagggcccgaggcggnccgacanngnnnnnnnnnnnnnnnnnnnnnnnnnnnnnnnnngngttaccaaagaagtgttttatttttcttgcagtagctttgttaattgcacaaaatcatgttttgtttttgccatttaaacattatcacacaatcctattctgaaagacaaatgttcattaaaaacaaagcaaaaataaaaattcacaaccttaattacctagatttgtcatttaaaggtttaaagaaaaaagggaggggctttcttacaagctttttcacaagtgtcacattttctccttaaaagggaaggatttcaaaagaaaggtgaaatagcttaaacagaaatattcataaaaaggaactttacagaattgtcaacaatattaagancaaaattgactaaccggtttcattaccgcatcttnnnnnnnnnnnnnnnnnnagtgtgttccgccggggcttaggaacagggnttgtgtttcagncagaaatggcttcaaaatcccagt

SEQ ID NO: 178183 - DNA, 715 bp, Homo Sapiens
ggggctgctgtagccggaccctttgccttcgccactgctcagcgtctgcacatccctacaatggctaaaacagcaatggcctacaaggaaaaaatgaaggagctgtccatgctgtcactgatctgctcttgcttttacccggaacctcgcaacatcaacatctatacttacgatgatatggaagtgaagcaaatcaacaaacgtgcctctggccaggcttttgagctgatcttgaagccaccatctcctatctcagaagccccacgaactttagcttctccaaagaagaaagacctgtccctggaggagatccagaagaaactggaggctgcagaggaaagaagaaagtctcaggaggcccaggtgctgaaacaattggcagagaagagggaacacgagcgagaagtccttcagaaggctttggaggaaaacaacaacttcagcaagatggcggaggaaaagctgatcctgaaaatggaacaaattaaggaaaaccgtgaggctaatctagctgctattattgaacgtctgcaggaaaaggagaggcatgctgcggaggtgcgcaggaacaaggaactccaggttgaactgtctggctgaagcaagggagggtctggcacgccccaccaatagtaaatccccctgcctatattataatggatcatgcgatatcaggatggggaatgtatgacatggtttaaaaagaactcattat

SEQ ID NO: 178184 - DNA, 552 bp, Homo Sapiens
  misc_feature (252)..(262): n is a, c, g, or t
  misc_feature (471)..(471): n is a, c, g, or t
  misc_feature (516)..(516): n is a, c, g, or t
gggtaaatgtgaatggaaacttggaaatactcgtttttataaactacaaaaactttttgttgtttatcaggaaatccatatttattttgtaattaactgtcaagcctgtggatgatttttttgaacttggtagttcataaaggtttacagtgaataaaaggatatcatcttgagtatagcaatatcaaaaggaattcagtagttactgctgtttaggaatataaggttaagatatcatatgggtcaggtcannnnnnnnnnnctgtgctggttgccacatcttagcaagcaccaaaaaactaaagcagtttttaaaccgatatttacgtaaagaaaatcataaaatccaatgcttctgcatactgtgttatgttacagtccagttttgtgtgctttactacacagtttggttacaggacttctgtggcattgtaaaacataaacagccatgggaaaagggttaaaataccngtgtttcagattgttaaggtcctagtcccggacttgccggtgtanatttgttaaccgttaaatggaaaaaaggaccccccc

SEQ ID NO: 178185 - DNA, 1002 bp, Homo Sapiens
gggagagaagcagtcttcatacacgcggccagccagcagacagaggactctcattaaggaaggtgtcctgtgccctgaccctacaagatgccaagagaagatgctcacttcatctatggttaccccaagaaggggcacggccactcttacaccacggctgaagaggccgctgggatcggcatcctgacagtgatcctgggagtcttactgctcatcggctgttggtattgtagaagacgaaatggatacagagccttgatggataaaagtcttcatgttggcactcaatgtgccttaacaagaagatgcccacaagaagggtttgatcatcgggacagcaaagtgtctcttcaagagaaaaactgtgaacctgtggttcccaatgctccacctgcttatgagaaactctctgcagaacagtcaccaccaccttattcaccttaagagccagcgagacacctgagacatgctgaaattatttctctcacacttttgcttgaatttaatacagacatctaatgttctcctttggaatggtgtaggaaaaatgcaagccatctctaataataagtcagtgttaaaattttagtaggtccgctagcagtactaatcatgtgaggaaatgatgagaaatattaaattgggaaaactccatcaataaatgttgcaatgcatgatactatctgtgccagaggtaatgttagtaaatccatggtgttattttctgagagacagaattcaagtgggtattctggggccatccaatttctctttacttgaaatttggctaataacaaactagtcaggttttcgaaccttgaccgacatgaactgtacacagaattgttccagtactatggagtgctcacaaaggatacttttacagggtaagacaaagggttgactggcctatttatctgatcaagaacatgtcagcaatgtctctttgtgctctaaaattctattatactacaataatatattgtaaagatcccatagctc

SEQ ID NO: 178186 - DNA, 653 bp, Homo Sapiens; identical to SEQ ID NO: 4635
  misc_feature (452)..(469): n is a, c, g, or t

SEQ ID NO: 178187 - DNA, 943 bp, Homo Sapiens
  misc_feature (279)..(291): n is a, c, g, or t
  misc_feature (434)..(444): n is a, c, g, or t
  misc_feature (605)..(622): n is a, c, g, or t
  misc_feature (664)..(725): n is a, c, g, or t
taagagggtggtggcccaaaaatagtgagggcacatattatttttttgtggcccgcgccgtttttgttcccccgcgtgtggggcccaaattttagttataccccacagagggggcgaccaaaagtgtgcgtggtatttcccccctggggcggattttacaggggttcccccacaaacccgcttttgtggaggggggggcttcccccttatcggcgaaaagaatattcgttaaaagaaaattttccccccccgtttttttctgggaaacaaatgtccccnnnnnnnnnnnnntgtataatttttaatatttggggggccgtcccctggggacccccccttgtgtggatgagacccccccgaaagaccccctccgagaaacgccccgtttgggagtttttttcaaaaaaccgcccggtgttccccccccggggggnnnnnnnnnnnggggggggaacgcccaaccccctttttgcctatgccccggttttttcttttggaaacccaggttttgccctgttttcactttcttatgcggggggccccgcgccccaaacgaaaagttttttaaaagtttttttagggggcggggcggcccgcacaagcannnnnnnnnnnnnnnnnnccgttttgggggcgtttcctccgttggtttgttttgttgtgnnnnnnnnnnnnnnnnnnnnnnnnnnnnnnnnnnnnnnnnnnnnnnnnnnnnnnnnnnnnnngcaaacaattaaactttatttgaaccttaaaaatttgcagagtggaacattattgtaagatctaatggcaatagagtacaaattcagtacagagcaaataatcaagcaaaatgctatataaaatatgacttacaatcacctttgaaaaaaattagctctctaactgttcacagaaaaacaaataaaagctaagcaaacataatgagaccatagcaacc

SEQ ID NO: 178188 - DNA, 459 bp, Homo Sapiens
  misc_feature (42)..(42): n is a, c, g, or t
  misc_feature (49)..(49): n is a, c, g, or t
  misc_feature (73)..(73): n is a, c, g, or t
  misc_feature (99)..(99): n is a, c, g, or t
gtcttaaaaaatccctgaccctcgggtgaatctgccccaccntcagccntcccccaaagtgcctaggattacngggataagcccactgcaccccggccnagctcctagtccttattttgctgaaaaagggaggcaattgagggaaaaagcctgctggcccgggacactggagacgtgggtttacccacacagccttgggaaatttatctaactctctgggcccctttgtacttttcagcttagagatttgggggttaaagtagatcagtaatttccaaactcttcacagagtaccagggtctgtagagatgcctcacaggcctccatgacaggccaagaagatggcctatgatctctgaaaccagcccccacttcaatcagatcaaagtaattccattctgttttatatgctgggattctgcttaagatttcatttgataaaaagaatcttctgcttga

SEQ ID NO: 178189 - DNA, 851 bp, Homo Sapiens
  misc_feature (795)..(795): n is a, c, g, or t
  misc_feature (797)..(797): n is a, c, g, or t
gggtcccgtgaccatgtaccagctgcgtcctctgggccacgctccacttgcccgcttccacccggaaagccccccaggctgagtgcggcatgatctccatcaccgaatggcagaagattggtgtggggatcaccggtttcggcatcttcttcatcctctttggaacactcctgtactttgattccgtgctcctggcctttggaaacctgctgttcctgacgggcctgtccctcatcattggcctgaggaagaccttttggttcttcttccaacggcacaaactcaagggaaccagcttcctcctggggggtgtggttatcgtgctcctacgctggcccctcctcggcatgttcctggaaacctacggattcttcagcctctttaagggctttttccctgtcgccttcggcttcctgggcaatgtctgcaacatccccttcctgggtgcgctgttccggagacttcaaggcactagctcgatggtctgaaaaacagagatgagctccttgaacttggatcattggttgagggggctagagggagaatgggaaccaccccctcagtcccctgcactgactcactccccgacatatccggacctcccccaagtccagaaagaaggaatggagctgagcaactgacgtcaaatccccaagtccactcaagaggctgccaggaagcaaagatgcagaccccaaggagactgggctggggctggtatcacacccctcactctaaatttatgggaaggaaaaatgaaagattaaaattcccaagtggggcgggggggcctcncncggccccctcacagcgacgccctctaatgtgcgggccccctccggccctccaaa

SEQ ID NO: 178190 - DNA, 803 bp, Homo Sapiens
  misc_feature (723)..(723): n is a, c, g, or t
gggagattatggacttaattgattggtatattagtgacatcaacttgacacaagattagacaaaaaattccttacaaaaatactgtgtaactatttctcaaacttgtgggatttttcaaaagctcagtatatgaatcatcatactgtttgaaattgctaatgacagagtaagtaacactaatattggtcattgatcttcgttcatgaattagtctacagaaaaaaaatgttctgtaaaattagtctgttgaaaatgttttccaaacaatgttactttgaaaattgagtttatgtttgacctaaatgggctaaaattacattagataaactaaaattctgtccgtgtaactataaattttgtgaatgcattttcctggtgtttgaaaaagaagggggggagaattccaggtgccttaatataaagtttgaagcttcatccaccaaagttaaatagagctatttaaaaatgcactttatttgtactctgtgtggcttttggtttagaaatttgttcaaattatagcagaatttaagccaaaaataaaacagacatgtattttttgtttcgctgaattggatgaaaaccattgcattccttgtacacctggatttgaaaatgctgtacaatatggtcccaattttggaattgaattctcctgtaaaatataaaaatggtaaattaaaaatatttcccccacaacaccacaacaccccacaccatanattaaaacttggtgggggccggcctctggggcccccccggaaaaaggtttttttccaaaaccgcttttcggtttgggcgc

SEQ ID NO: 178191 - DNA, 373 bp, Homo Sapiens
gggaaagagggcagcctcttgtcaaagcaggaagagtccaaagctgcctttggtgaggaggtggatgcagtagacacgggtatcagcagagagacctcctcggacgttgcgctggcgagccacatccttactgcactgagggagaagcaggctccagagctgagcttatctagtcaggatttggaggtgggcggaaaccagggtcactgagctacagaggaggacatgccctgggatgtagtagtatcatgcagaggtgtgtgggcccttttgttcacctctgcagactgtgaatcctagctgccagtttgcctattatatgccaaggcatttgcaaaaatctcattaatctaaatcaaaatagctttaaagg

SEQ ID NO: 178192 - DNA, 1235 bp, Homo Sapiens; identical to SEQ ID NO: 4648
  misc_feature (538)..(541): n is a, c, g, or t
  misc_feature (574)..(575): n is a, c, g, or t
  misc_feature (817)..(817): n is a, c, g, or t
  misc_feature (852)..(891): n is a, c, g, or t
  misc_feature (976)..(976): n is a, c, g, or t
  misc_feature (1080)..(1088): n is a, c, g, or t
  misc_feature (1146)..(1178): n is a, c, g, or t

SEQ ID NO: 178193 - DNA, 424 bp, Homo Sapiens
  misc_feature (22)..(22): n is a, c, g, or t
  misc_feature (26)..(26): n is a, c, g, or t
  misc_feature (46)..(46): n is a, c, g, or t
  misc_feature (341)..(341): n is a, c, g, or t
aagtagaccgacccgactcagngacntccaggttgccagactctgnttctgattcaccaggggttccgttcagtagtcattgtccacccgcggggcacctccctggccacacgcctgttcccagcaagtgctgaaactcactagaccgtctgcctgtttcgaaatggggaaagccgtgcgtgccgcgttatttatttaagtgcgcctgtgtgccgcgggtgtgggagcacactttgcaaagccacagcgtttctggttttgggtgtacagtcttgtgtgcctgggcgagaagaatattttctatttttttaagtcatttcatgtttctgtctggggaaggncaagttagttaagtatcactgatgtgggttgagaccagcactctgtgaaaccttgaaatgagaagtaaaggcagatgaaaaga

SEQ ID NO: 178194 - DNA, 373 bp, Homo Sapiens
  misc_feature (260)..(271): n is a, c, g, or t
gggagaatcaagcctcttaattttaaactgcggaatgtggcctctgcttcctccgtcctcctgcccaaggacgacgaggattgctccagggctgctgggtagtttaccgtcccttctataggcatggagttggcactgacatcacagcttcataaccccaccaccgccagcttcccctgcctcctacatccagtctgttcttgttcatagtgagaatcctgtgttcccacttcagtgacacctgaattgtttgttgttgnnnnnnnnnnnnattgtcttcaaagaggaagggccccattaaagggtgaacttgtaataaattggaatttcaaataaacctcatgtacttgtgtttataaagaagggaaaaaaa

SEQ ID NO: 178195 - DNA, 810 bp, Homo Sapiens
  misc_feature (747)..(747): n is a, c, g, or t
gggaggggagagagcagttaaggcacacagagcaccagctccctcctgcctgaagatgttccaccaaatttgggcagctctgctctacttctatggtattatccttaactccatctaccagtgccctgagcacagtcaactgacaactctgggcgtggatgggaaggagttcccagaggtccacttgggccagtggtactttatcgcaggggcagctcccaccaaggaggagttggcaacttttgaccctgtggacaacattgtcttcaatatggctgctggctctgccccgatgcagctccaccttcgtgctaccatccgcatgaaagatgggctctgtgtgccccggaaatggatctaccacctgactgaagggagcacagatctcagaactgaaggccgccctgacatgaagactgagctcttttccagctcatgcccaggtggaatcatgctgaatgagacaggccagggttaccagcgctttctcctctacaatcgctcaccacatcctcccgaaaagtgtgtggaggaattcaagtccctgacttcctgcctggactcaaagccttcttattgactcctaggaaatcaagaggcctgtgagctgtccaataactgacctgtaacttcatctaagtccccagaggggtacaatgggagctgagttggtgggaggaaaaacttggaaaactccagctccagctcccactcaaaataataaaggataatttttcatccctccgnagcacggcaacccccgcaaaaataccctgttcggcgcgccctcgggccctcggaaaagatttc

SEQ ID NO: 178196 - DNA, 221 bp, Homo Sapiens; identical to SEQ ID NO: 5014

SEQ ID NO: 178197 - DNA, 466 bp, Homo Sapiens
  misc_feature (64)..(64): n is a, c, g, or t
  misc_feature (376)..(376): n is a, c, g, or t
  misc_feature (388)..(388): n is a, c, g, or t
  misc_feature (401)..(401): n is a, c, g, or t
  misc_feature (414)..(414): n is a, c, g, or t
ttttgatgtgtattatttttatttaaaaaaataagagtaaaggaactaactagatgtatatggngccaatttttaaaagtcttgcttaactccacaggtctcaaaatagctaataaagaaaccatgtctccaatcatttcaatacaagctgtaaaaatgccttaaaaatctcaggtctggcattacttccatttaaacgcatcaagataaaagttcactgaaacatcagctgccaccattactttaggaatctttatctgtttagggatttttcccctaggactattatagccagtttgtcaatcaaaagtagcattcagtatgcttaactttcattatcaaaaaagtgatctgctaggaagtgacaattaggttnaaatccaaggangtccttgggtttngtattttacaggntttcactttcccattaaggccttaggccttaaggtaaggacccttcccaatg

SEQ ID NO: 178198 - DNA, 494 bp, Homo Sapiens
  misc_feature (374)..(374): n is a, c, g, or t
  misc_feature (385)..(385): n is a, c, g, or t
  misc_feature (474)..(474): n is a, c, g, or t
  misc_feature (482)..(482): n is a, c, g, or t
gtataaatttgcctcctgagttcactttgtgtcaagagctaaaactgtgaacctaactttctcttattggtgggtaataactgaaaataaagatttattttcatgctcacttcttaaaagtcataaaaacaatcaaataggatcatgtttattgtcatgtgtttcctgggttctgacctgtgtgcacacccctgtgtgtttataatttttaaattgaattttatatggggtttttatttgctaaaaaccaggctgttgaatcacatttgggaagggtacttatcttaatgactaatgacttaattgggaaagttgaattcttgtaaaatacaaaatccaaggacttcttgggatttaatctaattgtcacttcnttaggcagatncacttttttggataatggaaagttaagcataccgaatgctacttttggttgacaaacgggcctaatagtccggggggaaatccctaacnggtaaggntcccaagtatgg

SEQ ID NO: 178199 - DNA, 672 bp, Homo Sapiens
gggggacaacatggcggccttcatgctgggctcgctgctgcggacgttcaagcagatggttccttcatcagcttcaggccaagttcgaagtcactatgtagactggagaatgtggcgcgatgtgaagagacgaaaaatggcctatgaatacgcagatgagaggctacgtattaattcactcaggaagaataccattttgccaaaaattcttcaggatgtggctgatgaagaaattgctgccctcccccgggatagctgtcctgttagaatcagaaatcggtgtgttatgacgtcccgcccgcgtggtgtgaagcggcgctggaggcttagtcgtatagtcttccgtcacttagctgaccatgggcaactttctgggatccagcgagcgacatggtaaatgagctccagaacctattgagcttgcagggaagccaagcttgcagttccagcaagcaaagattttttttaatagaccaaaccctaatctctacaggggcccagtacagttgtttggcctacctgatgctatctctaaactacttttaaaatgaagacatttgggtgtttcatgtcagtgaattatcttttctcttggacttaacaaacatactgttcccatacatagtacaaagagtagcataataaatattttctgggaatgtttttttatcc

SEQ ID NO: 178200 - DNA, 452 bp, Homo Sapiens
ccatcccagttttcatcattgagccccagaccctctgagcagcaccttgaagagggcagataatcagacttgaggaaactgaaagccccaggttgagagaacagaggcctagggacctccagaccattggaatcactgtttgccagctgtgtggccttggtcatatcatcagcctctgggaagcctagttcccacatctggaaataaggatgatcatagctacctcacggttacattgcaaagccttactctaaaagctcccagcctccagaggctctcaatgaagagtcaccttcatggtcgtcttcaggaacaggacggatgaagaagggggtggggttaagactcaggggcacctgagggtcttgagcccccttatggagtacccaaggaagggactgtctattgcatgcacacccacaagcctattacacctttattttacctacacg

SEQ ID NO: 178201 - DNA, 512 bp, Homo Sapiens
  misc_feature (89)..(102): n is a, c, g, or t
  misc_feature (113)..(129): n is a, c, g, or t
  misc_feature (131)..(132): n is a, c, g, or t
  misc_feature (134)..(134): n is a, c, g, or t
  misc_feature (137)..(139): n is a, c, g, or t
  misc_feature (146)..(162): n is a, c, g, or t
  misc_feature (164)..(174): n is a, c, g, or t
  misc_feature (176)..(180): n is a, c, g, or t
  misc_feature (182)..(185): n is a, c, g, or t
  misc_feature (187)..(199): n is a, c, g, or t
  misc_feature (201)..(232): n is a, c, g, or t
  misc_feature (234)..(235): n is a, c, g, or t
  misc_feature (242)..(250): n is a, c, g, or t
gtcccgggtttccttggaaaacagttttggcccttttcctttcccttggggggcccggcgcccaaaagaaagttttgaaaaaatttttnnnnnnnnnnnnnncgccccaaaannnnnnnnnnnnnnnnntnntngtnnnccccccnnnnnnnnnnnnnnnnngnnnnnnnnnnntnnnnngnnnngnnnnnnnnnnnnngnnnnnnnnnnnnnnnnnnnnnnnnnnnnnnnngnngaaagannnnnnnnnattctacaagaaattgataggtgcaatcctgttaaagaaatttcttttcaaaagtaaatgaaaaacccctctgaattatttatatattaattttttgaaaacaatagtcatagggcctgctttgtcctatttaactataaatgttacacatttacaaactgaaacaaaaatgcatagtacagagatttaaatgaaatcttcgaaagaataaatttgcttttcagtccactgtattttcaaaattgattatcaccaagcttcc

SEQ ID NO: 178202 - DNA, 1099 bp, Homo Sapiens; identical to SEQ ID NO: 83682
  misc_feature (568)..(584): n is a, c, g, or t
  misc_feature (651)..(659): n is a, c, g, or t
  misc_feature (895)..(895): n is a, c, g, or t

SEQ ID NO: 178203 - DNA, 901 bp, Homo Sapiens
  misc_feature (355)..(420): n is a, c, g, or t
ggcatgagccaccgcgcccggcctgaactctcagttctaggcggcagggattcaggaattgggctttcagactccttctgcagtgtcacagtccagactttttttaaatgaaggacaccccgcagtggctcacagtgggtcccagggctagcaggagcgtgctggggagccggctctgtctttgttcgcagtgggtcccggtgctggcaggagtgtgctggtgagccggctctgtctttgtaaatccttcaggggtcctacggctgactccaccggacagcccgtcctgggccgtgttaagcacctttgtgtagaaatcgtatttttattaaaacatcaaatctgtgttcctgtnnnnnnnnnnnnnnnnnnnnnnnnnnnnnnnnnnnnnnnnnnnnnnnnnnnnnnnnnnnnnnnnnngagagagcatatacaaccgacaaaaacaacagaaaaagagagaacacacaaaaagcaagacgcaccgcacgaaaaccggtacactaaaagggagaccaacaacaaacacgcgacaccgaagagacgaagaagacccgcaggcgagcgaacgacacaacacccagagcgagcacgaggtagaggcaagtcaacgccgccgcggccgccacgcgaacacaggggtagcaagagaacaccccgagccaccagcagcaaccagagaaggcccaccagacagccggagcagagaaagcacgacgaagaggcagaaaaagggccatacaacccaggcgaactaaaagaccagcaatacagcagcgcagggaaaacacagcacacaccaagagaggccacccaccgccgaaacaaaaggtcaaaagcagaagagaccaacagacaagagctcgcaaacacagcaaaaccaaaagagaagaacccccaa

SEQ ID NO: 178204 - DNA, 771 bp, Homo Sapiens
gggacgccgcgtcacgagtcagccaaagatggctgcgcccaggtaatttgagcaaaggccacagtgaactccggcgtggctgaggaaggaggaggcacccacaggctgctgggaggagagcataaggctcaaaatggaaaatcataaatccaataataaggaaaacataacaattgttgatatatccagaaaaattaaccagcttccagaagcagaaaggaatctacttgaaaatggatcggtttatgttggattaaatgctgctctttgtggcctcatagcaaacagtctttttcgacgcatcttgaatgtgacaaaggctcgcatagctgctggcttaccaatggcagggataccttttcttacaacagacttaacttacagatgttttgtaagttttcctttgaatacaggtgatttggattgtgaaacctgtaccataacacggagtggactgactggtcttgttattggtggtctataccctgttttcttggctatacctgtaaatggtggtctagcagccaggtatcaatcagctctgttaccacacaaagggaacatcttaagttactggattagaacttctaagcctgtctttagaaagatgttatttcctattttgctccagactatgttttcagcataccttggggtctgaacaatataaactacttataaaggccccttcagttatctgaaccctggcaaaagaaattcactggattttaaacccaatattgtaacccaaaataaaatggttaaaacccc

SEQ ID NO: 178205 - DNA, 580 bp, Homo Sapiens; identical to SEQ ID NO: 5048

SEQ ID NO: 178206 - DNA, 809 bp, Homo Sapiens
  misc_feature (50)..(50): n is a, c, g, or t
  misc_feature (129)..(129): n is a, c, g, or t
  misc_feature (141)..(141): n is a, c, g, or t
  misc_feature (463)..(463): n is a, c, g, or t
  misc_feature (465)..(562): n is a, c, g, or t
  misc_feature (700)..(709): n is a, c, g, or t
cctgagaatcaaccactaccaggaaacccccggctgtgaaaaacaaaacnaaccccagagggcctgtgttcccaagcagccgcctggggaagcctaccgtaaacagtcggatgcccagttttggaagantcacccatgcgntcctgaccctctgttcgtctctttcctctcctctttcttcaagaaggaaattgatcctagtgatttcagcccatgcattaaacaggaaacaataataaatttgtagaattcatatttttctaaagggaacttaaaaactgctgctacatgttatgtacaaaactggtttatgccacatgaacagagaatcacaagtttggttttggtactttttgttcctctttgtattcagttgtatagaacttccaaattcagaatgagaagaaagctgttctgtatcaaaccatttaagcaataaatgttatattttaaaagctgcaanannnnnnnnnnnnnnnnnnnnnnnnnnnnnnnnnnnnnnnnnnnnnnnnnnnnnnnnnnnnnnnnnnnnnnnnnnnnnnnnnnnnnnnnnnnnnnnnnntggggggcgcccttggccccctaaaaaattttttaaaaccttctctttgggcgccgggccccaaaaggaaaggaaactgggccaaacgtgttcccaaagaaaaacccgggaaaggaaaaggggttgggaatcccaccnnnnnnnnnnccccggggggaaaccgaagcgttttgaaaaaaaacccagagggggggtccgggagggcctttccggaatctttccacacgggggccccaggggggctccc

SEQ ID NO: 178207 - DNA, 411 bp, Homo Sapiens
  misc_feature (382)..(382): n is a, c, g, or t
taatccatagaaaatgcagtagtttggagggaggtgtacccttagaagtggttaatagaaccttgtataaacacctttcaccagcccttcctttagggcagcattcccatcctatcctctctcccagacattataaacatcttttaaacagaagtccttgaataatctgatataaaaatgcatgcctctgttaggcatgggtgagggctttggaggggcggaaggagctttccttacgtagtgatgaactctccagggctggggagggtcccagtgggtggggggaagggctgttcctgggaaccgtgatgtccacagggggtgagggggagagatgtctgggctggctcctcactgtgggaagtgggcacaggggtgaccntgcctggggcttcggggctgtgggggtct

SEQ ID NO: 178208 - DNA, 1015 bp, Homo Sapiens
ttattattagatatcacaaattgtcaggtctatctttatttgaaggtagaggtagcctcaagcactttagttgggtttgttaaacaagcaagcaaagcggaaactacagctaagcatcttctgaatgagatcatcatcactatagaagaacctatgtcaaagatcttcaactcaagaaggaaccagtgaggattagttcctttatggtcagcgttcagaactgtggcttggccagcctcttctcttaggtaaggcatgagcaccctaggcttcttctgtgtatctcttgctgcttaaatgtgtctccattaggggtgttatatccttttcgaagtctttctatatttgaagaaaagccaacagcacaaaaagaccaaccaagccaccagtgttcccatgactactaagagagttgtgggccaacctggagtttcttcaactgaaactggcagatcgatggcatagctgtagccaagttggtctgaggttaaaaagagttcttcattagtcactggagggaagaaaggaaccatgttgtacatccgattgtgaccaataggggccagctcctgaggccaggcatctgcaggaggattaaatcttttcatccactcatcaaagatggcatcagtaaaggaatgaagaaccacaaaaatgggatcattggcggctgaatgtggcaaagcgtttgtcccgttcaggaaggaatgaaccaaattatgaaggctcatcacttgagaatccagagtcccatctgctttatcaaacccttccaaagcattcctgaaactgaaggtagagttctggaagaagggaggattgtcaaacttctggagagacaggcaatctcgtatgtcttttaaggttggcaatttcatgctgtttcttcccatttgatttcttctcagcaaaccttcataggttccattgcacaaggtgaccaggtggttgtagtcatccaagctatcacagacagtttcccagctggagaatcttgagttccgactaatcagag

SEQ ID NO: 178209 - DNA, 796 bp, Homo Sapiens
  misc_feature (305)..(350): n is a, c, g, or t
  misc_feature (394)..(407): n is a, c, g, or t
ggggagttcaaggcaattaaagtcaagagctaaggagggagggagagggtttagaaataccagcataataagtagtatgactgggtgctctgtaaattaactcaattagacaaagcctgacttaacgggggaagatggtgagaagcgctaccctcattaaatttggttgttagaggcgcttctaaggaaattaagtctgttagttgtttgaatcacataaaattgtgtgtgcacgttcatgtacacatgtgcacacatgtaacctctgtgattcttgtgggtatttttttaagaagaaaggaatnnnnnnnnnnnnnnnnnnnnnnnnnnnnnnnnnnnnnnnnnnnnnnagtagaagataaggagaaaagtacgacagagacaaggaaagtannnnnnnnnnnnnnctctcccaattataaagccatgagccccctttggtgggggtttctgctcagttgcttgggctgcaaaatcctgccaggagcccaggtcagttcccccgagtctgcatgacggtggacagcctagtgaacaaggagtgctgcccacgcctgggtgcagagtcggccaatgtctgtggctctcagcaaggccgggggcagtgcacagaggtgcgagccgacacaaggccctggagtggtccctacatcctacgaaaccaggatgaccgtgagctgtggccaagaaaattcttccaccggacctgcaagtgcacaggaaactttgccggctataattgtggagactgcaagtttggctggaccggtcccaactgcgagcggaagaaaccaca

SEQ ID NO: 178210 - DNA, 1528 bp, Homo Sapiens
  misc_feature (196)..(246): n is a, c, g, or t
  misc_feature (289)..(302): n is a, c, g, or t
gctggtaccggcccggaatgtatgggatatcgtcgaccacgcgtccgctcattaaatttggttgttagaggcgcttctaaggaaattaagtctgttagttgtttgaatcacataaaattgtgtgtgcacgttcatgtacacatgtgcacacatgtaacctctgtgattcttgtgggtatttttttaagaagaaagnnnnnnnnnnnnnnnnnnnnnnnnnnnnnnnnnnnnnnnnnnnnnnnnnnngtagaagataaggagaaaagtacgacagagacaaggaaagtannnnnnnnnnnnnnctctcccaattataaagccatgagccccctttggtgggggtttctgctcagttgcttgggctgcaaaatcctgccaggagcccagggtcagttcccccgagtctgcatgacggtggacagcctagtgaacaaggagtgctgcccacgcctgggtgcagagtcggccaatgtctgtggctctcagcaaggccgggggcagtgcacagaggtgcgagccgacacaaggccctggagtggtccctacatcctacgaaaccaggatgaccgtgagctgtggccaagaaaattcttccaccggacctgcaagtgcacaggaaactttgccggctataattgtggagactgcaagtttggctggaccggtcccaactgcgagcggaagaaaccaccagtgattcggcagaacatccattccttgagtcctcaggaaagagagcagttcttgggcgccttagatctcgcgaagaagagagtacaccccgactacgtgatcaccacacaacactggctgggcctgcttgggcccaatggaacccagccgcagtttgccaactgcagtgtttatgatttttttgtgtggctccattattattctgttagagatacattattaggaccaggacgcccctacagggccatagatttctcacatcaaggacctgcatttgttacctggcaccggtaccatttgttgtgtctggaaagagatctccagcgactcattggcaatgagtcttttgctttgccctactggaactttgccactgggaggaacgagtgtgatatgtgtacagaccagctgtttggggcagcgagaccagacgatccgactctgattagtcggaactcaagattctccagctgggaaactgtctgtgatagcttggatgactacaaccacctggtcaccttgtgcaatggaacctatgaaggtttgctgagaagaaatcaaatgggaagaaacagcatgaaattgccaaccttaaaagacatacgagagtgcctgtctctccagaagtttgacaatcctcccttcttccagaactctaccttcaggttccaggaatgctttggaagggtctgataacagcagatgggactctggattctcaagtgatgagccttcataatttggttcatatccttcctgaaacgggaacaaacggctatgccacaattcagccgccaatgatacccattaaggtggtacttcatttcctttactg

SEQ ID NO: 178211 - DNA, 893 bp, Homo Sapiens; identical to SEQ ID NO: 5060
  misc_feature (476)..(482): n is a, c, g, or t
  misc_feature (484)..(500): n is a, c, g, or t
  misc_feature (504)..(508): n is a, c, g, or t
  misc_feature (511)..(511): n is a, c, g, or t
  misc_feature (513)..(591): n is a, c, g, or t
  misc_feature (615)..(618): n is a, c, g, or t
  misc_feature (629)..(645): n is a, c, g, or t

SEQ ID NO: 178212 - DNA, 692 bp, Homo Sapiens
aacgtggtttttaaaaaaatatttttcagttacattattcaacatgtatatatttccttgatgtgcttcccctttaatacagatttattgtgcctaaacgcaaatgttaacctgccttattttaaatatttgtttaaaattatgtctcagagtacatctgttctctgtaattcaacagttttaacattttagttttattcttccaaaataggcaaaatcccttaaaactgggatcattttgatctattttggttttaaaaatatatttccctttaattcaactttttaaaaaaatgaggtaatatttgctgagcaggttgcttcacaattgaaaagaggcaatgaaatattgctttttcaaaacaaacttcagggcatcatttaaatgccgagaattccaactcttcaagtcttgagagcttgccttaaaaatttccatagtggtatacaaaggactccagggtgctttcctgtggcttcaggaagggaagggaagacatttgccctgggtagtctgggacagtcccttgaaaagtctatttttgtttctctccccacttggattccaaaaagctagtgctggctccagtgccaccagaatactccaggccggttgggttttcaaatgtgagaggttgggtgatttcaagaatctacagagatttaaaatgtgcaatgaagccacaatttct

SEQ ID NO: 178213 - DNA, 521 bp, Homo Sapiens
ggtgggaccagtggcagagatgcactctcggtcctgtctccaacctgttcgtgtctttctgcagttttcggcaataagaagtagaagatttgctgtcctgctgtccaattgtggagcatcagcaggtttccaactcactcattaacccctaccccatctccaggcctgtactaaagtttgctgcccgcttaggggcttagaaggagaagccagtgagcaggctcacactaagttgtaaacataggagaagcatttggccaataaagttgttgaaactctatagacctggggctgcagttggggacttcatgtcagtgcaaatgccattagttccatttgtaccagccagttactgagcccctgtcacccttgaagtgagttccacctgaccagtcttgagcagccaacaggctcaattaagcccgcctggtttttccatatggctcatgatctaatttaaggaacaagtaactaaaaatgttaagccagtgcaaaataatctgcttacctactcacattgg

SEQ ID NO: 178214 - DNA, 1076 bp, Homo Sapiens; identical to SEQ ID NO: 5071
  misc_feature (190)..(202): n is a, c, g, or t
  misc_feature (374)..(384): n is a, c, g, or t
  misc_feature (524)..(598): n is a, c, g, or t
  misc_feature (613)..(615): n is a, c, g, or t
  misc_feature (625)..(625): n is a, c, g, or t
  misc_feature (632)..(632): n is a, c, g, or t
  misc_feature (643)..(748): n is a, c, g, or t
  misc_feature (750)..(752): n is a, c, g, or t

SEQ ID NO: 178215 - DNA, 458 bp, Homo Sapiens
ggggcagttcagagttcaacaacaagcttccaagatgccgcccaaaggaaaaagtggttctggaaaagcggggaaagggggagcagcctctgggagtgacagtgctgacaagaaggctcaaggtcccaaaggtggtggcaatgcagtaaaggtcagacacattctatgtgaaaaacatggcaaaatcatggaagccatggaaaagttaaagtctgggatgagattcaatgaagtggccgcacagtatagtgaagataaagccaggcaagggggtgacttgggttggatgaccagagggtccatggtgggaccatttcaagaagcagcatttgccttgcctgtaagtgggatggataagcctgtgtttacagacccaccggttaagacaaaatttggatatcatattattatggtcgaaggaagaaaataaaatcatatgaaagactgaataagttcta

SEQ ID NO: 178216 - DNA, 430 bp, Homo Sapiens
  misc_feature (15)..(15): n is a, c, g, or t
ttttaacggggcacngaaacccatcaattttaatttgggataacaaagggtctcccaaattatattggaaaaataaatcccaagttaatatcactcttgtaaaaaagttgagcacacttttcacaaacaatttatgtaaaagagaagaaaatacacataattttacataatatcttaaactcttttattccctaccatagacattttgtcttgttttctttcagttttctacaatttccaacttgtacctgtgtttaatactgctttagtgtgctaaagacattaactgattgctttcctaaatctaaggattatatagttttagtataaatatatatcatatattttcgtaaaactttgacaaaaccaaataagcaagccttgttttaagtccacgctcctgccactgtttacaaaatttgatttaatg

SEQ ID NO: 178217 - DNA, 1360 bp, Homo Sapiens
  misc_feature (770)..(780): n is a, c, g, or t
  misc_feature (1205)..(1205): n is a, c, g, or t
  misc_feature (1319)..(1319): n is a, c, g, or t
atttgattacagccagtgtgacatttggtacatgaggttttctatggatttctggcaaaagatgcttgcattgggcaatcaagttggcaaactttatgtttgggatttagaagtagaagatcctcataaagccaaatgtacaacactgactcatcataaatgtggtgctgctattcgacaaaccagttttagcagggatagcagcattcttatagctgtttgtgatgatgccagtatttggcgctgggatcgacttcgataaaatacttttgcctaatcaaaattagagtgtgtttgttgtctgtgtaaaatagaattaatgtatcttgctagtaagggcacgtagagcatttagagttgtctttcagcattcaatcaggctgagctgaatgtagtgatgtttacattgtttacattctttgtactgtcttcctgctcagactctactgcttttaataaaaatttatttttgctgcccccgccccgacgcccgccgaaaaagctgcgcgcctggaacaagacgcaatggcccgcgcgcacaaatgcataaaccctgtggggtcggcctctcggcccctcaaaaaaaacttttctaaagaacatttcggttttgggcgcgcggcgggggccctccgatagggcaacaggggaacccctgggtccccataagccttggtttctccctaaagggaaaacccccgtgggtgccgatggactataagcgggcccttgcggatattcttctcacccccgagataataaaaacaaannnnnnnnnnngggggcgagcgaccacacactgccgaagcggcgtgttctctctgtgagatacacacaatatactctcccccgccagagtcggtgaggacgtcttctctctgagagagggggcaccccattatgtagcgctgtggggaattatcgctttgtcccgacaaccgcggggatgagtcgtacgcatagagagcgcgagagagctgcccccggatcatatttctcgacaattgtgttacggggctaccccgcgcgctgcaccgtggggcgggcaacatgctcactttcgcggcactaacaaaacaactgcgtgggaggtggggaaaaatctgtccattctctagatcacacgcatttttactctgtcgcgccgccgacaacatgttgtgggaagaagagccccgtctcccctcagcaagaacgcgggtggnataataggaatatgagacacaaccgctgggaaaatactcgcggcacgcacggcgggcggtattattttcttcacgagcactccccttgcgtggtgtcggacggcatgtggttgncggacgtataacaaaatcatccttttcgcgctgcccgcagg

SEQ ID NO: 178218 - DNA, 416 bp, Homo Sapiens
ggggtctcgcgggagcgctgctggcggtcgggcgctcgggcggccctggccggggagacgagttgcatgtgttggttcagctggcgatagcggcgggagcggagccggcggggcctgtgcgaccgcctgggtttgtgaaatggctgctgacatttctgaatccagcggggctgactgcaaaggagacccaaggaacagtgccaagttagatgccgattacccacttcgagtcctttattgtggagtctgttcattaccaacagagtactgtgaatatatgcctgatgttgctaaatgtagacaatggttagagaagaattttccaaatgaatttgcaaaacttactgtagaaaattcacccaaacaagaagctggaattagtgagggtcaaggaacagcaggggaagaagaggaaa

SEQ ID NO: 178219 - DNA, 1849 bp, Homo Sapiens
  misc_feature (76)..(76): n is a, c, g, or t
  misc_feature (238)..(238): n is a, c, g, or t
  misc_feature (248)..(248): n is a, c, g, or t
  misc_feature (512)..(512): n is a, c, g, or t
  misc_feature (535)..(535): n is a, c, g, or t
  misc_feature (594)..(594): n is a, c, g, or t
  misc_feature (670)..(670): n is a, c, g, or t
  misc_feature (767)..(767): n is a, c, g, or t
  misc_feature (919)..(919): n is a, c, g, or t
  misc_feature (926)..(926): n is a, c, g, or t
  misc_feature (1113)..(1130): n is a, c, g, or t
  misc_feature (1359)..(1374): n is a, c, g, or t
ccagggcgatggcatgtcttccagatttctagacatatccagtcttatggtgctgcgatcaggccgctgggcgtgntactcgttctccgcgctatggcataggcaacatactaggcgtccatctatactcctgcatctatattcctcggtgacacagctttagtatggtgactgttaggcgcatcagatgatggggcatatcgtggtatgatctgtgggtgatctgcacatcgatgancaccactcgngacacgcgtcctgcgcagcgtcgctgtactggcgggctggagtggtgtgcagcggggacatctcgagatcggtgaacgagagccgtgcttgcggcgtcctcaggtgtcgacgtcggtctgatgtgcagcgagacagatagcgtatagttatatattccggaggcagccggatagccacgacagtagcggacgatgatggtccgtcgacacctcgtcctcgatgtaacgtcggctcaacccgtatacatatctcacaatcctgancgtcacactatcacagactgagntttatgatacctacgctgtgtgcgatgtgaggggcggcgtgaggattcagcagccgttnagtacgctctgacgtgcgagcatagcaggtcatcgtagtcgtcgacgggaaggagtacgctatactgtgagatgtngcgtcgacagcggcagaggatagcgcgccgcagacaccgcgatatggtgtagcatagaatgcacgtacgatcatatatctgttctgaggcagggagngcgcgcgtacattaggcgtgcgagtgtgacgtggagagcgtgtgcgtgcagcgagtacgacacctctcacacacgacatgttctcccgacacacagttgtcctccgcccgacacaggcacggccgcgggccacgtcgcgcgatgctataacnctgtagnagcggtgagtgtgcgcggcgggccgcgtagggcggccggcgggtcgcgggcgcggttgggccgcctgtcggtgctcgcccctcgcatggtcccgtctgtctagaaccgtcgtcggtgcgattagttcgttggggcgggaattcattgtgatctcggtttgctttatgggaggtggggtatactagannnnnnnnnnnnnnnnnntcacgggtgaaaggtttgatgggggtcggctcgctcgttcctgttgtgtggcgggttaccgtcttttaaggggttttctgccggcttcgtgggggccgccggccgaacgtgacaaattctagatgttcgcctccgggctcggggaggggggaggtgttcttttccttgtttgttcgtgcttgttcttttgcgtttgtggtggacaaaaatggttggtttttctgtttgnnnnnnnnnnnnnnnngaatacaagacttagttctcatttatttgtgattttgcaggtgttcaaaccaatgaatgaaaatcaattatctcttcatatcaatgaaattcactatttcactattatcttcagaatcatagtgatcaaaaccctacctgaaaatggtaatacaaaagagaactattaatacaaggtttcagaagactgtgcaagttaaaataattggcattaaaacgacacacaacaaaccaccgaaggtttggtcccttttctctctgatatgtggcctctgatctctttcttagggcagtggttttcaacgtctgtgtagcagaatcacctgaaaagctaacagaacatatagaaacccaggatttgtatttgtatttaaatgtaaatacaaaaggtctgggtctctgtatctttacaaagttctccagcaatggtttccaaaccaggcttatcacaatcaccagggaagctctgaaaaccc

SEQ ID NO: 178220 - DNA, 369 bp, Homo Sapiens
gggagcactaaacttatttttgcatatttctgtaatattgcagtccccagatccagaacatgggaagttagggaaaatgtgtgattttgtgttttgaattactgtcagaattacatacacaattacaacaaactttttttaaaagacatttcattgtactgcaaaaatctgaatatttatatttcttgtttttttctttatatgttttgcattttaatatgttgagccactggaaatttgtaacagattaatttgttataggagtttaaatgtgttgtcattgtctccattgtctttgtccagagcctattattatggaaacaataaaattttgacagaagaaaccataaaaaaccaaaatcaccatgt

SEQ ID NO: 178221 - DNA, 558 bp, Homo Sapiens; identical to SEQ ID NO: 5565

SEQ ID NO: 178222 - DNA, 538 bp, Homo Sapiens
  misc_feature (483)..(483): n is a, c, g, or t
ggtgtgtaatttcatggtggcctagtgttgtggtgcttctggtaatggtaatagaagctcaactatttttttgtggatttcagtttttatcatcagaagtcctagacagtgacatttcttaatggtgggagtccagctcatgcatttctgattatacaaaacagtttgcagtaggttatttgtcatttcagttttttactgaaatttgagctaaacatttttacatgtaaatacttgtatttaccaaagatttaaatcagttgattaattaattaactcaaatactgtgaactatctttaaaacactagaaaaaagaaatgttagtatctcaattacaccaactgtgcaaatgaactttgataaaatagaaataatctacattggcctttgtgaaatctggggaagagctttaggattctagtagatggatactgaatactcaggcccacttaatttattaatgtatacattgtgtttttgtnctttatcctatgtacagagaaatgtgataattttttataataaatattttttatg

SEQ ID NO: 178223 - DNA, 752 bp, Homo Sapiens
  misc_feature (470)..(470): n is a, c, g, or t
ggtcaggatctcaataaccagctgaaacacatgtctgtatcctcaatcaagcaagctgtggattttctgagcaatgaggggcacatctattctactgtggatgatgaccattttaaatccacagatgcagaataactggatctaactgggtacctgagatattttacagctggacctagtttcacaatctgttgtctccagctctgcatatgtctggccagggggcttctaggaagtaggtttcatctatcaaatgtctcctctgacttccttttgaaacttactgctcttctgttttattttgttttgtttgaagctcagagggagatgggcaattgacagggatgcaatccagggtgggatttcttgaggaagttacaaataagcttgttacaacatcaagatagatggaattggaaggatgctaccaggagagtacttacatagtgctcaggagtttctcttcttanaatgtttactgctgaaagatgagcaggacccagggcgttataggcagagccctagccgagaaacctgctggcctctgcctgttttcatttcccactttggttgtgtggcattactttcagaattgcactttcctgcttgtcatgactttttgacacacttgccatgacgtgtgtttctgtgaacatgaagttctgcggtagtgcccccaggggcagaggaaaagaagaagtgttactgcgttttgtacaaaataaatacagtcatatgtttaataaaacagt

SEQ ID NO: 178224 - DNA, 676 bp, Homo Sapiens
  misc_feature (566)..(577): n is a, c, g, or t
gggaactttctaacgcataatattctgtgatacagccattccgtacatgtgtgaagtcctgcataactttcgaactttgttaaatgttggcactaggagtcatcagatctaggcttcatcattttccagtgagaagcacagacccaaagggcctgttacttgtgcttggtcaggggactgtctgtcatgcctggaggctcttcggcacacttccccatctttcccttctgccactgtggcttcaagcacctctgttcatagagcgtctctgaaattgagtctcggtcatgacttatcccgaagtagagcaatgcgtctcctctcattgtagtttcaggactttgtcagtacaagctctgccctacgcttgttactttatactcataccctgaaaacacgtgatttcatctatgaaggggtaaaacatcggttcgcacttaatttgcttgaaattaccgtgattccctatatctacatttaaccccgtccccacaaacattaactttttttccggacccactctggccctttgataaacctttcctaccacccattcttttttcggnnnnnnnnnnnnacctttttggtaaacgggtaccctggcctattttccggcttttcctaaggaacccccttgggctcctccaccaagtggtttgggttttccttcacgcat

SEQ ID NO: 178225 - DNA, 337 bp, Homo Sapiens; identical to SEQ ID NO: 5588
  misc_feature (282)..(282): n is a, c, g, or t

SEQ ID NO: 178226 - DNA, 311 bp, Homo Sapiens; identical to SEQ ID NO: 5590
  misc_feature (140)..(243): n is a, c, g, or t
  misc_feature (254)..(268): n is a, c, g, or t

SEQ ID NO: 178227 - DNA, 906 bp, Homo Sapiens
ggggatgggctctgaggcggcgcagctgctggaggctgccgacttcgcggctcgcaagcaccggcagcagcggcggaaggaccccgaggggaccccctacatcaaccaccccatcggtgtggcacggatcctgacccacgaggcgggaatcactgacattgtggtgttacaggcggccctgctccatgacacggtggaggacacagacaccaccctggatgaggtggagctacactttggggcacaagtgcggcgcctggtggaggaggtaacagatgacaagactctgcccaagctggagagaaagaggctgcaggtggagcaagcgccccacagtagccccggggccaaactggtgaagctggcagacaagctgtacaatctgagggacctgaatcgctgcaccccagagggatggtcagaacatcgagtccaggaatacttcgagtgggcagcgcaggtggtgaaggggcttcagggaacaaaccggcaactggaagaggctctaaagcatctgttcaagcagcgggggctgacaatctgatcagtgcttgaagctatccagaggcacaactccagcctcgttcaggccggacaggattcatacgccatcttttctgtgtctcctgagctccctccatccttcccagatattagaggccaaaaaaagacttgcatttttttctcagtctgaaggtctcctgctaactaagctgagccccgcgtggtgggaatcagatgtacccatccatttctgatgcactcaccgcctctccccaagtcttgggtctgtttgctattttgcatggtgggatctctggcccctcagggacttgagattatttaagtactagttcctaacacgttctggaaaataaaaataactctgggttaaggtttaaagaa

SEQ ID NO: 178228 - DNA, 484 bp, Homo Sapiens
ggggcactctgccggcaacgccgaggcgcttctgcatctgtgggccgagcattcttcaggtcatctgaaccttctgagaaaacatggtcaacgtcttgaaaggagtgcttatagaatgtgatcctgccatgaagcagtttctgctgtacttggatgagtccaatgccctggggaagaagttcatcattcaagacattgatgacactcacgtctttgtaatagcagaattggttaatgtcctccaggagcgagtgggtgaattaatggaccaaaatgctttttcccttacccagaaatgaaaatactcaatatggaccatttaggaattataagcagcaactgtgaaagacttgccactcaatatcttaggtgactgattagacatagagggttgttttaggagcatgccacgggaaagactgagggatcatgatcatttgttcagaaaaaaagcccctgaactgattttgttaccatagaattt

SEQ ID NO: 178229 - DNA, 762 bp, Homo Sapiens; identical to SEQ ID NO: 98081
  misc_feature (621)..(621): n is a, c, g, or t

SEQ ID NO: 178230 - DNA, 684 bp, Homo Sapiens; identical to SEQ ID NO: 99386

SEQ ID NO: 178231 - DNA, 439 bp, Homo Sapiens
  misc_feature (35)..(35): n is a, c, g, or t
  misc_feature (334)..(384): n is a, c, g, or t
  misc_feature (404)..(404): n is a, c, g, or t
  misc_feature (410)..(410): n is a, c, g, or t
  misc_feature (429)..(429): n is a, c, g, or t
attacccctcaatcccccctgttccaccttggccncccccatacccccccttgatggatcacctaaaactgaaaggccagcggggagcagacaaagatgaggtcctacactgtcccttcatggggattaaagcctatggttatattagcaccaaacttctacaaaccaagctcagggccccaaccctagaagggcccaaatgagagaatggtacttagggatggaaaacgggcctggctagagcttcgggtgtgtgtgtctgtctgtgtgtatgcatacatatgtgtgtatatatggttttgtcaggtgtgtaaatttgcaaattgtttccttnnnnnnnnnnnnnnnnnnnnnnnnnnnnnnnnnnnnnnnnnnnnnnnnnnnaagcttaattgtcccagaantcctgnttcctaggaaacccggacnatgaacatgt

SEQ ID NO: 178232 - DNA, 240 bp, Homo Sapiens; identical to SEQ ID NO: 6105

SEQ ID NO: 178233 - DNA, 827 bp, Homo Sapiens
  misc_feature (708)..(712): n is a, c, g, or t
  misc_feature (714)..(722): n is a, c, g, or t
  misc_feature (729)..(730): n is a, c, g, or t
  misc_feature (733)..(733): n is a, c, g, or t
ggggtttcagtcgtccgtgggtttcccgccagccgcagtcttggaccataatcatggtggacatgatggacttgcccaggtcgcgcatcaacgccggcatgctagctcaattcatcgacaagcctgtctgcttcgtagggaggctggaaaagattcatcccaccggaaaaatgtttattctttcagatggagaaggaaaaaatggaaccatcgagttgatggaaccccttgatgaagaaatctctggaattgtggaagtggttggaagagtaaccgccaaggccaccatcttgtgtacatcttatgtccagtttaaagaagatagccatccttttgatcttggactttacaatgaagctgtgaaaattatccatgacttccctcagttttatcctttagggattgtgcaacatgattgatcttgatggattttcatacgattgtaaatgagctatattaaagtctattaaaggaagcccttcttgtttgagggagagatttctgtgctttctcatatttaatttgctgtttttaagatattccaacctagagtttttgatggaactgatatattgacagttctcaccgaagtccttttataaagaattgctactccaatatatggtcagattagatgcaagaataaagcaggtgtccgagtctaagtttctattttattaataaaaactaaaatggtacgtggcaaannnnnannnnnnnnnaaaaaannaanccttgtcggccgcctcggcccctcaagaagctttcaagaccattccttttggcgccgcgggccccagtaagtaaagtgaccatggtccatacct

SEQ ID NO: 178234 - DNA, 900 bp, Homo Sapiens; identical to SEQ ID NO: 6120

SEQ ID NO: 178235 - DNA, 1005 bp, Homo Sapiens
gggatcatttagcatatcttctaacttgcaaaggcacgttcgcaacatccacaataaagagaagccatttaagtgtcacttatgtgataggtgttttggtcaacaaaccaatttagacagacacctaaagaaacatgagaatgggaacatgtccggtacagcaacatcgtcgcctcattctgaactggaaagtacaggtgcgattctggatgacaaagaagacgcttacttcacagaaattcgaaatttcattgggaacagcaaccatggcagccaatctcccaggaatgtggaggagagaatgaatggcagtcattttaaagatgaaaaggctttggtgaccagtcaaaattcagacttgctggatgatgaagaagttgaagatgaggtgttgttagatgaggaggatgaagacaatgatattactgggaaaaacaggaaaggaaccagtgacaagtaatttacatgaaggaaaccctgaggatgactatgaagaaaccagtgccctggagatgagttgcaagacatccccagtgaggtataaagaggaagaatataaaagtggactttctgctctagatcatataaggcacttcacagatagcctcaaaatgaggaaaatgggaagataatcaatattctgaagctgagctggcttcttttagtacttcccatgtgccagaggaacttaagcagccgttacacagaaagtccaaatcgcaggcatatgctatgatgctgtcactgtctgacaaggagtccctccattctacatcccacagttcttccaacgtgtggcacagtatggccagggctgcggcggaatccagtgctatccagtccataagccacgtatgacgttagcaaggttgaccagagtgggaccaagtccaacagtagcatggctctttcatataggactatttacaagactgctgagcagaatgccttataaacctgcagggtcactcatctaaagtctagtgaccttaaactgaatgattt

SEQ ID NO: 178236 - DNA, 972 bp, Homo Sapiens
gggcagacgggacatgcagcctcttccgcctgagccccggaagggtgatgtggctgcggcatcgccggcctcgctatgtctgccattttcaattttcagagtctattgactgtaatcttgctgcttatatgtacctgtgcttatattcgatccttggcacccagcctcctggacagaaataaaactggattgttgggtatattttggaagtgtgccagaattggtgaacggaagagtccttatgttgcagtatgctgtatagtaatggccttcagcatcctcttcatacagtagctggggaaaatgccagaatgtagttgccatcagatttgattgtgaacaaggactgactgcagaaaataatggaaaggatgtttaactcttttatctccgaacattgaatgagataaatttccagatgctgttctctattttaatgttattggaccaatgttctgtataaacaattaagatgtaaccatttaatagtctgtaacaatcaacctcagtactgtcactacaatattacattctgcaaatgttattctgttgtatcagatacaaaattttagtgaggtatctctaaggcacatagtagaaaacaaaaatgggttaattactcaagttcctttcactgtgattgggaaatgatttaatctttatagaatgagaacctttttttggactaactttttttattaaaatggctcaatttgtgttgataaggatggcattatatttaatagtgctggcttttcctctggggccaccatttggatcattaaccagagtacctttaatcttagcaaactctaagttatgaacagttatttaaatatttaaacaagcttatgagtcttaaggaggaagggtaatgagatgtacttaaaaatagtatgggaaaaggttgatagtaacaataggggttagactagcaatgactagtaggctctgaaatttggcaagtattgt

SEQ ID NO: 178237 - DNA, 1296 bp, Homo Sapiens
  misc_feature (360)..(451): n is a, c, g, or t
  misc_feature (585)..(585): n is a, c, g, or t
ggtatgaagaacctgaagtcctgggctagtgtaaatcgaggtgccattattctttctagcctcctccagagttgtgacctggaagttgcaaacaaagtcaaagctgcactgaaaagcttgattcctacactggaaaaaaccaaaagcaccagcaaaggaatagaaattctacttgaaaaactgagcacataggtggaaagagttaagagcaagatggaatgattttttctgttctctgttctgtttcccaatgcagaaaagaaggggtagggtccaccatactggtaattggggtactctgtatatgtgtttcttctttgtatacgaatctatttatataaattgtttttttaaatggtnnnnnnnnnnnnnnnnnnnnnnnnnnnnnnnnnnnnnnnnnnnnnnnnnnnnnnnnnnnnnnnnnnnnnnnnnnnnnnnnnnnnnnnnnnnntctctcaaaataaaatataccaagcaaagcgattctccgtccctttcaaattcacgttcacgcgcgattggcccatcgtacaaatcattctatctgttttagtggctcggagcgcatccgtaatgtgaactctntactatgaattttctttggctagctacgtgaacctaccaggagtatacctgaaaggaaccgtcagaccacttcgcctacgggaattctcgtaaaggcgctaagactcgggcgtcttttaaaccttaattgtttaatgaacacaacagccgagctatggaaaacaccgacgcgagtccaattattcaactaggctcagcaagggtgacgcgccgggatgtttggtattggaggccgctcccctgcgcgaaacaatgctcgacacgcacacatacctgttaattgatagattgttatagggcccgccgctactctcgcccaagctcgccctataacgacacactcgagtgaactaatatggcatctgtcggagtacttgtttgttgtccccagtgaagtgccgcacatacctgtagagaaacctactcaacataaaattattgaacacttattttagtttcgaccccaatgcacgttgcaatctgcgccgagccgctggtgtgtggtagggccctttgcgccgcacccgaggagtgtcttcctctccaccgcgcatgacgtgcggcagacattagagcatttggtgcatgcacgtcagaatgaatagcgccttcctattcatctcgagtgcgtgagcacgcgcacctcacttcttggctcacttattcttcgtcaacgcggctctatgatcgcatatgataatctgcgttgtg

SEQ ID NO: 178238 - DNA, 716 bp, Homo Sapiens
ggtgtaagggtaattcatatcaatatatattgatacacacatcaatatataatgcaatatatatcaccgaagagaacacatggattaaagaaatacaaaaatttggcatcatttccaaacttaaatagtaaaaataaaaactacaaaaggagctgcataccctaaatgtatcatgtgaaacaacaagcatattcaaaaatgtaaattttacatccaatttctctggtcttgtcatatcacatcagacccatttacaatggcaaaaccctaaggtactgctgtgaagagagcatgtttgctcgctcttgggtgttctgcaaacaaatagcagagcccaaagcaaaaaagcctgttccggtgaagtctcccacgttggtgaacaccaaataatggactcttctcacagggggttgagacatcaggttacacattgacagacagtatttggacctcagagtacagtgtgagaaccagaaactttacatttaagacatactcccttcattcaagtgaaacaggattattggaacgataggcaggtctgtaacctgggaacaaggagctggttcagaccaataaagctacgagtgactgaatcaagtcagtaaagaacagcagtcaggcactaaagtgttaaaagtacccaatttgaaaaccaaatgcaccccactaccctagtcagtgtggaggtgataccaattgacttttaaaacccc

SEQ ID NO: 178239 - DNA, 1199 bp, Homo Sapiens
  misc_feature (202)..(278): n is a, c, g, or t
  misc_feature (704)..(704): n is a, c, g, or t
ggtgctgggattacaggcatgagccaccacagctggccgtaaatattttttgaatttgaatctgttttggaagccaaatatgttttggaagccaaacaattaagagaagtaaaattttaaccctagtaggtttcgcagattcatccccagatatgtttttgtttggcttgtgttattaacaaataaatgagtgtctttcgcnnnnnnnnnnnnnnnnnnnnnnnnnnnnnnnnnnnnnnnnnnnnnnnnnnnnnnnnnnnnnnnnnnnnnnnnnnnnngaaccacaaaatcactacggtaatctcccgccccgcgaccggacatcgcctactaacatccgcgtcgccgccggcgcgcccccgtgagcgcacgcatcgtctgcggattcccgcgtctgtgtgcgtttatcaagttttcatgcatcccgcactcgcgtcgcatgggacagccccttacctccgtgcacatcgcgacccggttcggtgtgcctcgttcgttacattaggtcgcggcggggcgccggggtgtgctgccgccgccgctcttcgtttatcgcccgtgaccgtgtcgatcatattctgaacttcttcctcgcgagcgcagtacggcggtccacctctcatcgactactccatggccgacgtgcctatagaggagtagcgtgctcgcggccgtatttggcgatgcgacaccccgcccgcctntctcccgattcgcgccccggccttatcccacccaccgattcctcactagcgtatcctcccctagcgcgtgtgcactcggcttatcggtattttttctgtgttgcgttatgattccgggcgggtttcgcgtgtgcgtgaggggcggtgtcgtcttgccgcgcgtgacgccccccaaccgcccgctcgctcacagcacaacgcgtgcgggctctgatacccacataaaccccgagccataatgtaactatccggtcaccatgtacatccactcctctatgaccagctgatctatgaggagtgtgtgccatgtatctccggcgagcaccccacgacgacgctccttggccaccatctgacgcacgcacctgcatgcgtgtaccgcccgcgcgcagtggggcggcgcgcgaggcgcgcgggtgttgctcagcgaggatcgcatccgatagtggtatcggcgctcacagcgcacgctgacgcgcgtcatgctgctcgcga

SEQ ID NO: 178240 - DNA, 900 bp, Homo Sapiens; identical to SEQ ID NO: 6131

SEQ ID NO: 178241 - DNA, 928 bp, Homo Sapiens
gcaatgaattctacaccaggattccgcatgactttggactccgtactcctccactaatccggacacagaaggaactgtcagaaaaaatacaattactagaggctttgggagacattgaaattgctattaagctggtgaaaacagagctacaaagcccagaacacccattggaccaacactatagaaacctacattgtgccttgcgcccccttgaccatgaaagttatgagttcaaagtgatttcccagtacctacaatctacccatgctcccacacacagcgactataccatgaccttgctggatttgtttgaagtggagaaggatggtgagaaagaagccttcagagaggaccttcataacaggatgcttctatggcatggttccaggatgagtaactgggtgggaatcttgagccatgggcttcgaattgccccacctgaagctcccatcacaggttacatgtttgggaaaggaatctactttgctgacatgtcttccaagagtgccaattactgctttgcctctcgcctaaagaatacaggactgctgctcttatcagaggtagctctaggtcagtgtaatgaactactagaggccaatcctaaggccgaaggattgcttcaaggtaaacatagcaccaaggggctgggcaagatggctcccagttctgcccacttcgtcaccctgaatgggagtacagtgccattaggaccagcaagtgacacagggatttctgaaatccagaatgggtataccctccaaactacaatgaataaattgggatataaccccacaaccaggttccgtaaggccggaacccttttttaaaggggtcacattttaattctcccctccaccttgggggagggaaagggttgaatctcttaaaaatacaaccagccaaaatcgtgattcctctcaagacc

SEQ ID NO: 178242 - DNA, 778 bp, Homo Sapiens; identical to SEQ ID NO: 6137
  misc_feature (623)..(640): n is a, c, g, or t

SEQ ID NO: 178243 - DNA, 1035 bp, Homo Sapiens
  misc_feature (320)..(320): n is a, c, g, or t
  misc_feature (323)..(411): n is a, c, g, or t
  misc_feature (416)..(419): n is a, c, g, or t
  misc_feature (445)..(562): n is a, c, g, or t
ggggggagggctgaacaggacaacctctcatcacccccacttttgttccttcctgctgggctgcctcgtgcagagacacagtgtaggggccatgcagctggcgtaggtggcagttgggcctggtgagggttaggacttcagaaaccagagcacaagccccacagagggggaacagccagcaccgctctagctggttgttgccatgccggaatgtgggcctagtgttgccagatcttctgatttttcgaaagaaactagaatgctggattcttaagtgatatcttctgattttttaaatgatagcacctaaatgaaacttntcnnnnnnnnnnnnnnnnnnnnnnnnnnnnnnnnnnnnnnnnnnnnnnnnnnnnnnnnnnnnnnnnnnnnnnnnnnnnnnnnnnnnnnnnnaccannnnaacacaccccccaccacaccaaacannnnnnnnnnnnnnnnnnnnnnnnnnnnnnnnnnnnnnnnnnnnnnnnnnnnnnnnnnnnnnnnnnnnnnnnnnnnnnnnnnnnnnnnnnnnnnnnnnnnnnnnnnnnnnnnnnnnnnagcagcgcctcccgggagaggccccggcccacatatccaggagtcgttggccaatcccccccgaaacaaaacaatcgcttcggacagccccaacctaattctaatatctacagcacctaccatccaaacggccgcgtatttttggctccttacaatttcgctagcccccccacatattacttccttctcgtcaccctcgcgcgcttttttctttacaagcagtctagtgacagatttacgccgtctcggccagggtttggttctttcgcttcctcatcctcgactctctcccctagtatggcccgcacactcccgcaggtggagccgcacgtcaacgtcgaccacgccggctcccccacgcccacatgtcaacagccggtccttcaccccgatttttgtggcacagcagacaaccaaaatccaaaccacgccatataaccctccgcttgctggcaagaggctagcacgacggc

SEQ ID NO: 178244 - DNA, 540 bp, Homo Sapiens
  misc_feature (31)..(31): n is a, c, g, or t
  misc_feature (54)..(111): n is a, c, g, or t
  misc_feature (131)..(145): n is a, c, g, or t
  misc_feature (334)..(405): n is a, c, g, or t
  misc_feature (455)..(464): n is a, c, g, or t
aacgtgtaaacccagctacttgggaggctgnaggcaggagaattgcttgaaccnnnnnnnnnnnnnnnnnnnnnnnnnnnnnnnnnnnnnnnnnnnnnnnnnnnnnnnnnnagagtgaaactcttgtctcnnnnnnnnnnnnnnntgaggtttaagacagttttgtcattactggtgggatctggtcacacaagatagcattaaacgtgacatggcacataaaattggttaaaaaattttgttttttaattacgtaatgtaaaagcccaacaaacactttatgcaagattggaatgtatcttcaaattcagatttaataaacatgtaaagatcnnnnnnnnnnnnnnnnnnnnnnnnnnnnnnnnnnnnnnnnnnnnnnnnnnnnnnnnnnnnnnnnnnnnnnnnacctggtgggcccccttcggccctcaaaaacttttttaaacctttctttnnnnnnnnnnccccaataggaaagggaactgggcaaaactggttcccaagaaaacccgggccagaactaggggttggattcccccc

SEQ ID NO: 178245 - DNA, 460 bp, Homo Sapiens
  misc_feature (421)..(421): n is a, c, g, or t
  misc_feature (431)..(431): n is a, c, g, or t
attcggaacgagggcaaagcataggtaaatatttttctttattaagcttctcactgagaagccctctttattttggtaaatgtcactctgtttgttaggagatgtctgcttttccatgaaatgaaatagtggctaaagccctgaaagaggcaagactacaatgggctgaaacagttggtatagcaaccccagagaagtgcttcattttctttttatagtagaagcaggtccatgtcttttgtggtttcctgcacatctttgggagtagttatgacttctcagtttttcccccctttaaactgcattgcctattcttttttcctggacatgctattcagggtatcagtgtgttggaatacataatgcttgtgtatccagacttacggttactgtccatcaccctttaaaaggattgcaggcntgtggccccnggaccttcagctcagttgttggaccgtcc

SEQ ID NO: 178246 - DNA, 629 bp, Homo Sapiens
  misc_feature (479)..(487): n is a, c, g, or t
ggtatttcttaaatttattgaagaactcttagctgggagaagaaagatcacaggcttaaacaattgtaagataaaagaacaattaattgcaaataattacaaaagtaatttctgaaattttttgagccactgctgaaacaaaactttagtgcatctcaaagttcgtattttgttaagtgaacatattaaattactgaaaagcaaaaaagagttactgttacacagtacaagatcttaatatagtaactgagcacagccaaataaacagctataattattccaagctgcttttgctatgtatctggtatattaaacaagaaagtggattacttttaacactgcacaagtaaccaaaggtagcaaatccacgcaatattaaaaccggatataaaatagtattcaaacattacaacaaaaacaaaataagaacttctagaactagaactctaccctatgaaaggaatgtacacagatggttnnnnnnnnnccaataaataaataaagtgacaagagtgactaattctgtatccacatcttcagagcaggaatacagtaaatgagtaaatggttagaggagtcttgctgaaaatgagaaaaaatgcatctctctgtagtatactttttgtccc

SEQ ID NO: 178247 - DNA, 629 bp, Homo Sapiens
ggggagtaacctggacaagctgtaccatggcctggaactcgccaagaagcagctgcgagccacccagcagaccattgccagctgcctttgcaccaacctcgtcatctcccaggggcctttcctgtactgctctctcatggagggcactccagatgtcatgctgttctctaggccggcatccctaagcctgctcagcaaacacctgctcaagtcctttgtgtgttcgacaaagaaccggcgctgcaaactgctgcccctggtgatggctgcccccctgagcatggagcatggcacagtgaccgtggtgggcatccccccagagaccgacagctcggacaggaagaacttttttgggagggcgtttgagaaggcagcggaaagcaccagctcccggatgctgcacaaccattttgacctctcagtaattgagctgaaagctgaggatcggagcaagtttctggacgcacttatttccctcctgtcctaggaatttgattcttccagaatgaccttcttatttatgtaactggctttcatttagattgtaagttatggacatgatttgagatgtagaagccattttttattaaataaaatgcttattttagggctccaaaacacacacaaac

SEQ ID NO: 178248 - DNA, 381 bp, Homo Sapiens
ggaaaaaagcatcatttatttcaaagtacaacacaaagttgtatttttaagaaatacacattcaatcttgtatctcaagacttggctatgtgcatttcagttcatctttaaaataagttcaggtatacaaatgttacatacctcaagtacaaacagcacagaaaatgcatatggtctcaactgaatgtttttacattcattcactgttcttaagttgacttacatttctgtaatctgcttttaaaccaagacagccttactttaaaaaaatactctattttcagcacaaagtcctcatacagttttaaaattagatcttggcgcataatattgagaaattattaaaaaccaaacttggtaatttaacaaaattgtcacacc

SEQ ID NO: 178249 - DNA, 638 bp, Homo Sapiens
gtttacatgtgtttatagagctaagagaaatcagggcatggaaattgagtgtgtaataaaaattaaactcttcatgttatataatcatgcataacttctatcttcattctctgaagttgcctagagcaccatcacagctaggaagcttccatcatgaattaccttatttccaaaagcaagtactcaaataattgtctcaagagaggaaggacaaaactgttacaagctgaaatatttggggatttgtttgacttgactagggaaccacaagttttcatataatgcctgatttagccctgtgcctaacagtttaaatcttaatgctaatgttaattgcttcccagttggttgaccttataagaaaacactgtgtggtattttaatgtggtaaacatgtgaatgaaggcctgtggctcagttaatcactcccacaactttgagctgtgagttttactggtggaaggaactttaacaggtcttcgctcttgtcattagatatcaaagaactgaaattagttggaattgtaagcagtgaatagatgtgttgttagaatgattccatcacttatacattgtttaaaatgctaataaagtaacttgcttttgtaaaaggaaagcagacagaagaaacaacaagc

SEQ ID NO: 178250 - DNA, 1004 bp, Homo Sapiens
  misc_feature (89)..(97): n is a, c, g, or t
  misc_feature (167)..(190): n is a, c, g, or t
agtgggctttccaacttaaataattttttggttttcaaaggaccagtttcccttaattccaaattaaactttcccaagtttatttgttnnnnnnnnnccatttttttggtccccccaaaatccttttattatacccttccccaattttttttttaccattaccgggnnnnnnnnnnnnnnnnnnnnnnnngcttaggtcaaatatcaactgccctgaaaaacccaattaaggttacttttccgtaaaacatgtgcagtataattgaaatcaaaagagaaaactgcaaatacattgtgctttggccagaagtagagttcatttcatgatgattcagtatcttcagatactatttttgacacttgccataaatcttagcaaagtaaatccatttattaacgtttcaaaggcaaagttgtttttaacattagactttctttgccagttggcaacttagaatttttgcagaggtgattattaatacttctttgcagctaattttagctttaatttttctctctcatctaaaaacatatcaattgcacattgttcctttgacttaataactgcattcttgaaacagaggttagctatttcactgtatccagaaacgtggtagaaattctgacccatcattcttttatctcagtgacaacaccagcagctattgtagaaccaccgtaacgtagcatgaacctccccagctctttaaagtctttatatagctcaagagctattggtctttgtgtctgtagctctaccatgcattctggcctttagtcaaaaacttaggctttttctttgtgacttcacccgtgcttttgtttaagacactaatcatcgtttaataacggcgggttcactgacagtttggtagtgtaacagcacaggaaatcctttagtgataggaatttcaatattaaagatgaggattcgggctctgaaacgagtgcaagctttaatgggtactttggggccacaatatgcagccaacattgattttgat

SEQ ID NO: 178251 - DNA, 469 bp, Homo Sapiens; identical to SEQ ID NO: 6178
  misc_feature (414)..(423): n is a, c, g, or t

SEQ ID NO: 178252 - DNA, 331 bp, Homo Sapiens
ggggtgaaggagcggggcttggctgcaggagatgccattgctgaaatccgacgactacgacccggctccatcgagacctatgagcaggagaaagcagtcttccagttctaccagcgaacgaaataaggggccttagtacccttctaccaggccctcactccccttccccatgttgtcgatggggccagagatgaagggaagtggactaaagtattaaaccctctagctcccattggctgaagacactgaagtagcccacccctgcaggcaggtcctgattgaaggggaggcttgtactgctttgttgaataaatgagttttacgaaccagg

SEQ ID NO: 178253 - DNA, 743 bp, Homo Sapiens
  misc_feature (285)..(317): n is a, c, g, or t
gggggagcgggcagtcagaacagctgttccccactccgtggttctcaaaatcataaaccatggctactcttgggaaccacccggccatgcggtcgccaagtacagcaagccccctttctcttcccaatcacgtggctgagcgtggatgacttttattttacgagaagggcgattaacacttttgacagtatcttgctttgccctgatttgggggattgtcttgttttggtggttgttttggaaaaacagcttataaactgatttttgtagtttggtatttaaagnnnnnnnnnnnnnnnnnnnnnnnnnnnnnnnnnccttttggtaactgtgcactgtgtcctttagccaggccgtgccaacttatgaagacactgcagcttgagaggggctttgctgaggcttccccttggccatgtgaaagcccgccttgttgcctgctttgtgctttctgctccagacaacctgatggaacatttgcacctgagttgtacatttttgaagtgtgcagggcagcctggacacaagcttagattctctatgtatagttccccgtgttcactaacatgccctctctggaaagcatatgtatataacatgtgtcatgtcctttggaaacctggtcacctggtgaaaacccttgggattcttccctgggcatgactgatgacaatttccatttcatcagtttgttttgttttcctttttctttaaatcttggactttaaaccctacctgtgtgt

SEQ ID NO: 178254 - DNA, 814 bp, Homo Sapiens
ggggagctatccttagacaaagaaaagtcaagtcatgaaagaagtccttgaagatataccaagaacattcatcagtatcattcgtgtttggatttttaaggccacctgatttcttcgtcatgcattcggcatttgctaaatgacagttactacatcaatctgcaactatcaaaaatgaggggaaaaggttcaggctgttaacaattccatgcagtatttaaatacatttactttggcagagtttataccctccccttgttttcttgctttattctgggcaagtttgaaggggaaaatttgtgctgctgttagtgcaactgctgtgtatgttgagccactgttgtcatgccagccaggtgcaaaggcagcttagctactgaggtagcgaatgttctgaggacattctagacaacagcttagttcctttttcaggctcatttgcttttgcttttttgttgaatgattccaatcgtaaataaagcttttaataatttgtgaattttttggttgttgttccctgaactactgtctatatttaaaattagatggaatccaaagatacacgggattaatagtatatttttttattcttgattaggttgggttattgaactattttttacttttgagaccacaaccatattcaatatcataccataatgtgtcatagctataggcacaagaaaaacaacagtttgagagaatattatataagatgatgtgccctgttaaaaggaggaggcaaaatagtcaaacccagggtagtttacacttaatgctagggaggctcttaaaacattattagattttgagg

SEQ ID NO: 178255 - DNA, 839 bp, Homo Sapiens
  misc_feature (691)..(699): n is a, c, g, or t
gggggtaggaatgggaaaaggggcaacctacaaagattgttggggcaagggaagtcacaagctttcggatgggcggtggcttttcacaaaacatttagctcatcttattctctctttgtcctctctcccctcctgcccgcccgcaccctggaattgccactcagttcctctgggtgtgcacatatgtttggagaaatagaggagagaaaagagggccacgtaactgagagcttacagtgccaatgccgtttgtgttctggccagagtggagtgcgcagccctgactcccaggcgctgagattgttgcctggttacccaggaagctgctgttccggctgcccagcctttctctgagccagcggatgcacagtccgtggccttcttcacgcttattgatgatgctttttgcaaatgttgaatcatggctctgtttctaagttggatcttttttgttttctccttgccaccctaatttgacatcaaaattctctcttgtgcattgggccctgggtcattcaaacccaggtcacctcattccccttctctgttcacacccaatgtcttgaaaagtaggcaccaacagtgtgggcctgaacctaggccagcttgcttaacgggccaccctgctgatgaagtcctggcaaagcggttggtaatgtgtggcaaattgcgcgcacccaagggttcggtnnnnnnnnntctgatcccaggtcttccccccccaacccgccaccaaggggggccccataacagggctatacctggatagtgaccggggctcggggcacctgcgagggagagcctttttcctaaacaccgctttttgcccattttggggg

SEQ ID NO: 178256 - DNA, 780 bp, Homo Sapiens
  misc_feature (59)..(83): n is a, c, g, or t
  misc_feature (242)..(292): n is a, c, g, or t
ccggaagcttccctttcgtggaatttgtttccaggaaccggtcgcggttttccgccccnnnnnnnnnnnnnnnnnnnnnnnnnagattcccaagccccttgtttcaggaccccggggttttcctttggggaaccaggttttggccccgggttccctttacctttctggggggccgggggcccaaagggaaatggttttgaaaaagtttttttgaggggccgaagcgggcccgcaaaggggtnnnnnnnnnnnnnnnnnnnnnnnnnnnnnnnnnnnnnnnnnnnnnnnnnnntaattttaaagaattttaatacaaacttaatataaactatttcagtccctcttaacatgtaagacactgactcaaaatacttttataccgtttttttcaagtattgcacaatataggtacaaaattaatatttacgattacatttttcttccataatatatagcaaaaatctttaaacttttaacagaaaatacatttttttgaaaaagcaagtattcgtacattttaattccaccactaaaggaatatcctgtacacaatttttagaatagttgatgtctttaagatggatattttacaatttcagtaaaaaaaatacaacatgaagctgctgctgtcacagatcactgtagtaaaaagatataaatgcaataccatgtcgtagaaacaatatatatatatcctctgatattttacaaactttgtactaaattaaattatacaattagaaaagaccaataaacccacttattagtgccaatttttat

SEQ ID NO: 178257 - DNA, 279 bp, Homo Sapiens
gggggcgccgagctgaggtggtgagggactagctcccggatgtggagaaggcaagggagaaggcaaatctgtgaggccggggccctgcacctgtgcagcgaagcttagcgttcatccgtgtaacccgctcatcactggatgaagattctcctgtgctagatgtgcaaatgcaagctagtggcttcaaaatagagaatcccactttctatagcagattgtgtaacaattttaatgctatttccccaggggaaaatgaaggttaggatttaacagtcattt

SEQ ID NO: 178258 - DNA, 829 bp, Homo Sapiens
  misc_feature (690)..(693): n is a, c, g, or t
  misc_feature (695)..(695): n is a, c, g, or t
  misc_feature (698)..(699): n is a, c, g, or t
  misc_feature (701)..(701): n is a, c, g, or t
  misc_feature (703)..(706): n is a, c, g, or t
  misc_feature (716)..(716): n is a, c, g, or t
gggggggcagatctcagatctccgtcaagtaccagctgctctacgtggcggttcccagtggccctccctcaacaaccatcttggcttcttcaaacaaagtgaaaagtggggacgacatcagtgtgctctgcactgtcctgggggagcccgatgtggaggtggagttcacctggatcttcccagggcagaaggatgaaaggcctgtgacgatccaagacacttggaggttgatccacagaggactgggacacaccacgagaatctcccagagtgtcattacagtggaagactttgagacgattgatgcaggatattacatttgcactgctcagaatcttcaaggacagaccacagtagctaccactgttgagttttcctgacttggaaaaggaaatgtaatgaacttatggaaagcccatttgtgtacacagtcagctttggggttccttttattagtgctttgccagaggctgatgtcaagcaccacaccccaaccccagcgtctcgtgagtccgacccagacatccaaactaaaaggaagtcatccagtctattcacagaagtgttaacttttctaacagaaagcatgattttgattgcttacctacatacgtgttcctagtttttatacatgtggaaacaattttatataatcaatcatttctattaaatgagcacggtttttgcccnnnncnacnncncnnnncaaaaccccnccacatggtcgggcgccttcggcccctcgaaaagcttttccaacacccattcggtttgggcgcgcggggccccggtaaggtaagtgaaacatgggcccataactggttttcca

SEQ ID NO: 178259 - DNA, 1006 bp, Homo Sapiens
ggggtgccggaggcgcgtcctgcatcgtctgccgctttggtgacttctgacagctctctccatggaaggaggcggcggccgcgatgagccttcaccctgccgggcaggggacgtgaacatggatgaccctaagaaggaagacattcttcttttggccgatgaaaaatttgacttcgatctttcattgccttcttcgagtgcaaatgaagatgatggaaggcctcttcggaccctttggacataaacaaagatgtattgctgccagcttggaattaaataatccggttcccgaacagcctccggtgcccaccatctgagagtcccctttgcctggagccctctggccggggaaaaggccgcggcggcgtgaccagcaagctcacttactggcctttacaccattggcaagcagccatccgcgaaaccacgcaaagcccaaggctgccccaagcccgcgaagcacccctccgggaagacaaggggccgatggcgaacagaattgcattccgcggggaagtccgacagatttaaaaaacactacgaaccctccgtttttgggaacgaggcgcgctggacggatggccgcacccacgccgatcgacctcagaccggctcctgtgtggttatgagggactgagctcgcttctcctgggccgcctagtcgcaacaggacacggatttattggcgtaaagaaccataaaattattcaatattttaggagacacgcctcgcaggggggtcccccagcgtaatgggattatgaaacagctggacaaacaccaagtggagggacgaggagccagcgtccgcggggttacccgcaccaagggcaatcgaaacccccatgcgcgaggccgcgtggcgcgaggttagaccgcgcccctctgcggggtaaatgtgcctcacccgagagtcaaaccgcagaaacagaactgcgcgccccatggaggcgcgggtcgtgtacgacccactgaaaaacccgatcgcccgtgggacagaccacca

SEQ ID NO: 178260 - DNA, 411 bp, Homo Sapiens
  misc_feature (333)..(333): n is a, c, g, or t
  misc_feature (358)..(358): n is a, c, g, or t
  misc_feature (384)..(384): n is a, c, g, or t
cgcctccgaggcagtgtgtttccgcccagagctggagtctcccagctgccagccgaccccgaacccgcactcccgccaaccgcgctttttgtgggcggtcggaaaccacagcctccgttggatatgttcggtgcatgttataaacaaccacttaaaccctccggatctgagcctcccgcagaggaatgcagaatgacgccacggcacgcaggatgtgatgtcaccgagatgcagaggatactcagtcaaccaacatttactgagcatcttacttcgtgccgtcttgttcaacgggaaagggggtccctattccaggaccccaaggaggaggcnttctttgggttctctttggcaaggnaagggatttttgaggggcgaattccntaggggttaaggcaaggggcaagttta

SEQ ID NO: 178261 - DNA, 710 bp, Homo Sapiens
gggagagggagccgtggtttccggaacttcgcccgcgtctctgggcttttgctctgtcaggctggtggcgttttggtgtcttcgtttgttatggccgctgctgtcgctatggagacagatgatgctggaaatcgacttcggtttcagttggagttggaatttgtgcaatgtttagccaacccaaattaccttaattttcttgcccaaagaggttacttcaaagacaaagcttttgttaattatcttaaatacttgctttactggaaagacccagaatatgccaagtatctaaagtaccctcagtgtttacacatgttagagctgctccaatatgaacacttccgaaaggagctggtgaatgctcagtgtgcgaaatttattgatgaacagcagattctacattggcagcactattcccggaagcggatgcgccttcagcaagccttggcagagcagcaacagcaaaataacacatcgggaaaatgaaaaactggatacaaacgaggcacttaatacatggatataatggattccttttgtacagggaagacaacaaaaaatgaaaactcttcctatctacctttattatggtagcccctagaacctttagtgtgctttttcatccaactttttattgttaatagactatttctgttagaacctgaatggttcctttgaaaaacgcaaacacaaaccaaacaaccacaggg

SEQ ID NO: 178262 - DNA, 755 bp, Homo Sapiens; identical to SEQ ID NO: 14959

SEQ ID NO: 178263 - DNA, 422 bp, Homo Sapiens
gggggagagccagtatgggggagcaaatttgacaaatgggaattagaggagtgcagttttaaaaggaaaagttgctgtcatcaaaatggcagccttttccccagctactgtttttggggccaagatggctgccctagcagcaatcactgccaagggcaagatcatggcttttggagggaggtgagtttagggagggccaggaccatcctcctacccctcataccctccccagcatatacaaaaggggaggttttagacaggctccctgaatgttaaccacagaggagtcactccttcattcctcctctgtctctttgcacttttcttggtcttggccacagcctgagtgacgaatttcctactgaatgtaccaagttccaatttttaagggggggaaaggtttcaaatggggaaaaacacac

SEQ ID NO: 178264 - DNA, 591 bp, Homo Sapiens
ggctagattcagaagcaaaaccgattttgctttcaccattaaggttgcattttaatgcagttattgttttaaattagagaataaaatgtaaaaccaagggaggctttagaaccctttattgaatggcatggcaaacttttaaaactgcttttgctatttcactagaactatctttgataaaggatatagctaaaaaatgtcagcccaaactgtgtgtaattagggttgtttattaaaattttctctaaatgtcatacagaggccttaagatcctgtgtatgcctgttgggtcggagtgcccagtcactgcctttggaagtctatgttctggggctgcagaatgacaaacgtgtcatgggattaaaaccaatcaactgtgaattgtgaaattgaaactactctttcggttttattttctttagcatattgagtatagaaatctgaaacttatttaaaatttatactgcttttgttgatggctcattttggctgtgtatcctcacttatgtactgatttctgataaaggcttgacattattataacacgcattttgtgttccagtttaataaaacggtttctgagtcttgtct

SEQ ID NO: 178265 - DNA, 936 bp, Homo Sapiens
gggaggcctatttccggtaggaatcagtggacttggcggcagaggcagtgcggatccggcgttctccactgatcttttccaaggctgtacagacatggcggcggcttttcggaaggcggctaagtcccggcagcgggaacacagagagcgaagccagcctggctttcgaaaacatctgggcctgctggagaaaaagaaagattacaaacttcgtgcagatgactaccgtaaaaaacaagaatacctcaaagctcttcggaagaaggctcttgaaaaaaatccagatgaattctactacaaaatgactcgggttaaactccaggatggagtacatattattaaggagactaaggaagaagtaaccccagaacaactaaagctgatgagaactcaggacgtcaaatatatagaaatgaagagggttgcagaagctaagaaaatcgaaagactaaaatcagagctccatctgctggatttccaggggaagcaacagaacaagcatgtgttcttttttgacaccaaaaaggaagttgaacagtttgatgtcgcaactcacctgcaaacagccccggagctagtcgacagagtctttaataggcccaggatagagaccttgcagaaagaaaaagtgaaaggagttaccaatcagactggacttaagcgaatagctaaagaaaggcaaaagcagtataactgcctgacacagcggattgaacgagagaagaaattgttcgttattgctcagaaaattcaaacacgcaaagatcttatggataaaactccaaaaagtgaaggtgaagaaagaaacggtgaactccccagctatttataaatttcagagtcgtcgaaaacgttgacgtgttatagataagccttgtcattctgtatcaaaaatctgttgtcgttttctagtaacttcaaattccattactccaa

SEQ ID NO: 178266 - DNA, 462 bp, Homo Sapiens
  misc_feature (30)..(30): n is a, c, g, or t
  misc_feature (37)..(37): n is a, c, g, or t
  misc_feature (61)..(61): n is a, c, g, or t
  misc_feature (73)..(73): n is a, c, g, or t
  misc_feature (78)..(78): n is a, c, g, or t
  misc_feature (124)..(124): n is a, c, g, or t
tacctacaatccaaccaaaatggatataanaaagtanatttaggcacaaaaaagctatctntaatatcatacnaaatncagcgcaatacatcattccccagaatacctagtttgaaagcttatntttttttccattcacttgcaagctggattaagacattaactataataatatggaatgttcagcatttatgtttggtaaccagatgtatatggtttgtataaccatactttagaatttagatcagataaattggttttggtatactttgactacagaaagtgatttcaacataagatgtgatgaaggaagtctcccatgaaaaacttagtaaggatcaactgatgctatggacaaaacctaaaaaaagagatttgtagatgctttcaaggctttgactatgaaatatagaaaactggatgggcattcttactgaccggatgcttacaatttcaaatgaa

SEQ ID NO: 178267 - DNA, 1099 bp, Homo Sapiens
ggtgggaggaaattccagaagcccttaggtcctgtggcccgggggttctcccttagggaaaacaagcttatgacccatgtttcacctttccctttctgggccgccgggcgcccaaacgaaatggtttaggaaagctttttggggggccgagggcggccgacaagggttgtgtgtgtgtgggggcggatccagggggcggacaggacaaggtttatttgggggtcctggaagcactggggagagggacgagggggcaaggtcgaggctcacaggggcaccccctagccaaatgcccccttcccctagggattggggaggaagacagagacagacaaaccaacagagatggagagaaagaccaacggatgctacggagagagggaaggaaaccccagtgtccaccacctcccactcagatgagttcacaggataaagaattgcgtggaccggtccacacgctacaggaaaagagagggagggtccgccctattcactctaaggaaggtggcaggccacagcctaggaccagcccattccatgtgatggggggtgtgtgcacatagatcagtccattctactgggcaaggggatttcagggccagtctattctagtgtttggggcggggaagatcgttagggtcgatccattccacagtcggggaggggggattcgagggcagggggcatctaccctggtccctctttcagcacagggaatgaaaaaggggaaaggcagatttcggctatatccattttctggggtcaccagtgactctggtgggtggcatttggagggatctaggaaaattcagggacatgctccctccacattctccagatcaaggtcgttaggaatgatggctctcagggaatggggcagtcttcccttggtgggggtgggtgcccatcttttagtattagggctctcaagatgagaggtacttgtggagacccattgctcactgcaaagtccccatgtcttggggacttacggctacccacactcattccagggacctcaggctcaggagtctctccctagatttgggctcccctgccccagctaaggaccctgtttgtttgtggtcccccagctccc

SEQ ID NO: 178268 - DNA, 954 bp, Homo Sapiens
  misc_feature (773)..(773): n is a, c, g, or t
ggggcagctggcttggaggctccgcgctctggaggctcaggcgccgcgtggggcccgcacctctgggcagcagcggcagccgagactcacggtcaagctaaggcgaagagtgggtggctgaagccatactattttatagaattaatggaaagcagaaaagacatcacaaaccaagaagaactttggaaaatgaagcctaggagaaatttagaagaagacgattatttgcataaggacacgggagagaccagcatgctaaaaagacctgtgcttttgcatttgcaccaaacagcccatgctgatgaatttgactgcccttcagaacttcagcacacacaggaactctttccacagtggcacttgccaattaaaatagctgctattatagcatctctgacttttctctacactcttctgagggaagtaattcaccctttagcaacttcccatcaacaatatttttataaaattccaatcctggtcatcaacaaagtcttgccaatggtttccatcactctcttggcattggtttacctgccaggtgtgatagcagcaattgtccaacttcataatggaaccaagtataagaagtttccacattggttggataagtggatgttaacaagaaagcagtttgggcttctcagtttcttttttgctgtactgcatgcaatttatactctgtcttacccaatgaggcgatcctacagatacaagttgctaaactggggcatatcaacaggtccaacaaaaataaaagaagatgccctggnattgaagcatgatgttttggaggaatggagaatttatgtggtcccctgggggaaatttgtggggaacttgggcaaaccacctggggtctcctggttttgggccttgggggaaaaaatttttaaatttcccccattcccttggggagaaaaggggaacccctctttttttgaacactgtggg

SEQ ID NO: 178269 - DNA, 885 bp, Homo Sapiens; identical to SEQ ID NO: 84552
  misc_feature (479)..(482): n is a, c, g, or t
  misc_feature (484)..(485): n is a, c, g, or t
  misc_feature (488)..(491): n is a, c, g, or t
  misc_feature (545)..(605): n is a, c, g, or t
  misc_feature (637)..(655): n is a, c, g, or t

SEQ ID NO: 178270 - DNA, 662 bp, Homo Sapiens
gggtcttctttaaaactggattgcaaaatggaagtcagtgtatcagacaagctagcagttgtagatgaatggagaaaagaaatgggcctgtgctggaaagaagtggcatatcttggaaatgaagtgtctgatgaagagtgcttgaagagagtgggcctaagtggcgctcctgctgatgcctgttctactgcccagaaggctgttggatacatttgcaaatgtaatggtggccgtggtgccatccgagaatttgcagagcacatttgcctactaatggaaaaggttaataattcatgccaaaaatagaaattagcgtaatattgagaaaaaaatgatacagccttcttcagccagtttgcttttatttttgattaagtaaattccatgttgtaatgttacagagagtgtgatttggtttgtgatatatatatattgtgctctacttttctctttacgcaagataattatttagagactgattacagtctttctcagatttttagtaaatgcaagtaagaacatcatcaaagttcactttgtattgtaccctgtaaaactgtgtgtttgtgtgctttcaaagatgttgggattttatttatctggggacagtgtgtatggtaagacatgcccttctattaataaaactacatttctcaaacttg

SEQ ID NO: 178271 - DNA, 636 bp, Homo Sapiens
gggacctgtgattagactgggcggctggggagaaacagttcagtgcattgttgttgttgctgtttttggtgttttgcttttcagtgccaactcagcacattgtatatgattcggtttatacatattaccttgttataatgaaaaaactcattctgagaacactgaaatgttatactcagtgttgatttcttcggtcactacacaacgtaaaatcatttgtttcttttgactcaaattgtattgcttctgttcagatgatctttcattcaatgtgttcctgttgggcattactagaaactatggaaaactggaaaataactttgaaaaaattggataaagtataggagggttacttggggccagtaaatcagtagactgaacattcaatataataaaagaacatggggattttgtataaccagggataataaaaagaaaacagaagttgatttttaattgatgtttttgaaacttagtagaacaaatattcagaagtaacttgataagaaatgaatgtttctaaagaagtttctaaagattcggaaaatgctccttgtcacattagtgtgcatcctacaaaaagtgatctcttaatgtaaattaagaatattttcataattggaatatacttttctt

SEQ ID NO: 178272 - DNA, 959 bp, Homo Sapiens
  misc_feature (838)..(846): n is a, c, g, or t
  misc_feature (851)..(852): n is a, c, g, or t
  misc_feature (881)..(881): n is a, c, g, or t
ggggtcgcaaaggccgcgtttgcggggccaatgagcgactcgctttccgtgcggtgcggcgagtgaggccccggtcttcctcctcgtcctgccgcagggccagaacccctgacggtattcagctgcgcgtaagtctggccggtgccatctgtctccgcaatgccccccaagaaacaggctcaggccgggggcagcaaaaaggcggagcaaaaaaagaaggagaagattatcgaagacaaaactttcggtttgaagaataagaaaggagcaaagcaacagaagtttatcaaggctgtcacacatcaagttaaatttggtcaacaaaatccacgtcaggtagcacagagtgaagctgaaaagaaattgaagaaggatgacaagaagaaagaattgcaggagctaaatgagctgttcaaacctgtagttgctgctcaaaaaataagtaaaggtgcagatcccaagtctgtagtatgtgcattcttcaagcaaggacagtgtactaaaggagataagtgtaagttctcccatgacttgactctggagagaaaatgtgaaaagccaagtgtttacattgatgcaagagatgaagaacttgaaaaagatactatggataattggggatgagaaaaagctggaagaagtagtgaacaagaagcacgggtgagggcggaaaagaaaaaaccaaaaactcaaatagtggggaaagcattttcctggaaagcctattggaaacaaaccaagtatgggcttggtttttggggtatgcccctgggaaggggggggaattatttggcactgtgaatcggcccttggaccctttccctccccggggatattnnnnnnnnnaaaannaacacaagaacggacaaggataaaccacnaatcccccggttcggggggccggccctctcgggcccctcttcagaagaaaaaatttttttctctaaaaacccgacttt

SEQ ID NO: 178273 - DNA, 830 bp, Homo Sapiens
gggagagcgattgacggaaacagaaattgctttgcggcccgcacggaaattgctttccttcggcttccgttcttggtccatgtgagagaagctggctgctgaaatgactgcgaaccggcttgcagagagccttctggctttgagccaacaggaagaactagcggatttgccaaaagactacctcttgagtgagagtgaagatgagggggacaatgatggagagagaaagcatcaaaagcttctggaagcaatcagttcccttgatggaaagaataggcggaaattggctgagaggtctgaggctagtctgaaggtgtcagagttcaatgtcagttctgaaggatcaggagaaaagctggtccttgcagatctgcttgagcctgttaaaacttcatcttctttggccactgtgaaaaagcaactgagtagagtccaaatcaaagaagacagtggagttacctctgaacaaagaagagattgaacggatccacagagaagtagcattcaataaaaccgcacaagtcctctccaaatgggacccctgtcgtcctgaagaaccggccaggcagagcagctggttttttcccctggaagaaaagaggagccagccattgctcccattgaacatgtgctccaggggctggaaggcaaaaaactcccccgggagcaggaaattttccaccctccctccataaagaacaatcagcccggtggacagacccctttactggaccccctgtgggaaagggcctcctcctccgagccctggagccctaaaaaaaggctaaaaatgcggaccgagccgaacgctttccaagggcccggggccc

SEQ ID NO: 178274 - DNA, 1070 bp, Homo Sapiens
  misc_feature (239)..(247): n is a, c, g, or t
  misc_feature (409)..(417): n is a, c, g, or t
  misc_feature (722)..(722): n is a, c, g, or t
  misc_feature (751)..(751): n is a, c, g, or t
  misc_feature (819)..(819): n is a, c, g, or t
  misc_feature (846)..(846): n is a, c, g, or t
  misc_feature (913)..(913): n is a, c, g, or t
  misc_feature (929)..(929): n is a, c, g, or t
ggatccatatacatatcactaataggcttcttggaattatttagaaaagcatttttaaactggcagtggatgactgaataggcatcatatttctttttgtgtgtcatttaaaagtaacaaaaactgccatttgacagtaaaggctcttggcttctgttggaggcatgggaaattgtctcaatttgtacagcttgtagattggaatttttgtaaataaatttgtttgcacattgtatgcnnnnnnnnnagtttaaatatactggcacgtgtacggtaggaaattattttctggtaaatccacgctgcattttataataacttgagttgactaacctgaattgaaacctcattaccaattaaataggggttcctcaacaggccctattccctatgtagaaagaaaataaannnnnnnnnaactaaattggacaaaaaattctaccaccagccccttggtctggattttaaagaaataagaattggtgctgaaagaattttaagaagtgggaaaagcaaacccatttttctttcccccttccaccttttcctcctttctttccaggttccccccgggaaggtccattttttttagacccaccttttttaaaatttcctgggttgggcaaaccactcctgggtggctttaagggataaatattggcgtttaaataccaaacttaatttctccctggaatgggcaatccacggttttttaaagaacnaaagggaactcccttcccggagatatacncaaagggggaaaataacaacaccatttttacattgggggagaaagacttttttcgctgggcactcccncgctacaacgcggaagaacaaacatanaaacatttgtgtttagaccaatttcccctaaccccgccggagagatttatttagtccgcgcccgcancgacgcacgagccacnccagcatccgaccctctcttcgataatcgtttgtgtctggagcaccgccgccctcgcgcgacgcgcccccgagacacaagaggattttatctcagaaaacacaatatttccccgttctgggggcgcccgcgccgggccgct

SEQ ID NO: 178275 - DNA, 429 bp, Homo Sapiens
  misc_feature (391)..(391): n is a, c, g, or t
atgacatacggttctctgcctttgaatgtaagtgtccccagggcaatctcaggcaagcctgcaaacccatcctgactctcagtgtttttttgccaatctggatctctttcctgagctccaaatcaactcattcctagatagctcaccctccagatttagggacatcgaactcagtatgtctaaagctgagccttaccatctgcccctctccaaaccgcctctatgacattctgtcttagagaattagagctacctgggtttcccaagtgcccaagtcaggaaacccaggcatcatttatttttaataaatgttttattttggggaataaatttgggttttacaggaaaaggttgcaaagataatatggggttccttataccccttattcangtttctggtaatgttaacatcttctattataccacagt

SEQ ID NO: 178276 - DNA, 426 bp, Homo Sapiens
  misc_feature (406)..(406): n is a, c, g, or t
gactttgcccacaagatgccttgtggagattttattatatagagtgtaaaatgaattgtcagtcaaataaaaagaacactttgttttcttaaaaaccccatgcataacattttccaattgtcttttttaatagttagacatttcaagcattataagaaaaataaggagaaaaaaccagaaactgtaacttcagtacatttcaaacggaatgtccctcaggccaattagaaatgcaagaaaaaatagcttcaattccgttttttttcctttaaaaatacatgttatctgtacaagatacactacagtaaacactggaaatcatattatccctttcattaaatcaaaattatttaattcataatgcggttaatactagatttatttattcatctagttaatctgacanaatattaaggcaatatttaa

SEQ ID NO: 178277 - DNA, 522 bp, Homo Sapiens
ggacacaagaagggtaggagagaaaagccatggccgacaaggtcctgaaggagaagaaaaagctgtttatccattccatgggtgaaggtacaataaatggcttactggatgaattattacagacaagggtgctgaaccaggaagagatggagaaagtaaaacgtgaaaatgctacagttatggataagacccgagctttgattgactccgttattccgaaaggggcacaggcatgccaaatttgcatcacatacatttgtgaagaagacagttacctggcagagacgctgggactctcagcaggtccgatacctggaaattagcttagtacacaagactcccaattactattttcttccttcccagctcttcaggcagtgcaggacaacccagctatgcccacatgctcaagcccagaaggcagaatcaagctttgctttctagaagacgctcaaaggatatggaaacaaaagttgcagaggtgccatgttcagaatacaataataaagtggagtgaaagac

SEQ ID NO: 178278 - DNA, 711 bp, Homo Sapiens
  misc_feature (91)..(91): n is a, c, g, or t
  misc_feature (160)..(175): n is a, c, g, or t
cttcttttccgtgtcgctgtggagcgtgtataggggcccccgttgatggcggcttgtgcgatttgctggcggacgccgcgcgttctgggtngggtgtgtgtttttcccaaagccaattcaaaaaagaagggtttatttttttaatagaaaagatttggtnnnnnnnnnnnnnnnntttttttcaaaccagcttttactttattagagaaaaccttttttccagaagtggattaagattttaaattggtcccatcattaaataaggtgggacaccatatgaatttcattgcactggaagaaatgcaaagcattttttaatataaagtatacagagcattctagtcaactacagctgtgttacagctatgtgttcttttggatttggtccaaagaaacctgagtccgtttccagagagaatgaaaaatgttatagacacctgatcagttactcctcactgtaggatgcacaaaaatgacattccttgtagatcccactgaatccagtttcccaacacttgatactttcctttttcccttcccccaccccagttcactttgggtttcaggttcaattctcgaatcacaggcatccagattttcttcataacaaacacatcccatggtcagatgaactacccagttttccaggatgacatcacctcttctgctcccaaatttcggccatatttaggtccaaatctttaaggcccc

SEQ ID NO: 178279 - DNA, 1331 bp, Homo Sapiens; identical to SEQ ID NO: 6992
  misc_feature (647)..(647): n is a, c, g, or t

SEQ ID NO: 178280 - DNA, 1102 bp, Homo Sapiens
  misc_feature (892)..(892): n is a, c, g, or t
ggggcagtcggcggtcggcgtggggcgctatgccggggcggcacgtttctcgagtccgggcattgtacaagcgcgtcttgcagctgcaccgtgttctgcccccggacctcaaatccctgggcgaccagtacgtgaaagacgaatttaggagacataagaccgttggttctgacgaggcacagcgtttcttgcaagaatgggaggtgtatgcaacagcgttattgcaacaggctaacgaaaacagacaaaattcaactggaaaagcatgttttggcaccttcctcccagaagaaaaacttaatgactttcgtgatgaacaaattggacagttgcaggagctgatgcaagaagccacaaaacccaataggcaatttagtatttctgagtctatgaaaccaaaattttagtctatacaacaaagcttaataagacatgcaaaaatttagaacccctactttaactgtcattggtttttgaaatatatttaagctttgaaaacacctgttattaatgaaatactcttttattttggatattatgattgcagtatatggatcaagatcactagtgacaattgaaaaaaactattggaataatagcacttgtataaaattcagttttggaactaaacagcaaatttctagaattttgctgaaaatgttttaaaatgctattctcatccagccatattagtcttctggcttttctttagcttcatcaaataagcatgttgtgataatgatagatgtacaattccacacaaggttattatttttttaaatacattgtcattctgaacattttatcacttctagtttaataatacatacatgatttttcttctgaatgtctcttctccctgcatcactgttcattcacaatgaaagggtangaagaagctttaaaattcactattttactatcaatctttggtataataaactatacaaaggattaaacccaccctgctcacgtttccccctgttccaacgccgcataccccgcccagccataccacctcccttcatcgaacccgccgccagtactccccccgcgggaatacccccgtttatccgtccccggcgatccctacctacttata

SEQ ID NO: 178281 - DNA, 552 bp, Homo Sapiens; identical to SEQ ID NO: 7022

SEQ ID NO: 178282 - DNA, 819 bp, Homo Sapiens
cgggggaaagtgtctgttcttgtcttttgttcacttttcaaaggggctgtttatttttcatattctgagactccagcaggatgtcttatcaacagcagcagtgcaagcagccctgccagccacctcctgtgtgccccacgccaaagtgcccatagccatgtccacccccgaagtgccctgagccctgcccaccaccaaagtgtccacagccctgcccacctcagcactgccagcaaaaatgtcctcctgtgacaccttccccaccctgccagccaaagtgtccacccaagagcaagtaacagcttcagaattcatcaggagcatgaaaggataaggataattggctcaccttgttccacagcttcacctgcatcttctcatcaaagcctaccatggatacacagttagcttctttcctcttaaccagtgatctgcccatgatgatccctgatagcaaaaggtttcctttctgaagctgccatattgccactgtccaggtggagactgagaaaagaagtcctcagcagtgccacttcccagagctttggaagaaggaccagcagctcctgtccctgggaaccatcaaaaaatgctggtgatgttttctgtgtccgcctgtcacctgggcatgggcttctaacacctgtgcaattgtcacttttctttcactccctgaaaaaaatatctttgcctacgtccacactctcatcgaccacctccgtccccattttataacttagcactacccccccgtacacaatatatgtcggataacaaccccagtgcctaatgtgcccactgcaaacctctcaccatcag

SEQ ID NO: 178283 - DNA, 969 bp, Homo Sapiens
ctgcgagtgccgggcgcctcctgctccgctgtgcgcgcttggggtgggactcggcgggggaggggtcgtgtacattgtcccaccaggcgcaatgtagccgggcggcgcagaggatttcttttttggtcttgagagcatagagtcccttttcatattcacgtgtactcttaagaaagcgtctgttctccaaactggctttccattctccccgtcctaaatggtgcgtggctgacaccgtagtgttttcaaaactggatatggccaggatgctatagcattgtcagtgcatctccttggaaacaatgccatctttgaatgtgagagataaacctagtttcagcatgtctgcagcagagaccagtacatcaggcttattcccacaggaagcctcctaaagcctgtggcgcggcaaccatttccaggactaaataataatgtgtcagatgcctgtgagtggactgcctggccaaatgactcatgaagatattcacggaagaatagtcaaaaaccaaagaaaaggcatattctagaagcaccttcaattccatcgaggatttttgagcagctgaagaagaaagttctgaaaatatgagtgacaggactccagcacattttttttagttgtttcttacattatctttgttaacccatccgcttttgtgtataatattaacgttatttctccactactgcaatggctagtaatttacttaggctcagagttttactctgtatggacagagaaataggaggtaacaacagtgggagaacaaataggaacagttcactgggatgttggtccccagaaattggctttcattgaataattcctaaagggtgtcgtgtgctgaattgctttttcatagtgatgtgctgcttcttgttcatactcttatgactttaatttcacctttatctactcccagcctctgtatatgcctacgtttttaaaaattaaatcctcgtaaa

SEQ ID NO: 178284 - DNA, 716 bp, Homo Sapiens
  misc_feature (462)..(499): n is a, c, g, or t
  misc_feature (617)..(665): n is a, c, g, or t
gggggattagagcctttggaggtcaaagcaaattaagatttttatgtaagaataaaagagtactttgatcatgagacataggtatcttgtccctctcactaaaaaggagtgttgtgtgtggcggccacgtgcttctatgtggtgtttgactctgtacaaattctagtcccaaagatcaagttgtctgaaggagccaaagtgtgaatgtgggtgtcggctgcggcattaaattcatcatctcaacccagagtgtctggtctccctgctctttctgcatggttgtgtccctagtcctaagctttggttctttagggtgactgtggtaagaaggatatttaatcatgacatgcacggacacgtacatatttaactgaaacaagttttaccaaacagtatttactcgtgatgtgcgtagtgcattctgatatttttgagccattctattgtgttctacttcacctnnnnnnnnnnnnnnnnnnnnnnnnnnnnnnnnnnnnnntgaatttgtattaacgcgggtaaagaaggaaccctacaaccaacgtcacaagcgcatacttaaatttgggggcccccctccgccccctaaaaaaacttttctaaaaaacttccgtttnnnnnnnnnnnnnnnnnnnnnnnnnnnnnnnnnnnnnnnnnnnnnnnnnccccccaaagaaagaaccctgggtataagaaattatagggctttggaaatt

SEQ ID NO: 178285 - DNA, 198 bp, Homo Sapiens
attccactttcttctgcctgctttattttatcctttatactttttgtatcctcagtccaatcaagttgacactcaatattaaccatcacaaccacattctgggccattcaaataaaaaaatagattaagaaatgtaaaaatactgaaattatttggaatgtttttctgatcaccatggaattaagctagaaatgatca

SEQ ID NO: 178286 - DNA, 914 bp, Homo Sapiens
gggtggtggatctcaatccggttgttcagggggccggggtcttctttaggaaacgattaaaaggccgcggggtcccctaccttagtagggccccgcgtcgtccaaagggaatgtgtttagagaaactatttgaagggtgcgaagccgggcccccaggctattgcggggatagtgggttgtggcggagtccgaggggagatctttattgactgtaatgtaattttttggcatacaaattacttaagtatatttacaattcttacataatgtacattttagaagataatgtactttgctccatttacaatgacaaactactgtaaaactacattcatgaattagatacaaatcctctacatactaataaaaagtaaatggactgttggttatacattctttaaaatataccttttcacaggtagcaagaaatagtacatgtaataagtctttatgactggaatgatccagaaatatcacaaagcatgagtaaacacatatataaaagtagctcatcatttccaaaagttaacctttagcctttgtgtaaaataaatggtgccaacaatctttataatgtagcaagctttccctgtttaatatccaaaaaatggagggtggggaggttgaagaaaaataagaaaagttagcaaataagatagtgaaaagaccaatgcagagaaaagtttatgtaatcaaatcttgctttgtctccacattatcacattttaagtggataaatttatgtaaacagaaaaagatgtccacaaaaccatatctgtagatgtcatttggaagcatcaagaaattgataagtatgtggtgaattaaaattacttttataatgttttgctttcattaatgtttgttattgcaaaaatgtaagatttcctacaattttgtcttcaaatcccacc

SEQ ID NO: 178287 - DNA, 872 bp, Homo Sapiens; identical to SEQ ID NO: 13266

SEQ ID NO: 178288 - DNA, 777 bp, Homo Sapiens
  misc_feature (704)..(704): n is a, c, g, or t
  misc_feature (712)..(712): n is a, c, g, or t
gcccctgagccccctccaggccccccttcaaagagcagtccccaggcacgggggtccctagaggaacagctgctccaggagctcagcagcctcatcctgaggaaaggagagaccactgcaggcctgggaagtccttcccagccatccagcccccaatcccccagccccactggccttccaacacagacacctggcttccccacccaacccccatgcacttccagtccaccctccagccagcccctcacatgaccctaggaccagcagtctgagagggtaggtaccagaagacccagaaactcttatcgtggcactgttgcagcttcctctgccctggctggaaagactccagaatccagtgtggtgctgtggaaggagcactggactaaaggcttcagtggctgcgtgtcccaggacaggtcatggcccctctctgggcccagcccatttatctataccatgaggtaactgaagtaaggagagcagtgaatgtcaaactgtgtttcttagagccataagccccacatattatccctgaacaagggcagctcctgctttatatatttgatacgtaggggttccatgagagattttgggttttaaaggaatggttttactgcattaaagaaaaaaaatgctttggaaaccagaggcctgggtgatgttaaagtctatcctgtcccacttcctacattctgggactnccgtgaancctggagtagggagagcgagtttgggagctgggactcggggagtcaaaaatagatgagtaattgt

SEQ ID NO: 178289 - DNA, 734 bp, Homo Sapiens
ggattgaaacaagatggcgggttcgtggtgagaagccgtcaaggagtagaaattggtatgcttagaagcagattctaaaagcagtttctcttcagaacatcttttttcataccacttgataagcatcttgaaacaccatggctgtagctgcagtaaaatgggtgatgtcaaagagaactatcttgaaacatttatttccagtccaaaatggagctttatattgtgtttgtcataaatctacgtattctcctctaccagatgactataattgcaacgtagagcttgctctgacttctgatggcaggacaatagtatgctaccacccttctgtggacattccatatgaacacacaaaacctatccctcggccagatcctgtgcataataatgaagaaacacatgatcaagtgctgaaaaccagattggaagaaaaagttgaacaccttgaggaaagacctatgatagaacaacttagcaaaatgttctttactactaagcaccgttggtatcctcatggacggtatcacagatgtcctaagaatctgaatcctccaaaagacagatgatgcggaggttcctgggggaatcaaagagaaatgtgcctcatttgccatttgagaaatgcagtctggtgtattcagtaatatatagtaaagtaataatggataaatatcttttcatatattagaatgtgtacttttatataaagtaattctggatttgacattctcaaa

SEQ ID NO: 178290 - DNA, 663 bp, Homo Sapiens; identical to SEQ ID NO: 13272

SEQ ID NO: 178291 - DNA, 814 bp, Homo Sapiens
ggtcatcagctcagttcaggaaggcctaatatggtaaagtattagatgccttcttagtcatactatcattgggcttacatttctatggcaagcaagtttcagaaaatacatgaacaccatataatctttaaaatatagaacttctaaatacttgaataacatatttaggatacttctacaatgcccagttaattgctagaagttttttccctcaggttttcctggatgatacagcaaactacagaatttgtgcacttactgttgctcaaatttgtgtacttactgtgtgcacatatactgctgcactgtttctcggctgtgaaaaattaaaagcattttttcaacctttgagaaggaaagaaaacaatgaagaatctcctcataataatacagcataacagggtttgtttactgtgccacatcatgggtgtttttaaaacgaaatataaatatatggttagggatagcatttttaggagaacaagtgaccaaaaactaagttacctcttttcaggtcagccaaaaaacgtgaagggaaagtggactttatacaacttagacatttatgtagatagcacagcagactcatgttcaagccagccacctgaaacattataagtccgtcgagggggacagcaatctatggtccatggactgaatccagcctacttttgtatggctctgagctaagaatcgttttaatattttttaaaggttgttaaaacgcaaataacaaagaatacatgatgactctattcttgttctccgacgcgtgggtcgacgatatcccgagaattccgtaccgtaccagccc

SEQ ID NO: 178292 - DNA, 364 bp, Homo Sapiens; identical to SEQ ID NO: 13311

SEQ ID NO: 178293 - DNA, 535 bp, Homo Sapiens
  misc_feature (411)..(411): n is a, c, g, or t
gtttgagctactgtgctgagcctaaatttaacatatttttgaacaatcatagacatgtcctatttttagcaggagctcaaagaaaatgtttgataaggtacagatttattatattttagtccaacccctatatttagcaaatacaaaaccacagtcatgtttacaatgtaaaaactgtagaatagctctgtatactaaaatattattaataatgcagtttttgagaaccaaaatatcagctggctgactttgcttttatgatgtatattaacatcttttagcatgacaataccactaagagaagttcaccattctttcagtatcttttgatttcccagtatgcattactagttggcaaatttattttaatggcagtatggtaagaattcagtcccaaagaggcaaagattncattttgatgaactatttgatcataacaacatgcagcggcaaattttcaattcataaactatttttatcactcagtgaggattactattatagttggcataatcatgagtgataaggttggtgg

SEQ ID NO: 178294 - DNA, 560 bp, Homo Sapiens
  misc_feature (21)..(21): n is a, c, g, or t
  misc_feature (31)..(31): n is a, c, g, or t
  misc_feature (328)..(392): n is a, c, g, or t
  misc_feature (457)..(457): n is a, c, g, or t
  misc_feature (487)..(487): n is a, c, g, or t
  misc_feature (509)..(509): n is a, c, g, or t
aaaaaaaaccccccgtagaanggaataccanatatcctaattattcacccaatttccctgtaagacagacatacatttccactttttcccagttatttaactattaataaatatgtaactatggaacattccttacacattccctccctagtggcccacatgcaagagtttgctggacatacaggtgggagtagcaagcaagatcataaggtctgcaaatgttcaagtctgtaagggataattgttttttaaagcagtggtgcctgtttacacatccacaatgttgtacaagtccctacagatctaacaactggtactgtcagacccnnnnnnnnnnnnnnnnnnnnnnnnnnnnnnnnnnnnnnnnnnnnnnnnnnnnnnnnnnnnnnnnnccaatgctacagaacatctatttatttaaaagccctatttcctcttgtgtagtcttcactatttntctatttttttaaataggaattctctatanttgtgattatgaatccttcatnagttatttgtattataaatgtattctcaagttgtggatcatcttctcactt

SEQ ID NO: 178295 - DNA, 680 bp, Homo Sapiens
tgatccaccacacctggcccttgcaatcttctactttaaggtttgcagagataaaccaataaatccacaccgtacatctgcaatatgaattcaagaaaggaaatagtaccttcaatacttaaaaatagtcttccacaaaaaatactttatttctgatctatacaaattttcagaaggttattttctctatcattgctaaactgatgacttactatgggatggggtccagtcccatgaccttggggtacaattgtaaacctagagttttatcaactttggtgaacagctttggcataatagtcaatttctacttctggaagtcatcctcattccactgttggtattacataattcaaggagaatatgataaaacactgcccctcttgtggcgcattgaaagaagagatgagaaatgatgaaaagggtcgcctgaaaaatgggagacagcctcttaccttgccaagaaaatgaagggattggacccgagctggaaaacctcctttaccaaatggccgactggcactggcgggttttttgctctcgacagtatccacaatagctgacggctgggtgtttcagtttgaaaatattttgttgccttcatcttcactgcaattttgtgtaaatttctcaaagatctgaattaaataaataaaattcatttctacagacccacaaaa

SEQ ID NO: 178296 - DNA, 356 bp, Homo Sapiens
  misc_feature (78)..(78): n is a, c, g, or t
  misc_feature (83)..(83): n is a, c, g, or t
  misc_feature (231)..(231): n is a, c, g, or t
  misc_feature (275)..(275): n is a, c, g, or t
  misc_feature (310)..(310): n is a, c, g, or t
  misc_feature (336)..(336): n is a, c, g, or t
cagatctttgagaaatttacacaaaattgccagtgaagatgaagggcaacaaaatattttcaaactgaaacacccagnccgtncagctattgtggatactgtcgagagcaaaaaccaccagtgccagtcagcatctggtaaaggaggttttccagctcggtccaatcccttcattttcttggcaagtaagaggctgtctcccatttttcaggcaaccttttcatcatttcncatctcttctttcaatgcaccacaagagggcagtgttttatcanattctccttgaattatataataccaacagtgggantgagatgacttccaggaggtaggaanttggccctattatggccaaa

SEQ ID NO: 178297 - DNA, 884 bp, Homo Sapiens; identical to SEQ ID NO: 13339

SEQ ID NO: 178298 - DNA, 519 bp, Homo Sapiens; identical to SEQ ID NO: 13340
  misc_feature (492)..(492): n is a, c, g, or t

SEQ ID NO: 178299 - DNA, 797 bp, Homo Sapiens
  misc_feature (21)..(21): n is a, c, g, or t
  misc_feature (50)..(50): n is a, c, g, or t
  misc_feature (56)..(56): n is a, c, g, or t
  misc_feature (95)..(95): n is a, c, g, or t
  misc_feature (202)..(202): n is a, c, g, or t
  misc_feature (286)..(286): n is a, c, g, or t
  misc_feature (359)..(359): n is a, c, g, or t
  misc_feature (445)..(459): n is a, c, g, or t
  misc_feature (657)..(668): n is a, c, g, or t
ccccttcctacaaatgggganaccccgccaagggacccccgcagagcagnatgggnaagggccgtggcctctgaaatcctgtcacggcattcttncacgtggcctgcgggaagcagaagaggagtctgaggataacctaaaacttcaaatacacaaaatgaaacaaaagaaacaatttaagtatttttttaaaaagtttcancgtcttcgcccaatcacagtgcagcaaggccaattctcgcagaaacccccacgtgtgcacgagtgggagaggggaaagagaaanaaaggtgatcatggaggaaaaaggtactggataaaagtaaacttcaaaccttagggcgggagcactaaaaccnaaatacatgtattatttatagaaaatattttctgttttaatcttttctttttaaacaaggactcatacttaaaaaaatgtttagcnnnnnnnnnnnnnnngttgagaacttttaatttattttaaggactgcaaatgccagtgtaattttttaatttgcagtttctgtaaacaacttgtataatagaaaagcagagaaataaatttccctccccttcaagatgcacctcatgtttgttttaaggtatagcatttagtccagatttgagaaagtttggggtgaacaaggtaagaaagannnnnnnnnnnnggcatcaaatctttctgcctgcctctcagcttgcttcagaagatttaaaaaatcacaatagtaatcaaaacatacataacattgaaacagaaggaaatgctgtggaccacagaactccaagaattgttt

SEQ ID NO: 178300 - DNA, 1324 bp, Homo Sapiens; identical to SEQ ID NO: 13345
  misc_feature (533)..(541): n is a, c, g, or t
  misc_feature (585)..(724): n is a, c, g, or t
  misc_feature (728)..(733): n is a, c, g, or t
  misc_feature (740)..(756): n is a, c, g, or t
  misc_feature (802)..(815): n is a, c, g, or t
  misc_feature (853)..(899): n is a, c, g, or t
  misc_feature (1065)..(1075): n is a, c, g, or t

SEQ ID NO: 178301 - DNA, 313 bp, Homo Sapiens
gggatgaattccgttgtattgtatgtgtgaatataaatatctgaattctcccgggggacttggttttcgtccaaggatgttggcagtggacacttagtttacctcaggaattgcaatcatgtaagactatattcggaaaaaatgctggagtatataattttggatactgatataaaatcatcaagatggaagttaagcagaattgtcacgtgtagtccatagcgcttttatatgcattattctgtaatttgtttgtactgcggcaactttttatactttcaatgtatcatttaataaaaaaaataagcaagtc

SEQ ID NO: 178302 - DNA, 813 bp, Homo Sapiens
  misc_feature (368)..(368): n is a, c, g, or t
ggtcaggaatgtcagcattgacctctccttgccactgttactcagctaaacataacttgccattcttaaaaataaaaaagctcccacccagaaactctagtgatactcagttttgacctcttactgcttccatgtgggacttcttttcagcttttaaccattggaattttctacctgctatgttcctctctggaaaatatcaatttggaaatgctgcctttcaaatcaatgccatgatcatccatattgttgagtttgttgttggtgttccagaagtgtccccattttacaactttatgcacacacctggcaaatcattaacatgagcattcaacagtactgggatgggtggggtgggggtagggggnctcaccaacagaactggccagttgacattgcctgaaaaggcaccacctttaagggccagttgtggggttggtaagcacagttatgaaaatttctatctagcctccgttttgaatggttttaagaaattttgtatatggaggatggaaatgcttatatatttattgaaaatccttttatttgaaattaaaattattttggtatataattgtttgatatttggggagggtttttggagggggagataatgtcactgataaataaaaagctgttgattttgcaaaaaagtactgctagtgactgataaggatgcctttgttttgtacctgaaccaaatccttggttttacctttccttaatccaaaatatttaggcatctgaacatttttcaccaggattttcattatataccggggatttttaatttggtgccaatactttacaatt

SEQ ID NO: 178303 - DNA, 1123 bp, Homo Sapiens
  misc_feature (923)..(923): n is a, c, g, or t
  misc_feature (933)..(933): n is a, c, g, or t
  misc_feature (945)..(945): n is a, c, g, or t
  misc_feature (974)..(974): n is a, c, g, or t
  misc_feature (1023)..(1023): n is a, c, g, or t
  misc_feature (1048)..(1048): n is a, c, g, or t
  misc_feature (1070)..(1070): n is a, c, g, or t
  misc_feature (1092)..(1092): n is a, c, g, or t
ggtgataaggggatcctttcagatgatcatgggctggccgctgccctctggagaaccttcttcaaccggaaatgtgaagaccctcgacatcttgaattgctggtagagtatgtgaggaaacagatacagtacctggactccatgaacggggaggatctgcttctgccaggggaggtgagctggcgccctctagtggagaagaatcctcagagcatcctgaagccccattctccgacttacaacgacgagggactttgatgggctgggccctccgcacggcccgccagctggcttcgaggaacctccaggagagaagtgcctgttggtccacgaccctgcagaaagtggcctgaactgacctctgaacagcatctgtcaaatacctggccccatttgtgttgagtttcctcttagtgtgcccaggagtctgatctgctggggtacagggctgggagaacccctagctctcccggggtgtcctctcccttaggggaagccccgagtgagagtcccccagcactacactccccaaccccccatccagcaactacatgtgactgatagcttttcccaaaggccaaggaagggatggtgtaggttcaaaagggaaaccccccagggcctgctgtggcctaggagcagattgtaatgctgccgagtccggtcggtgaccacgcgttgtccctcggctttcagccatggggttgagttggccattaaaagaaacagagacttctctctgccatggcccttctttattccagggacttagaaacttgcctgagatggtggacgcagtaatgagggcaccgcgcagtcagttagagacggagaaagggaagaggctgggatggtctctgctgctcttgcctctagttcatggagatgtgtctctgttcaggccaagatacagccagccaggnctgtcgtctnggacccagggangccttttgattaccaagggctttcacatnctaagtcatttttggaaggaaggctttaagaaacaaaagtcaacttttntcaattcccagttgaaacttgaatnagggaacattgcttgttttccngttctttgggcttccccttttnatgaagatacttggggagaagagaacatttc

SEQ ID NO: 178304 - DNA, 1004 bp, Homo Sapiens
ggaacaacaaaagcgcttacaaatttggggggcgtgattttagtacctttatttgaagtgtaatcattttaaattattattattttaactggggcagttatcagtggtttaaacaggaactttagtggcttcaatttgtttaagaaacatattaagtttgagggaaaaatttcccatgaaatatttggaacgtaagagtagtattgattagagaaaattaaataagaaacatagtatggtagccaaattttttaaaaaatcttgaacttttctgtaggtcagttttagaactgctgtgaaaagtgaaggttgccctgtggagattaaaattagagttgttttcataactgacagcatggtgaatccatttgagtcaaagtgaagaatttcctcatcaagtgactatacatttgtttttgtgtgctcaaaagaaatactcaaacacagactgatattaaccagccaggtaaattgaacgacaatgtggcattaggtatttggctgtttattggtcgttaaatactatggttttgcaatatgattgatggtaaaagagtgatgtcatattgatactagagtagcttgtttttttagtaggtgtgggaccatctcttttacaagtgcaactcagtctaggacagccatggatgcagtggtctggagttggaccctctgagcccgctggctgccccagtagcatctgcattggtgacccaaggacactgcactttgaagaggtcgccactgggttatttagtgtcttcactgcttttgttaaaaattgtaaaattttgtacacaaaaagttgtgtttttgaatatcaattgtttagacacacctacaatgataaataagtgcctttaaaggcccctctttccatgaaatacatctgtggtttagcaaggaaagtacaaaatagtttatggagtggggataatttttatttgtgtcttcatgtagaaaagaatgaatgtcataataaaatataaaaccttacgtaaggg

SEQ ID NO: 178305 - DNA, 605 bp, Homo Sapiens; identical to SEQ ID NO: 13741

SEQ ID NO: 178306 - DNA, 722 bp, Homo Sapiens
gggaattattccaagaatagtgcaagatatttttaattatatttactccatggatgaaaatttggaatttcatattaaggtttcatattttgaaatatatttggataagataagggacctgttagatgtttcaaagaccaacctttcagttcatgaagacaaaaaccgagttccctatgtaaaggggtgcacagagcgtttgtatgtagtccagatgaagttatggataccatagatgaaggaaaatccaacagacatgtagcagttacaaatatgaatgaacatagctctaggagtcacagtatatttcttattaatgtcaaacaagagaacacacaaacggaacaaaagctgagtggaaaactttatctggttgatttagctggtagtgaaaaggttagtaaaactggagctgaaggtgctgtgctggatgaagctaaaaacatcaacaagtcactttctgctcttggaaatgttatttctgctttggctgagggtagtacatatgttccatatcgagatagtaaaatgacaagaatccttcaagattcattaggtggcaactgtagaaccactattgtaatttgctgctctccatcatcatacaatgagtctgaaacaaaatctacactcttatttggccaaagggccaaaacaattaagaacacagttggtggcaaatgtggagttaactgcagaacagtggaaaccaacaccacaag

SEQ ID NO: 178307 - DNA, 377 bp, Homo Sapiens
  misc_feature (206)..(228): n is a, c, g, or t
ttttcagcttaaaataaatttattgtgcaatacaaaatgtaggcatactggaaaataaaggtacattattaaatatacaaagcaaatgaaagctaaacaacacaaatgttttcatccaaacactaagataaaatgcacaacatttatgctaaaaacaaagtacttcaagaacaatatgcatttcaaatgaaatgttaatgatgccnnnnnnnnnnnnnnnnnnnnnnntcaaatatgctacattgtaaatgcttgaatatcaagaatcaataatggcataaaacaaacccaataatagtgggtactatcaagaactttgtttaaaaaggtgttaagaatactgaaagaatcaaaatatgtccttaaaactggcaaag

SEQ ID NO: 178308 - DNA, 929 bp, Homo Sapiens
cgaccacgcgtccgcgatgacacaagttcagcccagagccggggctatggggcccagcgggcacctggtggcctgagttatcctgcagcctctcccacgccccatgcagccttcctggctgacccggtgtccaacatggccatggcctatgggagcagcctggccgcgcaggcaaggagctggtggataagaacatcgaccgcttcatccccatcaccaagctcaagtattactttgctgtggacaccatgtatgtgggcagaaagctgggcctgctgttcttcccctacctacaccaggactgggaagtgcagtaccaacaggacaccccggtggccccccgctttgacgtcaatgccccggacctctacattccagcaatggctttcatcacctacgtttgggtggctggtcttgcgctggggacccaggataggttctccccagacctcctggggctgcaaggcgagctcagccctggcctggctgaccctggaggtgctggccatcctgctcagcctctatctggtcactgtcaacaccgacctcaccaccatcgacctggtggccttcttgggctacaaaatatgtcgggatgattggcggggtcctcatgggcctgcgtcttcggggaagattggctactacctggtgctgggctggtgctgcgtagccatcttgtgtgttcctgatccggacgcttgcggctgaagatcttggcagacgcagcagctgagggggtcccggtgcgtgtggcccggaaccagcttcgcatggtccttgaccatggcggtggatggcggaggcagcgtatgctcatggtaccgggctcacccttcacctgttgcggtgagctcgcccggtgaaactcctgctgtgatgctgctgttggggccctgtggccggcgcgccatctctgctgacgccca

SEQ ID NO: 178309 - DNA, 865 bp, Homo Sapiens
gggggggcgggcccgtacgccgattccatatgggcgccggcgcggagcgccgcggggcagcgcggggtcgccatggctgagctgcagcagctccgggtgcaggaggcggtggagtccatggtgaagagtctggaaagagagaacatccggaagatgcagggtctcatgttccggtgcagcgccagctgttgtgaggacagccaggcctccatgaagcaggtgcaccagtgcatcgagcgctgccatgtgcctctggctcaagcccaggctttggtcaccagtgagctggagaagttccaggaccgcctggcccggtgcaccatgcattgcaacgacaaagccaaagattcaatagatgctgggagtaaggagcttcaggtgaagcagcagctggacagttgtgtgaccaagtgtgtggatgaccacatgcacctcatcccaactatgaccaagaagatgaaggaggctctcttatcaattggaaaataaaagtatttgccagtggccatcagggctgagggcaagaatatattttttataaggaattgggaattttagtcttttaagcaaagtttacgaatgaagaaatgaaggatggccacaagcgtaaggcatatgtcacttgcctctggacactggttattttatgtttcagtccccaaaaaatgaacatggaaaacaagtggtgctaaactcgagtcacgagatattacaggagagttttagagcttattatttcctgtggccagtgcttgtcctggcagtaaggctctcccctgtaaacaagccagagccctccaaggtaccagactcttcttactacacaggtactaacaggctggcacgttagagttggtggagtcta

SEQ ID NO: 178310 - DNA, 1143 bp, Homo Sapiens; identical to SEQ ID NO: 13799
  misc_feature (260)..(318): n is a, c, g, or t
  misc_feature (918)..(918): n is a, c, g, or t
  misc_feature (920)..(1037): n is a, c, g, or t
  misc_feature (1039)..(1069): n is a, c, g, or t
  misc_feature (1078)..(1078): n is a, c, g, or t
  misc_feature (1082)..(1082): n is a, c, g, or t
  misc_feature (1092)..(1092): n is a, c, g, or t

SEQ ID NO: 178311 - DNA, 525 bp, Homo Sapiens
  misc_feature (181)..(220): n is a, c, g, or t
gggagacaatctaaaaaatatcttaggttggagatgacagaaatatgattgatttgaagtggaaaaagaaattctgttaatgttaattaaagtaaaattattccctgaattgtttgatattgtcacctagcagatatgtattacttttctgcaatgttattattggcttgcactttgtgannnnnnnnnnnnnnnnnnnnnnnnnnnnnnnnnnnnnnnntgcataggacagacttaggagttttgtttagagcagttaacatctgaagtgtctaatgcattaacttttgtaaggtactgaatacttaatatgtgggaaacccttttgcgtggtccttaggcttacaatgtgcactgaatcgtttcatgtaagaatccaaagtggacaccattaacaggtctttgaaatatgcatgtactttatattttctatatttgtaactttgcatgttcttgttttgttatataaaaaaattgtaaatgtttaatatctgactgaaattaaacgagcgaagatgagcacca

SEQ ID NO: 178312 - DNA, 771 bp, Homo Sapiens
  misc_feature (533)..(614): n is a, c, g, or t
ggggactttaaatccacagaagtgtaatgtgccatgctaaagccacaggggaagaaaagaactcattagaaactacacctgttacataccattcggttaaatgatttaaggggggaaatggtgtgaaacaaaccttcaaaaaatcatgaaacaaccttaatgttacaggcaactgaaagctaaacttccctatggctttaggacacagcctttgcataagagccgtgaagaacttggggcagttgcaatttcccagctctattttttataactgcaattaaccctacatctttggcactgattcagatgccaaacattatagttctgcttgattggggcaaattatgggacattcacactatagattattccagaatgagggtatttctagctataatatatacccatgggaaagtttgttcaagatatctgttaaatgaaaataaacaaacaaattttaagccgtattttatgatataccatttcatgtaaaaagagcagtaaatgtaataaacctataataaaaattaccnnnnnnnnnnnnnnnnnnnnnnnnnnnnnnnnnnnnnnnnnnnnnnnnnnnnnnnnnnnnnnnnnnnnnnnnnnnnnnnnnnttatttgggggggcgcgcctccggcccccaaaaaatttttccaaaaccctttgtttgggggcgcggcggcccccagaaggaaaagggaaactgtggccaatactgtgttccccaaggaaaaaccccggggcacatggaataagggggctgtgaatct

SEQ ID NO: 178313 - DNA, 651 bp, Homo Sapiens
ggggtgcagggcgggccagaagccccctcatcggcccgcagctggctggcccagtgctcctggctgggggctcttgcgtggtgagagtaggggtccccccaggagccatgctggacccatgagcctcgctggggcctcctccccaggcagccaatgggccccagacaagcctttggtggggaacagaacctccgcatcgtgtagttttgtgacataaggagacctcctacttgagctgtctgtaccccagaatcaaacacagaacctcagaaccagatttaggacctcagaatcctgcactcaaggtggcaccgacccaatttctgttttatatgttcatgaactttaaacctggaaacatgtcccttactacgcgttttatcaaaaaaaagcttccatatttatctctatccctaaccccccaaaaataggatgtcccattattgaagatatttttaccccccctttccccgactcacaccacccgtaaacccttgtcggccgccttcgcccccttcaaaaaagctttcaaaaccatttccctttggccccccgggaccccgctagggaaggtgaaccatgggcccaaccctgatctccgtacggaaaatcccgggtccattgcccaaggcgctgggcgactcccccacc

SEQ ID NO: 178314 - DNA, 1111 bp, Homo Sapiens
  misc_feature (135)..(135): n is a, c, g, or t
  misc_feature (179)..(179): n is a, c, g, or t
  misc_feature (227)..(227): n is a, c, g, or t
  misc_feature (448)..(511): n is a, c, g, or t
  misc_feature (646)..(697): n is a, c, g, or t
  misc_feature (868)..(877): n is a, c, g, or t
ttggtgggtcgcgcggcatgtggggaaaattgaggggagtgcgtgaggtgtagcgagtgaaagaggtggcagcgcagagtacgaaatcagggtgatgtgtggaagtgtgtatcagacgaatatagtgcacgatanatggggtggaaacaagaagcagaatgcactgttgtagccagtgngagatgaattgagaggtggggggagtactaatcgcgagcgttgtgagnatgttataagtgcgtagggtagtggaatagacgggtgggataaaggcgggagagatgcacacatgtgcccgtatctaatgagaagcggtaaagggcaaggtaattgggagggaagattcgtggtgaggggtgaaatagagtagaaaagggagtggaagggaaggaaatagatagggcggaggagggtgtgcataggtaggcgaaagtgtgagaagaggtgnnnnnnnnnnnnnnnnnnnnnnnnnnnnnnnnnnnnnnnnnnnnnnnnnnnnnnnnnnnnnnnncggagaagtgtagacatagcagggcgatatagcgagagaaggcgcgaggggcggatcgaaaatgatgggataaggaggtaggtagggaaaggagtgtacagagcggcagcggaggatgtggcgaataagtggaannnnnnnnnnnnnnnnnnnnnnnnnnnnnnnnnnnnnnnnnnnnnnnnnnnntggagcgattgtcaacgggcgtcggatacggtggtgtcgggagatgttgacagttatggtcgggggatgggaggtaagaagtgtggtgtagagttaggagcagggtcggttcggggcggtttggttctgaaatagtaggggtgggttctggtaggcactttttattttccnnnnnnnnnnttgtcgttaatatataaacatctcattctctcaaaaaattctacaactatacagctgtttgctccattatttgcataggaaatgaccacaatacaaaaataagagggaaaaagaagcaaaacagcaaccgatttctgcttttcatgtaggtgtgtttccacgtataaacattttgaagcctcttacaaaattatttacatcgtttgtcatctatttacagcttttaagagcacc

SEQ ID NO: 178315 - DNA, 399 bp, Homo Sapiens
  misc_feature (13)..(13): n is a, c, g, or t
  misc_feature (25)..(25): n is a, c, g, or t
  misc_feature (40)..(40): n is a, c, g, or t
  misc_feature (45)..(45): n is a, c, g, or t
  misc_feature (93)..(93): n is a, c, g, or t
agaaaaagaatanaaagccggaganataatttttggaccnccagngggcacccccaaagaaataccaaacattgcccctagctgcctgcccanttcctgtaacctgccccagaagggtgacagatttcctgaaggggaaaggattcagatatgaccttttctttagtccccaaccactagttttaacaaatgtgaattattgaaatgtgaagggacaaaaagaatcatacatttaaactgtcttgttcagcataccaatattgtatgttacaaatcatcatttctaaatctggattgattctgttgtgtttttgactgtttctaaagtaagtgtgtataaaagtctcctttttaaaaagatcatatttttaaataaagcattttttgtagaaagtgcca

SEQ ID NO: 178316 - DNA, 355 bp, Homo Sapiens; identical to SEQ ID NO: 13840

SEQ ID NO: 178317 - DNA, 1045 bp, Homo Sapiens
tacacctaactccttaaagagatgcctttcaaaaacaggtatgctcaaataaagtattctgagagttgcacaagaacagtctggaaatgagccagtgcccccggagagtcaacatttgaacaaaatagcacagttcaaacccttcttctgtggtacttatgtggattagtacaattatgacatcactactttcaaaggaatgattaaaactattattaaaaacttttgtcacaaacagaaatgccctgcaaatcatattattgcacacagggttatcagaagctatgcacatcaagaccttgaggcccctagaagacccaaaatagagaccctaaggccatgcccgtggctgctcctgccagcatgcccagtgccaggtcgctgtcgttgtctcgatagcgctctcgaatgatgacttggttagcaggctgctgtccataaagtcctgcatatgggtactggtagggcacggcatacgcctgcccattcgcagcgtagacaacttgagttcctggcgggtacgcaccaccgtatggcccatagccataagcctgctcaggggccggtgcagcataggccgtgtatggtggaggtgaggaaaccacggatgtctcatcggtcatgactgcagagcccacatacgctgtgtttgtcctagaatcttggagtgtaaatttccaggccaagcaatcatctgtgctttctgcacaaagactaattgttttcccatctcgacaaacaatctggagcatgcagtcttttgactttccatccgggggctgagtatcccgacattcctgccccgtgcggatgttgatgcagtccattggcatgtggaccttatcctcgatattctgccgagtctggtcatcataatagatcaggtgaccatccgaccacagatcaaaccagttcttcttccagcgcttcaaaatagtactctgtcgcagcaaccagccactcttcacaaacgccatctcttcacctgcgaaccagcgtggagaacaccaagacgccacggcgattcctcgcctgctcgcctccc

SEQ ID NO: 178318 - DNA, 888 bp, Homo Sapiens; identical to SEQ ID NO: 14379

SEQ ID NO: 178319 - DNA, 965 bp, Homo Sapiens
ggtgatggagaaggaagatggcgagtcattggaattttttgagactcaatttattttatctccaagatcactcttgcaagaaaacaactggccaccacacaggcccataccggagtatggcacttactcgctctgctcctcccaaagcagttctccgacagaaatggatgaaaatgagtcatgaacacagaaagtctaagaggagaaatatgatggatgaagagctctgtagatgctgtatagacactaaataagagttgattagggtagtatattatagtcatctgttatgctgtgaaatttggaattcaaaattttgaagtctgtaaattgtgttagtcattaacttagtcacctgttgtattctggatctacacaaaattattttaagtgctcttattaatctgtgaggattaatatacaaaaagtatcctttgagatgaagtcgtgttctcaaaataagggtatattattttctttttctgccttgattttcatcttgcggtttgctttgtttttgtaaggaaccatcctcttgggttggtcacattcagttcacaacagccatttgttttcaagggcaaggctccaagcaggttgttactggtgtttgcagcctgtcagtacttgcagtactggaataggttctaggctagtgtctgcgcgtcactgtggttttagcatgggaggacttatttgagaaatactaccttacttttctatgatttctttttttacagagttatagtgtgtttactcctaagatgacagttctctttgtctatattcagcatctaagacaaatatttaaacattttaaagaaccactgtgttaagtttaggattatttacttaccaaattagaagtttgacttttatgtgttatacacaatcttaaaatttcacgaattcacctttttaatagtatccatgtacctaataaaatcaaagtttaattagccaaa

SEQ ID NO: 178320 - DNA, 366 bp, Homo Sapiens; identical to SEQ ID NO: 14393

SEQ ID NO: 178321 - DNA, 996 bp, Homo Sapiens
gtggaggagggacagacagaggaggctcgtgcaggggaacgccagccaaggagggagcgcctgctccaagggagggggcatttgaggcacagatcaaatgattccatgatgacaaactgcctgtctcaactgaccagattccactggcaaacactccgctgaccttgggcagctccctctgctcccacctcctctggcccttgtgcttctggggctttgtggagtagctggacatcaatgataacactaacagtagccggcctgccaccaagttctttacataggggatgcctatgtctgtgcttcattggcgtcatctcacaaggccctgagctggcaggaaattgaggtctcaaggggaaaagccacctgcccccagtgacaaccaggaagtgcaagactctgaaccaacgcccatgcctgccatccccaaacatgggctcaaaacccccttcccagggacggctgtgtccacccctcagcaggaggaggagaccccacagcaccgggtgaaaggtcctgctggatgctaagcaccgaaacctcaacccggaacaagaccagaacaacctgagcaaacaacaggaccagcgatggctctccctgctggaggattctggaagtcacctggctggaccaagccctctccgtgttctctgtcagcccactcccccagagccgctaggcctgatgtgcaccaaggcaggagctaataaagggctttgagggaccattagaaacacacacaacaacacagcaacaaaaacacgggggcgcgggacccccttttgataatgacttgtacacacgagagagacacactttaaggagtattaatgatcgaccaaagagggtaaccaagctagtctagtacttatataatacaccaaccagacagttgttagcggcacgaatgtttgttaagagatagagacgcaggtggttcctcatatgccccattggtggcgaaatggtcgtcacccccacaccttaaaa

SEQ ID NO: 178322 - DNA, 471 bp, Homo Sapiens
  misc_feature (18)..(18): n is a, c, g, or t
  misc_feature (52)..(52): n is a, c, g, or t
  misc_feature (88)..(88): n is a, c, g, or t
  misc_feature (232)..(232): n is a, c, g, or t
ctgtgtgtccatcaacanattgtactgtgggctcagaaaaccgtgaaagagnccccccaccgtggaaaacgggctcctagggcccacnggaaaaaggaacgttccccgggcattttgtctcccatggaacaggcacgtactgccccggggagtaaatgcggagagttcacgaactgtgcccaacgcatgttatagcccagggtcctactaactactcagtaaaagaacgtantgttgtaatcctccagtgttaagctatagccatgttaaaagtcactgtgcatttattctcagcatcaaataccttgtaacgtcttctctgccttgttagtgcatatttttacttttctgatactgtaaagaatatatccagtatgtaaatgaatgttctataaatcttttgtatagtcattttctctgctccttaaatatcatctctattcagagtataataaaattatgaacttggta

SEQ ID NO: 178323 - DNA, 809 bp, Homo Sapiens
  misc_feature (671)..(671): n is a, c, g, or t
  misc_feature (720)..(720): n is a, c, g, or t
  misc_feature (727)..(727): n is a, c, g, or t
ggaccgggcacccgctcaagtcagacattgccaacatcctggactggatgttgaatcaagatttcaccacagcctacagaaatattacagagttgaaaactctgaaggggttggcactgcatgatatcctgacagagatacacttgtttgtgcatagagttgactttccatcttcagttcgaatacatttattgaccaaaatggcagacattgagtacaggctttctgttggcaccaacgagaagatccagctgagctccctcattgctgcatttcaagtcaccagagacctgattgttgcagaggcctagatgctctgagggccattcacaattctcagggctcagcagtgatgggagaacagaggacagttccaggataaactgctgcctggggctgtgggatgaatcagtcaccccgaatcttggaaaaacccccttccaggagaggatgggcaggcatttaaaaagtaccatttttgtggttgtttggagcagggatgtacaaaataattttaatgtattaactcatactgcctgtcttttataggggaaaaaaataaccttttttattttaaagttataaggtttttaccttttagttgcttggatgacagggaattagcctaccccattttggtctggaacagaagactttcaaatttaatatgnggtccaagtgtcttcctactcaagggtaaacattatctccaaaattacnatttatngattctaatatttgggcattgtggtctgtatcctaatttaaacagaatgttatgggacgtctggcccgaaactattatactt

SEQ ID NO: 178324 - DNA, 707 bp, Homo Sapiens
ggtgtgaactcggatcccttcccttatggcggccggttctcttggtggaaatctgaccccatttccaaggaacccatctccttttccagcttcatcaggctcattggcttcaaatccagcacctttcccggctggtgctcgtgacccaagtatggcttcttttccaagagggatgaatcccactggcacagggatacattggcctgcaggtcccagttcacatgtagtcccctgctcaccattggagaatcagctcactgctctctagaaacgtggcgttggtgaacggaccatgcttccgtagctctgacctgggcagcttggacctggtcatcctctactgccatacctttccctgggggcttgaacacagaacagggagatggacaaccacttcaaagaaagacccaccgaatgcagtttctgcttgactgactgggcctgcagctcccttctcctgggacttagaggtggccagatttaaggcccctctactcatccaactccctcttcactggtactcccaatcaatcaaagaacctcaaaatttaaactgatgtggatgggaatatgggaattagggtgggggtgggggatgaagggaagaaatcactgtgctttgttcggcctggtgtgcaaggatggttggtggttttcctgcattgtatcttttcttactgtttctttaataaatgggatgagagggc

SEQ ID NO: 178325 - DNA, 904 bp, Homo Sapiens
  misc_feature (17)..(17): n is a, c, g, or t
  misc_feature (24)..(24): n is a, c, g, or t
  misc_feature (39)..(39): n is a, c, g, or t
  misc_feature (116)..(116): n is a, c, g, or t
  misc_feature (119)..(119): n is a, c, g, or t
  misc_feature (124)..(125): n is a, c, g, or t
  misc_feature (137)..(137): n is a, c, g, or t
cgcgcggggggtcgtcnctttccngcgtgccgtttttcntttccgccgccttgtcgacagacaaactccttcttttctccccggttgggaaggggcttcaaggggacccttttctncgncattnncctaagttcttngggccggttttcccattgttctttttgatccaaaacgggggccaggcagcaagtcaggggaaagccaaggaacggggggcccagtccaggattattcttactcaggaaccccccccagaagagaaggaaaggcctgattcagtctttgtctggactacatctccccccactgcgagatcaccacaggtagcttgggcttattgttggggcctgtgggaacattctcaatctttctcatcactagaagtccatcgatgatttttccaaacaccacatgcttcccatccagccaatcgcacttagagcaggtgataaagaactgacagccatttgtacttggaccactgttcgccatggaaagcaggcctggagctgagtgtctaagtttaaaattttcatctgcaaatggcccccggtaaatactggcgactccagtaccatctccattaacaaaatctccaccctgaatcatgaaatcctttatgaccctgtggaaggtgcttcctttgtatcctattggaaccccatctttcctgaattctccggtgcagaactgcctaaagttctcggccgtcttaggcacaacgtctgcaaagagctcgatcttcatgcggccaacttcctgaccgccaatactgacatcaaagaacaccacggggttaacaggacttgaatttgccaccgccatggctccgacccggaagcagaagtcgggagcgtgggattccggcgaacctaaagcccggtccgcggatttcgtccggccc

SEQ ID NO: 178326 - DNA, 577 bp, Homo Sapiens
gggtcgatgctttcatgaacatccgcctggccaaagtcacctacacggaccgttgggggcatcaggtcaagctggatgacctctttgtgacaggccgcaatgtccgctacgtccacatcccagatgacgtgaacatcacctcgaccattgagcagcagctgcagattatccatcgggtgcgaaactttggtggcaagggccaaggccggtgggaatttcccccaaaaaactgtaagtgaggccctcagcaagccctggccccaactcggagtcctccagtgatctccggagctagttccctgccctcacaccctgtctggtacccgagaagaaagcagggccaggccagaagctggtgtccaacagacaccacctgtcaaagctgcctttcacagggttccacctcccagactcactctgggacccagaatcctatatgtggccttggggtaggtgacaatccccctttttgatgatctgaatctctgacttattgattatggaacctgtcaagtagttttcaactctcccagtgaggataattaaacatgctcagcctgagccacctctaagtgac

SEQ ID NO: 178327 - DNA, 831 bp, Homo Sapiens; identical to SEQ ID NO: 14446

SEQ ID NO: 178328 - DNA, 676 bp, Homo Sapiens
ggggttcccgcaaggtcgctttgcagagcgggagcgcgcttaagtaactagtccgtagttcgagggtgcgccgtgtccttttgcgttggtaccagcggcgacatgacggggtacactccggatgagaaactgcggctgcagcagctgcgagagctgagaaggcgatggctgaaggaccaggagctgagccctcgggagccggtgctgcccccacagaagatggggcctatggagaaattctggaataaatttttggagaataaatccccttggaggaaaatggtccatggggtatacaaaaagagtatctttgttttcactcatgtacttgtacctgtctggattattcattattacatgaagtatcatgtttctgaaaaaccatatggcatagttgaaaagaagtccagaatattccctggtgatacaattctggagactggagaagtaattccaccaatgaaagaatttcctgatcaacatcattaaagattatgtaaaaagttaaaaggcttatgagcctaagtttgttcctatattaccatatttactgaattttctggaaaagtaactttaataaagtttaatctcagaaattgtcatatctggttttcaagcattgtacaattttgagactgagtaatttaacaataagtaaaaagtggacatgctaaac

SEQ ID NO: 178329 - DNA, 496 bp, Homo Sapiens; identical to SEQ ID NO: 14470

SEQ ID NO: 178330 - DNA, 662 bp, Homo Sapiens
  misc_feature (471)..(471): n is a, c, g, or t
  misc_feature (588)..(588): n is a, c, g, or t
  misc_feature (601)..(601): n is a, c, g, or t
gggagagcggtggtgaaactggcagttgacggctcctgggactagatcccgcgaggtagcccccgaactatttctctacgttttctcttgatcctcccgaaatcttccagatccgcgtagtgaggaatcgtctccaccgtcatggggggcggagacctgaatctgaagaagagctggcacccgcagaccctcaggaatgtggagaaagtgtggaaggccgagcagaagcatgaggctgagcggaagaagattgaggagcttcagcgggagctgcgagaagagagagcccgggaagagatgcagcgctatgcggaggatgttggggccgtcaagaaaaaagaagaaaagttggactggatgtaccagggtcctggtgggatggtgaaccgtgacgagtacctgctggggcgccccattgacaaatatgtttttgagaagatggaggagaaggaggcaggctgctcttctganacaggacttctcccaggctctatctttgccccatcaggtgccaattcccttcttgacatggccagcaagatccggggaggacccactcttcatcatcaggaagaaagagggagaganaacgagaggtatntaataatccagtgaaaatgaggaaatcaaagaattgttgcaaatgagtctggaaaaaaggg

SEQ ID NO: 178331 - DNA, 984 bp, Homo Sapiens; identical to SEQ ID NO: 14489
  misc_feature (291)..(293): n is a, c, g, or t
  misc_feature (295)..(308): n is a, c, g, or t
  misc_feature (310)..(333): n is a, c, g, or t
  misc_feature (336)..(336): n is a, c, g, or t
  misc_feature (338)..(340): n is a, c, g, or t
  misc_feature (343)..(390): n is a, c, g, or t
  misc_feature (394)..(395): n is a, c, g, or t
  misc_feature (400)..(402): n is a, c, g, or t
  misc_feature (404)..(409): n is a, c, g, or t
  misc_feature (411)..(453): n is a, c, g, or t
  misc_feature (461)..(475): n is a, c, g, or t
  misc_feature (482)..(502): n is a, c, g, or t
  misc_feature (523)..(535): n is a, c, g, or t
  misc_feature (607)..(618): n is a, c, g, or t
  misc_feature (641)..(733): n is a, c, g, or t
  misc_feature (754)..(767): n is a, c, g, or t

SEQ ID NO: 178332 - DNA, 983 bp, Homo Sapiens
atgattattatatttttcaatgccagtgctgctcagccctcagcagaacttcagtttccatgaaataaacaatgactatataaaattccacctttctgaaactgcagtctgacctcaggtgaagctcaggtgaaagtttctttcccaagcagcccatctgtgttccatcaagagagtcaaggttctccaagtgaggggagctgtgcctggatcctgcctccaagtcacatgagcactagctcatagtggcagggtgggggtgggaggggcaggtctaaactcacagaagtcaagtctaaagacagtgggtgacccagattgccaatagaggtcaggcctgcggtgctggaacacaggcaggtgtcggcgcaactgtcgcagatagttgaggtctattcgggcaaggcagaggcctggcccctcagagcaagcgggccaccactgttccccaggggtctaccaccatgctgtggccataacttgctctcttctcatggtggcgtccacactgtgctgctgccactacatagcactgggtttcgatagcacgggcccgcagcaacacctcccagtgggctgggcctgtaatggatccaaaagctgaaggataggtaagtatctctgctccagcttgagccaatgccagagagagttcagggaaccgcatgtcatagcagacagctagaccaatcttgcctgctggtgtgctgacaggtgactcaagactgggcccaggcatggtagagttgctttcacacataggcccctgccctggaatctctacgtcacacagatgtgtcttcctgtaagtggccactactgcccctttgctgttcagcagcacgtgacaattgtagattttctgagtctgctcccagtcttggccacgctcatggaaaccacccaaggacagccagagtccacattccctggcaagctgggtgtattcttccaaaagtttcccacccagtggttcagacacc

SEQ ID NO: 178333 - DNA, 738 bp, Homo Sapiens; identical to SEQ ID NO: 64930
  misc_feature (711)..(711): n is a, c, g, or t

SEQ ID NO: 178334 - DNA, 538 bp, Homo Sapiens; identical to SEQ ID NO: 14493
  misc_feature (504)..(504): n is a, c, g, or t

SEQ ID NO: 178335 - DNA, 1182 bp, Homo Sapiens
  misc_feature (395)..(612): n is a, c, g, or t
  misc_feature (617)..(620): n is a, c, g, or t
  misc_feature (626)..(728): n is a, c, g, or t
  misc_feature (730)..(730): n is a, c, g, or t
  misc_feature (734)..(852): n is a, c, g, or t
  misc_feature (927)..(986): n is a, c, g, or t
  misc_feature (1028)..(1067): n is a, c, g, or t
  misc_feature (1108)..(1116): n is a, c, g, or t
aaattccactaccattacctaaagagctgaaagccttaataccatattcctttagggaatagttgcctaaccaaccccataacctatttagatttgaccttaacagaaagggaggtccttacaatgaaacaggtttatgattaaagatgttacaattaaactattctaaagacttacaatatgcttcttagcctaacgttataattgtatcatattacttaggttcaagttctttcttcaaagagtcatcagaataacatggattgaagagacttccgaacacttgctatctcttgctgctgctgtttcatggaaggagatattaaacatttgtttaatttttatttaagtgttatacctatttcagcaaataaaatatttcattgcttatattnnnnnnnnnnnnnnnnnnnnnnnnnnnnnnnnnnnnnnnnnnnnnnnnnnnnnnnnnnnnnnnnnnnnnnnnnnnnnnnnnnnnnnnnnnnnnnnnnnnnnnnnnnnnnnnnnnnnnnnnnnnnnnnnnnnnnnnnnnnnnnnnnnnnnnnnnnnnnnnnnnnnnnnnnnnnnnnnnnnnnnnnnnnnnnnnnnnnnnnnnnnnnnnnnnnnnnnnnnggggnnnnaaaggnnnnnnnnnnnnnnnnnnnnnnnnnnnnnnnnnnnnnnnnnnnnnnnnnnnnnnnnnnnnnnnnnnnnnnnnnnnnnnnnnnnnnnnnnnnnnnnnnnnnnnngnaagnnnnnnnnnnnnnnnnnnnnnnnnnnnnnnnnnnnnnnnnnnnnnnnnnnnnnnnnnnnnnnnnnnnnnnnnnnnnnnnnnnnnnnnnnnnnnnnnnnnnnnnnnnnnnnnnnnnnnnnaaaaagagggaaaaaggggcccccggccgccgcccagagacccaaaaaaagaggggccccgggggaaacaaacannnnnnnnnnnnnnnnnnnnnnnnnnnnnnnnnnnnnnnnnnnnnnnnnnnnnnnnnnnnaaaacacaccaacgggcggggacaccccccacaagaggaagnnnnnnnnnnnnnnnnnnnnnnnnnnnnnnnnnnnnnnnnccccctccaatggtgcggcggcccctcttttatttgacgcnnnnnnnnnccacaccccccggggggagagtggtgggaggaacaaaacagtgttgttatactcgctaacccgggt

SEQ ID NO: 178336 - DNA, 559 bp, Homo Sapiens; identical to SEQ ID NO: 82466
  misc_feature (139)..(192): n is a, c, g, or t
  misc_feature (358)..(413): n is a, c, g, or t

SEQ ID NO: 178337 - DNA, 1066 bp, Homo Sapiens
  misc_feature (63)..(63): n is a, c, g, or t
  misc_feature (333)..(345): n is a, c, g, or t
  misc_feature (380)..(390): n is a, c, g, or t
  misc_feature (527)..(527): n is a, c, g, or t
  misc_feature (535)..(538): n is a, c, g, or t
  misc_feature (544)..(544): n is a, c, g, or t
  misc_feature (548)..(638): n is a, c, g, or t
  misc_feature (956)..(956): n is a, c, g, or t
ccccccaccgccgtgtatccgtctccggggcgcgaatattctgtatattcctcacaggggcanaacaaagtcgcggttatagcacgggcgtgttccacatgtagggggcggagcacctggtcccagttttattatttggggttttctcattttccagaggaaagagcgcccgagaagcgagctcttaaaacaatttttcttccgaaaatattttcccacagggctcgcggcgcgttaaattttctcttatatgagggctcccccccgcgggcctcccctcttgggataaagagtcccggaaaaacggcccctcgagaaaaccctccagtttgnnnnnnnnnnnnnagaaaacgatatcccgctgccctccccgggggggnnnnnnnnnnngggggaggatacccaggcctttagtttctttcccggtttctctcttggggcacccggctacgaaccaaatttcgttttaccctatttggggccgggggccccaaaagaaatggttttgaaaagtttttcgttggggnggtggttnnnncccaantttnnnnnnnnnnnnnnnnnnnnnnnnnnnnnnnnnnnnnnnnnnnnnnnnnnnnnnnnnnnnnnnnnnnnnnnnnnnnnnnnnnnnnnnnnnngagatttaccaaaaactgtttattgcgacttccactggaagctgttaataagccacatggcagccaagagccaggtgtgacctagatcagctggatgcaagtgcctgtcccttcatccacacaacctgctgctcggggaccctgctaggatgcgcttgctggcaaactggctaaaacccaacagggagaaatgatgctactgctcatcatttccacctccccacatcccatgtccaagacaatacaggaaaatgccacaagtacccctccaaaataaacccgcctgcgtctgtctgtcctactgaggagccaggggtntcctacggttttgcaggcaaaccagaggacccaggcaccagcgaggcaccagttcccttgttcgttgttccagtgacctcccctggcagagaccccagttttaaccggtg

SEQ ID NO: 178338 - DNA, 522 bp, Homo Sapiens
  misc_feature (447)..(447): n is a, c, g, or t
  misc_feature (471)..(471): n is a, c, g, or t
  misc_feature (502)..(502): n is a, c, g, or t
gggggagcagtgggcagttcatggtgttagggcactcacccccacagactggcaaaccctgcaggacttccgtggctgaggctgtgaccggaggccaggaatgccgttgggtggattgtgagtgaatgggccctttgagctgccctctagagagcaaatccagtttcctggagctcctgaatgaatatctgtactggctcgctcagatgcagaagctccattgaccatgaggccttgtgaacatcagtggccacaggccagtgtgctgcttggcactgcactagtttaggacctgcagcatgtaggtagcgtcctagtgtttataatacaaagctgctctgcacagcttttctgattcttcttgcaatctcctgaggattatctgccccattttttaaaacgaaggttgggattacccaaggtcatgttaggccagtgagtgttttnggaaaggccaaagcagttcatccntttccgggggggaccacattgtttttgtttncaccagaccacatttttgga

SEQ ID NO: 178339 - DNA, 1026 bp, Homo Sapiens
  misc_feature (257)..(257): n is a, c, g, or t
  misc_feature (331)..(331): n is a, c, g, or t
  misc_feature (744)..(765): n is a, c, g, or t
gacatgacatttgcagtaaaagagaaatgttacttataagttcagtgagaacgagacggaggaggaggctatgatcgagaagtgtaatcatatctatgatgctagtgtgatttcgcgcgtaggtgtcacaaaattaatgatgaccagagtgcaatagaagttaagttatgaagatataagagaatgggcgcacattatattaggatagataattgtagatgggcatatctgttttaagatgcgcggcccgacttatntcgccccagagcatatgcgcgccaccgtgggtagttcaatagccatgatgtgtgtgtagaattatagaaggganttcggcggcgagtggagatgtgaacactataggaaattatagagaggagtggggtgtggagaggggctgcctgtgggtggtagaagagatccagcagtgagaggtctctgaggagaacgagcgtaaataatggtcatagtttattcagcacacggcggagggggagagcgtacgcgggaggaggtttatatagattggtgggagaaacccagcacaccttatagtgccgggacacaggtgtctcctcaggacaccacatatgatgtcccatgtacaagtaaccctaaggggcccggcgcgtgccataagaataggtttagaaaaagtatttgtagggggcggagggggcccgaaaagtttatttagttagagatgtgtagttactttaatttgttttagctgtttttggatannnnnnnnnnnnnnnnnnnnnnatagcaatcatttcatttatttcaggatataatatactatttagatccagggaagatgctaaattataaccttgtttaaatatctttggggtattttgtttttgcaaaggtagtaaaaccagacaaacgaataacacacataaaaatcagatttcacatgtatggctctgtcctactgctaaagatgttacaaagaaacatacttagaataccaccctgttctctcttggggaggctatattcaagatgacaagtactcta

SEQ ID NO: 178340 - DNA, 510 bp, Homo Sapiens
  misc_feature (215)..(254): n is a, c, g, or t
gggaagttgtggttgttaggttcacaccctgttttataaacaacatcaaaatggcagaaccattgctgactttaggttcacatgaggaatgtacttttaacaattcccagtactatcagtattgtgaaataattcctctgaaagataagaatcactggcttctatgcgcttcttttctctcatcatcatgttcttttaccccagtttccttacannnnnnnnnnnnnnnnnnnnnnnnnnnnnnnnnnnnnnnnagattgtgaggcaattattaaatcaaaattaattcatccaatacccctttactagaagttttactagaaaatgtattacattttattttttcttaatccagttctgcaaaaatgacctataaatttattcatgtacaattttggttacttgaattgttaaagaaaacattgtttttgactatgggagtcaactcaacatggcagaaccatttttgagatgatgatacaacaggtagtgaaacagcttaagaattcc

SEQ ID NO: 178341 - DNA, 778 bp, Homo Sapiens
agcaaaccacttctttagtcatctgtcttacctccctgggacagctgttaccttgcagtgttgccgaatcacagcagttacctttgcaatgttgccgaatcacagcagttctgtggagaaacgctggtttccggatccagagccacagaaagaaatgtaggtgtgaagtattaggctgctgtcagggagaggatggcagatggaggcatcaagcacaaggaaaatgcacaacctgtgccctgttatacacacgttcatgtgcacccaagaacctatgactttcttccagttccttctaccaggtccccatcctgctgccagctctcaacatagcaggccataggacccagagaagaatcccagcgttgctcaaagtctaaccatcataaagacactgcctgtcttctaggaatgaccaggcacccagctcccactggactccaattttttttcctgccttatttagaattctttggcgggaagggtatgatgggttcccagagacaagaagcccaaccttctggcctgggctgtgctgatagtgctgagggagataggaatttgctgctaagatttttctttggggtggagtttcctctgtgaggggcttgcagctatccttcctgtgtatacaaatacagtattttccatggttctgcctgcacttactttgtaatgccacggttgagattgagagagatcagtgcagccaggcaagggaactttaaagaattattaggcaccttctccctttcctggaccccagagtcattcctca

SEQ ID NO: 178342 - DNA, 323 bp, Homo Sapiens
  misc_feature (40)..(40): n is a, c, g, or t
ggagggtggactctgcggcgtttccagaacccgagatttngagccctccctggctgcacttggctgggtttgcagtcagatacacagatttcacctgggagaacctctttttctccctcgactcttcctacgtaaactcccacccctgacttaccctggaggaggggtgaccgccacctgatgggattgcacggtttgggtattcttaatgaccaggcaaatgccttaagtaaacaaacaagaaatgtcttaattatacaccccacgtaaatacgggtttcttacattagaggatgtatttatataattatttgttaaattgt

SEQ ID NO: 178343 - DNA, 1180 bp, Homo Sapiens
  misc_feature (955)..(955): n is a, c, g, or t
gggtgtcttggctgttctccatagtggtgttcggctccatcgtgaacgagggctacctcaacagcgcctccgagggggaggagttctgcatctacaaccgcaaccccaacgcctgcagctatggcgtggccgtgggcgtgctcgccttcctcacctgcctgctgtacctggccctggacgtgtacttcccgcagatcagcagcgtcaaggaccgcaagaaagccgtcctgtccgacatcggtgtctcggccttctgggctttcctctggttcgtgggattctgctacctggccaaccagtggcaggtctccaagcccaaggacaacccactgaacgaagggacggacgcagcccgggccgccatcgccttctcctttttctccatcttcacctggagcctgaccgcagccctggccgtgcggagattcaaggacctaagcttccaggaggagtacagcacactgttccctgcctcggcacagccgtaggcctccccggcttgcagaggccggcagccctgtatcacccctggcagtgaggtggcaggagcagcctagtgccagaaatgtccaagatgccagggcatgcagggcagtggaaggctggcttgaggaaccaattcaggttctccactgactcattcattccttcaccgcctcccttcattgattcctcatgcgttcattcattcagtaaacatttattgagcagctgttttgtgcctagtgatgaattaggtggggtccttggctccaggagcccacaggctggggaggagaaaacaaacacatcaatatctcttccaaatggacagccgtggacagttaccaggtaggtagcggccccatacatgggctgccctagaggcgttcatggtccccattgctgagctgtgggtgcagagcaatagcctctcccttcacagcggtgtgaagagtgacctcactgtccttanggttagcatcctggccgaggatgtcacagggctcctggtctggctctgtcctcatgtgctatgtgaccctgacaaacccgtgcacctctctcagcctcagtccacttaccctgaactgaggggtgataatggaccaacctctccaggctgttgtgcccatgaaacaaggccagcccaggggcttagcacaagcatgcttcataaatggaagctccttttggttcc

SEQ ID NO: 178344 - DNA, 813 bp, Homo Sapiens
cggacgcgtgggtcgacccacgcgtccggacgctgatgggaggatggacatactggtgtctgagtgctccgcgcggctgctgcagcaggaagaagagattaaatctctgactgctgaaattgaccggttgaaaaactgtggctgtttaggagcttctccaaatttggagcagttacaagaagaaaatttaaaattaaagtatcgactgaatattcttcgaaagagtcttcaggcagaaaggaacaaaccaactaaaaatatgattaacattattagccgcctacaagaggtctttggtcatgcaattaaggctgcatatccagatttggaaaatcctcctctgctagtgacaccaagtcagcaggccaagtttggggactatcagtgtaatagtgctatgggtatttctcagatgctcaaaaccaaggaacagaaagttaatccaagagaaattgctgaaaacattaccaaacacctcccagacaatgaatgtattgaaaaagttgaaattgctggtcctggttttattaatgtccacttaagaaaggattttgtatcagaacaattgaccagtcttctagtgaatggagttcaactacctgctctgggagagaataaaaaggttatagttgacttttcctcccctaatatagctaaaagagatgcatgtaggccacctgagggtcactatcataggagagagtataagccgcctctttgaatttgcagggtatgacgtgctcagtatctgagaatggacatgtgccccgcaatcattactctctggatgctagaaaagacggatactctgtg

SEQ ID NO: 178345 - DNA, 644 bp, Homo Sapiens
  misc_feature (281)..(300): n is a, c, g, or t
ggatcctggattcagaataatactgtgatggggagccagatccgcagtggtggagagttctaatgttgactgtttgcaggccaaaagatgattgctttataattttaacaaatcattgtcttttagtaacatccttgtttagtgtcttctcaagctttctttactgaggaattcagcttgtgacacagatacatcccactagcttgtgaggtggaactagtaataaagaccttgaatttggattgaaaagtttcctatctttacattgttgaggaagtccnnnnnnnnnnnnnnnnnnnnaattgctcaagaaatgattctctcacaggcttgggaaatcctgttagcatgcagaataatgtggtaactttgtcaatttcccattttatttttttaaataaatatatgatctaaaagccaactttttctcagttttactcagtggaaagataaactaagttttaatgttatttttttaaatttaagcaaaatttatttctgttctttaataaataagaaaatgtggtccactgcattgttgtgatgtgtcttgtgacatttctattttgtagaaactttaaaaaggagaactatgttcatttttcctgtcaatggtttttttgtgttgtagttgtcacctgtcc

SEQ ID NO: 178346 - DNA, 614 bp, Homo Sapiens
  misc_feature (545)..(545): n is a, c, g, or t
  misc_feature (551)..(551): n is a, c, g, or t
  misc_feature (562)..(562): n is a, c, g, or t
taatcccccactcctcgcaggtctcagtgtcatgctgtcttggggcagggtgaaagggtagtggcagcagggcgcccactctggagatcctcaaaaaaggccctcctctgtggctggcagctctgacctttccctgggcttcaaaggaaggctatggagtttgctgtgggccctgcaaccttcccagccactcctgctgcactaaggacttaggatccttttatcacaaatcgggattctctcccccaccccgaattctgtctgcttaaactggaatacacaggagcccttcctggcctggatggtgtctcccagcttccccgcccagcttgcccaccccatagttggtgaggatgccaagtttggtctgagttgtgaccccttcagagtagatgcccggcaggctggggttggccccctggagggtcaggggaccatcttcttaatccctcttttctcaatcctccaacttcctcccctccttcaattatttttttgtaaagttgatgccttactttttggataaatatttttgaagctggtanttctanttcttttggantttttttaatgtaaggttgttttgggggatggagttagaaccttaatgataa

SEQ ID NO: 178347 - DNA, 624 bp, Homo Sapiens
  misc_feature (72)..(85): n is a, c, g, or t
  misc_feature (89)..(89): n is a, c, g, or t
  misc_feature (94)..(201): n is a, c, g, or t
ggaaaaaattttggccggggtgcgtccccactggggccggggccccaaaggaaaggttttaaaaactttttnnnnnnnnnnnnnncctncaaannnnnnnnnnnnnnnnnnnnnnnnnnnnnnnnnnnnnnnnnnnnnnnnnnnnnnnnnnnnnnnnnnnnnnnnnnnnnnnnnnnnnnnnnnnnnnnnnnnnnnnnnnnnactttcatgatcagctttaatctaagggacatgtaaataaaaagatgcatttgacaggacagcagactagttcaagcaggaggttagaccagtaacaacaaccaagaaagcaaagtgctcgtttccatcttggctttaccacacttacaaactgatacccaaataacagaaatgtttctcaaagctgcacaagaattttaaggattcatgaccccactttcattaaatagtcccagaagatagctaaataacattttcagatagaacctcacactggcataagtttcataacaaacaaacctaagatatgctgacagaaatcacatggagtttgcaagcactcaaatagaaaacccaagacctccggcaacaaattagaaaatatgaacagaaatattttaaaccacaagtatttcatccccc

SEQ ID NO: 178348 - DNA, 435 bp, Homo Sapiens
ggggtgaagacatagctgcgggtggctgtgctggtggcgttcaagatgtcgaccaagaatttccgagtcagtgacggggactggatttgccctgacaaaaaatgtggaaatgtaaactttgctagaagaaccagctgtaatcgatgtggtcgggagaaaacaactgacgccaagatgatgaaagctgggggcactgaaataggaaagacacttgcagaaaagagccgaggcctatttagtgctaatgactggcaatgtaaaacttgcagcaatgtgaattgggccagaagatcagagtgtaatatgtgtaatactccaaagtatgctaaattagaagaaagaacaggatatggtggtggttttaatgaaagagaaaatgttgaatacatagaaagagaagaatctgatggtgaatatgatgagtttggacgaaac

SEQ ID NO: 178349 - DNA, 1129 bp, Homo Sapiens; identical to SEQ ID NO: 347
  misc_feature (599)..(599): n is a, c, g, or t
  misc_feature (938)..(957): n is a, c, g, or t

SEQ ID NO: 178350 - DNA, 1081 bp, Homo Sapiens
  misc_feature (885)..(886): n is a, c, g, or t
  misc_feature (889)..(894): n is a, c, g, or t
  misc_feature (896)..(900): n is a, c, g, or t
  misc_feature (903)..(903): n is a, c, g, or t
  misc_feature (907)..(910): n is a, c, g, or t
caggttaaaagcgcttaatgcaacattcagagtgaaaaacccagacaagagatttactgaccttaagcactatagtgatgaactgcagtctgtcatctcacatcttcttcgagtcagagctagagtagcagatcgactctatggtgtatataaagtacatgggaattatggtcgagttttcagtgaatggagtgccatagaaaaagaaatgggtgatggactgcagagtgctggtcatcatatggatgtgtatgcatcttctattgatgatattttggaagatgaagaacattatgcagatcagttaaaagagtatcttttttatgcagaagcattgcgggctgtgtgcaggaaacatgaacttatgcagtatgacttggagatggctgctcaggacttagcatccaagaagcagcagtgtgaggaactggtaactgggactgtgagaacattctctttgaagggaatgactaccaagctctttggtcaagaaactccagagcagagagaagccagaataaaggtgctagaagaacaaataaatgaaggagaacaacagctaaagtctaaaaatctggaaggcagagaatttgtgaaaaacgcatgggctgatattgaacgcttcaaagaacaaaagaaccgagacttaaaggaggccctcataagctatgcagtcatgcagatcagtatgtgcaaaaagggaattcaagtctggaccaatgctaaggaatgctttagcaagatgtaatcctgtgaattgaatctctcttcaatcaaagtgcccacaaacagaagcacaagtaaataaaagaaatttaagtcactacctagtatacctaaacatataccataagtttaataaattcagctttctttaactcaaannaannnnnnannnnnaanaaannnnacctggtcggccggcctcgggcccctcggagaggcctttctaggacccattcggtttgggcgccgcgggggccccagtaaggtaaaggtggaacaggggggccaatagcctgggtttcccttaggaaaaaaccccggggccaatggaccctaagggggccttggggaattt

SEQ ID NO: 178351 - DNA, 960 bp, Homo Sapiens; identical to SEQ ID NO: 831

SEQ ID NO: 178352 - DNA, 607 bp, Homo Sapiens
  misc_feature (290)..(298): n is a, c, g, or t
agcacatgtatgacaagcttctgtcaagcagcttgagttgaaattgatttaagaaaataaatcatgattgttcaaagctgctgggacgttagaattaggccatgatactggtctcattttaactacagtggtatttggcactagtgtaaacttccatataaatcactcttttggaacaacaaagggggagggagaaaaatcacggcctgttaaatgagtaccaaagccgcccaacagtaatgagatgttctcatccttgattctcccagcctcaaacaacacagcttacnnnnnnnnncccttgctcagaaagtacctgtaatttaacaaacagactgcctgtaggtatagtgcaattacaaatgctctaatcattgtacatacatctctcttgatattgcagcatccatactggctttgtaatcattaattttttggcagattgaatgtgctgtattgatatgtatctatgtaattgtattgtatgtctatagctaattcacgttttgaataatgttattttatttacttttttaagagaggagaatgtaaattctgtccagtttatttctgactagggatattttctttccatttagaaaagaag

SEQ ID NO: 178353 - DNA, 486 bp, Homo Sapiens
  misc_feature (71)..(71): n is a, c, g, or t
  misc_feature (205)..(205): n is a, c, g, or t
ggatggatgtaaagaagtaacttgtgtctcatgaaaatcagtacaatcacacaaggaggatgaaaacgccnggaacaaaaatgaggtgtgtagaacagggtccccacaggtttggggacattgagatcacttgtcttgtggtggggaggctgcctgaggggtagcaggtccatctcccagcagctggtccaacagtcgtaccccnggtgaatgtctgttcagctcctctgtgagaatatgatttttcccatatgtatatagtaaaatatgttactataaattacatgtactttataagtattggtttgggtgttccttccaagaaggactatagttagtaataaatgcctataataacatatttacttttatacatttatttctaatgaaaaaaacttttaaattatatcgcttttgtggaagtgcatataaaatagagtatttatacaatatatgttactagaaataaaagaacacttttggcaa

SEQ ID NO: 178354 - DNA, 603 bp, Homo Sapiens; identical to SEQ ID NO: 15152
  misc_feature (418)..(436): n is a, c, g, or t

SEQ ID NO: 178355 - DNA, 821 bp, Homo Sapiens
ggcaaatctctaggaacaatagagattatatcataactctgaagatggactctaaactttggtttacctccatggaaaataaagatttagaaaccaggtggaaaacattcactattaagactattgatatatttttgtaatgttgccacccatgttgaaaaccttaaaactgaatttatgtagaacacacatcttttatttaaatccatctgaactgtcccaaaatgtaatttgcaaagagcttcaaacaccaaaaatataccattttaaggcatgtggtgacaatgctatttgccttaattcattcgttgtttactttgcaaaatttgtgacttttaagtactaacacatttgattgaatgtgtattgaattggaattattatttctaaattcagcatttgagtccttagttgatgattttcttttaaagaaattagtttatttaaaagcaagatagcctgggttgggagttagtgcatatcatcagccctccatctaatgtgattgctaagatgtgcaggataggacagcttagaatgagtgccttgacacctacatatggctgcattccatacctcagtgaagaagccgaaggatgctgacacacagtgatgtggagggcattccggagaaacttttgcaacagtgtattaatgtgattggttttctttttgttttaagctaaacatctaaaacaaatttcaagttaacagttcatacaacttcagatttagtatttattgtttatcattaaaacatattatgttcctagtttttaaaaggaccccaagtatggattaatattatttcttgggccttg

SEQ ID NO: 178356 - DNA, 493 bp, Homo Sapiens
  misc_feature (217)..(346): n is a, c, g, or t
  misc_feature (353)..(355): n is a, c, g, or t
  misc_feature (357)..(357): n is a, c, g, or t
  misc_feature (360)..(377): n is a, c, g, or t
  misc_feature (383)..(383): n is a, c, g, or t
  misc_feature (386)..(403): n is a, c, g, or t
ggggctgtcagtatgacatttcacgggagatttcttgttgctcaaaaaatgagctcgcatttgtcaatgacagtttcttttttcttactagacctgtaacttttgtaaatacacatagcatgtaatggtatcttaaagtgtgtttctatgtgacaattttgtacaaatttgttattttccatttttatttcaaaatatacattcaaacttaaaattnnnnnnnnnnnnnnnnnnnnnnnnnnnnnnnnnnnnnnnnnnnnnnnnnnnnnnnnnnnnnnnnnnnnnnnnnnnnnnnnnnnnnnnnnnnnnnnnnnnnnnnnnnnnnnnnnnnnnnnnnnnnnnnnnnaacacannnanacnnnnnnnnnnnnnnnnnncacccncannnnnnnnnnnnnnnnnnaaaaaacttttctcaaacacatctttcctaaaacccagccccatccccctaaatacacttcaaaacccttccccccatcctttttttctt

SEQ ID NO: 178357 - DNA, 1032 bp, Homo Sapiens
  misc_feature (364)..(376): n is a, c, g, or t
  misc_feature (681)..(692): n is a, c, g, or t
ttgatgggcaaacagtgggtttgtgggggccgcgcctgtgggagagaggcaaaaagggctgggtggccaataattacccgtgtgaaagaggggggtgtatcgtgatgaggggaggggtatattgtcgtgtgtaacataatcgcatccacgccgcggcggggaatggtttaccagtccaaggtgtggggtgtgtggagagctattttctcataaatttgagggcgcgccgtggggggtggggcccctccgtgggtattgggcgccacgggggaaaaaaattcctcttacggccgacccccctcctaaaagtgtttctggagggaaccggttggtagtatggcgcggggtgcgattatatttaacnnnnnnnnnnnnnaccttcccacctttttttcaagaagccggtgatatttaattttggaaacagaaattttgagaagaggtttccctgtgcgagggggggaagcccgacccccccagaccaaagttggagaacaaaatttttttaataccaaaaaggggcccccaaaactttcatggtgggtttgttccggaacactgggggttacccccgggggggtttttattggtgggaattcaaggctttggtcttttgcaggattttttttggaagcagtgtatgaccattttcattttctttttggtggccgttcttctaannnnnnnnnnnnggtatattaaacagtttatttcagtaacattgtaaggcaacaattaatcctcagtaagtcagcaaaccagtgacaagaaattgacaaacactccttctacagcttcctgagacagcaggctggcttgtggccccctgggtggtaacatcttaaggaatcctatcatgtttgtttatatatgctaaactgtaaaaacaaacacttcatgcgacaatcattcttaggtcaaacacaagaacgaactattttgaaatcaattcctcacactttttccctgaatatgcagtactgtactactaacatctaattctgtagaaaataatgcatttgttagtgaccc

SEQ ID NO: 178358 - DNA, 873 bp, Homo Sapiens
ggggaggggaagaggatgtgatcatgcgaccgccagcagaagggaaattgtgaaagcgacctgctgtagaaaaggcggcccacagccacctcagcatgcagaggaggcccagctgctgagaggagttgcctgagagtgacctttgcatctgcctgtccagccagcatggaaccaaagcggatcagagagggctaccttgtgaagaaggggagcgtgttcaatacgtggaaacccatgtgggttgtattgttagaagatggaattgaattctataagaagaaaagtgacaacagccccaaaggaatgatcccgctgaaagggagcactctgactagcccttgtcaagactttggcaaaaggatgtttgtgtttaagatcactacgaccaaacagcaggaccacttcttccaggcagccttcctggaggagagagatgcctgggttcgggatatcaagaaggccattaaatgcattgaaggaggccagaaatttgccaggaaatctaccaggaggtccattcgactgccagaaaccattgacttaggtgccttatatttgtccatgaaagacactgaaaaaggaataaaagaactgaatctagagaaggacaagaagatttttaatcactgcttcacaggtaactgcgtcattgattggctggtatccaaccagtctgttaggaatcgccaggaaggcctcatgattgcttcatcgctgctcaatgaagggtatctgcagcctgctggagacatgtccaagaatgcagtggatgggaactgctgaaaaaccctttcctggacaaccctgatgccttctacaactttccagacagtggggttccttctggtgaagaaatttccaggaatgatgatg

SEQ ID NO: 178359 - DNA, 952 bp, Homo Sapiens
  misc_feature (864)..(864): n is a, c, g, or t
gttcagtttcctttaatgacccaatctcaaggttactcttaaatactagtaaatgcaaaaagaacttgtaaagtggcaaggcatggcctatcaaaagtcagcccaagggcagttttcagccctgcctcacctgggtctagttcaactgacggatgagctgattgatgcgttcaccccgatagccaggtgtgcccatctccttgaggaagcccactctatttttggtagcatgacgggccactgagaggtggaaagggcacaagaaccatgagatctcctggaaatgcttccctgggaaggcaatttcatgaatgaggtcttccaagcaaatgacgccaaacttccccaggtgctcctcaatcactgtattgtctgtcagagggatggtcttattcttgaccttggcttgtccacgtttcaaaatgagttctcggacagacttcagatttggaaatccgccaggtcacataaggttccactatacgcagcatttttagattctggggggtgacttttacaaagacaccactaaaaattttcctttaggcgaagtcttgcaatggttctctgcaccagtaaactcacgccgtcaatcctttcgatgcgtacaacaaaggccaaggaatgtttatctggcaattccaaggcatgaggtttcacttctagtcgtctgagacgcaccttgtcacgtttctgccgccaggaatcatgtaggaatgattccagtcgcttaaacctgagcccttttcctttcttctgctccttctttgccaaaagtgcctgctttgcctgggtggctttgagggcttgataagccttcctctttttcaggagattttctggaaccaaagggatttttctcgnacgcgtggtcgacgatatcccggattccggaccgtacagccgctttttaacacgtttgttttccactaaggtaccccctaaaattggc

SEQ ID NO: 178360 - DNA, 821 bp, Homo Sapiens
ggggatcagtagctgcaccactagaaagatggcggagcaagagcaaagaaaaatccctttggttccagaaaatctcctgaaaaagaggaaggcttatcaagccctcaaagccacccaggcaaagcaggcacttttggcaaagaaggagcagaagaaaggaaaagggctcaggtttaagcgactggaatcattcctacatgattcctggcggcagaaacgtgacaaggtgcgtctcagacgactagaagtgaaacctcatgccttggaattgccagataaacattccttggcctttgttgtacgcatcgaaaggattgacggcgtgagtttactggtgcagagaaccattgcaagacttcgcctaaagaaaatttttagtggtgtctttgtaaaagtcaccccccagaatctaaaaatgctgcgtatagtggaaccttatgtgacctggggatttccaaatctgaagtctgtccgagaactcattttgaaacgtggacaagccaaggtcaagaataagaccatccctctgacagacaatacagtgattgaggagcacctggggaagtttggcgtcatttgcttggaagacctcattcatgaaattgccttcccagggaagcatttccaggagatctcatggttcttgtgccctttccacctctcagtggcccgtcatgctaccaaaaatagagtggggcttcctcaagggagatggggcacacctgggctatcggggttgaacgcatcaatcagctcatccgtcagctgaaactagaccagggggcaaactgcgggtaaattttttatcagtggaaggggat

SEQ ID NO: 178361 - DNA, 765 bp, Homo Sapiens
  misc_feature (258)..(266): n is a, c, g, or t
ggtgaggttaatgagcaaaattggtctttggggccctttttgtccaagccccactgaaaggcctcttcagaaaactattatctttaaagccctactttaactccttaattccagcatacagctaaaactggatgtatattctggcaagtaaaggctgaggactcctctttaatcctcagatctagataactcatgacattttatttgaccaacatagcacatgatgagatatcaaggtaattaaaatagcatgcttgnnnnnnnnntacgtaatctgtttcacctgtaactgtttaagccaataaacttttcaaaatttatgtaatgtggggcttttatgtagcactttacgttttcatgctgcttattgttttattctactgaaaaaaatgaatttcaagattctcaacttttttaatttcaaaaattgtttattgttttgactataggaatacaaaatttcctattttgggagaataagaactctttttgtcatttttggctatgaataaactttctggtcttttgagaccacccatttttatagatcagaatcagaaaacaggtaaacctcactcacacatttggactcatttgaacaaaaatctaggccaaaatactgaaaagcctatgtgtttttttaattggaagtatatgtaaggttaatacattttagtgaacgtgactaacaaagactaatgtgcacattaacagatgtactttttaagggtttatgggaagctgttgcattgctcaaaagctggt

SEQ ID NO: 178362 - DNA, 674 bp, Homo Sapiens
gggacaggacacagctaggttctgaagcttctgagttctgcagcctcacctctgagaaaacctctttgccaccaataccatgaagctctgcgtgactgtcctgtctctcctcgtgctagtagctgccttctgctctctagcactctcagcaccaatgggctcagaccctcccaccgcctgctgcttttcttacaccgcgaggaagcttcctcgcaactttgtggtagattactatgagaccagcagcctctgctcccagccagctgtggtattccaaaccaaaagaagcaagcaagtctgcgccgaccccagtgaatcctgggtccaggagtacgtgtatgacctggaactgaactgagctgctcagagacaggaagtcttcagggaaggtcacctgagcccggatgcttctccatgagacacatctcctccatactcaggactcctctccgcagttcctgtcccttctcttaatgtaatctcttttatgtgccgtattattgtattaggtgtcatttccattatttatattagtttagccaaaggataagtgtccccctatggggatggtccactctcactctttctctgctgttgcaaatacatggataacacagttagattccatgggttttcataataaaaactttaaaataaaatgccccccccaccaa

SEQ ID NO: 178363 - DNA, 390 bp, Homo Sapiens
ggtgcctttgacctattaaagaaggaaagtgggtaatggagtcccagccactcaagagactggatatcccccgagaatggcttgggttatccagctatggacccttggaaaatgaatctaatccttctcactggtttttctttgcaaattcatttgcttttatttttctaataacaataaactctattttccatgttctcagggcccctgggtagacagacacagcttgatttcagagcagacataggcgaagaaaacatggcattgagtgtgctgagtccagacaaatgttatttatatacacatccaaatttgaagagaaaatgtatttctttaggtttcaaacactgtaatagatataaagcaaaaataaaaacctgttgcaaagtt

SEQ ID NO: 178364 - DNA, 1598 bp, Homo Sapiens
gggctcctcccggggtttgtagcggaggaggagcgggcgccatggcggttctactggagaccactttaggcgacgtcgtcatcgacttgtacaccgaagaacggccgcgtgcctgcttgaatttcttgaaactgtgcaaaataaaatattacaattattgccttattcacaatgtacagagggattttatcatacaaactggcgatcctacagggactggccgtggaggagagtctatctttggccaactgtatggtgatcaagcaagcttttttgaggcagaaaaagtcccaagaattaagcacaagaagaaaggcacagtgtccatggtgaataatggcagtgatcaacatggatctcagtttcttatcaccacaggagaaaatctagattatcttgatggtgtccatacggtgtttggtgaggtgacagaaggcatggacataattaagaaaattaatgagacctttgttgacaaggactttgtaccatatcaggatatcaggataaatcatacggtgattttagatgatccatttgatgaccctcctgatttattaatccctgatcgatcaccagaacctacaagggaacaattagatagtggtcgaataggagcagatgaagaaattgatgatttcaaaggaagatcagctgaggaagtagaagaaataaaggcagaagaaagaggctaaaactcaagctatactttttggagatggtgggagacctacctgatgcagatattaaacctccagaaaatgtactgtttgtgtgtaaattgaacccagtgaccacagatgaggatctggaaataatattctctagatttgggccaataagaagttgtgaagttatccgagactggaagacaggagagtccctctgttacgcttttattgaatttgaaaaggaagaagattgtgagaaagcattcttcaaaatggacaatgtgcttatagatgacagaagaatacatgtggattttagccagtcggttgcaaaggttaaatggaaaggaaaaggtgggaaatacaccaagagtgatttcaaggagtatgaaaaagaacaggataaaccaccctaatttggttctgaaagataaagtaaagcccaaacaggatacaaaatacgatcttatatttagatgagcaggccgaaagactcaaaatcaagtcactcacacacaagtaaaaaacacaaggaagaaaacccatcactgtttctgaagaaaaaagaagaatgaggactacatgccaatcaaaaatactaatcaggatatctatagagaaatggggtttggtcactatgaagaagaagaaagctgttgggagaaacaaaagagtgaaaagagagaccgaactcagaaccgaagtcgtagccgatctcgagagagggatggccattatagtaatagtcataaatcaaaataccaaacagatctttatgaaagagaaaggagtaaaaagagagaccgaagcagaagtccaaagaagtccaaagataaagaaaaatctaagtatagatgaaagatgaagaggcagaattgagaggctaacatatttactcttgtctaacttaagagtgccagggaaagc

SEQ ID NO: 178365 - DNA, 424 bp, Homo Sapiens
gggattctgccttccctagtagtagggactgacagaatacacttaacacaaacctcaagctttactgacttcaattatctgtttttaaagacgtagaagatttatttaatttgatatgttcttgtactgcattttgatcagttgagcttttaaaatattatttatagacaatagaagtatttctgaacatatcaaatataaatttttttaaagatctaactgtgaaaacatacatacctgtacatatttagatataagctgctatatgttgaatggacccttttgcttttctgatttttagttctgacatgtatatattgcttcagtagagccacaatatgtatctttgctgtaaagtgcaaggaaattttaaattctgggacactgagttagatggtaaatactgacttacgaaagttgaatt

SEQ ID NO: 178366 - DNA, 730 bp, Homo Sapiens
gggacataatagagatagaaagcacagaaggagcgtggatcggaagagaagggatacttcaggactagaaagaagtcacaaatcttcaaaaggtggtagtagtagagatacaaaaggatcaaaggataagaattcccggtccgacagaaagaggtctatatcagagagtagtcgatcaggcaaaagatcttcaagaagtgaaagagaccgaaaatcagacaggaaagacaaaaggcgttaatggaagaagccaggctttcttagccattctttgcagcagaagatttcttgataaaaaaggattacctttccttgtaaagaggatgctgccttaagaattgcatgttgtaaaaaatctttttggaaaatacagactgtttgtttaccagacattcttgtactttttgcataattttgtaagagttatttatcaaaattatgtgaggttccaaaatatgtaaaaatgataataataaaaaaagattaacatcccttgtcatcttttttaaatatcctatactcttcagtaagaatctgtatattttaataggcaaatctttaagtctgttcccttctaattctgtatcatacatttgcttttgtagaaaataaatgtgtgtttatttcattatttaggggatgtcctcgttgacacttgtataataaatatcctctttatcatttgcagcttttaacactagatactgcacgtgattagaatgttttgaag

SEQ ID NO: 178367 - DNA, 505 bp, Homo Sapiens
  misc_feature (450)..(450): n is a, c, g, or t
  misc_feature (471)..(471): n is a, c, g, or t
  misc_feature (494)..(494): n is a, c, g, or t
acaatttaagaaaaactaattcaagaaatacagcttccagaggatcctttaggatctatgttcttattgcacatggctcagcccgtctagggacatctaccaagaccagatggtcggggcgtgggggcagagcaccggggccacagtgggtaggcactctggccacatcagttcttataatctctctgggctgaagtggctgcttcattgcagggttggaccttgtttaaaaaccagatttgacatttccttaccgaacttcctttcccagcaagaatcctatttgttgggggacttttaaaaaaagagccgagagaaactctgggagggtggttatcacctcctgggctggcagcttggggaagtaaggctttggaagacggcgggcgcaatgacacacccaccgccacaggaaaacatggtcattcagaaggcccaggagaaactgtngggataaataaaacctcctcntccacttgcggcaagtctgtttnagcaaaatccc

SEQ ID NO: 178368 - DNA, 1115 bp, Homo Sapiens
  misc_feature (205)..(219): n is a, c, g, or t
  misc_feature (242)..(242): n is a, c, g, or t
  misc_feature (247)..(312): n is a, c, g, or t
  misc_feature (315)..(315): n is a, c, g, or t
  misc_feature (318)..(325): n is a, c, g, or t
  misc_feature (327)..(337): n is a, c, g, or t
  misc_feature (621)..(621): n is a, c, g, or t
  misc_feature (901)..(951): n is a, c, g, or t
ttaggcgccggctatggtataccgcggggagatgcctcccgatggaaagagcgtgaggacactccgctctgcgatttttttgtgggaggaccgcccggtggccgcagagggtgtatatattatttctcgagggtccccaccccccacgccaatcccccgaagtttttttggggaacccgattttgtcgccttttgtgttttggtnnnnnnnnnnnnnnncgaaggaagagtttgtgaaaggnttttnnnnnnnnnnnnnnnnnnnnnnnnnnnnnnnnnnnnnnnnnnnnnnnnnnnnnnnnnnnnnnnnnnggnggnnnnnnnngnnnnnnnnnnntcgaagcaaaatacagtacaaatttattgactccaatcattcttagtcaacatttaagcaaactgtagacaatggaattgaatacaaataagcaatggattaacattagatagaaatcctattttaccatgaattttcagttcgaaaaagcttattcctaagtaaaatggaaaaatgacttactctgctaaggcatatgacaaaatacacagaattataaaaccattcgtttttcttttaaccataagcatatattcaatggaaaacttgaaatagccttgganctaatgttctgaaaactagtattaactgaggtataactgtgtgaaaaatctgggacagcattaacaaatgaaagagcactgaattctgttattttaaagatttacagtaaaatactttggttccccaaaagactgtcccctaaaaggaatttttaaaaacacctgacattgtaactcattttttctcctccagaatctaaacaccaattttgtcttctccccagtcacatgggaatgccacaagctggagtacccgctgagatacactgaaagagcatannnnnnnnnnnnnnnnnnnnnnnnnnnnnnnnnnnnnnnnnnnnnnnnnnncataaatgaaaacctattttttaaaacttaaagtttagtagtcagtgttaaagaacacttttaaagagtacgtgtcagcattatttaaatcaataatgcatttcacaattattgcagaaacatcactgagacatcgtaaattgtcaaactgacttgtaatccag

SEQ ID NO: 178369 - DNA, 1593 bp, Homo Sapiens
  misc_feature (1080)..(1129): n is a, c, g, or t
caaggtatttgtggaatcgatgaatttgataagatggggaatcaacatcaagccttgtggaagccatggagcagcaaagtattagtcttgctaaggctggtgtggttgtgtagccttcctgcaagaacttccattattgctgctgcaaatccagttggaggacattacaataaagccaaaacagtttctgagaatttaaaaatggggagtgcactactatccagatttgatttggtctttatcctgttagatactccaaatgagcatcatgatcacttactctctgaacatgtgattgcaataagagctggaaagcagagaaccattagcagtgccacagtagctcgtatgaatagtcaagattcaaatacttccgtacttgaagtagtttctgagaagccattatcagaaagactaaaggtggttcctggagaaacaatagatcccattccccaccagctattgagaaagtacattggctatgctcggcagtatgtgtacccaaggctatccacagaagctgctcgagttcttcaagatttttaccttgagctccggaaacagagccagaggttaaatagctcaccaatcactaccaggcagctggaatctttgattcgtctgacagaggcacgagcaaggttggaattgagagaggaagcaaccaaagaagacgctgaggatatagtggaaattatgaaatatagcatgctaggaacttactctgatgaatttgggaacctagattttgagcgatcccagcatggttctggaatgagcaacaggtcaacagcgaaaagatttatttctgctctcaacaacgttgctgaaagaacttataataatatatttcaatttcatcaacttcggcagattgccaaagaactaaacattcaggttgctgattttgaacaattttattggatcactaaatgaccaggcttacctcttgaaaaaaaggcccaaaagtttaccagcttcaaactatgtaaaaggacttcaccaagttagggcctcctgggtttattgcagattaaagccatctcagtgaagatatgcgtgcacgcacagacagacagnnnnnnnnnnnnnnnnnnnnnnnnnnnnnnnnnnnnnnnnnnnnnnnnnngtcaaatactgtctctctgaaaaatgatgtcccaaaagtattttaataaggaaaaaagcattaaatataataaaactaattttagaaagtgataaaggtctcccgaatgcagtaacctcaccactgttaatcacaggtggactccacgcaggcctgaaggggaaaaggatttccctttgagggccaggggttccgaaaaccaaccctttggggccaacattagccaagaacccccatttttcttttagaaaaacaaacccctaacacatcattccataatacactcgcctggtccgggccgcccctccgggccccctcggaaaaaagttttttttaaaacccctttcctttttgggggcggcgggggccccaattaagggaaagtgggaaacgggggcccataagctgggtttcccccaaggaaaaaccctgggtccatgcccccaaggggctcggaattcccc

SEQ ID NO: 178370 - DNA, 1141 bp, Homo Sapiens
  misc_feature (148)..(226): n is a, c, g, or t
gggggggatttccaacccctagtccatggcccggatttctcttgggaacaagggtatggcccaaggttccctttccctattggggcccgcgccccacaaagagaaggtttaaaaaactttttcgagggccgaaggcggcccgacaaannnnnnnnnnnnnnnnnnnnnnnnnnnnnnnnnnnnnnnnnnnnnnnnnnnnnnnnnnnnnnnnnnnnnnnnnnnnnnngaggcttatgactggttcttttacttacaaatattgtttagacacattttcaaatgtcacaccaatcaataataataaggaatggattttatctatattgacagttctttcaaccttaagagtgaactgctacaggtaagattcaatcacatttttcaggagaaagctattgagaccaatatgctttggttatctaataagggtggaatgacttataatgctatttactccaggcaaagagaaaatacacagacataggatcttgatttcaacgtagttctcctccatgtgcatttctctgtccgtttaggtcaatgccaaactggtccaccagtgaacatgtccaccggccctgagctaactcattggtttattattcctgacctaaggtgttttacttcccctctccataggtatctggcactgttgagtgaagccagttaatgggaaggtaaaaatagcaaataagagagtattgtttcccaaatagagaagggaatggtggtagagattctcaaatagagaagggaatggtggtagagattctcagcctccattttgagctgtaacagaataaacaacatttctacattaacccttcacattcatcgtcatctacagatatggcattcacacattctgccagatattctcactattatgaatgtaccccccaatatcaatgcttgtaagaatgtataacaaaatacacgctgtgcagatataaatactctgtaaaaatccacaaaacatccaggggccccaaagaagagaggcataaacagatacaagatgataagtctttcttagcagaaaacgctgcaagtgaagaaactggagtgaagaaagtgggggaaggagttccgaagtgaaacagaggaaagctgctcaggagatgactgcgggatatttatt

SEQ ID NO: 178371 - DNA, 443 bp, Homo Sapiens
  misc_feature (343)..(343): n is a, c, g, or t
ggcacctccatggacacctagccaccctgttgtgtgtccttatgccagttgagctgaatcttttccccagtatagtggaaagactgaggcttctgcctactgagcaaggttgggtgcttcatttgtgttcagtctgaattatgggaaagttagctcttcccagacctaagctgccttctctccctactttcagaagatcctagttccttccttcccgagtgatacccatgaactgccagtagaggcctgctatcgttcccatgtgtaaggaatgaactggttcaaggcgcgtcctacccaggcattttctttaccttatactaattcttacctgaataatgtncttcagattcttgaggagaactcctagttttggttttcaaattacttggagggctgcctaggaatctatctccctctgacataaagtttcctcatcttcc

SEQ ID NO: 178372 - DNA, 770 bp, Homo Sapiens
  misc_feature (641)..(718): n is a, c, g, or t
ggctaaagaaaatgatgaaaattgtggtcctactaccactgtttttgttggcaacatttccgagaaagcttcagacatgcttataagacaactcttagctaaatgtggtttggttttgagctggaagagagtacaaggtgcttccggaaagcttcaagccttcggattctgtgagtacaaggagccagaatctaccctccgtgcactcagattattacatgacctgcaaattggagagaaaaagctactcgttaaagttgatgcaaagacaaaggcacagctggatgaatggaaagcaaagaagaaagcttctaatgggaatgcaaggccagaaactgtcactaatgacgatgaagaagccttggatgaagaaacaaagaggagagatcagatgattaaaggggctattgaagttttaattcgtgaatactccagtgagctaaatgccccctcacaggaatctgattctcaccccaggaagaagaagaaggaaaagaaggaggacattttccgcagatttccagtggccccactgatcccttatccactcatcactaaggaggatataaatgctatagaaatggaacgaagacaaaagagacctgatatctcgagagatcagcaaattcagagacacacannnnnnnnnnnnnnnnnnnnnnnnnnnnnnnnnnnnnnnnnnnnnnnnnnnnnnnnnnnnnnnnnnnnnnnnnnnnnnggagcgtgaaagggaacgagaaaggcgagaacgggaacgagaaagggaaaaa

SEQ ID NO: 178373 - DNA, 1131 bp, Homo Sapiens
  misc_feature (419)..(421): n is a, c, g, or t
  misc_feature (423)..(429): n is a, c, g, or t
  misc_feature (431)..(432): n is a, c, g, or t
  misc_feature (434)..(436): n is a, c, g, or t
  misc_feature (438)..(438): n is a, c, g, or t
  misc_feature (440)..(440): n is a, c, g, or t
  misc_feature (443)..(443): n is a, c, g, or t
  misc_feature (456)..(456): n is a, c, g, or t
  misc_feature (626)..(636): n is a, c, g, or t
  misc_feature (824)..(824): n is a, c, g, or t
  misc_feature (1012)..(1012): n is a, c, g, or t
  misc_feature (1017)..(1017): n is a, c, g, or t
  misc_feature (1021)..(1021): n is a, c, g, or t
gggcaatatttacatttttaatttagtttacagaatggaaccaaaatgtataaatgttatgtttgctaaaacttcacaatgtatattgggtctttgtacattttgcctgacttaccttaaatttaaaatattttttgctatataaactttaacagttattaaacagtgttttctttttgggtacgtattgtttctggatatcaagatgttaaatatatttcttgctattgtgatatgacaagagacttaacttatcttgctctgtcttccactgtacacgctgtatataggggtcaatgtgatgctgctggagacgagaataaactggactagaatagtgcattgtatttagtctgtattgatcatggatgccctccttaatagccatatgcaataaaataaagtacattatttatgannnannnnnnnannannnananaanaaaccatgtcggnccgcctcgggccctccaagaaacctttcttagaccatttcgttttgggcgccgcggggccccagttaagggaaaggtgaaacactggggccataagctgggtttcccctaaggaagaatccctgggtcaatggaactaagtggctttggggaatttccccccccccaatnnnnnnnnnnncggcccccggggggggcaaaacccgaagacgggtttctttgaaaccaaaatccccaaaaaagggaaagttttcctggagagggtccattttaccgcgggaaatcttatttctcaaccagggggaagttctcccaaaggccaagacgcctccgaaataattccgacaaatttctccccggcccccccgncccgcctgtgtgccaatatttttataatagcgaagaaagaaaaataggggcgtgtggtaaatattttcccactcttacagaccatatattttttggggccgcccacacaatgtgggtggaaaaacaccccatctttctctcactaaataagcgggggcgccacttggtggaagtgaagaaaaaacccncgcantaanaaactttgcctgcccactagtggtgaggccgagatatatttctagaagacagcaaccaccctcgttagtttgaacttcgccccaccttcgttgtggtatgtaggtacaac

SEQ ID NO: 178374 - DNA, 440 bp, Homo Sapiens
  misc_feature (374)..(374): n is a, c, g, or t
  misc_feature (384)..(384): n is a, c, g, or t
  misc_feature (406)..(406): n is a, c, g, or t
  misc_feature (415)..(415): n is a, c, g, or t
tcttgttgcataggaaatgcagtacttgcttccagtaattgtattgtaatgtgagaaggtggtagcactaatggttgaatacaagagttaaactaatccacaccagctcaaaaaacctgtggagatttagttgaataagaatggacgcccacagtgattctcaaccaattacaaattttcacagaacacagtaaaactaaaagggtaactatgagagtcaatacaagtatactagaggcacagggggcccggctcataaaaacagatttcagaccaagttattaacacggggggtgtttcgtttcataacagatctcttaccatcactgggaagtgttccatcccctccccctacaatttgaaatggggaaacnggggtttccncgtggggcaggtttcctgtttnggggggggnaagtcccccgtggtttttgcttcgg

SEQ ID NO: 178375 - DNA, 488 bp, Homo Sapiens
agggagtaaggccgctagctccgctgggacagaggcttgagagaactaacggctcggtgccttctccctggtctcagaccatcgtctctgcactgcgaaggcatttggtagcctcaccactgagatactaactagacctagactaggagctttatcaggttctaggaggtcctttaggaagactctcaaaggcaaatccctgatcccccgccccacccttagccctgccctctcaccagagcaaaattcactggggacttttcccaccacacatggaaatctgtccactcggaatacctctgttttccatttcaaattgtagggggaggggatggaacacttccagtgatggtaagagatctgttatgaaacgaaacaaccccccgtgttaattaacttggtcttgaaatctggtttttattgagccgggccccctgtgcctctagtatacttgtattgactctcatagttacccttttagttttact

SEQ ID NO: 178376 - DNA, 1069 bp, Homo Sapiens; identical to SEQ ID NO: 1559

SEQ ID NO: 178377 - DNA, 1069 bp, Homo Sapiens
  misc_feature (695)..(695): n is a, c, g, or t
  misc_feature (886)..(888): n is a, c, g, or t
  misc_feature (893)..(893): n is a, c, g, or t
  misc_feature (895)..(895): n is a, c, g, or t
  misc_feature (897)..(898): n is a, c, g, or t
  misc_feature (911)..(911): n is a, c, g, or t
  misc_feature (961)..(961): n is a, c, g, or t
gggtctcctcgacagggagcctgtccaccagcaggctgcggtcccagcgggtgcgtctgcagctcctccccttgggcagcctggttctcccggaggacctttccttggggccctgcttcatgacgatgctgcctgtgtcaccctctaccatctgtaaacaactgggtgccttccccgaccacaccccaatgccttcccagcttggaagccaaggcagctgatgaagggagctcaggagagccgtcttcagctgggctggggttggggctgctgtgaggaaaacctgccattgtggccctggagagtcaccagcagctcttgggaaggacttgctgggaggctgagagaggctttgggcacagcctgctgtcttttccatttcctaaagtttacttcattgtcttgaggcttccaggttttgtttttgtttttgccaaagtataaaaggcaggtggtgggcggctggcaaggagtgcgggtccccgcccctcttcagtcctgccctcccctcctcagtcctgcccaccccgtgcagcccatgctgaggctgcagtggtgtcgtgggtgttacgtgcaggaacgtggagaccctgacgtgggctcactgcatttggttttcttttcagaacttgggagcccccagggaggggctagtgttggtaggtcctagacgtggttccctccagcctccccanaatcaaccctggtgttgagagaacgtccttctgtccatcgtgagtaacagccttgaggagggtgcagagctctgcacagccatggggcatgtggagctgcctcagtcctgtccccttgggcactgagggagagggcccattcacctttctcctagaatgctggtgtacataaacaaatggatccctggcannntcacnantnnataaaaacttaanaacatgtcgggcgccttcgggccctcgaaaagctttctaagaccatgcgntttggcgcgccggcccccataaggaaagtggacccgggtccataacggggtctccaaggcaaatccggggccatgaactaagggggctgggattccctcaccaataaa

SEQ ID NO: 178378 - DNA, 1124 bp, Homo Sapiens
  misc_feature (14)..(14): n is a, c, g, or t
  misc_feature (60)..(60): n is a, c, g, or t
  misc_feature (66)..(66): n is a, c, g, or t
  misc_feature (77)..(77): n is a, c, g, or t
  misc_feature (114)..(114): n is a, c, g, or t
  misc_feature (133)..(133): n is a, c, g, or t
  misc_feature (217)..(217): n is a, c, g, or t
  misc_feature (273)..(273): n is a, c, g, or t
  misc_feature (676)..(762): n is a, c, g, or t
  misc_feature (767)..(794): n is a, c, g, or t
  misc_feature (803)..(819): n is a, c, g, or t
  misc_feature (946)..(954): n is a, c, g, or t
gacctaagctttgngccgattaattaataggagccttccagctttattagcccttattanggctgncgtattactgnggtgaaacaaaatacctttaaaagttaaaacatcccngatatataagctatttttncctaaggataaagtacctttgagcatgagtgtatcacagctttcattaggaaaacttttcattacatacttgtttaaactctgncttcccagggtaaaaataataaggttgaatcattttattaaaaatactttttaagnaaataactatgaacatctgaatattaaagatataaaaatgcacataattcatatttcaggtggtatttgcattcagtgccttactggtattctcagaacattttaatgatttctaacatttcttaacagtcatagatatatacattttcattttttgtacttgaatattctaaataaaactgacatttactcttgacaaataaaacatatatttactaaaatgtgtttaattttcctttctgaaaactctcattttaaaaacgttcatttaattatgtatttgaattattttggagatgaggtattttatgagtattttcagacaatgaaacttattagtctgtgtcagattctgagcaatcatagagtcatctaagttgtaaataaaaccttgcatagcacnnnnnnnnnnnnnnnnnnnnnnnnnnnnnnnnnnnnnnnnnnnnnnnnnnnnnnnnnnnnnnnnnnnnnnnnnnnnnnnnnnnnnnnccccnnnnnnnnnnnnnnnnnnnnnnnnnnnnctttggcgnnnnnnnnnnnnnnnnnaaaaaatttttaaaaccattccttgtggggcgggggcccccaaaaggaaagaaaaacgggcccaaagtggtttccccaagaaaaaccggggcccaagaaatagggcgttgggaattccccaccaatnnnnnnnnncccgcggggggggaaccccaaagggtttttaaaaacaatttcccgggtgggggttttcctggaggggtttttattggggaatcttcatctcaagagggaggccccaaggggagccctccatatatacaaaatttaccccccccgcccggggccttttttattggaagaaa

SEQ ID NO: 178379 - DNA, 766 bp, Homo Sapiens
gggagcacacaggaaacccctaactttcctataccccacccgcctcttcccctttctgtcccgggatacctggcggcaagagacttcttggctattgtccatgctcccagaatcaagcataaatgccagacacggcgattgagaagccaatcagtgaaccctttggcaaagcccccatccacacctggcactcccctctaccaatccctggcacagggttcctggagagcaggtgctgtacattttacagctttacaatggggctgttgacagccataattagggaggcatgaattatgcggctataatgcagagccctacaattaaggcgggaatgaggggctggaggcagcaaacggaatctgccctatgagcgtggctgttgagtcctgtctcctgggtctgactttccgtaatatgattggggtacagtagaggtgattaatggggctggcatctctctttggcctgaggttctgtattctgggaaaggtacacagggtggagtagggagaagctgccccaggaggcgatgtagtggtggaaagaagaggcagagaggtcgtcgtcgtcgcccagcagcaagggctgcaaaatagtagaactcgtggttgctttggacaggtgtgatttgtgcaagccaggttcaacccttgcctcaagaaatcagatgggaccaatttagtgtccttccacctgtgagccaagcccccatttgaggacatctatcgtattcttgtgtgctgggtctcaaatagaattttta

SEQ ID NO: 178380 - DNA, 979 bp, Homo Sapiens
  misc_feature (50)..(130): n is a, c, g, or t
  misc_feature (663)..(671): n is a, c, g, or t
  misc_feature (774)..(774): n is a, c, g, or t
  misc_feature (953)..(953): n is a, c, g, or t
agtcgacggtaccggacatatgcccgggaattcggccattacggccgggnnnnnnnnnnnnnnnnnnnnnnnnnnnnnnnnnnnnnnnnnnnnnnnnnnnnnnnnnnnnnnnnnnnnnnnnnnnnnnnnnttctttttaaacataaaagttttaaattggtattaactctgtactctggccctagattgttttaggcttctgttctgtaatcatgagtttggttggagatattctccatagatgatcttctactgaaatgcctaaagaagtcacaggctggcttctgttttattcagggatttttttaaaaagtcaatcagaaaagggatactggagcttcttcatgtatgtaacagcatattaaactggagacagtgatgaatcagctacaaaggtaatattgtattaaaatcatgtttaagatagctgcttttatgtgtattttatattgcatgcttttgtaaaaacatgctgggtgatgaaagattagttttagagagaaaatgttcatctgtgcagaggatgcattttcttccattaattctggaaaaaacgttcacagttatatatatggtattttgcaaaaggactattaatagaaccttttgagatgaattaatgtaagaatattttttaaataggcttactgtcaaattgcaacnnnnnnnnnagatacagagtggaaaacagtgctaagtcatttggcacctccttacaaatatttttcatggtcacatttatttaatgttactacatttctgaatttttgaaanatgtattttatcataaaatggcatttattttaaagggttgaaaaactgaccacagtcaatttccgaaaatgggactgaaagtctgaaataaggtcatttgcattttaaaaaagcatattaactggtacctgaactgaatgaaggggaaggggttacttttccacttggaataataagcnccttaattttccataaaacggaaaaa

SEQ ID NO: 178381 - DNA, 868 bp, Homo Sapiens
  misc_feature (558)..(558): n is a, c, g, or t
gggttgccccagatgactgctgaagacaccagctgtgggatgtcaagtaattccagggacccccagctgggagtccccgtctgtgtcacttgccacacactgcctcaacctccccgccccattttcagcagggtttgggcttagctacagagcccaagagggtcagccctgcttatcatcataggcccagcaggctgatctcgagcagcgataggacagctccctgcaaagccatcttagcaactttctcactgagaagcaggattcagagctgctctccccagttgcaccccctgactcatcttccagctggctcttctctcccatcctactcccttctgtctccctgccctctgccatcctgaaccatgccttgcttctaacctgcctggtcaagttttgtgaaacttatcctgctgtctcgggctggcacccatatgtgctcaccatgtgtaaggtgacatttccaaatgcctttgtgtgataatgatgatgaatttggttcctagtctcttcttcattgcccttcctcaccagcaatctgcactttcccatcangcgtcttagtctcatttgtaagtgcataagataatcccagtgatttttccaagcccaggaacataagggattgcttttttcactgggtctttactaactcctcctgtatcccactcagaatttccaaggacaatccccagcacctcttgggaagggcccaggccagggtggtatccaccctgagggtgcagggaagttttgaaaaaccagcccttgaaccccaacaatgggagaagacacgcctaattctctctacttatagaaaatccccacaacctcttccccccggggggtgcggtaaaccccccac

SEQ ID NO: 178382 - DNA, 893 bp, Homo Sapiens
  misc_feature (45)..(84): n is a, c, g, or t
ggcaatgtaattataatgtgggaagtgtgcatgaatgagagagannnnnnnnnnnnnnnnnnnnnnnnnnnnnnnnnnnnnnnncttttaatagtttatgccagcaatctttgcttgaatgtttaacgatgccttcagtgtgatgctggccaatagatgattgcagtttaaaatgtcattattgtgcaggcttggataactaacattccatgatgtagcttgtttctgatgagatgattgtaggtacatttttctcattatccaatcatctgtgggatacttagttttctaatgtgccattatctatttttattctgcagttatgttcaaaatacagtacatattttaaaatagaataaattgttaaacataaaattttaaaagtagtagatgtgcgtaagaaaactttgtaaaatagttatgagtcctacccagtagcaacttctggcattcaagcaggattccactatgtaaatatctgtaatgcatttataataagttgtgtagtttgtcctgcatccatactacactatttgctaaagtctcagtgccatctcctaatgagactgacattttaaaagtctgtatggaatatccttgataattcaaggaaatatccctcctgcctaagttccaaactgggaaacattcaaattatataaatgacatttcaaggactttaagtatgaagataatgggaattttattgttttgctttttaaaatgagagcatttttatttgataactttcctctttaaatttcttaatttttaactaatttcattatttctaaagtaatcagtttttcaaatcatgatttcgatatcattattctaaggagttatctcaaaggcacaaaatatgaattctgcaagaaggctatttctatcgc

SEQ ID NO: 178383 - DNA, 815 bp, Homo Sapiens
  misc_feature (17)..(17): n is a, c, g, or t
  misc_feature (42)..(42): n is a, c, g, or t
aaccgcacctagagttncagtgaataaaccccattttctccnaagaattccctgaatgttacagtatgaaatcccagaaacattatgcaggctttctaaagtaaaaaaatatcccaatgcctgaaaataaacatctttacagttataattctatttcttaaaccttttgggttgtggggtggaaggctgtcatgaaggagaggttatagtttatagataagttattaaaacaactctctctggtacatttataaagattttctttttgcagtaaataatttaggtcaaagtgatgacctcccatgctctaattctgattgattaaaccaacctgaagggtaaactggagactctttggcctgttagtcaataacaaaatggtttgtaaagaaaagaaaaaataaataccatatacaaataagtataactagcattcaagtctgttgcacctgtgtgttttagtgaaagggagaatgaaacttgtatgcatttgacgtgagcaggtattcacacagctaggaaacaggaaaagacggtaggatggcaacatcaccttctattgcacatttagtttaagacagcactttccgttgaaacacaactaccccaatggcatagtcttgtgatgtgggacagctaacgtgatggacgtctgcgcagcaggcccgaggttaggacggccactctgttagtgcaggtgagtgtaggtgcctcctcagctacactatctggaggatgtcacctgagtgcaactgggcaggcccttccccaacacatgatgtaagtcagccacgccaaaaacaaaggcaaccccc

SEQ ID NO: 178384 - DNA, 768 bp, Homo Sapiens
  misc_feature (47)..(47): n is a, c, g, or t
ggggttcccgtctggataccagcttccttcagcagcgcaggcggtgngtccctgaggcccgtggaaggagtcaaacttgcgggaattttgcagtttatctgcagggctgttgtttccagcaagacccaaagctagaaaaggaggaggaagaaactgacccgatcagtgccagaagtcattgtattcaaagaagaataagcaagaaagaaaagaaggaaggaagagaggtagacagatacaagatgaaatcctgtcaaaaaatggaaggaaaaccagaaaatgagagtgaaccaaagcatgaggaagagccaaagcctgaggaaaagccagaagaggaggagaagctagaggaggaggccaaagcaaaaggaacttttagagaaaggctgattcaatctctccaggagtttaaagaagatatacacaacaggcatttaagcaatgaagatatgtttagagaagtggatgaaatagatgagataaggagagtcagaaacaaacttatagtgatgcgttggaaagttaatcgaaaccatccttacccctatttaatgtagtttaccttgatttttatctgatattaacaataccatatagcttgctttttattagcattttcccgatattcctttgtccatatttctacttataacccttttgctattaatggttttagatgtatcctctgttatctgcatctcattggttattgaattttgaacccaatctaccagtcctctggtcttttaataaaaggacctttacccc

SEQ ID NO: 178385 - DNA, 787 bp, Homo Sapiens
  misc_feature (139)..(178): n is a, c, g, or t
  misc_feature (767)..(767): n is a, c, g, or t
tcgacgtgtgcagaagtcctggtaatctggtccttgttcccgtctggataccagcttccttcagcagcgcaggcggtggtccctgaggcccgtggaaggagtcaaacttgcgggaattttgcagaagtcattgtattcnnnnnnnnnnnnnnnnnnnnnnnnnnnnnnnnnnnnnnnnggtagacagatacaagatgaaatcctgtcaaaaaatggaaggaaaaccagaaaatgagagtgaaccaaagcatgaggaagagccaaagcctgaggaaaagccagaagaggaggagaagctagaggaggaggccaaagcaaaaggaacttttagagaaaggctgattcaatctccccaggagtttaaagaagatatacacaacaggcatttaagcaatgaagatatgtttagagaagtggatgaaatagatgagataaggagagtcagaaacaaacttatagtgatgcgttggaaggttaatcgaaaccatccttacccctatttaatgtagtttaccttgatttttatctgatattaacaataccatatagcttgctttttattagcatttcctgatattcctttgtccatatttctacttataacctggtgctattaatggttttagatgtatctcttggtatctgcatctcaatgtttattggattttgaaccaatctacaagtctctgtcttttaataaaagaactttacacatttgtaaaaaagaggtttcttgggtaagatataaaatggaaaaaaggctaaantaatatgtggaatatcctat

SEQ ID NO: 178386 - DNA, 648 bp, Homo Sapiens
aagtagaaatatggacaaaggaatatcaggaaatgctaataaaaagcaagctatatggtattgttaatatcagataaaaatcaaggtaaactacattaaataggggtaaggatggtttcgattaaccttccaacgcatcactataagtttgtttctgactctccttatctcatctatttcatccacttctctaaacatatcttcattgcttaaatgcctgttgtgtatatcttctttaaactcctggagagattgaaatcagcctttctctaaaagttcccttttgctttggcctcctcctctagcttctcctcctcttctggcttttcctcaggctttggctcttcctcatgctttggttcactctcattttctggttttccttccattttttgacaggatttcatcttgtatctgtctacctctcttccttccttcttttctttcttgcttattcttctttgaatacaatgacttctggcactgatcgggtcagtttcttcctcctccttttctagctttgggtcttgctggaaacaacagccctgcagataaactgcaaaattcccgcaagtttgactccttccacgggcctcaggcgacgcgtgggtcgacgatatcccgggaattccggagccgctaccagcc

SEQ ID NO: 178387 - DNA, 873 bp, Homo Sapiens
gatcgatttacggccgcaggagaaaaaccaagatttcactttcaagatggaaagtccgtcagactcagctgtggttttacctagcactcctcaggcctctgcgaatccatcatctccctatacaaatagttcccgaaaacaacctatgagtgcaacacttagagaaagattaaggaaaacaagattttcatttaattcctcttacaatgtggtgaaacgtcttaaagtagagagtgaagaaaatgatcagaccttttcagagaaaccagcatcttccacagaggaaaactgtttggaatttcaagaaagttttaaacatatagacagtgaatttgaagaaaatacaaatttgaaaaatactttgaagaatctcaatgtctgtgaatctcagtcacttgattctggatcatgcagtgctctccaaaatgagttcgtgagtgagaagcttcctaaacaaagattaaacgctgaaaaagccaaatcggtgaagcaggttcaggagaaagaagaccttcttcggaggctaaaactagtcaaaatgtatcagatcaaagaactgatctggtctcaattacaggtgctacataaacgaagcggagaagctgtacccagctctggctttatgacgtcgcagtcagcctgtgtctgaagagaaccaagaaactaggccttactcaattgatagaccactatgggttcgactgactacttactacactataacagaacgcgacagaccgaactcaccagagggacaatccctgaatggggcccagagacatctccgagaatggaccacccacagtcaaaagacacttaggcacacccacacacccccgagaccgaccacgcccgcgcccccggcgacacgcc

SEQ ID NO: 178388 - DNA, 1095 bp, Homo Sapiens
ggggtggcgggcggctccgggagccaacatgcctcggtatgcgcagctggtcatgggccccgcgggcagcgggaagagcacctactgtgccaccatggtccagcactgtgaagccctcaaccggtctgtccaagttgtaaacctggatccagcagcagaacacttcaactactccgtgatggctgacatccgggaactgatcgaggtggatgatgtaatggaggatgattctctgcgattcggtcccaacggaggattggtattttgcatggagtactttgccaataattttgactggctggagaactgtcttggccatgtagaggacgactatatcctttttgattgtccaggtcagattgagttgtacactcacctgcctgtgatgaaacagctggtccagcagctcgagcagtgggagttccgagtctgtggagtttttcttgttgattctcagttcatggtggagtcattcaagtttatttctggcatcttggcagccctgagtgccatgatctctctagaaattccgcaagtcaacatcatgacaaaaatggatctgctgagtaaaaaagcaaaaaaggaaattgagaaatttttagatccagacatgtattctttattacaagattctacaactgacttaagaagcaaaaaattcaagaaactgactaaagctatatgtggactgattgatgactacagcatggttcgatttttaccttacgatcagtcagatgaagaaagcatgaacattgtattgcagcatattgattttgccattcaatatggagaagacctagaatttaaagaaccaaaggaacgtgaagatgagtcttcctctatgtttgacgaatattttcaagaatgccaggatgaatgaagagtttactaaaagtaaccatctaaagagcttgtggccaaaccagcagaacattcttctcttcaaaggatgcaatagtagaaagctactttattttaaggaaaaaaagtaaaacttcgttctttatcaaccctcctggcctggaatcaaaattttttaattatttctggaaactgcttggctgtcttaaaggcggaaattcttttaagtat

SEQ ID NO: 178389 - DNA, 799 bp, Homo Sapiens
  misc_feature (129)..(148): n is a, c, g, or t
  misc_feature (724)..(725): n is a, c, g, or t
  misc_feature (732)..(732): n is a, c, g, or t
  misc_feature (735)..(736): n is a, c, g, or t
  misc_feature (740)..(742): n is a, c, g, or t
  misc_feature (744)..(750): n is a, c, g, or t
gggagtctggcctgggcgccgcgggaacgctgtcctggctgccgccacccgaacagcctgtcctggtgccccggctccctgccccgcgcccagtcatgaccctgcgcccctcactcctcccgctccatnnnnnnnnnnnnnnnnnnnncagtgcggcggtgtgccgggctgaggctgggctcgaaaccgaaagtcccgtccggaccctccaagtggagaccctggtggagcccccagaaccatgtgccgagcccgctgcttttggagacacgcttcacatacactacacgggaagcttggtagatggacgtattattgacacctccctgaccagagaccctctggttatagaacttggccaaaagcaggtgattccaggtctggagcagagtcttctcgacatgtgtgtgggagagaagcgaagggcaatcattccttctcacttggcctatggaaaacggggatttccaccatctgtcccagcggatgcagtggtgcagtatgacgtggagctgattgcactaatccgagccaactactggctaaagctggtgaagggcattttgcctctggtagggatggccatggtgccagccctcctgggcctcattgggtatcacctatacagaaaggccaatagacccaaagtctccaaaaagaagctcaagggaagagaaaccgaacaggaggcaaaaagaaataataaatattaaattttccaaannaaaaaanaannaaannnannnnnnncccttggtcggcccggcctcgggcccttcaagaagccttttctaaaacc

SEQ ID NO: 178390 - DNA, 766 bp, Homo Sapiens
  misc_feature (99)..(99): n is a, c, g, or t
ccttctggtcgatcaaccaacaatgtttccttgttttgcatgcagaggaaccttatattgaaaatgaagagccagagccagagccggagccagctgcanaaacaaactgaggcaccaagaatgttgccagttgttactgaatcatctacaagtccatatgttacctcatacaagtcacctggtcacaactttagataagagcactgggcattgagatctctacagaatcagaagatgttcctcagctctcaggtgaaactgcgatagaaaaacccgaagagtttggaaagcacccagagagttggaataatgatgacattttgaaaaaaattttagatattaattcacaagtgcaacaggcacttcttagtgacaccagcaacccagcatatagagaagatattgaagcctctaaagatcacctaaaacgaagccttgctctagcagcagcagcagaacataaattaaaaacaatgtataagtcccagttattgccagtaggacgaacaagtaataaaattgatgacatcgaaactgttattaacatgctgtgtaattctagatctaaactctatgaatatttagatattaaatgtgttccaccagagatgagagaaaaagctgctacagtattcaatacattaaaaaatatgtgtagatcaaggagagtcacagccttattaaaaggttattaaacaataatataaaaattttaaacctacttgatattccataacaaagctgatttaagcaaactgcatttttt

SEQ ID NO: 178391 - DNA, 925 bp, Homo Sapiens
gggactgttcgcgctgccgtgtttccgggcggggacactcagggcgcgacgcttttctgttacccacagaggcccgccgcggctgcgccatccgcggccatgaagtttcgggccaagatcgtggacggggcctgtctgaaccacttcacacgaatcagtaacatgatagccaagcttgccaaaacctgcaccctccgcatcagccctgataagcttaacttcatcctttgtgacaagctggctaatggaggagtgagcatgtggtgtgagctggaacaggagaacttcttcaacgaatttcaaatggagggtgtctctgcagaaaacaatgagatttatttagagctaacatcggaaaacttatctcgagccttgaagactgcccagaatgccagggctttgaaaatcaaactgactaataaacactttccctgcctcacggtctccgtggagctgttatctatgtcaagcagtagccgcattgtgacccatgacatccccataaaggtgattcctaggaaattgtggaaggacttacaagaaccggtggtcccagatcctgatgttagtatttatttaccagtcttgaagactatgaagagtgttgtggaaaaaatgaaaaacatcagcaatcaccttgttattgaagcaaacctagatggagaattgaatttgaaaatagaaactgaattagtatgtgttacaactcattttaaagatcttggaaatccctccattagccccctgaaagcacccatggagaacggaaacgtggaacacctggcctgaaagtgcaccttagatatttagggaggctccctacaggtttctttgcttggaacaacaaggtaaattccccccaaagggcctttatgcacaataattggggaataaaacaagaaggggtgccattttttggatcctc

SEQ ID NO: 178392 - DNA, 542 bp, Homo Sapiens
ggcagcgagcctgtggatcaggagtacctgcctgaagagttgaggggggtagatttcttcaagcagaggaggtgctgactcctcagggcacgacagcagaaggatgttgcttttttaagggagggccagaaagaaagttagtggattgcaaagttggttgcctggtggaagttagaacagaccaacattttgtgccagaaatttaagagttccataggtggaggcgcagttctttcgaataaatgtgtaactttgaaattgtgttcatttgcactcggtgcagcggttatgcttatgaaaatacctggcagctttgtgcaatgaattaatgttataaggaattatctattttgtcatagtatttaagtcataatgtcatttcagaattcagttctgtaggattttcttttctttaaaaaatgtatattctgggtagttttaattggtaaaaaaatgtaattgtgatttaatactgcatagtgttttgggtattttttttatatgcaaaggtcttacgagccaataaaaactatttcaaacta

SEQ ID NO: 178393 - DNA, 632 bp, Homo Sapiens; identical to SEQ ID NO: 2155

SEQ ID NO: 178394 - DNA, 1213 bp, Homo Sapiens
gggagtgccagtgtgactcatccacaatgatttctccagtgctcatcttgttctcgagttttctctgccatgttgctattgcaggacggacctgtcccaagccagatgatttaccattttccacagtggtcccgttaaaaacattctatgagccaggagaagagattacgtattcctgcaagccgggctatgtgtcccgaggagggatgagaaagtttatctgccctctcacaggactgtggcccatcaacactctgaaatgtacacccagagtatgtccttttgctggaatcttagaaaatggagccgtacgctatacgacttttgaatatcccaacacgatcagtttttcttgtaacactgggttttatctgaatggcgctgattctgccaagtgcactgaggaaggaaaatggagcccggagcttcctgtctgtgctcccatcatctgccctccaccatccatacctacgtttgcaacacttcgtgtttataagccatcagctggaaacaattccctctatcgggacacagcagtttttgaatgtttgccacaacatgcgatgtttggaaatgatacaattacctgcacgacacatggaaattggactaaattaccagaatgcagggaaagtaaaatgcccattcccatcaagaccagacaatggatttgtgaactatcctgcaaaaacaacactttatttacaaggataaagccaccatttggctgccactgatggatattctctggatggcccggaagaaatagaatgtaccaaactgggaaactggtctgccatgccaagttgtaaagcatcttgtaaagtacctgtgaaaaaagccactgtggtgtaccaaggagagagagtaaagattcaggaaaaatttaagaatggaatgctacatggtgataaagtttctttcttctgcaaaaataaggaaaagaagtgtagctatacagaggatgctcagtgtatagatggcactatcgaagtccccaaatgcttcaaggaacacagttctctggctttttggaaaactgatgcatccgatgtaaagccatgctaaggtggttttcagattccacacaaaatgtcacacttgtttctttgttcatcccaggaaacctaattgaaatttaaaaataaagctactgaatttattgccgggaaaaccaaaacacaggaagaaagaaaaaaacattgtgggcggc

SEQ ID NO: 178395 - DNA, 708 bp, Homo Sapiens
gggagagaggatctaggaactggagctgctgcctctgtctgctaagatgtgaagtccaagactgaaagtaacatagcagaaggagaaccaaaagatatgttgagtcttgatgctatttgttgaaccagtcctgaatccagctgtgtcggagtcagcgcagcttttgaagctggagagcatcatattttagaaagatcaagcaatgtggatgaggacacattaaaaagagaagaccgagaggaggggacaccactcaggcttataacctccagctcacatttcagcaccaaaggaccaaagcctagacctgagatctggcacttgcaaaaagaaagatcacctggaagaacaaaatagaagactcctgcctcccaataggcttgggtcaggaagacggctgctggcataatcgtggacgtaggaagatggaaaacaactcctagagatcccacacagctgacacgcgtgcttggcgctgtggctgcgtggtgacgctcctgggtcatggccatgtcatgcagggcattacatcaacgagggacactctggctttctggcttacccttctgagatagcaactggcgtcaacagctgatggaatcttgccggacagactaagctggtgtgcagagcaagtctgttcaggcttgccatttcatttcgctcatagtctccactggctgtgtttgcttgtcggctctgctctgt

SEQ ID NO: 178396 - DNA, 792 bp, Homo Sapiens; identical to SEQ ID NO: 2200

SEQ ID NO: 178397 - DNA, 1043 bp, Homo Sapiens; identical to SEQ ID NO: 2222
  misc_feature (338)..(338): n is a, c, g, or t
  misc_feature (352)..(363): n is a, c, g, or t
  misc_feature (525)..(525): n is a, c, g, or t
  misc_feature (527)..(528): n is a, c, g, or t
  misc_feature (530)..(534): n is a, c, g, or t
  misc_feature (536)..(536): n is a, c, g, or t
  misc_feature (538)..(541): n is a, c, g, or t
  misc_feature (545)..(545): n is a, c, g, or t
  misc_feature (547)..(554): n is a, c, g, or t
  misc_feature (556)..(556): n is a, c, g, or t
  misc_feature (558)..(735): n is a, c, g, or t
  misc_feature (794)..(812): n is a, c, g, or t
  misc_feature (959)..(959): n is a, c, g, or t
  misc_feature (1000)..(1000): n is a, c, g, or t

SEQ ID NO: 178398 - DNA, 812 bp, Homo Sapiens
  misc_feature (81)..(179): n is a, c, g, or t
  misc_feature (182)..(347): n is a, c, g, or t
gggccctccccgcccccccggtttccctcgtgtgtgcctttttttgcgccgggggggtccccccggcgcggttcttctccnnnnnnnnnnnnnnnnnnnnnnnnnnnnnnnnnnnnnnnnnnnnnnnnnnnnnnnnnnnnnnnnnnnnnnnnnnnnnnnnnnnnnnnnnnnnnnnnnnnggnnnnnnnnnnnnnnnnnnnnnnnnnnnnnnnnnnnnnnnnnnnnnnnnnnnnnnnnnnnnnnnnnnnnnnnnnnnnnnnnnnnnnnnnnnnnnnnnnnnnnnnnnnnnnnnnnnnnnnnnnnnnnnnnnnnnnnnnnnnnnnnnnnnnnnnnnnnnnnnnnnnnnngagcttttgtcactttattgttaaccaatgaatattatccaaaattagagatgtaattgtaacttaattgtacaacacaaaattatgctaatggtaaaagcctactgggatttaccaaatactcattagtgtatttttacattgactatatgaacatgtgctcgcgactgctaataagttataattggtttaatctctaagaaatccatattgcaaatggttcttgtttagaaaaattcacacagccttaaaaatggattaaatccattttaatcctaatctacaaatagatcataaacagcaaaatataactgataatttttcaatactgtatcaaactgatgtagctatggtagtgcacataattcaaaatgaggaaaattaacaaaaatccaatgaaagttcaggtttttatctattatgcaattgctttaaagtgaacatttatgtctcgactagttctag

SEQ ID NO: 178399 - DNA, 1249 bp, Homo Sapiens; identical to SEQ ID NO: 2235
  misc_feature (374)..(467): n is a, c, g, or t

SEQ ID NO: 178400 - DNA, 822 bp, Homo Sapiens
aggaagcacaccccgcagggaaagcggggttctggctttttcaaattttttggatccaggcagtcattgtgagtcaaaggagtcccaatgcggtggtcctccatattcgttggctgagaggggtccccagcttggcagcagccagggtccccaagcaggtttcactgaaggagaagacttcttggggagggaaagcttaagctgcctagaagaccccacttcaaagtttggttttttgcctgtgatctgaacaaacagcaggttgtcactttcatgaccaaggtgttctcgaacagactgtacttcctcaggggttaggggctcccgctgcagctctttcacttccacaagaccagaaagagtcagggctgaacacagcttagatgctgtcttcactttgctattgttatctacagctgtctctactggctccttcagaaaaagacatccaccaggccgaaggatccgggcgatttcagccaaaatctcagcactgtgcagagtggtgcttcctgggactaaacctgacaaaataatgtcaaagctggattctttgtgggcagattgcaacagctgcttgatgttttccacagacacgcggccctcattgccggttaacgcttgaagcttatccaccagacctttcagagcctccactggggatgacttatcccagaccactgccacaaactggccagcagagatcccaaaatctgccattcttgcagtgcagtactgacagacctaaaaactgctggccaaaagggaatcaagactgccgcctgggctcgctcccggcttctctccagccgtcgactcccc

SEQ ID NO: 178401 - DNA, 814 bp, Homo Sapiens
gggtctgtggattctggccaggccgggttcggcggttgctgtgagagcgggcttcccaacaccatgccgtcagtccttctctgtcagctctttccccgtcagcatcccagccgtgctcacggtacagcagggtcccggggagtccaggaggcggcggagtgcggcactgtctggagagttcactgtattgcagagaggttggagaaaatcaagtcttgcacgtggcgatggctcaagattccctgaggtcttcagtgctgactaaggagtctgaaatgatgattcatgttttacctttggggctgagccaagtgcatctctttgagcaatcgtcttaatttccttgtcgtcaccaattatcataaccaattatcatcgtaaaggatggtaattcctttaagttatacccaccttaaaaacatgattctgttccacaaacgaaaggagcacatcagagatgccttcagttctgtgtgcttgaactttgaattccatgaattatagttgcactgaggggagaatcctgtttacatcctcctggttccttctaccctttcctgtccccatgtatctctgaggcctggcaatgctctctggatacttgcagacggactggactgagccctggctcatggggctggccaacttccacgcgctctgcgtgctcctcacctgcttgtccctcccgaagctacagactacagatcggggcactttctgtgtctagtcatcttaatctactgtgctgaatacatcaatggagcggctgcgatgaactgaagattatttttcgaaataccagtatttccacctt

SEQ ID NO: 178402 - DNA, 613 bp, Homo Sapiens
ggggcggacctgtgaggggatccgacttgccggcagaacttacgctgcgggaccccgggcactgttgctgctgcgggagactgtgggctgtttagtgccatgcaccctttacagtgtgtcctccaagtgcagaggtctctggggtggggaccattggcctctgtgtcttggctgtcgctgaggatgtgcagggcacacagcagtctctctagtaaccatgtgtcccagcccagagaggcaggaggatgggagctcggaaggatttcagctccagggctggctgctggaccgactttttcaacaatttttttaaaaagtgcctcagcttcctcaggagaaagctgtcttcagaaagtgggaagaccccacctccctattctcatgatggatgaaacttcttggaaggcagagaaaagtctacctcgagacctatggctgccagatgaatgtgaatgacacagagatagcctggtccatcttacagaagagtggctacctgcggaccagtaacctccaagaggcagatgtgattctccttgtcacgtgctctatcagggagaaggctgagcagaccatctggaaccgtttacatcagcttaaagccttgaagaca

SEQ ID NO: 178403 - DNA, 405 bp, Homo Sapiens
ggtttgtctaatatttaaacatgtactggcacaatttgtgatgaaaatattagcacatttgcaataatgtttctccataacagagaatgttaatggataccagaattttatttttgtatttatgttcatagtacttttcctcttgtctactccagacagttattccataaagcatttgtataattaaaaggaaaacagaaaaaggaaaagtaggcaaatgtgaaaatagtttcaatatatcttatgatttcttaatgtaaaatgttttgttgaagtatatggctatcatgactaagtgctagaatttatagttacaggcggtgtccttttaaatgtggaaaggcttttaaaatattttaaaactggacctgtattatcctgaatacactattttgaaaattttta

SEQ ID NO: 178404 - DNA, 613 bp, Homo Sapiens
  misc_feature (33)..(33): n is a, c, g, or t
  misc_feature (44)..(44): n is a, c, g, or t
aacaaaccccaagcgcaacgggccaaccgccancgtgggcggcncccccgggtggcccgctcccaaacatcaaccaaccctcggttgaaacgtggaagccgcggaaggaacctaaccctgaaaggattctgggaatcatgtccatcccttttcctgtcagtgtttttgaaacccacagttttagttggtgctgatggagggagggggaagtcgaaggatgctctttcccttttctgtttaggaagaagtggtactagtgtggtgtgtttgcttggaaattccttgccccacagttgtgttcatgctgaatccacctcggagcatggtgttttcattcccccttcctagtgaaccacaggttttagcattgtcttgttctgtcccttccacttctaactccactggctccatgattctctgagtggtggttcctttgcaccctgtagatgttctaggatagttgatgcatgttactaaattacgtatgcaagtctgtgagtgcgtctgaggggacatcgcccaggactgactgaaaaccgatggccgaaacctcaagcccctgaaggggcagtcccaaaaacccttaacgggggaaaaatgcctaactcttttg

SEQ ID NO: 178405 - DNA, 415 bp, Homo Sapiens
tcccaaaaatccttcaggctaaattcctccgcgcatcccacgtttcaaaccgaaggctggtgaatgttggaaacggccaacccagggggcgcccacgaatgcggtggccggtgcgccctgggattgttgtcatctatctgggcacctgaaagagagcgccaatcgctgctggatgggatctgttagcatcagttccacgctgctcctggaggccatgtactctgccatgcactccactggacccaccttcattcagggctcagtccaggaccagccatgggaagcctccctggcctccacagagtccactgctccctcttctgtgcccctcagtccctgggctccccccaccttcagccctgacaccttgtggtgttcttgtcaaaatccccagtaaaatccgacattcctgaga

SEQ ID NO: 178406 - DNA, 813 bp, Homo Sapiens; identical to SEQ ID NO: 2290

SEQ ID NO: 178407 - DNA, 539 bp, Homo Sapiens
aggcatatgtagtaatattagaaacatttaatttgggaaactttgattcttgaaagagaaaacaaaagcatgtgaataaactttgaagtgttcacctcagtttgggaccaaactgcttggatctttgtaaaaaccggttttgtatgtcaaggaggagtttaaggcctttccgaccaccttgtgttccccttttctgcgcagcatgtatcacgtggagttgctccttaccacacctcacgtgcccctgagccctatttcctgatttcttctgggctggacttccccgtttctccaccagcagctccagtatcccaaactttctagtcctgctgatcctcccagcaacggggtggaaactggagggcagtgtctggtctgttttctaagaaacttatgaattctattatctttacaaatatgagaaaattttttcaatattttttattaatctttttataaaaatgaaaaggaaactcctatgatcgattaaggaaagtggttatggctgggggggttcaggggtttttttggggtttctg

SEQ ID NO: 178408 - DNA, 806 bp, Homo Sapiens; identical to SEQ ID NO: 2752
  misc_feature (493)..(493): n is a, c, g, or t
  misc_feature (702)..(702): n is a, c, g, or t
  misc_feature (718)..(718): n is a, c, g, or t
  misc_feature (755)..(755): n is a, c, g, or t

SEQ ID NO: 178409 - DNA, 599 bp, Homo Sapiens
gggtccctgccctggccaaggaggaggctgaaagagcctgagctgtgccctctccattccactgctgtggcagggtcagaaatcttggatagagaaaaccttttgcaaacgggaatgtatctttgtaattcctagcatgaaagactctaacaggtgttgctgtggccagttcaccaaccagcatatcccccctctgccaagtgcaacacccagcaaaaatgaagaggaaaacaaacaggtggagactcagcctgagaaatggtctgttgccaagcacacccagagctacccaacagattcctatggagttcttgaattccagggtggcggatattccaataaagccatgtatatccgtgtatcctatgacaccaagccagactcactgctccatctcatggtgaaagattggcagctggaactccccaagctcttaatatctgtgcatggaggcctccagaactttgagatgcagcccaagctgaaacaagtctttgggaaaggcctgatcaaggctgctatgaccaccggggcctggatcttcaccgggggtgtcagcacaggtgttatcagccacgtaggggatgccttgaaagacc

SEQ ID NO: 178410 - DNA, 789 bp, Homo Sapiens
gggagagcgtgcgttcggtggcccataggggaagatggcggctgctcctttggaggagcgggattgagaggatcggggtggggagaccaaacaagagagacatttctggctctgaaggcgaacgcttcgctggccatttaggagctctgctcaaagccagacgtatcctagaaggaaaacatcaccatggctacagaaattggttctcctcctcgttttttccatatgccaaggttccagcaccaggcacctcgacagctgttttataagcgacctgattttgcacaacagcaagcaatgcaacagcttacttttgatggaaaacgaatgagaaaagctgtgaaccgaaaaaccatagactacaatccatctgtaattaagtatttggagaacagaatatggcaaagagaccagagagatatgcgggcaattcagcctgatgcaggttattacaatgatctggtcccacctataggaatgttgaataatcctatgaatgcagtaacaacaaaatttgttcggacatcaacaaataaagtaaagtgtcctgtatttgttgttaggtggactccagaaggaagacgcttggtcactggagcttctagtggggagtttaccctgtggaatggactcactttccattttgaaacaatattacaggctcacgaccgcccagtgagggccatgacgtggtcccataatgacatgtggaatgttgacagcagaccccgggaggatatggtgaaatattgggcagtcgaacatgaaacaaccgtcaagatgtttccc

SEQ ID NO: 178411 - DNA, 798 bp, Homo Sapiens; identical to SEQ ID NO: 2783

SEQ ID NO: 178412 - DNA, 1282 bp, Homo Sapiens
gggtcggcaagatggctgccctgacagcggagcattttgcagcactccagagcctgctcaaggcctcctcgaaagatgttgtcagacagctgtgtcaagaaagcttttccagttcagcccttggcttgaaaaaactcttggatgttacatgttccagcttgtctgtgacccaggaggaggcagaggaactgctccaggctctgcaccgcctcactaggctggtggcattccgtgacctgtcctctgccgaggcaattctggctctctttccagaaaatttccaccaaaacctcaaaaacctgctgacaaagatcatcctagaacatgtgtctacttggagaaccgaagcccaggcaaatcagatctctctgccacgcctggtcgatctggactggagagtggatatcaaaacctcctcagacagcatcagccgcatggccgtccccacctgcctgctccagatgaagatccaagaagatcccagcctatgcggagacaaaccctccatctcagctgtcaccgtggagctgagcaaagaaacactggacaccatgttagatggcctgggccgcatccgagaccaactctctgccgtggccagtaaatgatccagccagctgccaggccactgccatgacccagctgctcatgagtgataaatgtctccccatatgcaggctgcccttgcagctgcagctgacaacaggcaggatggtggggacagcagggggctactgccatccagaagttacagttggattgggaagaagcagccagatcccccgctgttctcactcatcttctttctctttctgaagctggagagcagaagcccccatctttgaaaagctcctgagtgcaacttaattaccaccatggcagggtgagggaacatttgcatcgtcagctgcctctgcatagctgtttgagaaattcaggcccaaatcatgcagcctatccaataagtaagtttatttccaacattagctctaattagttcatttccaatcccagaacacatggagggaatcggacaggtgatgccagcagttcctgctcctctgtcagggaagccaggcagagcccacagagcatggtccatccagagtgttccctgagccccctccaccatactggaacccctcttcagtgtaggaagtctgaaatgggtgctaattcccttcttcatgaaaccagggccctcttccttcatctaatgcagccactcctaggtgaagaagtgggaataattggaaataaacaacagtttctaaaacttcct

SEQ ID NO: 178413 - DNA, 923 bp, Homo Sapiens
  misc_feature (376)..(385): n is a, c, g, or t
  misc_feature (455)..(465): n is a, c, g, or t
  misc_feature (566)..(635): n is a, c, g, or t
  misc_feature (640)..(648): n is a, c, g, or t
  misc_feature (691)..(699): n is a, c, g, or t
ggatcagagataagatgggaaaaaaacatcacattgggggaaccaccaggattcttacattcttggtggtgagtgctgcagcagctcccagtccagtgctaggaaacattcccccaggagatggcatgccagtaggtcctgtaccaccagggttctttcagccttttatgtcacctcggtaccctggaggtccaaggcccccattgaggatacctaatcaggcacttggaggtgtcccaggaagtcagccattactccccagtggaatggatccaacttcgacaacaaaggacatcccaaaaatggggggggccaatgcgaaaaaatgacctcctccaaaaaggaaggggggcccttagggacccccaaaactttnnnnnnnnnnaaggggacccccaccgggaaggcttttaggggggccccggaaagggcctggaatagaacaaggggccccnnnnnnnnnnnaaaacctttggcccaaacccaaaaaaaggggcccttttcaaaaaacatatatccccacgaattctcccggggggaaaatagggaggggcctccccaggaannnnnnnnnnnnnnnnnnnnnnnnnnnnnnnnnnnnnnnnnnnnnnnnnnnnnnnnnnnnnnnnnnnnnntcttnnnnnnnnnagaaaccgagggaacacctctttaggggagagaggggagggannnnnnnnntgggggggcccctagatcaggaagcaccttttgttctctcctcaggtgggctcctccggtgaaacacaaagacgccgcaccccgcggggtgggtgcattacccagagaggaaggtatgtaacccgccctcacatacacaacgcgaggggtgcgtctccttctctcttgtctcacggacaagaatcaacagcccgctggcttatttcttcggcacaacaaccccc

SEQ ID NO: 178414 - DNA, 426 bp, Homo Sapiens
  misc_feature (232)..(232): n is a, c, g, or t
ggggcagagaggggctgccttatatttgaaacatgctttctatcatgcattgactgtatgcattttgttaatgcacattctgtttgtttaaggtgtgtaagatacacacccttctagatgaaactatatgtgccacactttgcactactcataatgataacctcaagactatcagaagaaatatttaaatttccattttatgaagaaaggaaccaaattattatgctttttnaaacaaattaccagtttacataattaatcagggtgcattttaaagtctaacttcgtttattgtataatgcatcatttgaaaatacaaaggaagaaatacccctttgttttttaatgatgccaagagttggacgtaaatggctagttgggccagtatttttatttgaaagaaatccaataaaggtaatttggggg

SEQ ID NO: 178415 - DNA, 769 bp, Homo Sapiens
tgggcccccaattggttccaaggtcaggtaacttcaaagtggaccaccataggcccttcaagaatgtagccctagtctccttcaaagacatttatggtggaaccgcattcctctctgaaatgacgcagatctcatggggcctgtacaagcatcttgccaaaactcggtgtaaatgagaagggttccctttctgcggaacaatcaagaagttccccatctgaattgtaaaagcatctgttctccatggaggtattgcagaggaaaatgtggatagcaagcccattgttagactttatgtctccagctccacacaaggtatgcaggccactcacaaagtctactttcttctgagatgcttttggaatctcaaatggtttccatctaagctggttaggatcaggatcaacttcatcccagttgtgagtgacatggccttcgtcaatggattcaaagggcttgtgagaaactgaaggtagaatcctatacagccagcttctcttattggtgctccgtggacaagtgaaagccgatcctgagagctgctcagcatagagattgtaggggcagacctgaggattattctgtccttctggcagggaacctgggcagcgaggatcctctgaagaacactcattcccaaatccagaaatgtactttaactcagccattttctctctcctctatgtgtggtgacttcaggaaacccaggcccagaggatataaagccacaatgcttctttctccttcaaaccactctttggatattccc

SEQ ID NO: 178416 - DNA, 813 bp, Homo Sapiens
  misc_feature (455)..(455): n is a, c, g, or t
  misc_feature (551)..(551): n is a, c, g, or t
  misc_feature (646)..(646): n is a, c, g, or t
  misc_feature (758)..(767): n is a, c, g, or t
  misc_feature (773)..(773): n is a, c, g, or t
gggaagtgagctatagcacatatcatgtgcttagtttgtttatttttctccatctccccttggcttcctagagtttggacatattccaggctaaatgcttttactcaagactacagaaaggtttgaagtagtgtgtgcatggcatgcacgtatgtaagtaatctggggaagaagcaaagatctgtttcattcttagcctcaggcctcatgagggtctccacagggccggagctcaggttacaccactccttcgtccttacaggagatgtagggagaagaatctgcaggctgcttgtaggactgttcaccaagggggataccagcagcaagagagtgcacccgtttagccctggaccctgtttcttactgtgtgacttggctagagttgggagttcccccaaaataaacgtgtccccattttaccagaaccaaacctcaacacagcgaagctgtancgtgtctttgtgtggcaaagatgttcccttgtaggcccctttcaggtaaccgtcttcacaatggtattttcatcacagtttaaggagcatcagccngcttctcaagtgggtagggaaagcagaaaaacgtacgcaagaagacatggatccaaaatgatgatgaagcatctccccatgggaggtgatggtgnggagatgatgggctaaacaggcaacttttttcaaaacacagctatcacagaaaagaaacttgccctcatggtaaactggaattgagaaatctcagtgattctgcaatgggannnnnnnnnnacgcanaaagtatgtatactctagtattccgggggttttttaaatt

SEQ ID NO: 178417 - DNA, 858 bp, Homo Sapiens
gacccacgcgtgcgaagaatcagaagggacattactactatcaagacttataaaaatctcaggaacacagaaggaagtggcagcagccaagcatttgatactggagaaagtttcagaagatgaagaacttcggaagagaatgctcattctgcagaaaccagggtcccacgcaaacagccaatcagtgtgagaagagaagacatgacagagccaggtggagctggagagccagcattatggaaaaacaccagttctagcatggagccgactgcacccctggtgactcctccacccaaaggaggaggcgacatggctgtggtagtgtcaaaggaaggttcctgggagaaacctagtgatgacagctttcagaagtctgaagcccaggccatcccagagatgcccatgtttgaaatccccagtcctgacttcagttttcatgctgatgagtacctagaagtctacgtttctgcttctgagcaccctaaccacttctggatccagatcgttggctcccgcagcctgcaattggataagcttgtcaatgagatgacccagcactatgagaatagtggtgcctgaagacttgactgtgcatgtaggagacatggtagcagcacctttacctacaaatggttcctggtatcgagcccgggtcctcggcaccttggagaactgagaacttgggacctctattttgttgactttggagataatggaggattgcccactgaaggaccttcagggctctcaggagtgaattccttaagccttccatttccaagccattagaatgtatctgggcccggattggtccttcaggtggacccgtgcgaaaaggaacgttggatgaatttggaa

SEQ ID NO: 178418 - DNA, 797 bp, Homo Sapiens
  misc_feature (453)..(453): n is a, c, g, or t
  misc_feature (626)..(626): n is a, c, g, or t
  misc_feature (660)..(685): n is a, c, g, or t
gggaagggaactaattcagaagttgaagtctttcatcagcttctatagtgctttgcctggctacatctgcagccatagccctgtggcggaaaacgacaccctttgctggaatggacaagaactcgtggagagatacagccaaaaggcagcaaggaatggaatgaaaaaccagttcaatctccatgagctgaaaatgaagggccctgagccagtggtcagtcaaattattgacaaactgaagcacattaaccagctcctgagaaccatgtctatgcccaaaggtagagttctggataaaaacctggatgaggaagggtttgaaagtggagactgcggtgatgatgaagatgagtgcattggaggctctggtgatggaatgataaaagtgaagaatcagctccgcttccttgcagaactggcctatgatctggatgtggatgatgcgcctggaanacagtcagcaggcaactccgaaggacaacgagataagcacctttcacaacctcgggaacgttcattccccgctgaagcttctcaccagcatggccatctcgggggtgtgcttcttcttcctggtggactgactgcctggtgcccagcacatgtgctgccctacaagcaccctngggtcttcctcgataaagggaaccactttcttannnnnnnnnnnnnnnnnnnnnnnnnnggtaatcctggatacctcctcccgccatgaagtagaagaactaaccctggggttatggttttccaaaatccaatggaatctttttgggagaaagaaacatttttaagggaaa

SEQ ID NO: 178419 - DNA, 607 bp, Homo Sapiens
  misc_feature (283)..(283): n is a, c, g, or t
  misc_feature (302)..(302): n is a, c, g, or t
  misc_feature (344)..(344): n is a, c, g, or t
atacatacatctttaatgataaaagaagctgagatgctatgcaccaaaaaattcgtaagggtattgttattttacttttttcaaaaataatccaaataaactatagatacaaattctgcggcagggcaacctaacttatttcagggacagataattctagtgtacttaagatctgtctaagtatttaacattcctgtaagcattataaaaaagaataggaaaagaatgaagttgtctgttaaaatgttaacagtagttcctctctgaaagaagggattgttgnagagttttttaccttcttnccttatagaggtataacctatacttatgaagtcagagaaagnaaaaaatatttaagggtaaagttatgtattttaagttttgcatactgaatggtaagggatgtagattttattcttattgtgaatgagaagtgttgaaggattttaatcatcgagttgacgtgtcatgaacaaatacttgaagcaaccctgggtaccgaagcctagagactttgagtacatttgaaaattgctttaagtgcatgactagacagcataaacgagtgattgcatatgtactctgcattattttggacatgtttgga

SEQ ID NO: 178420 - DNA, 917 bp, Homo Sapiens
ggggttgtcgcgagaactctgcctttgggccgtaggttagtgtggggccgtgtctcagtccacccaaggtctcctcggatcgcctggagaggcactcggacctggagcagtgaggagaatgaataccttccaagaccagagtggcagctccagtaatagagaaccccttttgaggtgtagtgatgcacggagggacttggagcttgctattggtggagttctccgggctgaacagcaaattaaagataacttgcgagaggtcaaagctcagattcacagttgcataagccgtcacctggaatgtcttagaagccgtgaggtatggctgtatgaacaggtggaccttatttatcagcttaaagaggagacacttcaacagcaggctcagcagctctactcgttattgggccagttcaattgtcttactcatcaactggagtgtacccaaaacaaagatctagccaatcaagtctctgtgtgcctggagagactgggcagtttgaccctttaagcctgaagattcaactgtcctgctctttgaagctgacacaattactctgcgccagaccatcaccacattttggggtctctcaaaaccatttcaaattcctgagcacttgatgggctcatggctagttcaacaaatattgggccccttccctggaaaagagaggctgtatctccctggccagaacagaagtcaccctcccggtattgtaactgttcccttttcaccgaaatggcttctttgggaaagcaaacctggccaagggggtttatcaaggcttcctttaaattacccaagcaaccgaaccccccagggaattgtgccttaccctcaaaagcaagaacctcttgggagaaacaagttccaaaaattctcttccacagagaccctgggcaatttttctcttcca

SEQ ID NO: 178421 - DNA, 953 bp, Homo Sapiens
ggtgctggagcagtcgggtgcgccttcggcttcgagccctagctctcctggccccaacgcgggcttatgcctcccgccttgtgctcggtgcaggcgcccgtcgacccttcgtgcccctttcgcccgccctggagctggtgggcagggtgccagtggaagcgtggggcttggctctgtgattcattcattctccgccgacgggagcctcagacccgctgtgctctgaagagaggagggaagagggggcagccgcgaatgaagggccgggcaccagccgggctccattgtgctcggcggcggggggcgggaaggggctgagggaggtgggatctggtgtcccctcctccagctctccggcgtgcgctgcgcccccagcctgctgccagcctggaaatggctccgtttattctcttcgggagaatgaatcgatcctgcctagaccttctcttcgtcctccccacctcttctctgctccgagtcttaggaggagaaacatttaaaaagacagattccaatgtggagtgccgtgcaggttgcgagctgccgggtttgcacttcgaggagattttcctgtgtagtttatttcctaatgtgagcgcagggaagccgtggccattacttgccttagggatttttattcacgtgcacgtcgcgtttggttgctcgctccacccccggagacctggtgtggtggagaaatttgaacccgcagccttagctccgaaaaggccgagttacctggctctccctggactagtcgaggaggacatgagtgaacatggaccagcgaacctcatatatgattaggactcggtgaaagccggactctggcatttccctacttgtagaatccatttggtggaatagagttgatcgctggctcctccgcaaagcatttaaactcgaataagcaaatgccgcgtctagtgaacgtatggattttcaaagagaac

SEQ ID NO: 178422 - DNA, 924 bp, Homo Sapiens
  misc_feature (225)..(234): n is a, c, g, or t
gatatactggtggaaggggggagaatcccataactaactgctgaggagggacctgctttggggagtaggggaaggcccagggagtggggcagggggctgcttattcactctggggattcgccatggacacgtctcaactgcgcaagctgctgcccatgtttccctgccccacttcacccccttgggggctgctcaagggtaggtgggcgtgggtggtaggagggnnnnnnnnnnacccagggctctggaaggacaccaaactgttctgcttgttaccttccctccgtcttctcctcgcctttcacagtcccctcctgcctgctcctgtccagccaggtctaccacccaccccacccctcttctccggctccctgcccctccagattgcctggtgatctattttgttcccttttgtgtttctttttctgttttgagtgtctttctttgcaggtttctgtagcccggaagatctccgtaccggctccaggggctccagtgtaaattcccctttcccccgtggggaacatgcactaccttgtgcgggggggtcaaggggtgtaacggttttccagatgtccggtcctaggtattcatatatttgccttggccttttttcccccctatatattggagcagggacattgtcgcacggaaattgggcaccaggagaggtggcaaaggtaggatcatgcgctacacttttcacacactcattttccccagggggtgatggagactatcttctgttaactcttcgtggtcgctgggaactaagcgtgggtgttggaaacaattcacataaagatgacaaaaaagcacaccaaagacaaaggggcgggtgccgcctctagtaatgtcccccaggagagggccacccgggtgttcacgtcgtcaccagtagtttctgtgacacacgagagcgcc

SEQ ID NO: 178423 - DNA, 693 bp, Homo Sapiens; identical to SEQ ID NO: 3393
  misc_feature (537)..(537): n is a, c, g, or t
  misc_feature (566)..(566): n is a, c, g, or t

SEQ ID NO: 178424 - DNA, 550 bp, Homo Sapiens
gggaggagttgtacctccattggcttcctcactccaaaataggtgctgatccttcctattcctattctttgccaccttttgggtgtggtgtcaccagcctgtttagccaagtagctttgggcataggctgcccaatctgagcaaacaccagtgaggctctattgagccaagaccaagtcctcaaagcacctgaaccactgtggccttctcagcctacagcagtgtggtctcttacatggccacaaagggacacacagtgacaaaaggctcggaatgttacaatggtaaaatgagtgatctcaaatccactgacagatataaaataggcttagagaggaaaagctgcctctggtcaagtagatcatggcagcatgaattccaactcacttttttacaactccaacttctatgtttatctttgttactttcacttttttacaacctggccagaggcattttttaaatcaggcccaatatcagtattctttttgtgtgtgccaattttgttatcacatccctatgaagttgaaaaataaagttaattttgacc

SEQ ID NO: 178425 - DNA, 429 bp, Homo Sapiens
  misc_feature (406)..(406): n is a, c, g, or t
gaaacctaaaaagggacaataaagcaaaaagtatcagtaaggataggtggctgagacccactgccctgagctactagtgtggctgtgctgtgggtctctagaaccatctgcattggacgtgaagccacagcaggtggtggactgctggcctgttcctaatgagctacgctgggctttgaggtagaggttggggtttatgaaccccaactctggcttaaagatcttgctgtggctctgttatgttctgaggccttgggattagcctcttcctcattatggagctgattttctagtctgtggatcagctatgcctttggacacttctcttttccattgtgccttttgaaatgttgtcttctcactcagcatcagcacttcgatctaaatgccagacttaggtagtttngggagggaggaaccaaagttgaa

SEQ ID NO: 178426 - DNA, 594 bp, Homo Sapiens
gggacgcggaatgacctggacaccctgctcagcatggaaatcaagctccgcctcctggacctggaaaacatccagatccctgacgcacctccgccgattcccaaggagcccagcaactatgacttcgtctatgactgtaactgaagtggccgggcccagacatgccccttccaaaactggaacacctagctaacaggagagaggaatgaaaacacacccacgccttggaaccgtcctttggtaaagggaagctgtgggtccacattcccttcagcatcacctctagccctggcaactttcagcccctagctggcatcttgctcaccgccctgattctgttcctcggctccactgcttcaggtcacttcccatggctgcagtccactggtgggacaagagcaaagcccactgccagtaagaaggccaaagggcccttccatcctagccctctgcaggcatgcccttccttcccttgggcaagaaagccagcagccccagactgcccaaaaacttgcccaccagaccaagggcagtgcccaaggcccctgttctgggaggaaatgggcctagctatttgatgagaagaccaaaccc

SEQ ID NO: 178427 - DNA, 1137 bp, Homo Sapiens
taagggcccgaatgttgcctgggctgcccgtctttcattgatggaaggccccacggctggaagaaaggagaagcattttggtttgcagccaacagaccatggggccagaaggtgagggcatcctctcgcacgcttttctcaaagctctctgttgttgggtggcagccagagccctcctgcaggcagcctaatggctcacggggatcacccacaccacctgactttccagagtccccgttttaccacagaaggtctctctccccctgctgtgccttccatgttggaaaccattccagagttaagcttgtcatgcacttgagcctcttcattccctttcacaggaggatgctcaagcggtttcgtgtaatccctgaggattctgcgcactgtactctcatcctgcccctgtctacgcatcagctctgctgcccactcaacactatgctgatacctctttgatgtgatgataggcatgttagtcttcagatcttgtccatttagcaaccagtttaggatctgaaattgcgaagcttggacggcttcttgaaagaataccttttccaaaataacctttccccatacgagctcgctccaatgtcctcccgcattcctcacaatcacattggttcattaatcattatcagcaccggaatatcttgaattctttcagaggaccatggtcctgaccaacaagggacttggcaatggagactcgtaagtcctcatacactcgttctgtttcctctgttggggcatggataaactgcttctgccatcttttcagagcgaggctacttcccttctgcttctttccttgactacccccacatcccgaccgaactccaccagaggctgctggctccatctcagggcattatcagcttgcaccttgcgccccagccccactcaggccctgaacaaggcagccggctgttctccaacgaaccaaggagcctgcagagcgcacgaggaaagctgccggacggagtcagtgaccgggcgcactaggaagccatggctccccgtcccggcactgtttcgcccgactgtgcgacccctgtcacagtacctaggccctttcctctctccgcccatgcgcaggactttcggaagagcgagatttcctttctctgcaaa

SEQ ID NO: 178428 - DNA, 1019 bp, Homo Sapiens
ggacatgaaggaaaacaccagaaattattgttggcagtttttgtgactcctcttactgatcttcgttctgacttctccaagtttcgggaaatgatagaaacaactttagatatggatcaggtggaaaaccatgaattccttgtaaaaccttcatttgatcctaatctcagtgaattaagagaaataatgaatgacttggaaaagaagatgcagtcaacattaataagtgcagccagagatcttggcttggaccctggcaaacagattaaactggattccagtgcacagtttggatattactttcgtgtaacctgtaaggaagaaaaagtccttcgtaacaataaaaactttagtactgtagatatccagaagaatggtgttaaatttaccaacagcaaattgacttctttaaatgaagagtataccaaaaataaaacagaatatgaagaagcccaggatgccattgttaaagaaattgtcaatatttcttcaggctatgtagaaccaatgcagacactcaatgatgtgttagctcagctagatgctgttgtcagctttgctcacgtgtcaaatggagcacctgttccatatgtacgaccagccattttggagaaaggacaaggaagaattatattaaaagcatccaggcatgcttgtgttgaagttcaagatgaaattgcatgtattcctaatgacgtatactttgaaaaagataaacagatgttccacatcattactggccccaatatgggaggtgaatcaacatatattcgacaaactggggtgaaagtactcctggcccaaattgggtgttttgtgccctgtggagtcagcaaaagtgtcccatgtgggactgcatcttaaccccaatagggggctggtgaccattcaattggaaagggatcctcccccttcctggggctgaaataggttgggaaaactggccttctaatccctccaaggggttggcaaccccaaggaatttccctttaaataaatcccctaaaaatggaaattga

SEQ ID NO: 178429 - DNA, 907 bp, Homo Sapiens
  misc_feature (354)..(388): n is a, c, g, or t
  misc_feature (730)..(730): n is a, c, g, or t
ttccagaaagggacaaattaaaggatgaaccaaagattaagctgctcaagaagccagaaaaaggagatgaagaagaattggacaaaagagaaaaagccaagaaattggacaaagagaatctcagtgatgaaagagccagtgggcaaagttgtacattgcccaagcgttctgatagcgaacttaaagatgaaaaaccaaagagacctgaagatgagagcggcagagactatagggagagggaacgggaatatgaacgagatcaggagcgcatacttcgagaaagagagaggctgaagcggcaagaagaagagcgccgtaggcagaaggagcgctatgagaaagagaagacttttnnnnnnnnnnnnnnnnnnnnnnnnnnnnnnnnnnncacacttcgggataaaggaaagaaggctgaaagtacagaatcaataggcagctcagaaaaaactgaaaagaaagaagaagtggtcaagagagatcgaataagaaacaaagatcgtccagcgatgcagctttaccaaccaggagctcgaagccgaaatcgactctgtcccccctgatgacagcaccaagtctggagattcagcagcagaaaggaagcaggaaagtggtattaccccatagaaaagaaagaggagaggagtgataagtccagatggcctttagtgtcctgactgtctaggcagccaaagagcacaccgttaagcaatccagaaggtgccttcanggccaaagaatatgagagaaagggaagccgctggtgctggtggggttacacctgcagagggagtaaagtcttgtgggcaaagcagggaatctgattcaaagggttcaaaaattgggaagatacaattttcctttggcttttggcaatttcctaccaatttaatttttagaaggggcc

SEQ ID NO: 178430 - DNA, 704 bp, Homo Sapiens
  misc_feature (631)..(631): n is a, c, g, or t
cggatgataaggactgtcccttatcctaaatgtgttttgaaggcacacgttatttccattgtcattctgactttagaaaggcaggttggggcatgagtgggcattttcctaatgacttgctgctaggaggttataggcagggaacagtctgggagtctctaatccagagagactttcagattccctctcttcacatgaacctccattagttagattttgggaaagtgagcatgaagaagggactcagagctgccaggtacccgaggctcaggtctgacatccttgggccccttctgccacaacttgccacttcacggacttgaattatgttgcttcttcctggaaatctggcctgcagcacaggcctttcctctccaaaaagctgctgctcatttctggccccatctgctggctatctttgccatcagccatcacaggtttggcatcatcagagtctcagctagaggagctgtcactcctgccttaacgtttgcctgcgacctgaccaggggcatgacgacctgggatgtcaagtgaccattggggaacttggcacaggccaaatgattgaaggtttaattccttcttcagacccacttgatttgaccagtgggccatgggaaatagttanaattgaaaccaaaaaacctaccagggaactgcgggcataattcggggattctacctaacaaaaaattgggcgc

SEQ ID NO: 178431 - DNA, 899 bp, Homo Sapiens; identical to SEQ ID NO: 3523

SEQ ID NO: 178432 - DNA, 740 bp, Homo Sapiens
ggaattgtgaattcctgcccattgcctctcttggtgaatgtggaaatggccacctgggttttcccatatcaggaagggctttgggatggcacctatattggctgataattgaggatgcaaacattccattcattagtgtgatcgagctgttaatttttagactatagatcaaaatgtgaaacattttatgttcaatccatatttgtcttgcacattataaatatatttttattttttagtaatttaggggagggaggagggagaaagggataatgatgcccttggcataattcacaaaagcagctgtgacaacctccaatcagtttacttcatttcaaaactatttccaatcacaaggaaagatttatttaaaatatactcgtacatttcacctgtggatgtctataacttcatcctcagtatgttcccaaatctgtgctggcattgaaaggacaaaacattatactagtgggtttttctactaattattttttgaagcattattttcccaacacaaaagagcttttttctcggtataatgaaaattgaaatcctatgtgtattcaatagtaaatagacaaattttattttttatttccacttgaagagttacatttcgtataaaagtttacaaataacggtttttattttgattttttcagtataaaaaaagttgccttgatggcatattatgatgtaatgctaattgcttgtaggatagtaaatggtcagtattgaaa

SEQ ID NO: 178433 - DNA, 432 bp, Homo Sapiens
  misc_feature (380)..(380): n is a, c, g, or t
ggtctctcagcgtatttgggtcttctttgcccaaaagaacacaaaagcctttttccattgtatggaagatagtttttaagacatttgaaactttctactatagtttacagaacaaattattttatttttattgtaaatcttagtgtggaagagctgatttctaaaatatgattaaagtaaatatatacctatgaatatcaagagtcgtctccctgagcctgtagttggaagtgacgactgtaatggaatgatgtcttgtatagaaatgcccttctctgaaataaagagaactcctggggctttctaaagaggctgcggggaagccatcctccactcccactgtgtgtgaggagcagtgcttctggatcccggctggtcanccccgacctcttggcagggagcccggcgccagtaggggaaggacctccttcc

SEQ ID NO: 178434 - DNA, 1200 bp, Homo Sapiens; identical to SEQ ID NO: 3544
  misc_feature (80)..(80): n is a, c, g, or t
  misc_feature (90)..(90): n is a, c, g, or t
  misc_feature (213)..(213): n is a, c, g, or t

SEQ ID NO: 178435 - DNA, 1229 bp, Homo Sapiens; identical to SEQ ID NO: 3568
  misc_feature (427)..(427): n is a, c, g, or t
  misc_feature (1055)..(1055): n is a, c, g, or t

SEQ ID NO: 178436 - DNA, 1083 bp, Homo Sapiens
gggagatgcagatgatagacttgcagacggggactccttgggaatctgtcaccttcacggccctgggcactgaccgaaaggttttcttcaacatcctggaggaagctcgagagctagccttgcagcaggaggaagggaagaccgtgatgtacacagctgtgggctctgaatggcgtccctttggctatccacgccgccggcgaccactgaattctgtggttctacaacagggtctggctgaccgaattgtcagagacgtccaggaattcatcgataaccccaagtggtacactgacagaggcattccttacagacgtggctacctgctttatgggccccctggttgcggaaagagcagttttatcacagccctggctggggaactggagcacagcatctgcctgctgagcctcacggactccagcctctctgatgaccgactcaaccacctgctgagcgtggccccgcagcagagcctggtactcctggaagatgtggatgctgcttttctcagtcgagacttggctgtggagaacccagtaaagtaccaaggcctaggtcgcctcaccttcagtggactgctcaatgccttggatggtgtggcttccacccgaggcccgcatcgtgttcatgaccaccaaccaccttgacagggctggacccctgccctgatacgcccggggcgagtggacctgaaagagtacgtgggctactgctcaccctggcagctgacccagatgttccacagcgttctatccagggccaggcccccttcccttaactgagaaacttttgcccgaaacatgctcccttccaagcctacaaaacccacatccgtcccctgccccaggctgcaaggggttaccttccctggttggcacaaaaaaatgacccccggctcggggggcaaaccccacaattgcttataatccctctgcagggaggggggatttagggcctgcggattcaagccttaaggcttgctcccttcctttctaagtttcacccaaaaacacccctgtgtcccccacctatctaccgataatcttaccaacgcaatcgccccattgactcccctcgcct

SEQ ID NO: 178437 - DNA, 1205 bp, Homo Sapiens
gtcacggcggggtctggtgggatccagccattgaaggtgctggagcagagagagatatggtattggagctgatccctatgatgaaagatctggacccttgtgtagatgttccgtgaagcaggaggttttcgtaacaccccagggcctgtaaggttggtgtttccctttcaagatgccactttcagactttattctggctctgaaggacaagtccctactttggggctggatttgggctggtgggtgtgggcacagacctggccctggcccggaagggtgtccaactgggcctggtggcattccggcgccattacatgatcacactggaagtccctgctcgagacaggagctatgcctggttgcttagctggctcacccgccacagtacccgtactcagcacctcagtgtcgagacttcgtaccttcagcatgagagtggccgcatttccactaagtttgaatttgtccccagccctggaaaccattttatctggtatcgggggaaatggattcgggtagaacgaagtcgagagatgcagatgatagacttgcagacggggactccttgggaatctgtcaccttcacggacctgggcactgaccgaaaggtattcttcaacatcctgggaggaagctcgagagctagccttgcagcaggaggacagggaagaaccgtgatgtacacagctgtgggctctgaatggcgtccctttggctatccacgccgccggcgaccactgaattctgtggttctacaacagggtctggctgaccgaattgtcagagacgtccaggaattcatcgataaccccaagtggtacactgacagaggcattccttacagacgtggctacctgctttatgggccccctggttgcggaaagagcagttttatcacagccctggctggggaactggagcacagcatctgcctgctgagcctcacggactccagcctctctgatgaccgactcaaccacctgctgagcgtggcccccgcagcagagccctggtactcctggaggatgtggatgctgcttttctccagtcgagacttggctgtggagaacccagttaaagtaccaaggcctaggtcggcctcaccttcagtggactgctcaatgccttggcatggtcgtggcttccaccgggggccggctcgtgttccttgaacaaccaattcccgtttgaccggctggaccccg

SEQ ID NO: 178438 - DNA, 830 bp, Homo Sapiens
accggaacccaagatggctgcgctgttgctgagacacgttggtcgtcattgcctccgagcccactttagccctcagctctgtatcagaaatgctgttcctttgggaaccacggccaaagaagagatggagcggttctggaataagaatataggttcaaaccgtcctctgtctccccacattactatctacagttggtctcttcccatggcgatgtccatctgccaccgtggcactggtattgctttgagtgcaggggtctctctttttggcatgtcggccctgttactccctgggaactttgagtcttatttggaacttgtgaagtccctgtgtctggggccagcactgatccacacagctaagtttgcacttgtcttccctctcatgtatcatacctggaatgggatccgacacttgatgtgggacctaggaaaaggcctgaagattccccagctataccagtctggagtggttgtcctggttcttactgtgttgtcctctatggggctggcagccatgtgaagaaaggaggctcccagcatcatcttcctacacattattacattcacccatctttctgtttgtcattcttatctccagcctgggaaaagttctccttattggtttagatccttttgtattttcagatctccttggagcagtagagtacctggtagaccataatagtggaaaagggtctagttttccccttgttttctaaagatgaggtggctgcaaaactcccctttttttgcccacagcttgcctactctcgggcctagaagcagttattctctctccatatggggctttgatttgtgcctgaggg

SEQ ID NO: 178439 - DNA, 845 bp, Homo Sapiens
  misc_feature (86)..(193): n is a, c, g, or t
ggctgcgctgttgctgagacacgttggtcgtcattgcctccgagcccactttagccctcagctctgtatcagaaaagtctcgttcnnnnnnnnnnnnnnnnnnnnnnnnnnnnnnnnnnnnnnnnnnnnnnnnnnnnnnnnnnnnnnnnnnnnnnnnnnnnnnnnnnnnnnnnnnnnnnnnnnnnnnnnnnnntgctgttcctttgggaaccacggccaaagaagagatggagcggttctggaataagaatataggttcaaaccgtcctctgtctccccacattactatctacagttggtctcttcccatggcgatgtccatctgccaccgtggcactggtattgctttgagtgcagggtctctctttttggcatgtcggccctgttactccctgggaactttgagtcttatttggaacttgtgaagtccctgtgtctggggccagcactgatccacacagctaagtttgcactctgtcttccctctcatgtatcatacctggaatgggatccgacacttgatgtgggacctaggaaaaggcctgaagattccccagctataccagtctggagtggttgtcctggttcttactgtgttgtcctctatggggctggcagccatgtgaagaaaggaggctcccagcatcatcttcctacacattattacattcacccatctttctgttgtcattcttatctccagcctggaaaaagttctccttatttgtaagatcctttgtatgttcagatctccttggagcagtagagtactggtaagaccataatacgtggaaaaggtctaggtttcccttgtttctaagatgaggtggttgcaaaaatccccc

SEQ ID NO: 178440 - DNA, 1035 bp, Homo Sapiens
ggggattgcatttgcggcctcgctgccgcatcccaggctaagcgccgcgcgcaaagccgtgcggagattggaggccgcgcgggtccctggtctgggccatgtctggctgtgatgctcgggagggagactgttgttcccggagatgcggcgcgcaggacaaggagcatccaagatacctgatcccagaactttgcaaacagttttaccatttaggctgggtcactgggactggaggaggaattagcttgaagcatggcgatgaaatctacattgctccttcaggagtgcaaaaggaacgaattcagcctgaagacatgtttgtttgtgatataaatgaaaaggacataagtggaccttcgccatcgaagaagctaaaaaaaagccagtgtactcctcttttcatgaatgcttacacaatgagaggagcaggtgcagtgattcatacccactctaaagctgctgtgatggccacaccttctctttccaggacgggagtttaaaattacaccatcaagagatgataaaaggaataaagaaatgtacttccggagggtattatagatatgatgatatgttagtggtacccattattgagaatacacctgaggagaaagacctcaaagatagaatggctcatgcaatgaatgaataaccagactcctgtgcaatactggtcagacgtcatggagtatatgtggtgggggggaaaacaggggagaaggccaaaaccatgtgtgagtgttatgactatttatttgatattgccgtatcaatgaagaaagtaggacttgatccttcacagctcccagttggagaaaatggaattgtctaagccaaaagaaagtctaattatatacagagataaagctaaacgtaattattattttaaatgaaagctatttttttaaatgaattgacaatttcttcatgatgctactaatttgccactaaatactgcaaatggtcaccctgaatctcttctgacattggatgttatttgcttatattcttataatcttaaatgagggcacagcg

SEQ ID NO: 178441 - DNA, 1024 bp, Homo Sapiens
  misc_feature (14)..(14): n is a, c, g, or t
  misc_feature (354)..(354): n is a, c, g, or t
ggcgctctccaggntcttcaaaggcttcacctttctccaaaggcagatgtgaagaacttgatgtcttatgtggtaaccaagacaaaagcgattaatgggaaataccatcgtttcttgggtcgtcatttcccccgcttctatatcctgtacacaatcttcatgaaagaaagccttgagccgggccatgcttctcacatcttacctgcctcctcccttgttgagacatcgtttgaagactcatacaactgtgattcaccaactggacaaggctttggcaaagctggggattggccagctgactgctcaggaagtaaaatcggcttgttatctccgtggcctgaattctacgcatantggtgaagataggtgtcgaacttggctgggagaatggctgcagatttcctgcagcctgaaagaagctgagctgtctctcttgctgcacaacgtggtcctgctctccaccaactaccttgggacaaggcgctgaatgaaccatggagcggatggcattgtcctgcagtcgtatagtatagcagtgcaggaacaaacagcacttgccagcaaagtctgtgtgtactgttaagtgtgtgggaggcagagagaggagcaggggccatgggcttcacagcatggcacacctgtgggaactgcaagacattcctctcacagctagaaactgaaacaaaccctcttgctagggggtggtccgtgtgaagtgtcatcctgtccccctcataattactaattagctggaacttggcagcagcctctactgggcttttactgtgctgtgttcagtcatgtcctagggagtcagcttagccccaggtgggaatccttattggctaaggactggatccactttccatgttactttacatccgggcgattaaggaggtgctgtaagacatttgtggtagatgaagacgatacttaggttggagcatggttcgagatgtactggggtacctccagacttcggaagcccaaagcaatgaatgttatggacctaccggagggtacc

SEQ ID NO: 178442 - DNA, 799 bp, Homo Sapiens
ggcacgagaagattgtccagttccattgggagaaatatgcatgctcctggcatgaagaagatcaagttagacactccagaggaaattgcacggtggagggaagaacgaaggaaaaactatccaactctggccaatattgaaaggaagaagaagttaaaacttgaaaaggagaagagaggagcagtattgacaacaacacaatatggcaagatgaaggggatgtccagacattcacaaatggcaaagatcagaagtcctggcaagaatcacaaatggaaaaacgacaattctagacagagagcagtcactggatcaggcagtcacttgtgtgatttgaagctagaaggtccaccggaggcaaatgcagatcctcttggtgttttgataaacagtgattctgagtctgataaggaggagaaaccacaacattctgtgatacccaaggaagtgacaccagccctatgctcactaatgagtagctatggcagtctttcagggtcagagagtgagccagaagaaactcccatcaagactgaagcagacgtttttggcagaaaaccaggttcttgatagcagtgctcctaagagtccaagtcaagatgttaaagcaaactggtagaaatttttcagaagccaagagtgagaaccgaaagaaaagctttgaaaaaacaaaccctaaaaggaaaaaagattatcacaactatcaaacgttattcgaaccaagaacacaccatccatatctcttggaaatgcttctagctcgggacttcacatgaaagaaatgtgatttttgccatgg

SEQ ID NO: 178443 - DNA, 513 bp, Homo Sapiens
aaaacaaaaaggaaaacaaatgatgaaggtctgcagaaactgaaacccagacatgtgtctgccccctctatgtgggcatggttttgccagtgcttctaagtgcaggagaacatgtcacctgaggctagttttgcattcaggtccctggcttcgtttcttgttggtatgcctccccagatcgtccttcctgtatccatgtgaccagactgtatttgttgggactgtcgcagatcttggcttcttacagttcttcctgtccaaactccatcctgtccctcaggaacggggggaaaattctccgaatgtttttggttttttggctgcttggaatttacttctgccacctgctggtcatcactgtcctcactaagtggattctgggctccccgtacctcatggctcaaactaccactcctcagtcgctatattaaagcttatatttttgctggattactgctaaatacaaaagaaagtttcaatatgttttcatttcctggaggggaaaatggggat

SEQ ID NO: 178444 - DNA, 949 bp, Homo Sapiens
  misc_feature (706)..(706): n is a, c, g, or t
  misc_feature (729)..(729): n is a, c, g, or t
  misc_feature (794)..(794): n is a, c, g, or t
  misc_feature (886)..(886): n is a, c, g, or t
ggacagttagagatgtttatgattacttccgagctgtcctgcagcgtgatgaaagaagtgaacgagcttttaagctaacccgggatgctattgagttaaatgcagccaattatacagtgtggcatttccggagagttcttttgaagtcacttcagaaggatctacatgaggaaatgaactacatcactgcaataattgaggagcagcccaaaaactatcaagtttggcatcataggcgagtattagtggaatggctaagagatccatctcaggagcttgaatttattgctgatattcttaatcaggatgcaaagaattatcatgcctggcagcatcgacaatgggttattcaggaatttaaactttgggataatgagctgcagtatgtggaccaacttctgaaagaggatgtgagaaataactctgtctggaaccaaagatacttcgttatttctaacaccactggctacaatgatcgtgctgtattggagagagaagtccaatacactctggaaatgattaaactagtaccacataatgaaagtgcatggaactatttgaaagggattttgcaggatcgtggtctttccaaatatcctaatctgttaaatcaattacttgatttacaaccaagtcatagttccccctacctaattgcctttcttgtggatatctatgaagacatgctagaaaatcagtggtgacnataaagaagacattctttaatanagcatttaaagttatgtgaaatcctagctaaaggaaaaggacactataaagaaaggaatattggnagatacattggaagatccccttcaaaggaaacccagcacaggaaaatgactcaacaacaaatgtacagcaattaacacccatccagaagaancttgaagggaatgccttttatttttttaataagggacccttgcaagaagttttcccccgaaaa

SEQ ID NO: 178445 - DNA, 725 bp, Homo Sapiens
  misc_feature (550)..(566): n is a, c, g, or t
  misc_feature (687)..(687): n is a, c, g, or t
ggggggaagaagaggtagggcgccgccgtgacagattagtcctaaagggaacggggttgttagttcaattggctaccgagaaaaaaccaggctgggctgggcgccgccatgacaaccgataccggaaaaggcgggtcgttccccccggacagccctacgccggcaaaggtctcgagatgcaggcggccctagaggtcaccgctcgctactgtggccgggagctggagcagtatggccagtgtgtggcggccaagccggaatcctggcagcgggactgtcactaccttaagatgagcattgcccagtgcacatcctcccacccaatcatccgccagatccgccaggcctgtgctcagccttttgaggccttcgaggagtgtcttcgacagaacgaggcagctgtgggcaactgtgcagagcatatgcgccgcttcctgcagtgcgctgagcaggtgcagccgccacgctcacctgcaactgtggaggcacagccacttcctgcctcctgaggactcctctgacggcaggaaaactggacatgaatgactgnnnnnnnnnnnnnnnnntgcagagtggccagatggagtcctgagccctggacatgggcccggctttcctggatatcaggacttccaataaataaagactctgtatactgacccaccacactttatccccccctttggntttacatggtcgggccgccttcgggcccttccaaaaat

SEQ ID NO: 178446 - DNA, 1057 bp, Homo Sapiens
  misc_feature (64)..(158): n is a, c, g, or t
  misc_feature (172)..(188): n is a, c, g, or t
ggctgtggaatgaaatgtttctcaagagcctataatatagtagatagtgcatattaagatgtcnnnnnnnnnnnnnnnnnnnnnnnnnnnnnnnnnnnnnnnnnnnnnnnnnnnnnnnnnnnnnnnnnnnnnnnnnnnnnnnnnnnnnnnnnnnnnnngagaccctgtctcnnnnnnnnnnnnnnnnntcaatttagctagcaggaatttgacatttaaagagggaatcttctctacctctacaaaatcaacacttaacacttttttcaccttcagaattatttagaatgtggatttactttgtctagttttttcctttatagtgtaatttattgttactctctatttactgactaccagagatatacaaaatactgtgcaaaagattgttactgttcaaagagcttacaaactaaatttaaaagaatagcaagtctgaaaaatagaagatagtcaaatatttgtttatgctaagaactgtttttaattttcagctttgatgtaaattgctagcttaggtgtctttagttcaagcatgttaggaaatcctctttattcttaaatatagatacatgtctgcatatatgattgaattttagagccagaaagcatgtagagcagttgtgattagtagaaaatacactgacaagaagatatttgcatttatttcccaaagctgccagtaactagattttgtgacttaagtcatttaacctctccttgattagagcttcctgagccatgcacactggcactgcaaatcacagacaggcctagatacagatcccctcaccccttgctacatccaaaggtggcctgggtggctggagcctctgggccagaaccacctttgtccattttcctcagtgtgcctacagcatcgctttccatgtgtgccataacttgggaatagtcgggatgtgtcgcttaactcctttggcaccattagttatctgtgaagaccatctattccacactcttcattctttaaaaagagacaataattatttttaacttactgaagtttaaaattacctagcatttctgattacaacca

SEQ ID NO: 178447 - DNA, 802 bp, Homo Sapiens; identical to SEQ ID NO: 4066
  misc_feature (30)..(31): n is a, c, g, or t
  misc_feature (668)..(678): n is a, c, g, or t

SEQ ID NO: 178448 - DNA, 882 bp, Homo Sapiens
ggggagcccggagctgcagccaccggggagccaggtaccttccgcgagacgtcgaggggcgagtcctagtctcttttctccgcactggaagacttgaacacttccttctctgcagcaaagcacctgctctgagtggccatggggaagcgatacttctgtgactactgcgaccgctccttccaggacaacctccacaaccgcaagaagcacctgaacgggctgcagcacctcaaggccaagaaggtctggtacgacatgttccgagatgcagctgccatcttgctggatgagcagaacaagcggccctgcaggaagtttctactgacaggccagtgcgactttggctccaactgcagattttcccacatgtcagagcgagacctgcaggagctgagcatccaggtggaggaggagaggcgagccagggagtggctactagatgctcctgagctccccgagggccatctggaggactggctggagaagagagccaagcggctgagctcagcccccagtagcagggctgaacccatcagaaccactgtcttccagtacccccgtgggctggccaccagttcaggaagctgcctccatccctgggggcacccccaccctgggggggtggccctctgcagccccaaaagtccaagggggggcttgaagcccccttggccccccgaattggaccccccacgggggggccacttttcctccatcccgtccaccaataagggaaggcccaagcccctgggttccttggcttacccccccatggggagggctcccgaaaaccattttggccccaggccttcacttggagggttccaaggacacccgggcccacaaccaaggggggcaagcccccccgtgccccgggggact

SEQ ID NO: 178449 - DNA, 927 bp, Homo Sapiens
  misc_feature (55)..(106): n is a, c, g, or t
gggaggaggagcccggagctgcagccaccggggagccagacagggtctctgtcannnnnnnnnnnnnnnnnnnnnnnnnnnnnnnnnnnnnnnnnnnnnnnnnnnnttgggctcaagctatcctcccacctcagcctctcaaatagctgggactacaggcagcaaagcacctgctctgagtggccatggggaagcgatacttctgtgactactgcgaccgctccttccaggacaacctccacaaccgcaagaagcacctgaacgggctgcagcacctcaaggccaagaaggtctggtacgacatgttccgagatgcagctgccatcttgctggatgagcagaacaagcggccctgcaggaagtttctactgacaggccagtgcgactttggctccaactgcagattttcccacatgtcagagcgagacctgcaggagctgagcatcccaggtggaggaggagaggcgagccaaggagtgggctactagatgctcctgagctccccgagggccatctggaggactggctggagaagagagccaagcggctgagctcagccccaagtagcagggctgaacccatcagaaccactgtcctccagtaccccgtgggctggccaccagttcaggagctgcctccatccctgccgggcaccccaacctggggggtggcctctgcagcccagagtccagtggggctgagccccttgcccccgactgacccccacgtggtcacttttctcatcagtcacaataggaagccaagcccggttcctgctacgccccatggaggctccgagaccatctgcccagcctcactgaggctcaggacacggcacaccaagtgcagccctcgtcctgggtctgcaccgggcagctctcccctcactctcctccacctgcccccctgcttcttaagaagatgggg

SEQ ID NO: 178450 - DNA, 831 bp, Homo Sapiens
  misc_feature (688)..(737): n is a, c, g, or t
aaagcaggctggtaccggccggaattctcgggatatcgtcgacccacgcgtccgtcaactacgtcccaacattccctaatagggtattcagggaacctgtcttaaattgtgcttatctaaatcttggaactttgagctaggggaggagaatgtattagactaaatacaaactgcggggttgtaagggagtctcagaacctcactgaatccttcactccagttaatggcactgctcacttcctgcctctgctgccaccatcactgtgtgaagctttcaagagcttggtacttcccagggctaccggcagtcctctgtagtccagagaggtgagattagatcttcttggttccctgtgaggtttcaggcactaaaactctatgtggggaagggaggggttactcctcctccaatgggactcaaggacttgacctccaggagtaggcccctggtcagaagtgccatctcaccagtggtcttcattcttcctcattcattctttatcatcctgtgttctgtttagttgcaacaatctcttgtgactaatgtcactcaaagcatcttgtaaatcctagggcttcctggaagttagttgccaaagtcatgcaagcatcacctgtcattcttgtgttggagttatagaattctacatcttataaaacctaactggcatttaaaacatactgtggnnnnnnnnnnnnnnnnnnnnnnnnnnnnnnnnnnnnnnnnnnnnnnnnnngacgatgctgagtccaagaatttggacagcgctggacaccaggagacctcattctatcaaaaataaaattcgaagatcgggcataccgggtcca

SEQ ID NO: 178451 - DNA, 893 bp, Homo Sapiens
ggggcagtagcgcctggtggcggtggcagtttgcccgcgggtgtgtgaagggagacagtgtggaggccacagggtactcgccacgatgagcagcaccttagctaagatcgcggagatagaagcagagatggctcggactcaaaagaacaaggccacagcacaccacttagggctgcttaaggctcgtcttgctaagcttcgtcgagaactcattactccaaagggtggtggtggtggaggtccaggagaaggttttgatgtggccaagacaggtgatgctcgaattggatttgttggttttccatctgtggggaagtcaacactgcttagtaacctggcaggggtatattctgaggtggcagcctatgaattcactactctgaccactgtgcctggtgtcatcagatacaaaggtgccaagatccagctcctggatctcccaggtatcattgaaggtgccaaggatgggaaaggtagaggtcgtcaagtcattgcagtggcccgaacctgtaacttgatcttgattgttctggatgtcctgaaacctttgggacataagaagataattgaaaatgagctggaaggctttggcattcgcttgaacagcaaaccccccaacattggctttaagaagaaggacaagggaggcattaatctcacagccacttgcccccagagtgagctggatgctgaaactgtgaagagcattctggctgaatacaagattcataatggccgatgtgactctacgtagtgatgctacagctgatgacctcattgatgtggtggaacgaaacagagtttatatcccctgtatctacgcggtaaataagattgaccaaatccccattgaggaattggatatcatctataaggtgcctcactgtgtaccc

SEQ ID NO: 178452 - DNA, 851 bp, Homo Sapiens; identical to SEQ ID NO: 4129

SEQ ID NO: 178453 - DNA, 967 bp, Homo Sapiens
  misc_feature (392)..(517): n is a, c, g, or t
  misc_feature (529)..(539): n is a, c, g, or t
  misc_feature (564)..(573): n is a, c, g, or t
  misc_feature (597)..(743): n is a, c, g, or t
  misc_feature (759)..(767): n is a, c, g, or t
  misc_feature (883)..(925): n is a, c, g, or t
ggcttcatattattttacctattagtacactcatagttagctttgtaataaatttatgttttctttaataattttagttcttcaaagaatggctgatgctggcctgtaatttttctttcaaggatgataatttgtgtgttgtttgatttgtttatattttacatctctgtagttttatttttagaagttgtgagatattggatgtgtggctatttttcctttctctgtattctttatgaaacataacttttgaaaaacctatgtattattcatacagctttggtttgtatattctgtatagcctaactacacacatcaaaatgtatgtcaaccaagtgtttagaatgaaattataagtgtttaagtccaaataaagcatgtgatgtggaatnnnnnnnnnnnnnnnnnnnnnnnnnnnnnnnnnnnnnnnnnnnnnnnnnnnnnnnnnnnnnnnnnnnnnnnnnnnnnnnnnnnnnnnnnnnnnnnnnnnnnnnnnnnnnnnnnnnnnnnnnnnnnntttgggggcccnnnnnnnnnnnaaaaattttttaaaacctttttttnnnnnnnnnnccccaaaaggaaaagaaaaggggnnnnnnnnnnnnnnnnnnnnnnnnnnnnnnnnnnnnnnnnnnnnnnnnnnnnnnnnnnnnnnnnnnnnnnnnnnnnnnnnnnnnnnnnnnnnnnnnnnnnnnnnnnnnnnnnnnnnnnnnnnnnnnnnnnnnnnnnnnnnnnnnnnnctttatttaaattttnnnnnnnnntgggaatttttgggaataggggggtaatttttttaaaccttcggccgacggggaacccccccaaaagggggtggaaaaacctaaatccccaggggaataaacccttgtggcccctnnnnnnnnnnnnnnnnnnnnnnnnnnnnnnnnnnnnnnnnnnnttttcccttatgggccccgttttaaatcaaaaggggggaaaa

SEQ ID NO: 178454 - DNA, 968 bp, Homo Sapiens; identical to SEQ ID NO: 4150

SEQ ID NO: 178455 - DNA, 697 bp, Homo Sapiens
gggcactacccagagggctgccgccgcctctccaagttcttgtggcccccgcggtgcggagtatggggcgctgatggccatggagggctactggcgcttcctggcgctgctggggtcggcactgctcgtcggcttcctgtcggtgatcttcgccctcgtctgggtcctccactaccgagaggggcttggctgggatgggagcgcactagagtttaactggcacccagtgctcatggtcaccggcttcgtcttcatccagggcatcgccatcatcgtctacagactgccgtggacctggaaatgcagcaagctcctgatgaaatccatccatgcagggttaaatgcagttgctgccattcttgcaattatctctggggtggccgtgtttgagaaccacaatgttaacaatatagccaatatgtacagtctgcacagctgggttggactgatagctgtcatatgctatttgttacagcttctttcaggtttttcagtctttctgcttccatgggctccgctttctctccgagcatttctcatgcccatacatgtttattctggaattgtcatcttttggaacagtgattgcaacagcactttatgggattgaacagaggaaacctgatttttttcccttgagaagaaccctgcattaccagtaccatcccccgcccagaaagggtggtttttccgaaaa

SEQ ID NO: 178456 - DNA, 849 bp, Homo Sapiens
ttggaatatgaacagtggagtttaaaagcaggctggtaccggtccggaattcccgggatatcgggatgtgtgaacctattgggtactgtacaacttcaagcctcgaaatcagataggcaccaccaacctcatttcctgtttcaccttgattttctgtgataccaaaatctcagcttcacaaagtcattgaaagtgttggttcatgaagttttaccatcaattcaagtaatcataaatggcaaattctgcaaaagcagaagaatatgaaaagatgtctcttgaacaggcaaaagcgtcagtgaattctgaaacagagtcttcattcaatattaatgaaaacacaacagcttctgggactgggctttctgaaaagacttctgtctgtaggcaagtagacatagcaagaaagagaaaagagtttgaagatgatcttgtaaaggaaagttctagttgtgggaaagacactccatccaagaagagaaaacttgatcctgaaattgtcccagaggaaaaagatcgtggtgatgctgaaggcaattcaaagaaaagaaaaagagaaactgaggatgttccaaaagataaatcttctactggagatggcactcaaaataagagaaaaatagcacttgaggatgttcctgaaaagcagaaaaatctggaagaaggacacagctcaacagtggctgcccattacaatgaacttccaggaagtgggtttggagaaccgtagtcaaagtcgtattttttacctaagaaactttaataacttggatgaaaagggttctcattgggagaatttttggaaaaggtacgacagacgaaaaaacgtgatatcactgttttggacct

SEQ ID NO: 178457 - DNA, 888 bp, Homo Sapiens
ctggggataaacatgaaacagctgttagtgtgagtttatcatgtggccattttcatagaaccatgaacatccttgaacttataaaccagaaatcagacagcgagtgtgctgaacaattgaggcagcttgccagaagaattacagaggatcatgtgattcagcatgggctggtagtggatgggaccagcctatctcttgcactcagggagcatgaaaaactatttatggaagtttgcagaaattgttcagctgtattatgctgtcgtatggctccactgcagaaagcaaaagtaataagactaataaaaatatcacctgagaaacctataacattggctgttggtgatggtgctaatgacgtaagcatgatacaagaagcccatgttggcataggaatcatgggtaaagaaggaagacaggctgcaagaaacagtgactatgcaatagccagatttaagttcctctccaaattgctttttgttcatggtcatttttattatattagaatagctacccttgtacagtattttttttataagaatgtgtgctttatcacaccccagtttttatatcagttctactgtttgttttctcagcaaacatggtatgacagcgtgtacctgactttatacaatattggttttacttccctacctattctgatatatagtctttgggaacagcatgtagaccctcatgggttacaaaataagcccaccctttatcgagacattagtaaaaaaccgcctcttaagtattaaaacatttctttattggaccatccctgggcttcagtcatgccctttattttccttttttgggatcctatttactaattagggaaagatacctctcctgcttggaaaatggcccaaatgtttgggaaac

SEQ ID NO: 178458 - DNA, 837 bp, Homo Sapiens
  misc_feature (739)..(741): n is a, c, g, or t
  misc_feature (744)..(746): n is a, c, g, or t
  misc_feature (750)..(750): n is a, c, g, or t
  misc_feature (765)..(765): n is a, c, g, or t
  misc_feature (770)..(771): n is a, c, g, or t
gggggcgatcccggcgagcaccttggcgcgcggagctggcaccttggcgctgttggtggcggcggagacagctgtgaagtgtgaggttctttgtctgctggcagctaggggcgacgaggcgggacgtcatggaagtgaaggatgccaattctgcgcttctcagtaactacgaggtatttcagttactaactgatctgaaagagcagcgtaaagaaagtggaaagaataaacacagctctgggcaacagaacttgaacactatcacctatgaaacgttaaaatacatatcaaaaacaccatgcaggcaccagagtcctgaaattgtcagagaatttctcacagcattgaaaagccacaagttgaccaaagctgagaagctccagctgctgaaccaccggcctgtgactgctgtggagatccagctgatggtggaagagagtgaagagcggctcacggaggagcagattgaagctcttctccacaccgtcaccagcattctgcctgcagagccagaggctgagcagaagaagaataccaaccgcaatgtggcaatggaccgaagaggaccccagcatagaagagcacacctgggccccgccgttttcatggaagtcagaaaggccctggcagcccattttcctgggacgttgaagaaggaatggtttatttggattttttatccctccatccccagccaggccctgggctttttgcgggctaagttggggcaccatccccnnncgnnnaatnctcaccccccccaancccanntaacactggtcgggccgccccttcggccccctccaaaaagccttttcctaaaacccatctcctttg

SEQ ID NO: 178459 - DNA, 791 bp, Homo Sapiens
  misc_feature (31)..(31): n is a, c, g, or t
  misc_feature (140)..(140): n is a, c, g, or t
ccattaaagttcccattccgtgcccttcagntgatgagggcacgagaactccaatgagccagttaggacagactcaaatcatctcagctggaagcactctccactttaaacatactcatctggcccacctcatttcaaantttaggcaaaaatggcctccctgaggctttatgactagctttcttctttttcttctgatagtgttttcccagattggctccttgatgtgttctggtaactgttctaattgtgtctttgttacttccatggcaacccctgcaggtaagtttcgctgaatatattccaagtagacatctgctgtgcttccagttagatgttctaactctaaacatctgtaaagtgttctcatttcatactgaactctgtgcttcttgtaaatatgcactgattggagaagagtaaatcgctctattttccttggaggttcatgtactttaatagagataccaagttctttagcagcaagcacagcaaaatattcataactgtccaatacagacttatcgtgacctttcaccaaaaccgagaggcgcttatataatatgtctggttcatcagagattgttaccacaggtttggtcaaatcctttggaacatcaacgtgtaggtttgaaaactgtacccacttcatattggtactgagaagcaagccaccatttttggctgtattgcccttagaagtgtttacagaaaaattccccaatccctgccagaggcgccggcacacagcaccgaacgctgtccgcgccgccatcttgccggtccccccc

SEQ ID NO: 178460 - DNA, 345 bp, Homo Sapiens
gggaaaaggcttctgttcacaacagtggcccatggagaaagaggctcttattaaacttagatgaaagagctgcttccattgtcagggtattttctaatttcagttcaaggaatatcctaaaatttagccttgttcagaatttactgcacataaaaaagggtatttcatccagaatagatcagttattgaagcagtgctgctaacatccattccctttcataccaccattttcaccctgtttcttcccctcctccagttctttggaaatttgtgatcgggggatcttagttgcttatttgttttgactcttgtgtgctgtgggcactggagtagagatttctggag

SEQ ID NO: 178461 - DNA, 968 bp, Homo Sapiens
ctatgcgcgaagagggcaagaggggtttaacaagtgaccgggatcgagcggggatgacgggggcccatcatgcctgaccggcaatgtgtggggacgccaggccatgaagcgatgggggtcccggggggaaggaggcattaatatgaaccaaggatgcttaaaactgggcctggcaggtgccagagggtatgggatgaagaatttaggaagaaagcccgggtgtaaagtatcaggggtgatataaatgggggtcagtagatctttttctcagaccctcccaggctgaaggaggcccaccctattccagcatctgagagcaaaacctgccggggcagcacagaccctgccctctttacacctcgctaatgtccaggagtccgcacttgtatgggaccaactcccaaggagtacctgagagtttctccctggtctggcccctgttcccaagacataaagatcaggagaaactgatttgtgtgtggacaaaaatagagaagcaagaaaaattcaatgtaactaaagctacccaccacctgacagccatctagaatgtacctgagccctgtgccagccatgaccacctctgtcatctcagcctcactgtcctgacacccccactgctagctagatcagagagagatgcagagagggccgggccccagggctttgagtctctctcctaagtgcaatcgatgaagcaggaggaatccaggctctgcctgccctggcagcagggtgcctcttcctagtctgtaggaggagggtttccccgaagaggccgaggcagagggagaggaggggaagagtctgtcagagaagaaccacaggagaggttgaccacggcagccttgagctcaaagagggacctcaagtcctaggcacagtggggtttttagtcactcacaaggggattgcggtcatcttgttgactctgacccttgagtttcttcttaaagatggaaattgcc

SEQ ID NO: 178462 - DNA, 916 bp, Homo Sapiens
tggtaagactcttagaaatcacagatgttgatagcattctcatcataggggacatgtaaaacaaggctgaccataataaatgattagttgggatacttttgtattttaaagaaaaaagataaaacagtgacacgggtttcccttccagaccctttttgtaatgtcagcaacagtacatgatatagaacagtaagaaaataatgtctttgtagttgccaattgcttaaatctttacgaagaaaacatgatcatctttcagtcaactgactgatctgagtacatggcaccaaagaaagcccttcagaaaatagaagctaaatgacataaagtagtttggaaaatcttcaagcacctccctttattccaattatccttttccaaagtctggctttcttataatccatcactttgattacaaaacagctctcttctgggaatttcaaaacacttcccgttacgttaagggaaaatgggtacaccagattcatgggttacaggattgctttctctagacttggcttctctttaacatggctaaatggaaataatttagcttggttaaatgaaagctacttcacttacaggataatctcaggagacatgagtggagtttttcatatggaatttcttagtaaaatgtactgtttaggatatgagagacggaattaagataatgttttccagatgattcttggcctgatcctaagaatcaacaataacaatcaatagcaaggaacattacacattcaaccctgagtgatgaagagagttcaggaagagagccccttaaactctgaattaagggctctttggtaatatcatatactataatatttcaaaccaaaacttcagaagggttcatgatcctatttcaggactttagaaaatatactttgtcctctggaagcaatttcac

SEQ ID NO: 178463 - DNA, 837 bp, Homo Sapiens
  misc_feature (657)..(684): n is a, c, g, or t
ggggcctgccgtgtagtcgccgccgtcgctgccgctgccgctgccgccgtcgttgttgttgtgctcggtgcgctgagctccgcggctccgcgagccggttccgtccccttcccgccgccgccatgaagtggatgttcaaggaggaccactcgctggaacacagatgcgtggagtccgcgaagattcgagcgaaatatcccgacagggttccggtgattgtggaaaaggtctcaggctctcagattgttgacattgacaaacggaagtacttggttccatctgatatcactgtggctcagttcatgtggatcatcaggaaaaggatccagcttccttctgaaaaggcgatcttcctgtttgtggataagacagtcccacagtccagcctaactatgggacagctttacgagaaggaaaaagatgaagatggattcttatatgtggcctacagcggagagaacacttttggcttctgagggccattgctgggctaggtgcaccgtaactgcttgtgtatcttgtaaatagccagccattttcagttattataccagaacctcttcacatagacctattagtgcatttgtaactggatttatttcttaatatattgggaaggttttgtttcccttagactagtaaaattatcatacagannnnnnnnnnnnnnnnnnnnnnnnnnnngtggcattgtccctcatgccctgtattcctccagggaaaccttgtcccttcctggaaaatccataattgaaatggatatttttcttatatcccaaattggagggtaaggtgccggctatttaaaaggtgaaaaaggggaaagggggattgcca

SEQ ID NO: 178464 - DNA, 487 bp, Homo Sapiens; identical to SEQ ID NO: 727

SEQ ID NO: 178465 - DNA, 624 bp, Homo Sapiens
  misc_feature (13)..(13): n is a, c, g, or t
  misc_feature (25)..(25): n is a, c, g, or t
taaacaaatgtanaatttggggctnaaaagtcaattaaattaaatttggccagttgaaaaaactcgactactgatttgcttactaattcatctatctcctttatgttttttattttgctccctatctaacttctttagatatcaaattccattgatttttttcctttcttatgaataaagccatttttgttggaaaatgccaaaaaaaatttaaaggatccaattaacataaatttgattaacaacaaaataaatcaattgagtgaaaggaaacttaaccaaacttcaaaactatagaataataaatttagaattacttatccttaacatctacatttatagatagcatatatagcaatagagcatagtacacactgccaaaaagttaatcacaagctttagtaaacagccaaatgtggatcagggactttctgagttgttaacccacagcagcatattttccctaatcgttcttgtcgttggtgaacttctccagacttttgcttgcagtggtggcaaatgtccgtgtgcacatgccagggctacagacaacggcccatttctaggcaccctgcagcttgaagatcaattgacaactgtaaatttgacaaaaaacaacttgcc

SEQ ID NO: 178466 - DNA, 898 bp, Homo Sapiens
  misc_feature (651)..(665): n is a, c, g, or t
gggtaataacaagaaggagcatcactgtctactcagaagactgagaaacctgctgttcattatgtagttcagatatttatcacaatcatcctcattatggaagaccttttaaagcattgttttagaatgtctgagtattaagatacagattaattgggaatatctgagtattaagtactttcttcagagtataagatgtttacctcatctttttacttttgtgtgtgtagttctttcaagttgtaggaaacattttaatggaatttaaactcaaaaacttgaatacaggacaatgcttgccttttcatgtatgtactacattttttgctaagaaatactgatatttctgtttagttgagctagaaatacttcttatttatacatttaggaaagcaaataatgcctactactccgacttttatagaagctacttttaaatcagaatatttaatttttgatattcatataattaatagaagttgcatttatattttttatggggcatagttccttatgtgtttttttaatgtattttcatactacatactgaatttgtatgtttttaaaattgttacatctagacaactgtaaacattatttttttagctagtgcaaacctagtacctgccatttttactaattttgtctttnnnnnnnnnnnnnnngcacatgacctaagttgaaaattaagtaagtttatttttaacaaaaaatgcctgaaaaaagctaaattatttaagtcattaagatattgagaaaaaatttgaaatttttactatttctgtttccacaattccaaatatttatcttggtgtatatattgttactttaacagaacttgcattattttgtttttaataaatataaacatgaaatttttgtaaatcgaacacccttc

SEQ ID NO: 178467 - DNA, 793 bp, Homo Sapiens; identical to SEQ ID NO: 765

SEQ ID NO: 178468 - DNA, 577 bp, Homo Sapiens; identical to SEQ ID NO: 800
  misc_feature (367)..(402): n is a, c, g, or t

SEQ ID NO: 178469 - DNA, 1258 bp, Homo Sapiens
  misc_feature (241)..(367): n is a, c, g, or t
  misc_feature (378)..(391): n is a, c, g, or t
  misc_feature (551)..(561): n is a, c, g, or t
  misc_feature (617)..(628): n is a, c, g, or t
  misc_feature (1110)..(1110): n is a, c, g, or t
gggtagtccagtggtgctgccctgttgtgcaaactgctcctttttctcgtgtttttgtaaagagcttccatctgggctggacccagttcttgcacatacaagacaccgctgcagtcagctaggacctttccgccatgtattctattctgtagtaaagcatttccatcaacaatgcctaattgtatctgttatttttggtttaacacacactgattcatactaataaatattttcagttttnnnnnnnnnnnnnnnnnnnnnnnnnnnnnnnnnnnnnnnnnnnnnnnnnnnnnnnnnnnnnnnnnnnnnnnnnnnnnnnnnnnnnnnnnnnnnnnnnnnnnnnnnnnnnnnnnnnnnnnnnnnnnnntctttggcggnnnnnnnnnnnnnnaaaaaagtttttgaaacttctctcggggcgccggcgcccaaaagaaaaacgacttggccctccccggttttcccaaaaaaaccggggcttccgcccagcggttttattcctccccaaacaaaaaaaccccccgcggtgacaaccctccgcgttttaaaannnnnnnnnnngcgcgcttttgcgaatatttttccgggaccccgccataccaggcgcatcctatggnnnnnnnnnnnnacatataaaacccccgcccccgcatgtttgcagatttctccgcagaagaaaagggggtgagccactctccattaataccgtttcttccgtcgacaacccgtgaggagtaccctccacaccacaacgaggtggtgcggagggataacatacccgggcgaaccgcggccgcagagggcggcgcaaattagcagtgttaccgcgtttggctctcacctgtgtgtgcgcgcgctacataaatataatttttcacctccccgcgcgcgcccgcaaataaaacagcggggtgttaaaatatccaaaacgccgccgctttacactattatggtggctaatgcgccggcctaacaatagttataaaaaattggggggaggacaacctccccttccccctcccggatcccccgcccgccttttttttccgcactattatccgcctctgccccgccgcctcagaatacctctatcccgccgcggagaaattnattcgcgccccgtattttctgcccgccgcgaacacgcccgccaaccagtattctcgggaaaataatataatgggactcaaaaacaccgctccccgcccaaatacgaacgtcgcggtggttattacttctcgccccgcccgccgccccg

SEQ ID NO: 178470 - DNA, 1404 bp, Homo Sapiens
  misc_feature (1216)..(1266): n is a, c, g, or t
  misc_feature (1298)..(1307): n is a, c, g, or t
gggccgccctgccagaggagagggaggtcacggcgtaaaggtgcagctgccgccaccgccgcttctgcaaggtctcagggacgggctgcagccatgtcctattgccggcaggaagggaaggatcgaatcatatttgtaaccaaagaagatcatgaaactccaagcagtgcagaattggtggctgatgaccccaacgatccatacgaggagcatggattgatactgccaaatggaaacattaactggaactgcccatgccttgggggaatggccagcggtccctgtggagaacagtttaagtcagccttttcctgcttccactatagcacggaggagatcaaggggtcagactgtgtagaccagttccgggccatgcaggaatgcatgcagaaatacccagacctctatccccaagaggatgaggatgaggaagaggaaagagagaagaagccagcagaacaagcagaagaaacagctcccattgaggccactgcaaccaaagaagaggagggatcaagttaatgaaggccacaaggcactgggcaccagtccttttggagtggaccttttgcaaaaggccttgtcatcaccttccaagaaagtttcccttctgttgtcctgtgcattataatatacaaaataacttattttgatgatcagaggtcttgaggtcttgacctcttgacatatacactgaaaaaaatggggggtggtatgtatgtgtgtccctaccaaaacctgtgggccgccacttttgaaattctcagaattgccctgaaatttttgccacttttaaataatgtgctgaataagctcagcaactaaaaaccattacccaagaacgtttcttgtgagtgagctgatttattctgattcattatattccttttggtagattttataccccttggggaaataatacaacaaaaacatctcttaaaaatgctgggatggggccatatctactaccagaggccagatggccagatatgattttctgcaaacccatcttgaccttgagtatgtggaggggggaactggaactttattccctgaaacatttttgggttcccatggaagggggtgaacctcccggggttttctggggtttggaaggaagaaaaaatttggacccccttccctttcccaaacccccttttcaaacggaaaggaaaaggcccggctcttggccttttccttggtaatttccaaaaannnnnnnnnnnnnnnnnnnnnnnnnnnnnnnnnnnnnnnnnnnnnnnnnnntatatccgcggggcaaggcttctttggcaaannnnnnnnnnaacccttattctttcccccctagagccccctctcctataaaggcaccccccctttggaatcttcccgccccctctctttatacaggccccgcctccc

SEQ ID NO: 178471 - DNA, 716 bp, Homo Sapiens; identical to SEQ ID NO: 861

SEQ ID NO: 178472 - DNA, 501 bp, Homo Sapiens
gggtgtcataaacctctgagaactgtagcctgcttcttagcttctcatggagattcctagaggtgcgttcgagttttcagagtaattttcccagaccaaccagcgtcagtgggaaatctgacctctttgggcaaactgcgatcattcattttccctgagtcccctggtggggtggggggaattctgcctcaggaccctgaggggtctttggggcaagatggccttggtaattgcagccactaagaacaggacttcatttcaaaggcattaatgaagtaaccagggtgaccatcaagtaaaattaaagcacaagatcattgtaggaggcttccttgtcaaagacgtgaacgtgggatttccaacgcaccacggtgtgtccactcatcactgcatgttaggaactgctgtctctttgggacacgagttaaaagaacacactaatttctggagtgtgcctgcagcttcacggccttcatttgttactagttatttctggaagac

SEQ ID NO: 178473 - DNA, 804 bp, Homo Sapiens
gggctggcagctggcggcattgaggcggacgcgtctagaggtccgtctgaccgcggcgtcgggacctggtttccgggcatgagctgagagcaccacgccgaggccacgagtatttcatagacattgatggaagcagaaaccaaaactcttcccctggagaatgcatccatcctttcagagggctctctgcaggaaggacaccgattatggattggcaacctggaccccaaaattaccgaataccacctcctcaagctcctccagaagtttggcaaggtaaagcagtttgacttcctcttccacaagtcaggtgctttggagggacagcctcgaggctactgttttgttaactttgaaactaagcaggaagcagagcaagccatccagtgtctcaatggcaagttggcccctgtacaagaagctggtggtgcgatgggcacatgctcaagtaaagagatatgatccataacaagaatgataagattcttccaatcagtctcgagccatcctcaagcactgagccctactcagtctaaacctaagtgtcactgcaaagataaaagccattgaagccaaaactgaaaatgatggcggaaaaaaccctgatgcagagtatccagcagcgcctggtttattcctactttaagccccccgataaaaaaaggactactccatattcctaaaacagcatggaaatcttcaagatgatggttgtggaattactgtagcagcaaaagccaattgggcctcccccacctaaattcgccctgccggggtaccttggaaaatgtgaaatgggactta

SEQ ID NO: 178474 - DNA, 844 bp, Homo Sapiens
ggggtttccgtacggaagcaaaggagccaagaccatggcgaaagccggggataagagcagcagcagcgggaagaaaagtctaaaacggaaagccgctgccgaagaacttcaggaggctgcaggcgctggggatggggcgacggaaaacggggtccaacccccgaaagcggctgcctttccgccaggctttagcatttcggagattaaaaacaaacagcggcgacacttaatgttcacgcggtggaaacagcagcagcggaaggaaaagttggcagctaagaaaaaacttaaaaaagaaagagaggctcttggcgataaggctccaccaaagcctgtacccaagaccattgacaaccagcgagtgtatgatgaaaccacagtagaccctaatgatgaagaggtcgcttatgatgaagctacagatgaatttgcttcttacttcaacaaacagacttctcccaagattctcatcacaacatcagatagacctcatgggagaacagtacgactctgtgaacagctctccacagttataccaaactcacatgtttattacagaagaggactggctctgaaaaaaattattccacagtgcatcgcaagagatttcacagacctgattgttattaactgaagatcgtaaaaccccaaatggacttattttgagtcacttgccaaatggcccaactgctcattttaaaatgagcagtgttcgtcttcgtaaagaaattaagcagaaagaggcaaggaccccacaagaacacataccctgaaataattctgaataattttacaacacggctgggtcattcaattggacgtatgtttgcatctctctttcctc

SEQ ID NO: 178475 - DNA, 303 bp, Homo Sapiens
  misc_feature (118)..(118): n is a, c, g, or t
  misc_feature (292)..(292): n is a, c, g, or t
cccaggcattatggctcctccaccctggtatgagaccacccatgggcccaccaattgggcttccccctgctcgagggacgccaataggcatgccgctccgggaatgagaccccctccnccaggcattagaggtccacctcccccaggaatgcgtccaccaagaccttagcatactgttgatccatctcagtcactttttcccctgcaatgcgtcttgtgaaattgtgtagagtgtttgtgagctttttgttccctcattctgcattaataatagctaataataaaaacaatnagcaattaaaa

SEQ ID NO: 178476 - DNA, 212 bp, Homo Sapiens; identical to SEQ ID NO: 1399

SEQ ID NO: 178477 - DNA, 788 bp, Homo Sapiens; identical to SEQ ID NO: 1402

SEQ ID NO: 178478 - DNA, 951 bp, Homo Sapiens
  misc_feature (161)..(176): n is a, c, g, or t
ctttaaaatatatttaaaggggtttaagacaaaaagggccattgggaaggtttttttaataagagggttcccatttaaaaaaagttcaagtaataagctggggggtccttctttttaacaaagcacaggtcatttcggcctttaaatatttttccccccgnnnnnnnnnnnnnnnngttgggggaggcaaaaatcccattccgtttgtttgctgcaagggcaggcaaccctgctagattcctgacatttggtttggaattttttgccacctggaggcttgttagtcaaggtctaaaatcccctaagtgtggtgacttttccatttcatcctgccttttcaaagctggcccaggccctcctttcagtctgacatgagaatggcgagaatggctcacccaccgtgccctcctgcacgaagccagctgggcccacatagtcacttgagttgcagctgctttctctcacacaccacaggggggcgctggacacatctctgtaaaataatacaattgtgcgtttttatgggtgaaatctgagggtaattaaaaccagcagcctagttacccagaaagagtgcttgctatgcacctgtagttcaatctttcctttctttttccaacaaagcctacccttacacaacaggaattaactagggggagaaacaccccacatacacaactcttcccccaagtctccttttccccaaacaaacaaacaaacaagctattcttttagaattataaccatcttgccttctgctgaatccaccatcaggtggcaggaaatgaaagatcagatacagatcaaatgaaagctctaaaaggcctggcctcagcattaccaaacttatttattaagaggttctgaggaaattgttcagagtaccgccacagaccccgttttcttctcttagctctctggcatacaggccaatgacttcataccagccac

SEQ ID NO: 178479 - DNA, 798 bp, Homo Sapiens
ggggtcctccctcctggtgtactgggtgggaggtggaactagtcggacaaagccctcgcgtcggacccttgccagaactcaattaatggatgcctcgaagttgacgtacatatatattcagaaatgttttgccacctgagacctatgaggaggttatgtctagagaagatatttccacactggtttcccttttcaagagctttatcgggagctgaagcagtcaatgccttgaggcctttctattttgcagtacatcccagatttctttggacagcaccccgtagaaagggaaatcaatgaaaattctcttaaaaggttaagtgtctacctagaaaacctccagaaaccaggcttcaagtctttgaaaccaactcagcttacattttatgtaagagaaacagaccagagttcctccgatggccaggaaccttttagtacttccgtttatctgttgaacatatccaaagcttgaatactaatatgcatacccagcctctcaaagaagctaaaaggatgcctgacaggcccatcaaatgggacaagtcttattactcctttactgggattcaggaccctgatgaagaccttgaacaagtctcgagagtgggaaacactctcacgtatgtaaaagtttttatctaactaaactgtatttgcagcttgtgtttatgaccctgatttattggggatggcaaaaaaatttttttattaataaaaagtgtagttccccttttaaaattaaaacccaaattttccaggaaaagaaatacctatcaggcctagtttaatcccgttaat

SEQ ID NO: 178480 - DNA, 345 bp, Homo Sapiens
  misc_feature (266)..(266): n is a, c, g, or t
aattaaaaaaaagaacaacaggatagagctgttggggtggcacagtggcccaaagagcagcttcagagataattccttggttctatgacccctgtttaactccaaattacagtcggacttggatacatcatttgtaacattgtaggaaagaaaaaagtcttggttgtgaaaaacgatttgcatttgggtaaaaataaagtgaccatgcttttgttctgtaatactgtgtgacctgtggttgttgtaatggtgatcatggagaagcnaatatgaacttggcccggattttaaatggcctaaaatttgtggtagttgccaaagaggttctcctaggtggtcttaata

SEQ ID NO: 178481 - DNA, 903 bp, Homo Sapiens
gggctttgaccgggtcgtggcagccggagtcgtcttcgggacgcgcctgctcttcgcctttcgctgcagtccgtcgatttctttctccaggaagaaaaatggcatccgttgcagttgatccacaaccgagtgtggtgactcgggtggtcaacctgcccttggtgagctccacgtatgacctcatgtcctcagcctatctcagtacaaaggaccagtatccctacctgaagtctgtgtgtgagatggcagagaacggtgtgaagaccatcacctccgtggccatgaccagtgctctgcccatcatccagaagctagagccgcaaattgcagttgccaatacctatgcctgtaaagggctaaacaggattgaggagagactgcctattctgaatcagccatcaactcagattgttgccaatgccaaaggcgctgtgactggggcaaaagatgctgtgacgactactgcgactgggggccaaggattctgtgggccagcacgaatcacagggggtgatggacaacaccaaaggggcaatggactggcagtggaggaaaataccaaggctggtggccagtggcaggcattaacccccgtctttgggggagcccccattgatcgcaccctccctgagccgcgtgggcccaaaaaaagtggggcttcccccaaatcagcagcttgggcgggaagaaacagtaccttgccccgttgccggggagggaaataactgcgcgcccgggcaaagctcccccagcagcgccgtaaaacaccgttgcccgggccggccctccggggccctccccagaaaggtcttctttgagacccctctcgccttcggggccccgcgccgtgccctcccgcttagggtcaaacgcgccacacattgggcgctctgtgacgcgggt

SEQ ID NO: 178482 - DNA, 205 bp, Homo Sapiens
gggttgtgagcaattttgattcccatgtatcacatgaattacacttccttaaataaattacagtttatggctgtatgatttattctctaattctaacatagtctagttgtcaaaaggaaatatgtaatctttttatgattgttgaatcaataaataccaatttgtgaagcttatccaccaaaaccaaatgagtacaaaaccttgt

SEQ ID NO: 178483 - DNA, 809 bp, Homo Sapiens; identical to SEQ ID NO: 1523

SEQ ID NO: 178484 - DNA, 654 bp, Homo Sapiens
cagaccctgaggagaaagctggcaaggagagcgatgagtaaagaacaagcaacaggacaaggacagggagctccaacaggcagagctccctaaccgttccccaggctttggaatcaagaaggagaagacaggctgggacacgtcatgaaagtgagctgagtgagggtgagctggagaggcggcggcggacactcctacagcagctggatgatcaccagtgacccaatgagctgttctctgcctcgggtctgtgtgaggccatggctcctgggccaccctcaccgtctgcctcagacttcttccttagtctggtctgtgtccactttttctaaagtaaccccacccccagcacaccattgttggcacctctcaaggttgctcttggtgttcaagggtcccctactccctggactagtgcagtccttgccctcagccccagaccagagatgggtggtatatgccatgtggggtgggtgatgccagtagataaaagtgtgagagaaggggtctccagggaagagtcacaggctgttggacacagcctgggtggcagagggcagggtcatcaccctctagcatcagtgcctgctcctgcctgccctggccctgaggctccaccacttcttcctccacccaggacctaatgtacgtgtg

SEQ ID NO: 178485 - DNA, 412 bp, Homo Sapiens
  misc_feature (277)..(277): n is a, c, g, or t
  misc_feature (315)..(315): n is a, c, g, or t
  misc_feature (347)..(347): n is a, c, g, or t
  misc_feature (360)..(360): n is a, c, g, or t
  misc_feature (385)..(385): n is a, c, g, or t
cagaccctgaggagaaagctggcaaggagagcgatgagaaagaacaagaacaggacaaggacagggagctccaacaggcagagctccctaaccgttccccaggctttggaatcaagaaggagaagacaggctgggacacgtcagaaagtgagctgagtgagggtgagctggagaggcggcggcggacactcctacagcagctgggatgatcaccagtgacccaattgagctgttctctggcctcgggtctgtgtgaggccatggctcctggggccanccttcaccgttttgccttcagactttttccttagtctngtctgtgtccattttttttaaagtaaccccanccccagcacaccntttttggcaccttttcaaggtttgnttttgggtgtttcaaagggttcccctt

SEQ ID NO: 178486 - DNA, 916 bp, Homo Sapiens
  misc_feature (25)..(25): n is a, c, g, or t
tccttgtggcccttgctttggtcancgtagggatagaacatgcctcttgcagggacttgtcatctaccaggtcctggacccttgggcgttgggcagtatacattggagtactggaggatggacaccagtgtcacaacgccgtagtacagcaggttcttggatagcaatgcgcaccaggttgagctccacatctgcctctgctgaaatcttctggatgtggcggaacccatcaatgtagggcaggatttgttgtgtagtgaggtcccactgtgagttgaagaaatcctccttgtctttggtaaagacaggtacatcatactcctgggccaccggagggtctggccgctgctcaatcaccttcaagtggatggtgttggactcatcaatgggcagagtgcaccggcctgaggcatttagctcctccagcaagatggtcatgatgggcaccaacttctgcttgctctcctccatggacacgaagctgctctctagctctagtgtggtcagatagccagccagctttttaacaatgggctcgagggcgcaggtcttggcctgggcatcacacacgaagcccaggttgaagaggagagcattgcggctgtacttcttgtgttcgatgcacacaggacagccgatcagcttcttttccatagctgtgacagtgataagcttgttctgcagctctggcttggtgatgatgtacacttggactgtgtcaaacagctctcgggagatgaagtcttcagggacctgataggtgatcttgggtcccagcgtggggtggaactcgctgaagaatatgcattcgatgcggcagccgctgcccatggcaataaccgggcccaggcccgtagctcctcgttcctcgcgcagaggcgtccccacctcctgtgaacacttgtcagagacagcc

SEQ ID NO: 178487 - DNA, 875 bp, Homo Sapiens
  misc_feature (790)..(790): n is a, c, g, or t
  misc_feature (792)..(792): n is a, c, g, or t
  misc_feature (813)..(813): n is a, c, g, or t
  misc_feature (815)..(815): n is a, c, g, or t
ggtaattaagcaagaggttcttttctaaaagtggtatctgttatccacaatgtattttagttattcccacaagtcaggggtccagataaaatgagggttatcagctaactgatatgctatcattgaggttcatcaatgaatttgtacatttctagttccctttggtgaagggaaaaatgatgattttgcaagacctagattttggcttggtttcttgcctccttttttggcagccttcatcttctcatctcccaaaccccctgagcccgtagggttttcatagtggacaaagaacttgtggtcttttaaaactgggactgatacttttttgagagagtatcgtgtcgaaagtgtgatgttctaccactttaccaataactaattttaaatacacattgtcctctcgatttttggaccaaacagacgctcacagtggaggcttatcaagggttgcattggggaagaagcctctccctctctgtcagcaccagctggtaaaagtgactgtacagatgtgcattttccttttggtataaatggtccacagcactaactggtaaagcttattgtacagtatattgtcagtattcttctggttcagcataccttatagttcacatataacctgtattaattgtatagattgtgcattaaaaagctgttaccaagttgtcagaacataagagcgaaaacaaggtcatatggaatattttggcttggaagtaccctttggatcatagcaaaggaaatggtttaaaaaaatcaactggtactaaaagtaatttctccncnccgcccgctccggacccgccntncaacatggtccggcccgcctccgcccccccgaaaaaaacttccctaaaccattccggttt

SEQ ID NO: 178488 - DNA, 834 bp, Homo Sapiens; identical to SEQ ID NO: 97790

SEQ ID NO: 178489 - DNA, 880 bp, Homo Sapiens
  misc_feature (491)..(491): n is a, c, g, or t
gtgttgaggtgttttatccgcgatgaattaaaatatttattattataaaatgatctacagaaccatgtcacattgcaagtatatataacatatacttgtaaagtccacatttcccatctatatttcagtggtttccttaaaactaggacttccccacaccttcatgatgttatcttttgaagactgagatggtgatcaactaaatcaagtggagttgtaaattttctggatggaatttccacactgccaccgacatgaataaaaagaccaggtttcttcatactctccattgcagcagttgtctgcatgtgttgcggtgaattcatgcacattaaaaaaaatggtcaatgtattcttccacgaaattatattatgttcagatatttcagtttaaaaatatttgtgaatataaacatatgtaacataagcaatgctactgcatctgaataataaaagaaaaataaatataatgctggtcagcaatgctggtntaagaagcagtacagtctattaaaatgccttatttggagatttaaatttcccttgttttccagcagttaggttatttggtgttggaagcctatataaaggaaaagaacttctcaaaaacaatgtcccgtgcagttggaataatgaaatctttactcagtctctgttggtgttatttgctgcaaaggcatgtaagtatcccatctggctcaggccactctgaatatgtgcaacatggatttctacattattctgaaagcaactgatattagaagcgtctattgtactcttgatatcatttaatgagtctgtaagtgatttgaattcaaaggaattcaggtctcctccttctgctagacacttaatttgtaacaaaatagctgtaagcccc

SEQ ID NO: 178490 - DNA, 507 bp, Homo Sapiens
  misc_feature (82)..(82): n is a, c, g, or t
aaatagcgtagatgcatctctgcgtattttcaagtttttttatcttgctgtgagagcatatgttgtgactgtcgttgacagnttttatttactggtttctttgtgaagctgaaaaggaacattaagcgggacaaaaaatgccgattttatttataaaagtgggtacttaataaatgagtcgttatactatgcataaagaaaaatcctagcagtattgtcaggtggtggtgcgccggcattgattttagggcagataaaagaattctgtgtgagagctttatgtttctcttttaattcagagtttttccaaggtctacttttgagttgcaaacttgactttgaaatattcctgttggtcatgatcaaggatatttgaaatcactactgtgttttgctgcgtatctggggcgggggcaggttggggggcacaaagttaacatattcttggttaaccatggttaaatatgctattttaataaaatattgaaactcaccagtcatggacaa

SEQ ID NO: 178491 - DNA, 919 bp, Homo Sapiens
  misc_feature (21)..(21): n is a, c, g, or t
  misc_feature (30)..(30): n is a, c, g, or t
  misc_feature (55)..(55): n is a, c, g, or t
  misc_feature (104)..(126): n is a, c, g, or t
aaggtggggaaaaaatgcctngggcccccnggaattcaaggcaaaagtgagccgngaacacccagtgcactctaacccgggcaacagagaaagaccctgtctcnnnnnnnnnnnnnnnnnnnnnnngaataggaagcttctgatatttgtctttctggagtactatttgctttgtgattcccacaatgcaatgcttcacctagtacatcatctggttctcccagacccttttaggactgaactgtgctttaaatagttacatgtctgcctgttacacagtggaaactagtttccttcagagggacacgaaaccacagatgaggccacaaagaaagcattctccttccacagcaactggctgagaaaacagaaccaggaaaattctgccttgaggaaacaatgtcagcttcctgaatcatccagggagaaagggggagagaatagattttaaaatgcttaaaaaatggcctttcagagtgctctgttccaattgtttgtgtgtttgcaatcctgtgtcaataatacttggcctctaacagaaacacctggcccccagccatcgtcaacacacattgggccccttctccaaaacacaggaggctgagtcctctcctgccctggtgagaggcgcctgccacagagggatgggagacagggaaggggaagttctttcctgaggctgaagctctcgagcttggaattgcgctgtttgcaacatggccagggaatgacagtgaccctagaaggcttttctccttgtcaccacccggctgcttacagctcccctggcggccggcctgcgtctgcagcacagcggaaaccgaggttgtctgaggctgaatctggagtgttgcccatcctggtggtgacccgggcccggtgattggcagagccatcagctgtgtcgatccaggatgcc

SEQ ID NO: 178492 - DNA, 734 bp, Homo Sapiens
  misc_feature (524)..(524): n is a, c, g, or t
  misc_feature (568)..(568): n is a, c, g, or t
  misc_feature (608)..(608): n is a, c, g, or t
  misc_feature (634)..(635): n is a, c, g, or t
  misc_feature (712)..(712): n is a, c, g, or t
ggcttgttattcttaaaatggcgccgctagacctggacaagtatgtggaaatagcgcggctgtgcaagtacctgccagagaacgacctgaagcggctatgtgactacgtttgtgacctcctcttagaagagtcaaatgttcagccagtatcaacaccagtaacagtgtgtggagatatccatggacagggtgattttgtagacagaggttactatagtttggagaccttcacttaccttcttgcattaaaggctaaatggcctgatcgtattacacttttgcgaggaaatcatgagagtagacagataacacaggtctatggattttatgatgagtgccaaaccaaatatggaaatgctaatgcctggagatactgtaccaaagtttttgacatgctcacagtagcagctttaatagatgagcagattttgtgtgtccatggtggtttatctcctgatatcaaaacactggatcaaattcgaaccatcgaacggaatcacgaaattcctcataaaagagcattnttgtgatcctggtttggtcagatcctgaagatgtggacacctgngctatcagtccccgaggagcaggttggctttttggagcanaggtcacaaatgagtttgttcatatnncacacttaaaactcatctgcagagcacatcaactagtgcacgaaagctataaatttatggtttgatgagaagctggntgacagtatgggtctggctcta

SEQ ID NO: 178493 - DNA, 1023 bp, Homo Sapiens
  misc_feature (860)..(860): n is a, c, g, or t
ggggcgcagaccccgagcgcggccgcggacgaagatggcgaccgccatgtacttggagcactatctggacagtatcgagaaccttccctgcgaacttcagaggaacttccagctgatgcgagagctggaccagaggacggaagataagaaagcagagattgacatcctggctgcagagtacatctccacggtgaagacgctgtctccagaccagcgcgtggagcgcctgcagaagatccagaacgcctacagcaagtgcaaggaatacagtgacgacaaagtgcagctggccatgcagacctacgagatggtggataaacacattcgaaggcttgatgcagacctggcgcgctttgaagcagatctgaaggacaagatggagggcagtgattttgaaagctccggagggcgagggttaaaaaaaggccggggtcagaaagaaaaaagagggtcccggggccgaggcaggaggacatcagaggaagacacaccaaagaaaaagaagcacaaaggagggtaagaggccttcccctctttttcccaaaagaacgaatacccatagcctgtatcccggatgtaggaacactgatgggaagctgacccgagtgaagtgcaccccgtgtgccggggtggtattctgattcttacgctgcgcgcctgtcgtcagccttgtcctcaccgcagcctttgagggggtgccgtttgtcaggggcattttcactggcccaaggaacctgcccaggctttaaggctgctgtggtgcggctgggcttgcacctggagtctgactccagtgcctgtcctcttagccacagtgtgtgctgccccactagggacaggaggatggtgagcaacgtgtngttgacagaggccaatgtagaccactctttaagtagctagatttctgtatatctgtcagttattttatgtgtcaacatatagtgtgcatatattcattgttaattatgtggccacatttattaaatagacatgtcatttaactttgaaaacaaaaaacaaagg

SEQ ID NO: 178494 - DNA, 961 bp, Homo Sapiens
  misc_feature (847)..(847): n is a, c, g, or t
  misc_feature (886)..(886): n is a, c, g, or t
  misc_feature (946)..(946): n is a, c, g, or t
gggccacattcgcttcctgctttcggtgtgtctgttgtgtcttgttgcgggcaccgcagtcgccgtgaagatggcgtctaccagccgtttggatgctcttccaagagtcacatgtccaaaccatccagatgcgattttagtggaggactacagagccggtgatatgatctgtcctgaatgtggcttggttgtaggtgaccgggttattgatgtgggatctgaatggcgaactttcagcaatgacaaagcaacaaaagatccatctcgagttggagattctcagaatcctcttctgagtgatggagatttgtctaccatgattggcaagggcacaggagctgcaagttttgacgaatttggcaattctaagtaccagaatcggagaacaatgagcagttctgatcgggcaatgatgaatgcattcaaagaaatcactaccatggcagacagaatcaatctacctcgaaatatagttgatcgaacaaataatttattcaagcaagtatatgaacagaagagcctgaagggaagagctaatgatgctatagcttctgcttgtctctatattgcctgtagacaagaaggggttcctaggacatttaaagaaatatgtgccgtatcacgaatttctaagaaagaaattggtcggtgttttaaacttattttgaaagcgctagaaaacagtgtgggatttgattacaactggggacttcatgtccaaggttctggttccaacctttgtcttcccaaacaagttacagatggcagctacacatatagccccgtaaagctggggaaattggactttggtccctggggagaagccccatctctgtggcagcggcantatttgacatggcctcacaggcatcagctgaaaagaggncccaaaatgaaattgggagatatttgctgggtgtttgctgatgttaccaatcagacagtnctattagacttgatc

SEQ ID NO: 178495 - DNA, 809 bp, Homo Sapiens
  misc_feature (663)..(663): n is a, c, g, or t
  misc_feature (761)..(761): n is a, c, g, or t
ggggagcactggaggccacccagtcatgggggacaccttcatccgtcacatcgccctgctgggctttgagaagcgcttcgtacccagccagcactatgtgtacatgttcctggtgaaatggcaggacctgtcggagaaggtggtctaccggcgcttcaccgagatctacgagttccataaaaccttaaaagaaatgttccctattgaggcaggggcgatcaatccagagaacaggatcatcccccacctcccagctcccaagtggtttgacgggcagcgggccgccgagaaccgccagggcacacttaccgagtactgcagcacgctcatgagcctgcccaccaagatctcccgctgtccccacctcctcgacttcttcaaggtgcgccctgatgacctcaagctccccacggacaaccagacaaaaaagccagagacatacttgatgcccaaagatggcaagagtaccgcgacagacatcaccgggccccatcatcctgcagacgtaccgcgccattgccaactacgagaagacctcgggctccgagatggctctgtccacgggggaacgtggtggaggtcgtagaaaaaaaccgaaagcggttggggggttctgtcagatgaaagcaaagcgaagctggatcccagcgtccttcctcgagnccctggacagtcctgacgagacggaagaccctgagcccaactatgcaagtgagccctacgtccccatcaagggcctacactgctgtgggaaggggacnaagggctccctgctccagggtgaaacctcgttgaagtccattcccaag

SEQ ID NO: 178496 - DNA, 798 bp, Homo Sapiens
  misc_feature (70)..(159): n is a, c, g, or t
gggggcttccccagtgcctatcttctctgatagtcatggagaggttacactaattcattggagatgtaannnnnnnnnnnnnnnnnnnnnnnnnnnnnnnnnnnnnnnnnnnnnnnnnnnnnnnnnnnnnnnnnnnnnnnnnnnnnnnnnnnnnnnnnngaggcttttttagaggaagaccaagaaaattcaatgtcttaaaaatatatttaagtggcaatgcaaaagtcttcctgcttccgtgctgaactttagaacagaggattgtattgcaagacaaagttgaatgtaaagtgatctccctgaacatttgtaaggttttacttttctgaaattatacatcacagcagtgcataggccatataatgttagctggaaggtcaatttcagtgtatgatatactttattaagatgtataaaacatcctgaagtttttattcagttgtgggaataggcatcaatgggtggtattggcttggtaactccccccaggtacgatagggactgaatatggaccctgctgaaagcagtggtattgacgcatatgtaactcgccctctatccgtagagtagtcatgacactatacagatggttcgcgtgcatactggcagcgttaggaacaagccaagcagtacacagcatgactaagtatggcttagactggccctctatcccctggtagcacgcgcgcaccagaggaaagcgcgtcatggcacaggaacggcaacaatgccgcaagccggaggcccgagcgggcaacggggagacccagaagggggagtacaccggtccatcgg

SEQ ID NO: 178497 - DNA, 974 bp, Homo Sapiens
  misc_feature (173)..(173): n is a, c, g, or t
gaaagggtcccctaagtgcccctccagaacccccattggggattttgttcaagaaccgcttgggtttgccgccccgggcgtttttttattgggtggggaaatcccaagccctaatccatgggcccgggatttccttgggaaaacaagttatggcccaggttccctttaccttnaggggccccggggcgccaaaaggaatggtttagaaaagcttcttgaggggccgaggggggccgacaagaacttgcttccggtcacagcatggtatgcctcgaaaatttaaaattttgtattaggaaagccacagtttggtaaaaggtagcattaatatcattcacatcagattttaatttgttacacatttttgtagttcagcaaaggcccctatgatgaaaaacaattaaaaagtgttatgacaaaaataattatctgtgtaaaaagggggagacccaaaagatttttcatatggttatttaattcagttaaatagaactgttatgaatttgagaggaatgaagatattcaaacactaacagaaaatcattagccttatattagagcattcaaatgcttatgtaactcttcaatccatctggcttcataaaaaccaaaattttgaacacaaaaaagtggcagagtttacattaccttttgtatgttcctaagtatgaaattgcatcaatttattatgaattaaatttgaaaagcatcacagatttaaaaacaaagtacaaaagagcctgattctttttaattccacaaatacctagcatctcaaagtaacatgtaaacaaacttctatgctgctcaatgaatccttccaatttcaataataaactaaatagtattggatctagtatatgactttcatgtgtaagttatggttctatccattactttaacaatattactgatgtaacagagaaaaattttcaactattgtatttatttaaaacaacttgacaagttcaagc

SEQ ID NO: 178498 - DNA, 812 bp, Homo Sapiens
  misc_feature (367)..(684): n is a, c, g, or t
gggagtgcctggaggtgcttggcctccggtagctgcctccattctcttttaaaaaaagggggtgattctgaggcactgaggtacctcccagatgtggaggagtgaagccaccatcgaggccacactcagcactccaggatcccagcgacgtcagacactcttgagttgtcaaaatgttaattttcagttttaaataatcagtttatctaagaaaagggaattttaacttttctaccttgagccaagccaatgaagggaaaattaattaacttagtaaatttgaagtgcagctctgttagctcgtacatgtgggttcttatcctgatcctgtgccttaaagtaggaaggtgtttccaagttcagattnnnnnnnnnnnnnnnnnnnnnnnnnnnnnnnnnnnnnnnnnnnnnnnnnnnnnnnnnnnnnnnnnnnnnnnnnnnnnnnnnnnnnnnnnnnnnnnnnnnnnnnnnnnnnnnnnnnnnnnnnnnnnnnnnnnnnnnnnnnnnnnnnnnnnnnnnnnnnnnnnnnnnnnnnnnnnnnnnnnnnnnnnnnnnnnnnnnnnnnnnnnnnnnnnnnnnnnnnnnnnnnnnnnnnnnnnnnnnnnnnnnnnnnnnnnnnnnnnnnnnnnnnnnnnnnnnnnnnnnnnnnnnnnnnnnnnnnnnnnnnnnnnnnnnnnnnnnnnngaagccgcccttgtaactgtatttaccatgataatatattctgcacgggtaggaattcctttttacagacatttcttttatcaaggaaggtcggcccccttccttttttcagggcatggtaaggccac

SEQ ID NO: 178499 - DNA, 1106 bp, Homo Sapiens
  misc_feature (80)..(81): n is a, c, g, or t
  misc_feature (104)..(104): n is a, c, g, or t
  misc_feature (180)..(208): n is a, c, g, or t
  misc_feature (212)..(212): n is a, c, g, or t
  misc_feature (424)..(424): n is a, c, g, or t
tggtgggaggaaatctccaaaggccaccttaggttccattggacccagggattttttcctaaggaaaaacagctttaagnnccccatgtttcactttaccctanctggggcccggcgcgcgcaaaacgaaatggtctaggaaaagcttctcggaggggccgaggccggccgaccattttnnnnnnnnnnnnnnnnnnnnnnnnnnnnngatngtcttctagggcctagcctccattttatttatttgttctgcaaattcgatgcgtctaccttcaaataaagcgttcatttttctctgtgactcttctattagtttttgggtagctggacacattcttccaggaatataaaacaaatggggccttgtctaagttcttatatatttaattattttggcattatgttcatttccattcttcttgcnagctgcgcaagctcaactttctgttccaaaagccgcagttctgtctgtttagcacgcctctcttcaaacagttctctcctttcattttcaacctgctttctctcttcttctgcctgaacttcaagtttttgttcaatttcctggcgccgcttttgcctttcagtagcaacagtggattcttgtttaaatttttgaagggtacccatcaacaagccaaatattcgccggttcctttgctttcccttttcatccatattttgatcctggataaggtctctacgtgtgcgctctttggaggtagctacaactgaagactgcaatgctggctttttaacatcatcatcctccgggtcgctttcctggcgtgattctcttctggtccgacgctccccgcccagcctactgactgccccttcaaggtctctctgtttggctgggggtcctcctccactatctgagaatccacgcctcagtaataaactaccacgtcctctacctccaccaggaccagaaagggccagcaatctggcttggatgggcctcacgtcattcggatcccgcccggtgagcttgcgaatgttctcatccacgttcttaagactctctttggccttttccagctgttcctgcaaagttcttacggcgaccgccatcttctccctgcggcaggcttgagactccc

SEQ ID NO: 178500 - DNA, 741 bp, Homo Sapiens
  misc_feature (20)..(20): n is a, c, g, or t
gcgcatcccggccctcaggntacgtgcatttttattcaaagggcttcgggagcagagggaaacagtgagaactaagaaccaaaatactgtcactgacaagggttgggctaaagggtctgagatgtgtaagcaccaagaagggaaagggagactgagcaacatatgaaaaaggggctgtaggaacaaacacagagaaaataagtcaacaataacgtacttccacccagagcaaagtgacagtgcacatacattcatcctctcaagtgtgggctacactgcacattgactcatactgtctaaacctggtttattggaaagattcaagtcccctgagggcattcggcataggaccacagtgacatggtaacagacatacgcaagcgtgccgtgagcctaaagcaacaacacactttagataataatcgctcagaaaaaaatcctctcccagagctgaggttacaaattccaagtttgctataaacattctttggggaattcctttaaaggtatgagttaaaatacaacagaaaatcaacacctaaaatctcctaaagaacaaagtggaaaaataatgaatctctaccaagaaccaattattttaggtttcttatttggatggctctcccacgagataggtggcgggattacttcaaaagtaatgagactactacaagaaggagttatttcatccagtgaggggaacaggctttctagaaatcactttctcttccctggactccc

SEQ ID NO: 178501 - DNA, 165 bp, Homo Sapiens
aaaaatgtatatgctcaataacagtttacttggaaattttcactagaagaaataacatgaaagaacaccagcataaatacataatacatactttaattgtggctatattaaatgtatcttaatgtaataccgctgtaacatggtatcatctcattgttaaaaatt

SEQ ID NO: 178502 - DNA, 888 bp, Homo Sapiens
  misc_feature (19)..(19): n is a, c, g, or t
  misc_feature (47)..(47): n is a, c, g, or t
  misc_feature (475)..(475): n is a, c, g, or t
  misc_feature (510)..(510): n is a, c, g, or t
  misc_feature (522)..(522): n is a, c, g, or t
  misc_feature (640)..(640): n is a, c, g, or t
ggcatttcccaaatacatnccttaaacatttccaaaaattttaaaangttcgaaatcctaatccaagtagcctattaatgcaagtcctacccagtgcccccaaatcagacagggaacacacacttgttactgtcacggaaataattccatgggagtgctactaaagataatatgagacttgcaactcttgaccacatcactttttctcccaaaactttagaacttgtttgcaaaagcttaaatggtataaaacacattttaaaatgtcacccaattctcaaatgtcactgaaagaaaatgcaggaaaagtatgtattgtgtgattaatcagcttaggcttaactcaaaatactttcaatgttcacaaaattgtttctagagttctaatctaaaacaactaaggaggtgtgccttgatattctgaaacactgtcttaatactttattagaagaaatatgacttgaaatttctttanccataatctaaacgacaaactttaaaaatatatanccagtagaatanccatattacaaatgacccagaaatgtagaaataaaggtcaaaaactgacttggaaatatttttatgattacactcataacaacaaagacttatgcaactagcacaatcattatggganccaacatttacaaaatattttgcctatcaaagctagcaccaggaaaagtattatgcacataaaattgagaaacagataatctttactttagaaaagcacagttctacagagtattgctctggctaaatagtttagctagtaaaaaggtcagtttatctcactgaggcatgtatctccttggatctattaacttatctgaagaactttccaggtacttggtatgtactgaaaattcttactggaatccc

SEQ ID NO: 178503 - DNA, 972 bp, Homo Sapiens
gggtgggccagggttctgtgtccatccctggtaccatgggggccctctacatcgagcggcctgcagatgtcgaagagggtttctctatccaggcccctctggtgtatcattttggttccaccactcctggcactaacatcaagctttataataagattacatctcgtttagcagatgtgttcaaccaaaggtgtgaggtgaaccgaagggcatctgtgagtggctgtgtcattaacacctgtggctgggtcaagggctctggttaccaggctctggtgcatgcagcctcagcttttgaggtggatgtcgttgttgttctggatcaagaacgactgtacaatgaactgaaacgggacctcccccactttgtacgcactgtgctgctccctaaatctgggggtgtggtggagcgctccaaggacttccggcgggaatgtagggatgagcgtatccgtgagtattttttatggattccgaggctgtttctatccccatgccttcaatgtcaaattttcagatgtgaaaatctacaaagttgggggcacccaccatcccagaactcctgtttaccctttgggcatgtcctcaagaggataatcagctcaagctagtacctgtcactcctgggcgagatatggtgcaccacctactgagtgttagcactgccggagggtacagaagagaaccctgtccgagacaagtgtagctggcttcattgtggtgaccagtgtggacctggagcatcaggtgtttactgtctctgtctccagcccctcgcccactgcctaagaacttccttctcatcatggatatccggttcatggatctgaagtagagatcagcaggaagccttgctgcctgggacaatagagatcatctggccacccctagaggcagatgggtgagataaacagactgttggggccacctgaccagtaaactgtggcacttagtaaaaagttcattattcta

SEQ ID NO: 178504 - DNA, 822 bp, Homo Sapiens; identical to SEQ ID NO: 2119
  misc_feature (533)..(533): n is a, c, g, or t
  misc_feature (586)..(586): n is a, c, g, or t
  misc_feature (648)..(648): n is a, c, g, or t
  misc_feature (671)..(671): n is a, c, g, or t
  misc_feature (771)..(771): n is a, c, g, or t
  misc_feature (775)..(775): n is a, c, g, or t
  misc_feature (777)..(777): n is a, c, g, or t
  misc_feature (782)..(782): n is a, c, g, or t
  misc_feature (784)..(785): n is a, c, g, or t

SEQ ID NO: 178505 - DNA, 815 bp, Homo Sapiens; identical to SEQ ID NO: 2121
  misc_feature (552)..(552): n is a, c, g, or t

SEQ ID NO: 178506 - DNA, 559 bp, Homo Sapiens
  misc_feature (356)..(497): n is a, c, g, or t
gtaaactattgctgatgactccagggtcaatctggaaaaattaacagtattcctcaactccattactttctgcagaaagtaatggagttgaggaatactgttactttctgcagccaagcttgattccttgaattatagttttctaagaaaaaatagtttttaataatctaaggtaaatttgttgcaattattagcagcagcataataaggctttttgcgcaaatgaatgttattagctagagttattcaaaaaagaatgaagcacaatttttgctaggacttcttgagaactattcataaaaatgcttttagataataaacaagtataaatgtcaaaatatttttttaaaagtatnnnnnnnnnnnnnnnnnnnnnnnnnnnnnnnnnnnnnnnnnnnnnnnnnnnnnnnnnnnnnnnnnnnnnnnnnnnnnnnnnnnnnnnnnnnnnnnnnnnnnnnnnnnnnnnnnnnnnnnnnnnnnnnnnnnnnnnnnnnnnnctccatctctttacatatgtatatcttactctcttgatgggacaagttggtagaaataaaga

SEQ ID NO: 178507 - DNA, 249 bp, Homo Sapiens; identical to SEQ ID NO: 96811

SEQ ID NO: 178508 - DNA, 769 bp, Homo Sapiens
gggggtccgcagggaagcctatggcttccccaccggcaatggagcggttgacgttgcctctcggcggcgcggcggcggtggacgagtacctggagtaccggaggtataaacaacataaaactgacttggaagcgattcctcagcagtgccccattgatctgccctgccaagtgactggctgccagtgcagggcttacctttatgtccccttgaatggtagccagcccattcgctgcaggtgcaaacactttgctgatcagcacagtgctgcgcctggctttacatgcaatacatgttccaagtgttcaggattccatagctgcttcacttgtgcttgtggtcagcctgcatatgcccatgacacagtagtggaaactaagcaagaaagattggctcaggaaaaaccagtgggacaggacattccttatgcagccatgggaggattaactggtttcagctcgctggcggaaggctacatgcggttagatgacagtgggattggtgtaccttcagttgaatttttagaatctcccattacggcagtagacagcccattcctaaaagcatttcaagcatcatctagttcttctccagaaacgttaacagatgtaggtacaagtagtcaagtttcttcattaaggagacctgaagaggatgatatggcctttctttgaaagacgatacccagaaaggatgaaaatggaaaaggctggctaagtggaaaaggaaaagctccattgcccttcagctacaaaacccttcatggaga

SEQ ID NO: 178509 - DNA, 872 bp, Homo Sapiens
ggttacatattcatgttaagaaccccgtcttcccttaaaatacattaaaattatgacatttttgctttgtgattgaatttcaaatagcagtatggtatccttttatctagttaatatatgaaagtggcttgaatatagtcaaatccattttaggtactctactgactttttccttcacttgccaagcccttttattgttcactgttagaaaaatagagaaggtgagacagctgggggaaaatgtggagtaaatgataatcaaatgttgaattctaaaagtctctacatttacctaggttggctttctcccccagttcagaagtttccagcttggccaatcatcagaatcacttgaggaacttagaaagaactccctggctgtagctcctatgtaggtttaggttgagactctggattccacaatttttaaaggttaccatctgaggtttctgatcatagtctacttttgaagcagctgctgctgtttctttattccattgaacaccctggaattgacataattttatctatcagcatttctccccttttagtttatttaataattaacccggtctccaaggcagttttcatatgaccatgtgtatattcactgctcacgaaaaagtttaatgttaaattaccaaatttaatatagttacagaattactgcataaaggccttccctttcttgaaaactccttacccagcatggggaacagtggatctgcccacatgacagggtggtatgccaggcatagttaactgcttttggttgtgaggtactcatcttcctttagttaccctttagtatgtggcacacatgtcccttattgcctagttcgtcatccacacttttggatcttgttgaaaag

SEQ ID NO: 178510 - DNA, 1210 bp, Homo Sapiens
gggaatttaggagcacctcggaaatcccaactgatccttggtacatgaggaaagtgagattcacacacaaaacccagatgaccaaatgaatggtgcctcgctggcaaaagcagccattgcagtaaccaaattgcctccctagcattctgtaacccatgggcttagggaaagattaagtaacatttcttttttcaaattcacttcaaatactcaactgtgttcatttaaaaaacagcaactatatgcacgagactaaacagatctcattcacactgccagcccacagaggggactctccgtaccctttcaggagggttttgggcaataaagccaaaatctgtacttaaataggtgtgtctcataagacaaatttttaactcatttattaaaggtcctgatggacattccaaactagtaacttatacctagagagagaaaatacaaatgcttactgtatagttatataaaaatagaaatccatcaagagtccaatcctcaagaaaccaccacaatttgtaccccaaaggctggtatatatatcaagaaaggatgacttccttccttgatctctaaataacaccctctccacatcggaggtatctggaggttgggcatttgcctaacgccacggggtccaccggcgggggtcacagctgctggctggtgaagaaggatttagtctccctgcagacaggattgacacagagcggacagctcagggtcagctgcttggaacacagctcgtttgactggatgtgtgaatgcaccaagtcggccagggccttagagaacaatggatttccattaagagactcagctcttctgatgttttcaactccacactccttggctaaaacttgagagtactcgatgtccagctcatacagcgtttcaatatggtcactggtaaatgctatcggaaccaagaggatattcttcctccccctctcacaaagccctttgatagattcgtctgtttgaggacccaaccagggcatcggaccaaccttggattgccacaccagtcggtaggggttgcagtactccagcctttccatgactttttggacagtggcgcttacctcctgaggatatgggtcgcctctgttgaccacagacatcggcagtgagtgagcagaaaacagaatgaccacctcgcttctcttctcaagtggaaaatggtccagttcctttagaatatgacccttct

SEQ ID NO: 178511 - DNA, 1034 bp, Homo Sapiens
tgtgactggtccggaattacgggatatcgtcgacccacgcgtccgaggcgagcaagatggcgcagacgcagggcacccggaggaaagtctgttactactacgacggggatgttggaaattactattatggacaaggccacccaatgaagcctcaccgaatccgcatgactcataatttgctgctcaactatggtctctaccgaaaaatggaaatctatcgccctcacaaagccaatgctgaggagatgaccaagtaccacagcgatgactacattaaattcttgcgctccatccgtccagataacatgtcggagtacagcaagcagatgcagagattcaacgttggtgaggactgtccagtattcgatggcctgtttgagttctgtcagttgtctactggtggttctgtggcaagtgctgtgaaacttaataagcagcagacggacatcgctgtgaattgggctgggggcctgcaccatgcaaagaagtccgaggcatctggcttctgttacgtcaatgatatcgtcttggccatcctggaactgctaaagtatcaccagagggtgctgtacattgacattgatattcaccatggtgacggcgtggaagaggccttctacaccacggaccgggtcatgactgtgtcctttcctaagtatggagaagtaccttcccaggaactgggggacctacgggatatcggcgctggcaacgcaagtataatgcctgtaacctacccccgcccgagacggaatgaatgacgagtcccatgaggccaatcaaggccgggccggcccaacgaagcggaattgttccgcccaagggcgggccaacaggggcacgaccccactgggcacggaggcccacccaacaccaagggccccagcgcggacgcagaccagcacccacacgatcggaagcgagatacccaccccgtggcacgagagcggagaacaccagacagacgaggaggacaccccgacaaagcacgcacgaacgccgacagacacaggaacgcgcaaacaaagactaac

SEQ ID NO: 178512 - DNA, 792 bp, Homo Sapiens; identical to SEQ ID NO: 14924

SEQ ID NO: 178513 - DNA, 910 bp, Homo Sapiens
  misc_feature (123)..(280): n is a, c, g, or t
cttccaattttggcaaaggtttcccccccttccctggggtttccaccattttttccctggccttcaagccctccctgaagtaagcttgggaattaccagggcggcccgcccaccaagccccannnnnnnnnnnnnnnnnnnnnnnnnnnnnnnnnnnnnnnnnnnnnnnnnnnnnnnnnnnnnnnnnnnnnnnnnnnnnnnnnnnnnnnnnnnnnnnnnnnnnnnnnnnnnnnnnnnnnnnnnnnnnnnnnnnnnnnnnnnnnnnnnnnnnnnnnnnnnntactgtgactgggtcgttttttaagaaaggttatcagctttgtgtttggtttcccacagttgataaaaatctatcaaaaacattataatttgcaaggaaaaaggtttttcaatggctgcaggaaccagaaagaaatagcatttcttatctgtataaacacaaacatttaaagctagtcacaccgcaggtaaatccaatatagtatgcaaaagttctataaaaatgaacaagagatacacgtttactttcattgctccaacagtcaaatgtaaatctgcatgagagttgcgctgcagcagtttgctggtccaatttaagagttcaaggtcctttttgtacatctggcccactgatgtccacatcccagataaattttcaaaagacggaaatcagggcaaagactccatataacaaagcgcaaggatatgctactaaaagttgctgtccttccatggctaatgcagaaataaatattttggaagcagaaaaactacaccatccaataatcccagcagtgagaatgattcctaccattccttgcaaagaaaatatcactgcaaagctggaaagtaggatcatgggcagaagacaatatccaaggacacttgccacacaaccaaatgaacacct

SEQ ID NO: 178514 - DNA, 811 bp, Homo Sapiens
  misc_feature (743)..(743): n is a, c, g, or t
gggagtcgggactcgagcctagggaggcgaggttcccgcaccggatagaaaatgtcagctgaaattcacaaatgcaaaacggattgaaggacttgatagtaatgtgtggattgaatttaccaaattggctgcagacccttctgttgtgaatcttggccaaggctttccagatatatcccctcctacatatgtaaaagaagaattatcaaagattgcagcaatcgatagcctgaatcagtatacacgaggctttggccatccatcacttgtgaaagctctgtcctatctgtatgaaaagctttatcaaaagcaaattgattcaaataaagaaatccttgtgacagtaggagcatatggatctctttttaacaccattcaagcattaattgatgagggagatgaagtcatactaatagtgcctttctatgactgctatgagcccatggtgagaatggctggagcaacacctgtttttattcccctgagatctaaacctgtttatggaaaaagatggtctagttctgactggacattagatcctcaagaactggaaagtaaatttaattccaaaaccaaagctattatactaaatactccacataacccacttggcaaggtgtataacagagaggaactgcaagtaattgctgacctttgcatcaaatatgacacactctgcatcagcgatgaggtttatgaatggcttgtatattctggaaataagcactttaaaatagctaccnttccaggtatgtggggagagaacattaaccatagggaggtgctgaaaagacttttcgtggtacctggc

SEQ ID NO: 178515 - DNA, 1245 bp, Homo Sapiens
  misc_feature (1220)..(1220): n is a, c, g, or t
ggaagcagtggtatcaacgcagagtggctattacggcggcgcagcgaaaatggcggcttccaggtgggcgcgcaaggccgtggtcctgctttgtgcctctgacctgctgctgctgctgctactgctaccaccgcctgggtcctgcgcggccgaaggctcgcccgggacgcccgacgagtctaccccacctccccggaagaagaagaaggatattcgcgattacaatgatgcagacatggcgcgtcttctggagcaatgggagaaagatgatgacattgaagaaggagatcttccagagcacaagagaccttcagcacctgtcgacttctcaaagatagacccaagcaagcctgaaagcatattgaaaatgacgaaaaaagggaagactctcatgatgtttgtcactgtatcaggaagccctactgagaaggagacagaggaaattacgagcctctggcagggcagccttttcaatgccaactatgacgtccagaggttcattgtgggatcagaccgtgctatcttcatgcttcgcgatgggagctacgcctgggagatcaaggactttttggtcggtcaagacaggtgtgctgatgtaactctggagggccaggtgtaccccggcaaaggaggaggaagcaaagagaaaaataaaaccaagcacgacaagggcaaaaaaaagaaggaaggagatctgaaatctcggtcttccaaggaagaaaatcgagctgggaataaaagagaagacctgtgatggggcagcactgacgcgctgtggggggacaggtggacgtggagagctctttgcccagctcctggggtgggagtggtctcaggcaactgcacaccggatgacattctagtgtcttctagaaagggtctgccacatgaccagtttgtggtcaaagaattactgcttaataggcttcaagtaagaagacagatgttttctaattaatactggacactgacaaattcatgtttactataaaatctccttacatggaaatgtgactgtgttgctttttcccatttacacttggtgagtcatcaactctactgagattccactcccctccaagcacctgctgtgattgggtggcctgctctgatcagatagcaaattctgatcagagaagactttaaaactcctgacttaattgagtaaactcttcatgccatatacatcattttcattatgttaaaggtaaaatatggcnttgtggaactcaggtgtctgtagcc

SEQ ID NO: 178516 - DNA, 931 bp, Homo Sapiens
gggaccgcggagcagacgcggaggctggtggcccctgggcgagatgccgtacgccaaccagcctaccgtgcggatcacggagctcactgacgagaatgtcaagttcatcatcgagaacaccgacctggcggtggccaattcgattcggagggtcttcatcgctgaggttcccataatagccattgactgggttcagattgatgccaattcctcagtccttcatgatgaattcattgctcacaggcttggattaattcccctcattagtgatgacattgtggacaagctgcagtactctcgggactgcacatgtgaggagttctgccccgagtgctcggtggagttcaccctcgatgtgcggtgcaatgaagaccagacgcgacatgtcacgtctcgagacctcatctccaacagcccccgggtcattccggtgacatcccggaaccgagataatgaccccaatgactacgtggagcaggatgacatcctcatcgtcaagttgagaaagggccaggagctgagacttcgagcctatgccaaaaagggctttggcaaggagcatgccaagtggaaccctactgcaggggtggcttttgaatacgatccagacaatgccctgaggcacacagtgtaccccaagccccgagggatgggccaaagagtgagtactcgggagctggatgaagatgaatccgcagggctccctatgacccaaaggaagccaaaaagggtttactacaaatgtggagtccggtgggtcctctggggtcctgaaaacccatgggtcctggcaaggccctctcaggatcgaagaagaacatgagtgattgacaaactcattaagccagagatcagagtggatgtgtacccataaataactgcagttggccggcttcgcaaacaggaaatccagggcagagttggacatggg

SEQ ID NO: 178517 - DNA, 827 bp, Homo Sapiens
gggctcgcagcgttgctcacagaacagagtagaggcggcggcggcggcggccggacccagactggtagtgaggcgttggaccccgagccgctgcaatgccgctggagctggagctgtgtcccgggcgctgggtgggcgggcaacacccgtgcttcatcattgccgagatcggccagaaccaccagggcgacctggacgtagccaagcgcatgatccgcatggccaaggagtgtggggctgattgtgccaagttccagaagagtgagctagaattcaagtttaatcggaaagccttggagaggccatacacctcgaagcattcctgggggaagacgtacggggagcacaaacgacatctggagttcagccatgaccagtacagggagctgcagaggtacgccgaggaggttgggatcttcttcactgcctctggcatggatgagatggcagttgaattcctgcatgaactgaatgttccatttttcaaagttggatctggagacactaataattttccttatctggaaaagacagccaaaaaaggtcgccccaatggtgatctccagtgggatgcagtcaatggacaccatgaagcaagtttatcagatcgtgaagccccctcaaccccaacttctgcttcttgcagtgtaccagcgcatacccgctccagcctgaggacgtcaacctgcgggtcatctcggaatatcagaagctctttcctgacattcccatagggtattctgggcatgtaaacaggcataccgatatctgtgggccgcaagggcctctggggggcccaaggggttgaaccgtcaccataactttgg

SEQ ID NO: 178518 - DNA, 603 bp, Homo Sapiens; identical to SEQ ID NO: 2726

SEQ ID NO: 178519 - DNA, 1730 bp, Homo Sapiens
ttgacacctaaattagaaaacaaccgctcggcggttgtgttaatttataaagctaggcggtacggtcggaattcccgggatatcgtcgaccacgcgtcggacaggcgtcctgtccggccggtcgcgacctctgcggtttcggctgcagcagctggaggccctgcggaggatggtgcaggagcgcgagaaggatatcctgacggccatcgccgccgacctgtgcaagagtgaattcaatgtgtacagtcaggaagtcattactgtccttggggaaattgattttatgcttgagaatcttcctgaatgggttactgctaaaccagttaagaagaacgtgctcaccatgctggatgaggcctatattcagccacagcctctgggagtggtgctgataatcggagcttggaattaccccttcgttctcaccattcagccactgataggagccatcgctgcaggaaatgctgtgattataaagccttctgaactgagtgaaaatacagccaagatcttggcaaagcttctccctcagtatttagaccaggatctctatattgttattaatggtggtgttgaggaaaccacggagctcctgaagcagcgatttgaccacattttctatacgggaaacactgcggttggcaaaattgtcatggaagctgctgccaagcatctgacccctgtgactcttgaactgggagggaaaagtccatgttatattgataaacgattgtgacctggacattgtttgcagacgcataacctggggaaaatacatgaattgtggccaaacctgcattgcacccgactatattctctgtgaagcatccctccaaaatcaaattgtatggaagattaaggaaacagtgaaggaattttatggagaaaatataaaagagtctcctgattatgaaaggatcatcaatcttcgtcattttaagaggatactaagtttgcttgaaggacaaaagatagcttttggtggggagactgatgaggccacacgctacatagccccaacagtacttaccgatgttgatcctaaaaccaaggtgatgcaagaagaaatttttggaccaatttcttccaatactgccctgtgcacacatgtataatgacggccataacctttccataccctgtaacgctgaaaaaagccctcctgggcctccttttaacggtaattttctccggccatataaccccattaaagaccttcacatcccacaacggggacattgaacttgtggaatcgcgaagacaaccattctcccataatccggtggaaaccgggactgggcccctcactcacgcgatgtctacccacttctgggacccaccacgccctccaattttctaacatgggcgcccacctcttttatcacaaccgctcattccacacaaccattccccatcttttccaccccctattttattgtgggcataacggacaagtcgtgcgcaggctatcttccccataatctgtggggcgtaaattgggggatgataattcctttctcaatctttcaccgcggtaaaacaacacctcaccaacgaatctctcccggaataaactctatttatgttactcttcccattctcagacaccgcaccaccctctggtatttaaatgtaacaacaaagactatctctaaagtataaaataccaaaaggggggctcctcaaccctacacatccctccacataattatccctcccccccaaacaca

SEQ ID NO: 178520 - DNA, 528 bp, Homo Sapiens
tgaggacagggtaccatgcccacctttccttcagaaccctggggcccagggccacccagaggtaagaggacatttagcattagctctgtgtgagctcctgccggtttcttggctgtcagtcagtcccagagtggggaggaagatatgggtgacccccaccccccatctgtgagccaagcctcccttgtccctggcctttggacccaggcaaaggcttctgagccctgggcaggggtggtgggtaccagagaatgctgccttccccacaagcctgcccctctgcctcattttcctgtagctcctctggttctgtttgctcattggctgctgtgttcatccaagggggttctcccagaagtgaggggcctttccctccatcccttgaggcacggggcagctgtgcctgccctgcctctgcctgaggcagccgctcctgcctgagcctggacatggggcccttccttgtgttgccaatttattaacagcaaataaaccaattaaatggagactattaaataactttatttt

SEQ ID NO: 178521 - DNA, 1034 bp, Homo Sapiens; identical to SEQ ID NO: 2754

SEQ ID NO: 178522 - DNA, 1005 bp, Homo Sapiens
gggatggcggtttgggcggcgacgtgagcggctccgcggaccccgagcggggccccggccgcgacctgagccgccgccgagcgcccggggccatgcgaccgacgctgctgtggtcgctgctgctgctgctcggagtcttcgccgccgccgccgcggccccgccagaccctctttcccagctgcccgctcctcagcacccgaagattcgcctgtacaacgcagagcaagtcctgagttgggagccagtggccctgagcaatagcacgaggcctgttgtctaccaagtgcagtttaaatacaccgacagtaaatggttcacggccgacatcatgtccataggggtgaattgtacacagatcacagcaacagagtgtgacttcactgccgccagtccctcagcaggcttcccaatggatttcaatgtcactctacgccttcgagctgagctgggagcactcccattctgcctgggtgacaatgccttggtttcaacactatcggaatgtgactgtcgggcctccagaaaacattgaggtgaccccaggagaaggctccctcatcatcaggttctcctctccctttgacatcgctgatacctccacggcctttttttgttattatgtccattactgggaaaaaggaggaatccaacaggtcaaaggccctttcagaagcaactccatttcattggataacttaaaaccctccagagtgtactgtttacaagtccaggcacaactgctttggaacaaaagtaacatctttagagtcgggcatttaagcaacatatcttgctacgaaacaatggcagatgcctccactgagcttcagcaagtcatcctgatctccgtgggaacattttcgttgctgtcggtgcctggcaggagcctgtttccttcctggtcctggaaatatagaaggccctgattaaaatactgggtttcccacctccaccaaagcatcccatttatcgaatagaaagagtatttttaaaagacccccaca

SEQ ID NO: 178523 - DNA, 825 bp, Homo Sapiens
  misc_feature (522)..(522): n is a, c, g, or t
ggggggtcacgtgactgcgtctccccgccctctcactccgctgcctctaggttctgggaagatggcgaaggtctcagagctttacgatgtcacttgggaagaaatgagagataaaatgagaaaatggagagaagaaaactcaagaaatagtgagcaaattgtggaagttggagaagaattaattaatgaatatgcttctaagctgggagatgatatttggatcatatatgaacaggtgatgattgcagcactagactatggtcgggatgacttggcattgttttgtcttcaagagctgagaagacagttccctggcagtcacagagtcaagcgattaacaggcatgagatttgaagccatggaaagatatgatgatgctatacagctatatgataggattttacaagaagatccaactaacactgctgcaagaaagcgtaagattgccattcgaaaagcccaggggaaaaatgtggaggccattcgggagctgaatgagtatctggaacaattcgttggagnaccaagaagcctggcatgaacttgcagaactttacatcaatgaacatgactatgcaaaagcagcctttggtttagaggaactaatgatgactaatccaacacaaccacttatactgtcagcagtatgctgaagttaagtatacccaaggtggacttgaaaacctcgaactttcacgaaagtattttgcacaggcattgaaacctgaacaacagaaatattgagagctttgttgggactttatatgtcggcaagtcatattgcttctaatccaaaagcaagtgcaaaaaacgaaaaaggacaac

SEQ ID NO: 178524 - DNA, 706 bp, Homo Sapiens
  misc_feature (24)..(24): n is a, c, g, or t
cgctattggatacagtgaatatgntagtacgataaaagtaagcgggtactggtccggagtacccgcgatatcgtcgacccacgcgtcgaagtgcagaaacgagtacagaacagaactgttggcttggcaaaatgacccaccttcctggaaatgaccgttaagatgagaatcgagtgtgcaatacatgtcaatgtacacagtcatgtttactggtgaaaatattcctgttcatcctcatgtttataggcaatggtcatatctgtatatccaatctaacagaagactggtccccagcgctctcagtccaatcagtttgtcttagcattattagcatgctttccagctgcaaggaaaagagacgaccaccggataattctttttatgtgcgaacatgtaacaagaatccaatagaaaacaaaaatggtgggtatcatgatgatacttgttgatgccactgttatcatcctcctagcagaagatagtcctactgagaaaatgagcactttgatcattcagtctttgaactttaacctttgactggaagtgacctataggcaatgaagactacttccttttactgcatttttactcgtgtgcattctgggcgcatgttgatccgctggttcagtccaggcaactgacatgcttttattagtcatacagtatttaatgcaggttgtcagggaaatgtcaaatataattccca

SEQ ID NO: 178525 - DNA, 967 bp, Homo Sapiens
caattatgtataaacagttgttaaaaagaggctggtacggctcggaattcccgggatatgtcgacccacgcgtcgcaccatcatcagattctggcaattaaccgtggagaaaatttgaaggtactgacggttaaggtcaatatttctgatggagtgaaggatgaattctgtaggtggtgcatccaaaacaggtggagaccacgtagctttgcaaggccagagttaatgaagatcttatataattcactgaatgattcctttaaacgccttatttatcctcttctctgtagagaattcagagccaaactaacatcagatgcagagaaggaatcagtaatgatgtttggacggaaccttcgtcagctccttttaacaagccctgttccagggcgcaccttaatgggagtggatcctggttataaacatggttgcaaattagctataatttctcctactagtcagatacttcatactgatgtggtttacttgcattgtggacaaggcttccgagaggcggagaaaataaagacacttttgctgaatttcaactgcagcacagtagtgattggaaatggaactgcctgcagggaaacagaagcttactttgctgacctgataatgaagaattattttgcaccactggatgtggtttactgtatcgtcagtgaagcaggagcatcaatctacagtgtcagcccggaagctaacaaagagatgccagggctggaccctaatttgagaagtgcaggttccatagcaaggcgtgtacaagatccattagctgagctagggaaaattgagccaaagcacattggggtggaaggttaccctgaggtttcccaaattttccagggacctcggccgtcttttacaaaattcccttggggggctaaaactcttagaaatttgtattgccacacaccggcaccattatgacgaagacgctaacacaaagaaaaaggggcac

SEQ ID NO: 178526 - DNA, 803 bp, Homo Sapiens
  misc_feature (761)..(761): n is a, c, g, or t
ggtggctcaggagaaattggatcagaaacaagtgacaaaaaggattcattttatacagattcaagtagtatcttaaactacagagaagattcgaatatactttcatttgatagtgatggtaatcaaaacatactttcaagtactttaactagtaaaggaaatgaaaccatagagtccatctttaaagctgaagatttgcttccagaagcagcttcactctctgaaaaccaggatatcagtaaagaagagacccccccagttagaacacttaaatcacagtcatctttaagtggaaagcctaaggaacgttgcccacccaacctggctcctctctgtgtttcttataagaatatgaaaagaagctcttcacaaatgtcattggataccatttcacttgacagcatgatattggaagaacagttattagaaagtgatggaagtgatagccatatgtttttggagaaaggaaataaaaagaactcaactacaaattacaggggcacagcagaaagtgtgaatgctggtgcaaacctacagaattatggtgaaacttctccagatgccatcagtacaaattcagagggtgctcaggaaaatcatgatgacctgatgtccgttgtggtatttaaattactggtgggtatggggaaattgacatccgaggggaagatacagaaatctgtcttcaagtgaacccagtgacaccagaccaattaagggcatatcagcccttcggcattaccctttgtaatcgtcccagnttggtttccgaatcagaaagctggtaatttcaattccaaaac

SEQ ID NO: 178527 - DNA, 819 bp, Homo Sapiens
aagtttaatgtttaatgcccaattatctcaatacaaggaggcttacatggtgctcataaagacacgaccaggcgaaaccaggccggcaggaaatgacccgcatgagtcccagcacggggaccatgttctctcggttccagctcaccctcgaaaagtgccacagggcaaggttcttcagctcacccaggaagccagcaggctggccaggcgtgtggccaccatggtcactgaggatcctcgtgggagaatagggttctgggacctcaggatacaatcacaagaaccagaaagctgcttccaaacaaccccagaaggttttcacttcacatgcgctaagccacacaacacctggatgctggggcacccaaaccctttccctaaaactctgaacactgcagaatggaggttgagaacacttggggagggagaacaaagtcagaaccatcctaaagccagtttttcaagcttgaccacctccctcttcctccctgaaggcacaccagccgatcccattactgtggaaaagggacaccctctggtctattctaacacctttaatgggaaaggagttaggagcatgtccctggcttcaagaaatctctgaatctccaactctactggatgatttcctggagccccaagctttagaagtccctggggacacgagtgattttttttagggtggctgctggtggggctgggaagtttcctggcagaaattatttacctcagaaagacactggcttttctcttaccctcgttttaaagtctacctggtccctaaagaaaataccactcaggctgggcctggtggctcgt

SEQ ID NO: 178528 - DNA, 482 bp, Homo Sapiens
  misc_feature (353)..(353): n is a, c, g, or t
  misc_feature (385)..(385): n is a, c, g, or t
  misc_feature (450)..(450): n is a, c, g, or t
  misc_feature (465)..(465): n is a, c, g, or t
gggtagcttggggaagctgaataaactctaggcccagggctactaaagacttcaggatagaattctccatcaaatatacagcataagtaaaactgctctgcactgtttaatccatttccaaggggcttagaaaagctaacaagggtgtgtcccctgtcctgccccaccggtttgctggctttgtaataacataagaccattgtggttgttggtgtcagataccttcccatcctgagctctctcacctacctgctctctctcctagagcaggatactggggtacttttaagaagggtgctccttttaaggatgcccaggaaaagctgtatttaactcttgctatttgtaacttnggggatgggtctcccctgccccagggcacatnaagagcaaaggctcccaatgggtcagtgggatggactctggccaaaagtggaccccctgtggccnggaggttttaggccnttttccccaacaggtct

SEQ ID NO: 178529 - DNA, 795 bp, Homo Sapiens; identical to SEQ ID NO: 3238

SEQ ID NO: 178530 - DNA, 1036 bp, Homo Sapiens
tgcgacgagcagagcttcagagggctcgggctctgcagtcctactatgaggccaaggctcgaagagagaagaaaatcaaaagtaaaaagtatcacaaagtcgtgaagaaaggaaaggccaagaaagccctaaaagagtttgagcagctgcggaaggttaatccagctgcagcactagaagaactggaaaaaattgaaaaggccagaatgatggaaagaatgagccttaagcaccaaaacagtgggaaatgggccaagtcaaaggcaattatggccaaatatgacctggaggctcgccaagctatgcaggaacagttgtctaagaacaaagaactgacacagaaactccaggtagcctctgagagtgaggaagaggagggaggcacagaagatgtggaagaactccttgtccctgatgtagtgaatgaagtgcagatgaatgcagatgggccgaatccctggatgctcaggagctgcaccagtgacaccaaagaggctgcaacccaggaggaccctgagcaactgccagagcttgaggcccatggagtttctgaaagtgagggagaagaaagaccagtggcagaagaagaaatttggtgagagaatttgaggaaaggcgatcccttagaaaaagatctgagctcagccaagatgctgagccagcaggcagtcaagaaacaaaagattctggcagccaggaggtgctgtctgaattgagagtactatctcagaaacttgaaggaaaaccatcagtccaggaagcaaaaagcaagttcagaggggactattccccaggtccagagagaggaacctgccccagaagaagaggagcccctgttgctacagagaccagagagagtacagacgctggaagagctagaagagctgggaaaagaagaatgttttcaaaataaggagcttcccagacctgtgttagaagggcagcaggtcagagaggaccccaaataatcgccctgatgccccctaacgcagaagaacaaagaaggagcactggatcggaccaacaggaactccta

SEQ ID NO: 178531 - DNA, 743 bp, Homo Sapiens
ggcacgggctggtacggccggaattccgggatatcgtcgacccacgcgtcggctggcgtcctctttggctggccttcactagtgtttgtcttcaagaatgaagattactttaaggatctgtgtggaccagatgctgggccgattggcaatgccacagggcaggctgactgcaaagcccaggatgagaggttctcactcatcttcaccctggggtccttcatgaacaacttcatgacattccccactggctacatctttgaccggttcaagaccaccgtggcacgcctcatagccatatttttctacaccaccgccacactcatcatagccttcacctctgcaggctcagccgtgctgctcttcctggccatgccaatgctcaccattgggggaatcctgtttctcatcaccaacctgcagattgggaacctatttggccaacaccgttcgaccatcatcactctgtacaatggagcatttgactcttcctcggcagtcttccttattattaagcttctttatgaaaaaggcatcagcctcagggcctccttcatcttcatctctgtctgcagtacctggcatgtagcacgcactttcctcctgatgccccgggggcacatcccatacccactgccccccaactacagctatggtccttggccttgctggtggggcttttgtttccatagcctgtgccctgggaatggcaccacaaaggaagagaaggaaacagtgacatgaaa

SEQ ID NO: 178532 - DNA, 451 bp, Homo Sapiens
gggggcgcgtcattgtcgtcatcgttgcccgaccgctttccgggagactggagtcgaaggccgtgagtcagccataatggcaggtgaagaaattaatgaagactatccagtagaaattcacgagtatttgtcagcgtttgagaattccattggtgctgtggatgagatgctgaagaccatgatgtctgtttctagaaatgagttgttgcagaagttggatccacttgaacaagcaaaagtggatttggtttctgcatacacattaaattcaatgttttgggtttatttggcaacccaaggagttaatcctaaggaacatccagtaaaacaggaattggaaagaatcagagtatatatgaacagagtcaaggaaataacagacaagaaaaaggctggcaagctggacagaggtgcagcttcaagatttgtaaagaaatgccctctgggaacc

SEQ ID NO: 178533 - DNA, 1392 bp, Homo Sapiens
  misc_feature (158)..(158): n is a, c, g, or t
  misc_feature (232)..(232): n is a, c, g, or t
  misc_feature (1187)..(1236): n is a, c, g, or t
gggtaaactgtccagtttaagtaagggaaaggtcccggaaggaaaccttaaactggaaagggggtacggttccccaatatcaagaaagatttggacttttaaagggtttcaccgaagtttgtgacctttaattagcttttacgttgtaattcttactnttagcggaacaccacacagtttcaaaaatttagactatagtgtccgaccaggatgcagttaccatatgaagctntaactcaaaatttggataaagaaaaaaaggcacaatgaacttcaactcaattttatgtgcacaagagttgaaaaatctgagccaccttaaagagaaattgattctaaaatttataaaacctataaataatcagaggccaaaccactatattaaaacagattctctagcaagtaaaaatcttgcagtttaaacatacgcttgtatccactttagatacaagacaaaactcactctttaaagtggctccaccttggcagatacatatatttgtaatgaatgcacacctgctatgtgttgtttatcagtgaaaacaccccagctgattcacaaagctctgatggcatctgtctcatcttcatcacagtaaatacaccccccaatggataactaaattagtttagattttctatcccttcacatcaatgcattgggaaattatacccagtaaacagagcaacaataccatttctgtgacagcacaaattatttagtttaacaagttgtaaatccatattcttgtcattaataactgggtcagacatttaccaaagcaataacttgacatagtaataccggattttgcagaattacttagagatcactgcataatcaggtttatgttaaataactgcaaattactcctctacacagatccctgtctgaatcttttaatatgtgaagatgctttttgagtaggatctgaattaactttcccatactcaaagaatgaactcttatgacacttctaaatagttgctggtttgttgccaaccacattatcaaaagcactggttactaagtaaaaaatattttaagactaaattacagtaaacatgaaagctccacagtttaaacccaatataaatcaaccatatccattatcaaattaaaacaagaatattaactcctgaaagctgaaagcaagatttttttaaaaaacatcaccaatgggtannnnnnnnnnnnnnnnnnnnnnnnnnnnnnnnnnnnnnnnnnnnnnnnnncctttatactcagggactcttgctttcaacttaaacagaagttcaagtccataacaggttgcagctcaggtaaaataccatgcacagcatttgattacttcaaaacagcaggaacacacaggctgaagagagtggtcaaatagggcttgctgttcc

SEQ ID NO: 178534 - DNA, 1149 bp, Homo Sapiens
  misc_feature (109)..(109): n is a, c, g, or t
  misc_feature (287)..(287): n is a, c, g, or t
cactggttaaggactaagcaaaaaggaaagtgacctgtatctcctgtttccaaatttctttttctttctttgggccacattctcccatggcccatgtgaaaattaaaancaaaggattgcgactgtcctggccagagaagaaggttaaagctgtgtcatagagaattgcagattatagttctaccttcatccctgtgatatccatgtctctcagagaggtctggctacaccaggatgttctttgcgatagcattcaaagtccttactttggtcacatctgttacctntagggaatattctgagcaagaaagtgaggctcccatggcaacagatgaatttcgaaacttcattcccgagtctctagtagaccgagcagaacagtggaattctgtagcacctgaaccctcaaggatcctttgtagatttctgtctgttataccacctcctggcattaccacaatcctgccttttgcctgctcaatgagtcgctttattaggggtagcccttctaatgctgaactgtcacatccactggtcaacacgcgttcaaatcccaaggttaagagggtctccagagctgccattggatcatgaaccatgtcaaaggctcggtggaaagtgactggcagagggcggcaaatagccataagggacatacacagctctttgtcaatgtgtccatcttcagtcaatgccccaaaaaccaaaccatcagcaccataaagcttggcaagacgaatgtcagccttcatcacctcaatttcacgatctgaatacaaaaaatcacctccccgtggccgaatcatcacaaaaactgggatctgaacactctgcttcactacttgaaggacacccatgctgggtgtagttcccccctctgataaaccagaacataattcaatccgatcagcacctcctctttctgcattcacagctgattccactgaatcaacacaaacttccatgagaaatccatttgctgctccggccttcccggacggtatccgcgctcgttttcgctcagaggaggccccctgccttttcatgctccacgcgttcctccctcgtgcgcctgcagtttccacttggaatttgggctccggcgcgcaccagctaagaagcgcgtcaacagctgcgcgcgcccgtccc

SEQ ID NO: 178535 - DNA, 788 bp, Homo Sapiens
agctggtacggccggaattctccgggatatcgtcgacccacgcgtcgctgcctcaagtggacagcgcgggtcagcgggcgtgggggcggtgttctgtgggctggggaggaggtcaaaggcagcgcctggcactcaacagccttctgactttcattgcagtggtcgccgagtttggtcggattgctgtggaattcctgagacgcggcgcaaacccaaaaatctacgaaggcgccgccagaaaactcaatgtgagtagtgacactgtccagcatggtgtggaaggattaacgtatctcctcactgagagctcaaagctcatgatttctgaactggatttccaagactctgtttttgttctgggattctctgaagaattaaacaaattgttgcttcagctttatctggacaacagaaaagagatcagaacgattctgagtgaattggcaccaagccttcccagttatcataaccttgaatggcgactagatgtacagcttgcaagtagaagtctcaggcaacagattaaaccagcagtgactataaagctacaccttaatcaaaatggagatcacaacaccaaagttctgcagacagacccagccaccctgctccattgggttcaacaactggaacaagcattggaagagatgaagacaaaccactgtaggagagtagttcgcaacatcaagtagtaccagttttaaggttttaattcatttgaatcactttgaatggtgatatacagcattactttccacattaattttttttattcctggtggttattg

SEQ ID NO: 178536 - DNA, 707 bp, Homo Sapiens
  misc_feature (91)..(114): n is a, c, g, or t
  misc_feature (191)..(237): n is a, c, g, or t
  misc_feature (242)..(251): n is a, c, g, or t
gggggtgttgcttccatcaaaggatgtactaagttgtggattatttgtgaaattgaattacaaccttttccttaaggtcttttaccacctnnnnnnnnnnnnnnnnnnnnnnnnctgattcagattttcatactttaatgaaatattttataatttgcaaatttttaagtaatttatgaaaaacctagatnnnnnnnnnnnnnnnnnnnnnnnnnnnnnnnnnnnnnnnnnnnnnnnaaacnnnnnnnnnncagtttatggaccaagagttttgatttatttagggtggagttcaggatcagaatggtttcagaagctcccaggtgattccggagtgagttggagctgcaagcccctgagcctagattataagatgcttcctgggaaagaaccacattttaggaatttgcttccccacccagtgccctgcatttaatcagcacctgatgacttggcaggacttgccccaccagggtctggctttgaagggtagtggacaccaggatcctttggattaatcctctgccacctctctcttttcctcaaccgagagtgaatttatgtaattgagtgaaagtctacgaatcataattgtaataaattaaggctgggcatttgtttgaaattagataggataaagccaaagggtttgaacaagttgtggatggtttgtaaaaattaatcttacaaaataaatgctgtgtgtc

SEQ ID NO: 178537 - DNA, 871 bp, Homo Sapiens
  misc_feature (99)..(117): n is a, c, g, or t
  misc_feature (136)..(168): n is a, c, g, or t
  misc_feature (191)..(431): n is a, c, g, or t
acttaaccaaggtgccattgaagaggctgagtgatgaacatgaacctgaacaaagaaagaaaattaagaggaggaatcaagccatttacgctgcagtgnnnnnnnnnnnnnnnnnnncagcttaagatgatttacnnnnnnnnnnnnnnnnnnnnnnnnnnnnnnnnnagatggagtttcactcttgtcannnnnnnnnnnnnnnnnnnnnnnnnnnnnnnnnnnnnnnnnnnnnnnnnnnnnnnnnnnnnnnnnnnnnnnnnnnnnnnnnnnnnnnnnnnnnnnnnnnnnnnnnnnnnnnnnnnnnnnnnnnnnnnnnnnnnnnnnnnnnnnnnnnnnnnnnnnnnnnnnnnnnnnnnnnnnnnnnnnnnnnnnnnnnnnnnnnnnnnnnnnnnnnnnnnnnnnnnnnnnnnnnnnnnnnnnnnnnnnnntgagccactgtgcctggccgacaatttacttgtcttagtattatatgtagatatgtgattttttgagactgtatttttagagctgaatttttgactaaagacttaactttataataatgaagatacattagagaattttagttagatattgactttatctttaggcttttgtatgtttcagatgcaaacatattaaagtttcatatatctacttgactgggtatcttttttggaagacatacattattcacttccatttttacaataaacacttacttaacatctactctgtgccaagcactctgctataatatgggaccataaagatgagtacgacaaggatttggcctccaaggacttgttatcacctgtaaaccatttgcatgtttacaatatggcttatataatatttgttatataaatcaagtcttgaatactat

SEQ ID NO: 178538 - DNA, 673 bp, Homo Sapiens
  misc_feature (541)..(541): n is a, c, g, or t
  misc_feature (592)..(592): n is a, c, g, or t
  misc_feature (636)..(636): n is a, c, g, or t
  misc_feature (648)..(648): n is a, c, g, or t
  misc_feature (653)..(653): n is a, c, g, or t
gggggccacctcaggaggcaagtggccgcaggtgctattctttcctgagggcacctgttccaacaagaaggctttgcttaagttcaaaccaggagccttcatcgcaggggtgcctgtgcagcctgtcctcatccgctaccccaacagtctggacaccaccagctgggcatggaggggtcctggagtactcaaagtcctctggctcacagcctctcagccctgcagcattgtggatgtggagttccttcctgtgtatcaccccagccctgaggagagcagggaccccaccctctatgccaacaatgttcagagggtcatggcacaggctctgggcattccagccaccgaatgtgagtttgtagggagcttacctgtgattgtggtgggccggctgaaggtggcgttggaaccacagctatgggaactggggaaaagtgcttcggaaggctgggctgtccgctggctatgtggacgctggggcagagcaaggccggagtcgaatgatccagccagggaagagtttgccagggcagcttacagntcttttgatcctcatacggttgcttggtgcttttggtaatttccagcaggntaccatgggtttttggtggattttcccgagatttttggcctttncattagcagttnttgantgtgggcaagaacctgggaa

SEQ ID NO: 178539 - DNA, 943 bp, Homo Sapiens
gggtggcgagaaaggacactacgccaacagatgcaccaaagggcacttggcctttctcagtggacagtgacagcagctggagccagctccgagcagcccgggggccccgctgttgggagtgtgcatttaactgtttcatgcgcttgttggcgcgactgtggctcgagctggcccgcagacacgtgggtttcatcactctgaggggccacgtctgttagtttcctatcattttgccttagtattttttgaaaaagggacatgtgtcctgtgggtccctgcagtcgacatcatgtttggctgggcatcgatgcctcctttctgggactcccggcacaactcccctcatccagggagggaggcagctgctggggaggggcttggctaggtagttctgtgtggcggtggtcattcccctcattaaacaccagttcttggtgacgccaggggctggtaggtcattcaaagctgtggccagctcacgcctgcttcctccctccctgccctgctgaatcctaaagctgtgcctatatctgtgatttgaatgagggagccctttggggcaaattcaggtgcccccattgcctcaggctggccctgggtcccaggtggcagcggttgaggaggggtacagggctctcaagcctgaggttttcttctctgggcttaattttctcttggggtacgtgcctgacagtgtttaaggtgtccgttgaactggagttgcagacttttaaatagatgaccccttcagatcatctgtgcctacctcctgcccatcaggcgtctacactgtcactcagacacctgtggcatgtggaggagactgccctgtcctgagcctggaaaatgtgaaactgtctcctgcaacctgctggggcatgtgggcctggctgtgttcaattgcaagaacaatttttatgaaatggattacagcttgtttttt

SEQ ID NO: 178540 - DNA, 796 bp, Homo Sapiens
  misc_feature (688)..(688): n is a, c, g, or t
ggactgccatttattgacatttcagtggctgtggcaacagataaaggcttacttactccaatcataaaagatgctgctgctaaaggtatccaggaaattgctgactctgtaaaggctctatcaaagaaagcaagagatggaaaattgttgcctgaagaataccaaggaggatcttttagtatttccaacttggggatgtttggcatcgacgaatttactgcagtgattaaccctcctcaggcctgcattttggcggttgggaggttccgacctgtgctgaagctcactgaggatgaagagggaaatgccaaactgcagcagcgccagctcataacagtcacaatgtcaagtgacagtcgagtggttgatgacgaactggcaaccaggtttcttaaaagttttaaagcaaacctagagaatcctatccgacttgcctagtcctcaaagataagaagttggtgttcagcttagttgattcagtagttgttaccaagaaacatatgttataggaaaaacaacttggtatttaagtatgaagtggatgaaatgtttatttatttaaggtgaaagcatttgacccaggggtgtcttcatcttcaatttgggtttaatgttatagaaataaattgatgataaactcttaactaataaaggaaagagaatatttggttactcagatccatttttnacctctggtgctgtataaagggaatattaaactagatgtaaatcaaagtatatgtttggctcatttgagcattttggaatatttgagaatgtatgatacatgtaaaat

SEQ ID NO: 178541 - DNA, 1309 bp, Homo Sapiens
  misc_feature (507)..(507): n is a, c, g, or t
aaagaaggtactactgctgtaagaagttaacaagtaataatttcctatttaacatctgttcataatgacatttccgctgcatttttttccatcaagaataccaaaacagtttcctaatatacagtatttgaaagtgtttgccatattggctcttaaaatgatagactaatttttctcattcaataaaagaaaatttctaataacaaaatacatgtaaagttagaattttataatttccacaaaggaagcagcatttattaaccagagtacttgtttgcaattttttatctgtgaaaatattttaaagctcttacaaaacttaaatttttaaaaaatcagctcaaaaattttttcccatgttgttgggcataccactgctgtctctgctttcggttttccaactctgtaagaagggcttgtctgtatgcttcatacattttaacaatctgctccaattctttcatgaagagcaactttagcattccctggtatgtatccaggtcagcnagctggaagagttcccacttcagaatgtggtcatatttcacaggggctcgtgcgtaaacctgaagccagtccaggaatttctgccagtatgatatggatttgcaggtaccaggaagggactgatttctttcagtttcctgtggctggtatgtgacaggaggtggttgatcataccggaggtacactaggagcacagggatgcctgtattgggcctctttattggtgtgatctacataataggttccaaattcggatgactcaactcgttcccatccaggaggaagtccttctcgctcaagaggatggctccagtgagttgtatttgtgttatgatctatataatattttctccctctcattgtccagtccacagaccagccaggaggaaggggtaaatcttcagaaccatggttagtcaaatttcctaaagatgtagcagcaactctcccaatacctgaagcatgcctcccctgattctgtggcattctttggaagagatcatggttgtattcataatatctgtagtcttcatgtgcacgatctccaagtggccgctttctctgaccatcaaaaaaattgtctgaataataatatcgggaaccagagtctccattttcaacagcaaaactaacttccgttacaaatgactgagaagaaccatactctctagggacatctgctagacttctggcaagataagaaggtgcagataatctgttgctttctcttctcattatttcatgaggtgttctttgaattggagttctaaggaaactctggtttcttgaaactacatctccc

SEQ ID NO: 178542 - DNA, 460 bp, Homo Sapiens
gggtacttgcaaaacttgtaaattagcagatgacttttttccattgttttctccagagagaatgtgctatatttttgtatatacaataatatttgcaactgtgaaaaacaagttgtgccatactacatggcacagacacaaaatattatactaatatgttgtacattcggaagaatgtgaatcaatcagtatgtttttagattgtattttgccttacagaaagcctttattgtaagactctgatttccctttggacttcatgtatattgtacagttacagtaaaaattcaacctttattttctaattttttcaacatattgtttagtgtaaagaatatttattttgaaggttttattatttttataaaaaaagaatatttattttaagaggcatcttacaaattttgccccttttatgaggatgtgatagttgctgcaaatgaggggttacagatgcata

SEQ ID NO: 178543 - DNA, 401 bp, Homo Sapiens
aaaacgctattctcttgggactaaactgttcagaataatcagtattcttattccctttccactgtactctactgctcaatgcaaaatggagaatatgtggtccaaatagaaatatggcatttgtgcaggtcaagctttgaagagacatggaccacatgattagcctgatttttaaaaagcaacaagaatggtgacacaactattacaccaaacacaaaattctggccattaatgaatcagaagtaataactgatgctcctactttaaattcatcaatgccatatttaagaagtcaagcaacaacacatacttggcaaaatcttctaaattctcaagttatcaaacaaaaaagttatttttaatactttaccccccttatatcttatgattcaatcacttcc

SEQ ID NO: 178544 - DNA, 1133 bp, Homo Sapiens; identical to SEQ ID NO: 3464
  misc_feature (172)..(172): n is a, c, g, or t
  misc_feature (182)..(197): n is a, c, g, or t
  misc_feature (291)..(301): n is a, c, g, or t
  misc_feature (771)..(771): n is a, c, g, or t

SEQ ID NO: 178545 - DNA, 818 bp, Homo Sapiens
cccccaaggttcttaaaccagggtggtttttaaagggcccacccggaaaccttttttcttgtttcccaggcagtttttccggcgccgggccagaagggaaagggccagtccccctgaaaccagggttctttttgtttgggaaccaatgggttcggggcttctcccattttcccccaccgggggccatgttgttcccccttgagggatcctggggaagggacttgtcccttgggttgcttgcccagtggatctgacaacggacacctccctctaggtgccatctgtggctgggatactgcatctccttcagaatagcctcctgtgttctgccaactctcaggatgtctggcatcttcagtcaggttgtgtccctgaactgatgatggggctggggatagaatccatggctgcccaaataatgaggcgctccctgagtgagcccaggcagtggaggctgttaggcccagacctgaggaagcgttggcacacaaggtccaagctaccaccagcgccctcctgacaacactgggacactatgaaggagaagaggcaggaccaaccagggcctgggagtctcagataccctcggtggccttggaaagcaatcaccggccgtacctgttgccgctgacactcttgcagcgcccgcagggcagcgtcgttgagcctgagcagtaagaggctagtccgggcagcttgcgtgaagcagagccggagctgtcctctcagaggctcctggagctcctccatggcgacgagttcgagtgcaagcagcacgggggccacaggcgagggccaccaccgccacctcctctccc

SEQ ID NO: 178546 - DNA, 984 bp, Homo Sapiens
gggggactattaagggtgttagtcttggagaagacacagcctcaccttctcacttgctgtgggtgaggggccatttaagtggactgggagacagtgcgcagtttgtatataattccctttcttgtggaacagaagactgaggcctgcaggttccgatgtgtctccatgggctgtgctcccctcttcctactgtcagtttctgaaacttctgactggcctcccagttatgcctcctcctcaagttcctgggcccgtggatgttaaagctgctcgattcccagggatctcggctgccttttcctctatcttgagccctataaatgcccacgggaacccccaccaccagcctcttgaagtggctccacagctcctgtccctggaacatcctgtcaggttggtcataaaccctgagccagatgaaatgagccaccgtgaacagacatctgccatgcccccaggtggggtttcggtggcccctacccggtaccagttctctctgagaaactggaagatgtcttgttagcataagtggtcttccttcccaccctggaagggttcttgggcataaggaacccaagccgggtgggaaacttagttaactgaagcttaccaaaaacttcgaaataagtcccgtcctggaattgggaaggccccccccgttgaacaaaaaccggcggccccacaggaggtgcttggccctcccctccacggccgattccgcctgggccccgagccgccgccctctaacgcgccggagctccccgaagtggcgttttgggaaccacttcgggtgttgcgataacacccctccacccacgtggggcataaccctggggctacatgccaacccccagtggaaacacttctcgaacgtttccggggagacacattacatcagagaaagcccctactgtcgcggtgtgagggccccccccaccgtaaaaatctttttggtgggggcgtggtgggacctctataatcacc

SEQ ID NO: 178547 - DNA, 1367 bp, Homo Sapiens
  misc_feature (578)..(578): n is a, c, g, or t
ggggcttcgctgaggcagtggtggccgcactataccgttagaaactcaatttcccggaggttgtgaggccctttgaggcgaaatcgctctgggcgtgaaaggagcaggcgttggcaatggaaggaccaccgcgacctcaggctgaccgtagggagggatcttgagggccctccgagtcccctgggcttgcgctttctttctttgcagccaccgtgcctaccgcgaggatgagctcggcctcggtcaccgctttcgagaaggagcatctctggatgtatctgcaggcgctcggcttcgagccaggcccggcaaccattgcctgcggaaagatcgtgtcgcacacgcacctcggagtgaacatgtttgacaagctgaaccgtgatgcctttcatataatttcttattttttgtttcaagttctggaccagtctctcaccaaagaagttttcaaattttgttggcccccatttgaccaaaaaagtgacactgaattccgaaaacattgctgtgaatggataaaaaggatttctggtgaatgtggaagcagctttcctcaagttgttggttcactatttctnttctcctggtggtcctaagtttattcatctgatgtatcattttgcaagatttgttgcaatgaaatatattaaatccaattctaaaaattcttctcatcattttgtagagacatttaacataaaaccacagggacttgcacaaatgccattgccagatgccattttcgcacggtagcagattttttacaaattttgcaaagacaagattgtgttacccaaaaatatcaggaaaatgcacaattatcagttaagccaggtacgaaacttgagatctgaatgtactaggattggaaaaccaacataacgcaccacatggaaccctatgatgaccacagtaatatggcacagaacaaattcacaaaggttcggtctttgtgggccttcactgacctgacacgctcatgtcttcgccccccgcgagacaagtcgtcagtccggtcctctagtctcgttcaccacatatgctctcccactcgcactactgtagctatccatacttccacggctccttaccttgaccacccctcgccgcaaaccccactgtcccaacgttgcccctacggcccatgcttctatgagcgcttgcccccttgacccctctctcacacgctctctgcaggctccttcaccttgaccgttctctggcagcgtgcctgcccttctgcccccgtcgtccgcggccgcatcccgccccgatcgcaccgccgccctttccttaccttccaccaccagcccccgttcccccacgcacgtttcccagctctgcacctctgacgcttgactcccgtg

SEQ ID NO: 178548 - DNA, 1341 bp, Homo Sapiens; identical to SEQ ID NO: 3834
  misc_feature (1037)..(1037): n is a, c, g, or t
  misc_feature (1061)..(1070): n is a, c, g, or t
  misc_feature (1317)..(1317): n is a, c, g, or t

SEQ ID NO: 178549 - DNA, 228 bp, Homo Sapiens
  misc_feature (139)..(155): n is a, c, g, or t
ggggggagaaagggaaccttttcttaaaatgaaaataattactgctattttaaaatttcttgatcattgaatgtgagacccttctaacatgatttgagaagctgtacaagtataggcagagttattttcctgtttacannnnnnnnnnnnnnnnnggggaaaaaattggtaggtgtctaattactgtttacttcattgttatattgcagtaaaagttttaaaaccacc

SEQ ID NO: 178550 - DNA, 892 bp, Homo Sapiens; identical to SEQ ID NO: 3869

SEQ ID NO: 178551 - DNA, 823 bp, Homo Sapiens; identical to SEQ ID NO: 3896
  misc_feature (414)..(471): n is a, c, g, or t

SEQ ID NO: 178552 - DNA, 453 bp, Homo Sapiens
ggattaaaaccttaagttaaatataaatgttacaactcaatgtttgcttttagattttatacagtatttgttttgttttggttttgagtgtatataatgcagcattagcaatatggtccccaatagaggagtcaaatatatattgttaaaggagacctgtagcagtcaaagattttattgatttaatgacaaaggaaattaatgaaaatgtttttgtttttctgctgtaattctgcattaagctcacatgaaaatcatgattctagagtttggaatgcaaaattaattgttttaccctcaagctgggaatatttttcaaaataaatactataatatagatatcaaattattacctccccatgttatgttgaaaatttttttattaaattgataaaactttatttccattatattcataatgttctgttatacataacattaaaatgttcatta

SEQ ID NO: 178553 - DNA, 705 bp, Homo Sapiens
  misc_feature (294)..(305): n is a, c, g, or t
ggtacagggttgccgctaaaatattcacttgttcatatcgtgtcagagatttcctcttctctggagcttaggtggctcttcacaatccataggcttgaatctgcaacctagtgtaaactgccttgctttccccggttctttcccctgctagcacctgctttctcatccctatctccagtcaaagatgggattgcttaatccaactctggagagggaccaagtcttttctgcccacatctcacacaattgaggtgtctgaacaagcttggggagggtctataaggggtaggctcnnnnnnnnnnnncccatttgcagaggcagttttgccaacacaagggctctttcaagccgactttcacaaagagagccggacttgttagttggcttctgtctctttagagccaagaaaatagtaattaagtggcctatatatatgaagggcagaataagcacttactccccctgccttccaagatgaagaggagaagcaggccaaccctcaataattgtcagcctgaagagaagtgatcttagagaaagcagagaacagaatggactggatagacatcttgactctattccacccgtagtctgtgatctgggaagtccagcttaagggaaccccggatttttggaaaccggccttccctgcctgaaccaaaagtgtttcttcatttaaccccctcccactggggggaaaaccc

SEQ ID NO: 178554 - DNA, 792 bp, Homo Sapiens; identical to SEQ ID NO: 3915

SEQ ID NO: 178555 - DNA, 1110 bp, Homo Sapiens
  misc_feature (1042)..(1060): n is a, c, g, or t
gggacttccggggcggggctatctggccctttcctttccgcgtgtagaatgtggggcgcctgtaaagttaaggttcacgattccttggccaccatttccatcactctgagacggtacctgagattgggggcgaccatggcaaaaagcaagttcgagtacgtgagggacttcgaggctgacgacacctgcctggcacactgctgggtggtagtgcggctggacggccggaatttccatcggtttgctgagaagcacaactttgcaaaacccaatgacagccgtgctctccagctgatgaccaaatgtgcgcagactgtgatggaagaactagaggatattgtgatcgcgtatggacagagtgatgagtacagctttgtgttcaagcggaaaaccaattggtttaaaagaagagccagtaagttcatgactcacgtggcctcccagtttgcctccagctatgtgttttattggcgggattactttgaggaccagcccccttctgtatcccccaggctttgaccgaacagtcgtggtgtatcccagcaaccaaactttaaaggactacctcagctggcgacaagcagattgtcacatcaaaaatctttataatacagctttctcgggcacttatacaacaatctggactaacacccagtacaaccccaaggggagattacaggcaactcttgcaccaaacaaaaatgagattttgttttctgaatccaccatccactcatataatgaacctgccccatgttatagaaaagggactgtggttgatatggccacaaggtgggatgaagccgatgaccaaagaaaatttaccctgcccaccctgaaatggcaaagaaaccaaaaatggccacggacccggcacccgggaaaaagtccccctgccccttgcaccttgcaaaaaccattggctgaatgcttttctgggaaagcgcacctctccccaaaaattcttacaatgaaaacacacctctacccctttctgcccctttccctttcccggtgggcgcctttaatccataggacaaannnnnnnnnnnnnnnnnnnagggggcttcctttgctcctctagagggcgttggcaacacatctccacac

SEQ ID NO: 178556 - DNA, 656 bp, Homo Sapiens; identical to SEQ ID NO: 3921

SEQ ID NO: 178557 - DNA, 1030 bp, Homo Sapiens
tgagaatcatgttacaagcaagtcaaggcctcagattggttgaatggtgctgttcaaagatttagatgagatctgaggcatggagacatggagacagtatacagactcctagaattaagttttagggtttttggcttttctaatcaccaattcttatatacaatggatattttagactcgagcagatgatcatcttcatctaaagtcattccttttgactgagtagggcaggattagagggaatgggcagtatagatcaatgtctttttctgtaaagtataggaaaaaccagagaggaaaaaaagagctgacaattggaaggtagtagaaaattgacgataatttcttcttaacaaataatagttgtatatacaaggaggctagtcaaccagattttatttgttgagggcgagcagtctacagcaaccagacctaggccttgtttgacgagatgtagagtcgagtcatgtaatcacaattggcctagagagagacaaggatataaacaaactatttccaatgtttaaccagtgcattcattcgagtagctcaggatagctggcctttaaattgactgggaagtaaagaatgagttttctcatgacacacatcaaagtctccttgttcaacatgatctggtctgagagttcataaactgaatccttcctgctgaaacagataagttgtctttatgtctgttacaatgcctgccttaaatatatatcatggcaaggaatgaagtcagctgctctgagtcagtgtaaaatgacagtattgagactgatgtggttccactaaaatatccacaaggacaaaagctcttaagtctaccgataaaatccttagctgcagtcttcatagattttgtttttcaaatcagtttgtttccagcaaaaaggtaggcaataagctatcggaaatgcccagcaagtaagctaatggcctgctcaaagggccagcctccaactctccctaccacctatatttggtggtatcagacatcaaaagattcatcttaaaagaacatccc

SEQ ID NO: 178558 - DNA, 786 bp, Homo Sapiens
gggacgtcacgtgagagtgggcggagggggtggaggtttgtctccgctgtttcatctctatggctgtcagaggtgggcggctttgaccgagaggctgctggagctcgtgtttggacgcgatgtttcgtctgaactcactttctgctttggcagaactggctgtgggttctcgatggtaccatggaggatcacagcccatccagatccggcgaagactaatgatggtggctttcctgggagcatctgcagtaactgcaagtactggtcttttgtggaagagggcccatgcagaatctccaccatgtgtagacaacctaaaaagtgacatcggtgataaagggaagaataacagatgaaggggatgtttgtaaccatgagaaaaagactgcagatcttgcccctcacccagaagagaaaaagaagaaacgttctggattcagagacagaaaagtgatggaatatgagaataggattcgagcctactccacgccagacaaaatcttccgatattttgccaccttgaaagtcatcagtgagcctggtgaagcagaagtgtttatgacaccagaagattttgtgcgatccataacacccaatgaaaaacaaccagaacacttggggtctggatcaatatataataaaacgctttgatggaacagaaaatttcccaggaaacgagaaaaatttgctgatgaaggcagtataattttacaccctttggagaatgtgggctcatatccttttcagactacattttcctcacaactgttctttccactcctcaga

SEQ ID NO: 178559 - DNA, 878 bp, Homo Sapiens
  misc_feature (193)..(233): n is a, c, g, or t
  misc_feature (574)..(574): n is a, c, g, or t
  misc_feature (676)..(676): n is a, c, g, or t
ggggcgcggagccctgctctcgcaactcaagatggcggacgagagtgagacagcagtgaagccgccggcacctccgctgccgcagatgatggaagggaacgggaacggccatgagcactgcagcgattgcgagaatgaggaggacaacagctacaaccggggtggtttgagtccagccaatgacactggagcnnnnnnnnnnnnnnnnnnnnnnnnnnnnnnnnnnnnnnnnngcagtgagacagattcagcccaggatcagcctgtgaagatgaactctttgccagcagagaggatccaggaaatacagaaggccattgagctgttctcagtgggtcagggacctgccaaaaccatggaggaggctagcaagcgaagctaccagttctgggatacgcagcccgtccccaagctgggcgaagtggtgaacacccatggccccgtggagcctgacaaggacaatatccgccaggagccctacaccctgccccagggcttcacctgggatgctttggacctgggccgatcgtggtgtgctaaaagaactgtacaccctcctgaatgagaactatgntggaagatgatgacaacatgttccgatttgattatttccccggagtttcttttgtgggctctccggccacccggctggctcccccaggggcactgggggggntcgagtggtctcaagtcggaaaaatcggttgggttcattagcgccatcccagcaaacatccatatctatgacacagagaagaaagaatggtaggagatcaaccttcctgtgggtccaaccagaagctgcggtttccaggaggggttggcttccagtttccggatcccgagaggaatccccaggcggggggttccccctgggc

SEQ ID NO: 178560 - DNA, 891 bp, Homo Sapiens; identical to SEQ ID NO: 4008
  misc_feature (187)..(187): n is a, c, g, or t
  misc_feature (765)..(765): n is a, c, g, or t

SEQ ID NO: 178561 - DNA, 841 bp, Homo Sapiens
  misc_feature (469)..(469): n is a, c, g, or t
ggggcccaggggacgggtccgactcagaaatggcggcctccatgttctacggcaggctagttggccgcggccaccctgaggaaccaccggccgcagacgacccagcgagccgccgcccaggttctgggaaattctggattgtttaacaaccatggactacaagtacagcagcaacagcaaaggaacctctcactacatgaatacatgagtatggaattattgcaagaagcgggtgtctccgttcccaaaggatacgtggcaaagtcaccagatgaagcttacgcaattgccaaaaaattaggatcaaaagatgtcgtgataaaggcacaggttttagctggcggcagaggaaaaggaacatttaaaagtggcctcaaaggaggagtgaagataggtttctctccagaagaagcaaaagctggttcctcacaaatgattgggaaaaaattgattaccaagcaaacgggangaaaagggcagaatatgcaatcaagttttggtctgtgagcgcaaatatcccagggagagaatactactttgcaataacaaatggagaaggtcatttcaacgtcctgtactggatagaaagtgcacaaggtggtggttaacattggaaaaatgtggcctgccgaagaaccctggaagccccttgttaaatgaaccctaatgataatagtggaagggccttccacaaaagaaacacgcccgtgaaaccctgtcacagaaagaatgggattccctctacattgggacttgcgcaaaaactgatcaactcttaatcttttctgagcacccccaccttgggaaaataccccccggtaaaaatcctgccggaaggggc

SEQ ID NO: 178562 - DNA, 1426 bp, Homo Sapiens
  misc_feature (289)..(328): n is a, c, g, or t
  misc_feature (858)..(858): n is a, c, g, or t
  misc_feature (999)..(999): n is a, c, g, or t
  misc_feature (1010)..(1010): n is a, c, g, or t
  misc_feature (1050)..(1050): n is a, c, g, or t
  misc_feature (1259)..(1267): n is a, c, g, or t
cttggtcttcaatttaatagttgttaagtttttgcccgcgtggcatatgcctttcatttataatttatttaccctgcttgacttagtttgggaattcgtaaatttaaaggtgtgtgtattctgtttgcatctccctgtcactgtgacacacctagatgcgtgttacttcaattaaaattctcaaatttaattttgatttgcttcagcagggaaaatattctcaataatgtaaaataattaaggtctatacatgggttgtatttttctggttcacaacaccacaaagtgnnnnnnnnnnnnnnnnnnnnnnnnnnnnnnnnnnnnnnnnaccctgaagtcggtgaatacttttctagtttatttgatactctttctgtgtatatattaagcttttgctgtagattgcctagtaaaattactaaggataggttgtttttacatatggtctatttaagtctgatgtttacgggggaaagtgtagttactaaaaatgtttaacataatttggaagaagagtatgaacaaccaataccaatacctattgcgtttggattcttaagaccccagtttgttattccactaaactagttatcttaaccatatcatctggttttgtgggccattatttaccttcccttatgtcttatagaataatggttaatattcttaggtcaaaattacttttggaaagtaactttcccacaattaactgtttttgagcacctgacaaaatttagtgttaaccttgcgtgccattttgtgtcatccttcattaaaaaagcaattggaggtttgccagttatctcacttccctttttaaatcaatgttgttttaatgcactaatctgaattctgtanagaggattatcttagtttatactttgtattttataatgttcttgtatagcagctcggtactgaaggcggtgtttaacttggcaagctctgagacttcaaatgggaacaaatagtaagtagctaagtaaaccacatctttgncaccaaaatanagatgagttaaaaggtatctggttaggcctatttcatgangactatgctctggtgggaccacaggtcacctgatacttagtgctgtgctgcctgaaactcagcatggagacatcaccacatgcactgtggccatttcacatctttctggagcatcaggtcacttcagttttttattttaaggtgtcatcgatttttaccaactttgtcaaactgggaaaaagtgctttgcatatccaaaaaacttcccnnnnnnnnnccccaaaagggattacacaaaaactctttttgggaagggagggaatggaaactttaaagactcctggtggccaaaaatcaaactgcgctctaaaacagaatggggccaagggcccgggaggggaaatttcccaccaaacaggccccttggtttcctgaa

SEQ ID NO: 178563 - DNA, 614 bp, Homo Sapiens
  misc_feature (22)..(22): n is a, c, g, or t
  misc_feature (60)..(60): n is a, c, g, or t
  misc_feature (120)..(155): n is a, c, g, or t
ggggtgttcctattgaaactgnacctaaatttttgccctacaatttccccttggttaaanattgtagataaattgcctaatactaatagcccaaatagataacacctaatgctttgtttnnnnnnnnnnnnnnnnnnnnnnnnnnnnnnnnnnnntgagcagtggtgttctaatgaagttatgacatctgtcctaattagtttcttaaatacatttactacttaatggttttgaagcaactgtttaatttttaaaatttttgaaaacttgctaataaccttttgttcagaatttagtagattgtttaatgcaggacatcaactacataatgaaagatgcttgaaatgcttttgttatttcaggcaaatcaaattaaatcagactatcaaactacaagagaaccttagtcttttttgtttttgtctaaacatgttagtttagtgatgtcttggtgaactgtgagtgaactgtattgatttttctaatctttagagaccttcacacagcatgagggctgttggcattttgaaaaaggttaataagtagaagcatacatgttttccttttgtttttgaaacttgtttgtaaacataaataaatatgcccttttatta

SEQ ID NO: 178564 - DNA, 655 bp, Homo Sapiens
ggtagatctcctggatggggcttctggggatgtccagcatcctccccatctggacccctccccaggaggtgccctggtacacctgcttgaccttccctgtgtacctccacccccagctcccatcccagatctcaaagtgtttgagcgtgagggagtacagctgaatctgtctttcattcgaccccctgaaaaccctgctttgctgttaatcaccatcactgccaccaacttctcagagggtgatgtcacccatttcatctgccaggctgctgtgcccaagagtctccagctgcagctgcaggcccccagtgggaacacagttccagctcggggtggccttcctatcacccagctcttcagaatcctcaatcctaacaaggccccccctgcggctaaaactgcgcctcacctacgaccactttcaccagtcggtgcaggagatctttgaggtgaacaacttgcctgtggaatcgtggcagtaactgtctccactcacagcctgaaattctcctggtgtcccaaacccccagggggccccagcagcttccaacctaaacctgaagggctaccagcaggtggcgccctggctttgcactgcaaaaacctgggaccagcccccttctcccacaaataaagcccaataaagcctgagaaa

SEQ ID NO: 178565 - DNA, 387 bp, Homo Sapiens
gggaccttgatgtgaggaaaagataaaatttaaacaataaatttgccacttagattttctagcagcaaagtccgaaaagatagttatatacaaaattctgttttctgaaaacaaaattgtgattcaccttcagaattggccattttttttgtgagtttccttgcatcaaggacactgagaaacacagtcattgtcttaggtgttctatgggaggaagtgaatagagcctttaggaacttcctggtcaagcttatggtgcttattttgatctgggccacttccctccttccagtcatgagtaatcatcaaggagcaagttggagtgtttcaggtgtatattttgtagaacccaaaagattggagccttaacaataaacatcagcacta

SEQ ID NO: 178566 - DNA, 879 bp, Homo Sapiens; identical to SEQ ID NO: 4059
  misc_feature (444)..(444): n is a, c, g, or t
  misc_feature (626)..(626): n is a, c, g, or t
  misc_feature (629)..(629): n is a, c, g, or t

SEQ ID NO: 178567 - DNA, 833 bp, Homo Sapiens; identical to SEQ ID NO: 15021

SEQ ID NO: 178568 - DNA, 813 bp, Homo Sapiens
  misc_feature (740)..(740): n is a, c, g, or t
ggggcagtcctctctggggagcctgaagcaaacatggatcaagaaactgtaggcaatgttgtcctgttggccatcgtcaccctcatcagcgtggtccagaatggattctttgcccataaagtggagcacgaaagcaggacccagaatgggaggagcttccagaggaccggaacacttgcctttgagcgggtctacactgccaaccagaactgtgtagatgcgtaccccactttcctcgctgtgctctggtctgcggggctactttgcagccaagttcctgctgcgtttgctggactgatgtacttgtttgtgaggcaaaagtactttgtcgggtacctaggagagagaacgcagagcacccctggctacatatttgggaaacgcatcatactcttcctgttcctcatgtccgttgctggcatattcaactattacctcatcttctttttcggaagtgactttgaaaactacataaagacgatctcccaccaccatctcccctctacttctcattccctaactctctgctgaatatggggttggtgttctcatctaatcaatacctacaagtcatcataattcagctcttgagagcattctgctcttctttagatggctgtaaatctattggccatctgggcttcacagcttgagttaaccttgcttttccgggaacaaaatgatgtcatgtcagctccgccccttgaacatgaccgtggccccaaatttgctattcccgngcatttttggttggttcttcacctatcctggttctctgaagaatgttttgtgaccaggtttgttggttttcta

SEQ ID NO: 178569 - DNA, 472 bp, Homo Sapiens
  misc_feature (397)..(397): n is a, c, g, or t
ttttttgccggaaaagatgtttttatgttcacttacatggaaaaaaaatccaattatacaacatgtagatatatgtttctcagaaaattcatctctatgaacctgtttgtttcagtcgcagttataattcaacaattgccaaatggaagtcataaaattgtggggtgggggttggggaggagagccgccaaggggaaggtagtaattatgtgctatttcttttctagtttcagattatttggagtttcaacttttccagcaagtcagagttacataaacagacaccatactaaaatatgattgtgtaaaaatataaaattcctaaagcatgatggcaataatattttagggaaaaaaacattagagtctgataggcatcagaaaatacaaataggantcatttgaggcagtcctgtttctgtgtacgaacaggcagttgcaaatgatggggtgtacgtgaaaggaaaaaagg

SEQ ID NO: 178570 - DNA, 968 bp, Homo Sapiens; identical to SEQ ID NO: 4429
  misc_feature (299)..(299): n is a, c, g, or t
  misc_feature (604)..(615): n is a, c, g, or t
  misc_feature (627)..(818): n is a, c, g, or t

SEQ ID NO: 178571 - DNA, 1573 bp, Homo Sapiens
  misc_feature (185)..(194): n is a, c, g, or t
  misc_feature (302)..(363): n is a, c, g, or t
  misc_feature (404)..(445): n is a, c, g, or t
  misc_feature (495)..(509): n is a, c, g, or t
  misc_feature (521)..(527): n is a, c, g, or t
  misc_feature (529)..(531): n is a, c, g, or t
  misc_feature (533)..(534): n is a, c, g, or t
  misc_feature (546)..(547): n is a, c, g, or t
  misc_feature (571)..(646): n is a, c, g, or t
  misc_feature (648)..(648): n is a, c, g, or t
  misc_feature (650)..(650): n is a, c, g, or t
  misc_feature (652)..(652): n is a, c, g, or t
  misc_feature (654)..(665): n is a, c, g, or t
  misc_feature (667)..(668): n is a, c, g, or t
ctccgcgcgggggggagaaatattttattttccccagagggggcccccaagggggtgtttaattcccccgcgcgcggggtataaagggggggtttcaaaacacccgttgttttagggggagggtctctcccgcggggcggggggaagtttttttattgaaatataccaccccacccctcttctcnnnnnnnnnntaccccagcgggcggggcgccacataaattaaattaaaggaggagacaccccggggggcccccctcttggatataaacaccccaaataaaagcccccgaagagctccnnnnnnnnnnnnnnnnnnnnnnnnnnnnnnnnnnnnnnnnnnnnnnnnnnnnnnnnnnnnnngggggaggggtcccccgccccttgttttgtttcgggggggnnnnnnnnnnnnnnnnnnnnnnnnnnnnnnnnnnnnnnnnnncctgtggggggcgcgccccccacaaaaaggttgtataaaaaatttttttnnnnnnnnnnnnnnncgccaaaccaannnnnnngnnngnntgggggtttggnnttggggatggtgttttgggttttnnnnnnnnnnnnnnnnnnnnnnnnnnnnnnnnnnnnnnnnnnnnnnnnnnnnnnnnnnnnnnnnnnnnnnnnnnnntngngntnnnnnnnnnnnntnntttttcaaaaagaatgatacaacttttattttccatggattttacagatacttttgctacatagtttatgtatttttatgagatttttttcatttgtatgaagttcattcagccttatacaattttaaggtgatatgtttggtagtgtatctataatctttaaaaagttttagagtttttggaatgtacagtatatgaggtaaaatcaagattacattaaaaattgttttctcctctgcactaattttgcagtgaggctcaaatggcaaagtatactattaaatgacatttactatcaaaaataggaagttcatttgaattactatgaaaaacataagccactgtaacttgacacagtggcacattttaccattttagacattcaactatatataaatctctgggctattacactcagactcatttgtactgccaaatgtggcactttaaagaagtttctagaaaacaatcgcaatcactgttgtttctggggaaggttatcaccctatacataagagattaaatttaaataaaatgtaaacatacagtatattatagtgacaggtcattcttaccacttagaaaggccaagtttatccatttcttttttgaacaagggttaatgtttttctacagcacagatcatttgacataaaactgttacaatacatgcccattctattataaaagaaattcttcagagatcttcaaagcacaaaaaatacgttcttttttcaaagactgacagaagtgcttaataatcactaaaatgccaacctcagcaactaaaaattagtgattcgctatcctaaaattcaaataataaattaaaaaagctagttacaggtgttttacggataacagatgtgctaaaacaagaattgtagatagtttcattataaact

SEQ ID NO: 178572 - DNA, 1068 bp, Homo Sapiens
cttggctgtcatttagctctctggcccacagaaatactccatccaaggagctggtcctcagtcagcctgatgaggacaggtcagtggccaaccctttgccccagtccttcatctggagacagtcacatagtcacgtcaacagttcacccaaagagaagaggtggggcctggcttctcccacagggcacagcctaactatggagacccagggctccttcctgctgcactaggcctgtgctctccctattgccttcaggtggtgtgatcccggcttcctcacagagcccttttttccttctgcccagctccatcccaccagagtttctacccccgctgaggcatctcctgggcacagaccaccacactctaagccggctggcctgggagttagggtcctgcccacctcacctgggagttggggtcctgcccacctggagtttagcacgctggtcgctcactttgctttggtctgcacacctggtgtgtgcatgtgtatactgcttgtgccatctgtgtacccctctcccctggagtacacttgtggtcacactacagtggggacatcaagaatgcaatatttatggattgctgcatgattcttaaaaatgaataaaactgtttacaagggaaagagagctaactgcaaagtaaaaaccccccaaacacaaaaactcaaccttgtcggccgcctccggccctcaaaaaactttcctaaacctttcctttgggccccccgggccccctaagggtaagtgaaccatggcccataacctgtttcccctaagaagatccctgggccaatggactattggctttgggatctctcccccaaaataaaaaacccccccgggcgggacaacccgaaacggtgtcttagaccaaaatccacatatgggaatcttcctgaagggccaattactggggaaccaatccaaacagcgaggtccccaggcgaaggctctcaatattacaaaatttaggcccccgccgccctgggcaaccctcattgcgcaaataaaccgggtgggtaaattctcatataaaccacatctctggccacaaacatgg

SEQ ID NO: 178573 - DNA, 1297 bp, Homo Sapiens
  misc_feature (996)..(996): n is a, c, g, or t
accgcctgggtgggtgggcaatggccaaccccaaaggccagggcaaaaaaccaagggcaaaaaggttttccttcccaggtttagcttttgttacctccaggctggtgctttttccggccaaagcaagaaaggatcccatttttaaatgaatttcttgaaaggactttggaaattatttggaacttaggggaagggattttgagggttccctggctgaggaacttcccattgacttgggcttcgcatttacctttcaaaaataccagtacactttccaattgtccatataaatagctttccacaattctacacacccatcatctcctgaagatgctagcaccgttcctgttatattccaactcactcgccagacctgagaattatgattatcgaactgagccactatatggatttcaaactttgttggcccaccagaggaagtcagttcttccctcacaggctttaatgtaaaaattcccacatctttggtcgctattgctagaatatggaaagatcttccccaaatttggagcgaatgccaatatcatgaacaggatcagtgactgtcataagagtttcagcttttgcatatttcctggtgttttcattatattcaaaaatctgaaccttggccattgcgttggggctactgtcatcacttcctacggcgatcatgggggaatgagcacgagagcttgaagggttccaagaaatacaactacagcttagcttacatgagatctcatgctgcaaagaccactggctgagattcataacatctggtgcctcatagattcttactataccatctgcggaacaggttgctaacataagacccatgtgcttgggagcaaacttcacatcagtaacagatgttctgctatccaccagagttgtccttttaacccagtggctctgtcctcgcagtttatcatttgattctcctactatttcttcccatacagcagctgttcggtcaaaagaacaggaagccanaacctgcccaaattcaggatgggcccatgtcacacgccatacagatccactatgtgtcttccagctagcagtacaatgccaatcaccactttcacttttatcccagaccttaacgctctgatcgctggagcaggttgccatccgccgcccgtggaagtcgaaagagacatcgtggatgagatccttgtggtccgccgcgatgctgcgagccacaaacatggtttccgtcgggcccgcgcctccgaagaggacagtggcggcggcagcggcggcggcgcgtggcccgtagcctagccagacc

SEQ ID NO: 178574 - DNA, 836 bp, Homo Sapiens
gggctctctctcactggcacagcgaggttttgctcagcccttgtctcgggaccgcaggtacgtgcctggcgacttcttcgggtggtccccgtccgccctcctcgtccctacccagtttcttgcttccctgccccatctccgccgctccccgcagcctccgccgagcgccatggctcctaggaagggcagtagtcgggtggccaagaccaactccttacggaggcggaagctcgcctcctttctgaaagacttcgaccgtgaagtggaaatacgaatcaaccaaattgagtcacacaggcagaacctcctcaaggaggtggataacctcctacaacatcgagatcctgcggctccccaaggctctgcgcgagatgaactggcttgactacttcgcccttggaggaaacaaacaggccctggaagaggcggcaacagctgacctggatatcaccgaaataaacaaactaacagcagaagctattcagacacccctgaaatctgccaaaacacgaaaggtaatacgggtagatgaaattgataggggacagagggaagaagaagaaggaaaatgaacgcaaggaatctttcaaaactggaaagagtccaaaaaggtggtccctcccatcccaaagaaagagaactcccggtcccctaccaaggataaaaggaaaaaaggggaaaaaggtccaagcccggtgcctaaacactggttttccccccacgcccgggggggcacgatttggggaggtgggtccccatgggcccacaagcccaaacttcccaaggcccctgggaacacccccaaggttttggagctccacaagggggttctttcc

SEQ ID NO: 178575 - DNA, 828 bp, Homo Sapiens
ggatttcatatatatcccactactcaaggtatccatggaacatgaaagaataacatttatgcagaggaaaaacaaaaacatccctgaaaatatacacactcatacacacacacgcacaggggaataaaataagaaaaccattttcctcaccatagacttgatcccatccttacaacccatccttctaacttgatgtgtataaaatatgcaaacatttcacaaatgttcatttgtcatttcaaaatactttagtatatcaatatcagtagatacccagcgggcgggaaagggtcattacatgaaaatatgaagaaatagccatattagcctttttaacctgcaatttgcctcagcaacaaacaaaaagtgaatttttaatgctgaaagataaaagaagctaaagtacccaccacaagccttggctatttatagcagctctgacaatacttttataagaacatgaagagaacagaatcacttgaaaatggatgccagtcatctcttgttcccactactgaattcttataaagtggtggcaagatagggaagggataatctgagaatttttaaaagatgatttaatgagaagaagcacaattttgattgtgatgagtcactttctgtaaacaatcttggtctatctttacccttataccttatctgtaatttaccatttattgtatttgcaaagctagtatggtttttaatcacagtaaattccttgtattccagactttagggcagagccctgaggggagtattattttacataaacccgtcctaaagtaacatttcaggcaacattcttcattgcaagtcaaagatcct

SEQ ID NO: 178576 - DNA, 911 bp, Homo Sapiens
ggggtgacatcaccgggcagggaggggtgctggtggtggttcatacggagtaagctgctctgcctgtgtgagtggctcctgggccctaaacaggcacctttaggccatgggtcactcaccgtgagccatcaatgtgctctggtctgacatggtttctctctgtcttctagtctagacctagtttttttgttctgttccccacgtatggatatagtagagattgttgtctgtgaaatttctcttttgtagattttgagttttcccttgtagtgtaaagaatgatcactttctgtaacaataacaagaccactttttaagatttatcctgtttgttctttgctgattgaaacataataattgtctaaaattcctctacagccttctttttcttccatagctaatcttccttctaatagcttttgctttctgttttgcctgttgttgctttgcaaagctttcccctccatagcccgtaactgttatcaatataaaataatctttcctggttgaatgccttcactgacttgaatttttacttctggatacaaaacatttgcccaaactgcttttttatcctgcatgactttcatctgggaattggccctgccccttatccctctccatctgggagtttttacaatggccctcttggttcccgcttgccctcttcccacccctacatacgcataacttgcggccctttccgctgctatgccgagctaataacacactaaaataaaccctggccgccgccctcttctgatccttccagaagcgttcttcaaaacctcttttgtttggcgtcgcgggaggactctgtaatcccacaagggaaattagggtgttcaccgggcctgcctcgagggacaggcgccgatttatccgtacttgtgactacgcgctctccccag

SEQ ID NO: 178577 - DNA, 801 bp, Homo Sapiens
ggggattcggtcccgctgtcctaggcgggatggtgccgctgtgccaggttgaagtattgtattttgcaaaaagtgctgaaataacaggagttcgttcagagaccatttctgtgcctcaagaaataaaagcgttgcagctgtggaaggagatagaaactcgacatcctggattggctgatgttagaaatcagataatatttgctgttcgtcaagaatatgtcgagcttggagatcagctcctcgtgcttcagcctggagacgaaattgccgttatcccccccattagtggaggatagtgcttttgagccatctaggaaagatatggatgaagttgaagagaaatctaaagatgttataaactttactgccgagaaactttcagtagatgaagtctcacagttggtgatttctccgctctgtggtgcaatatccctatttgtagggactacaagaaataactttgaagggaaaacaagtcattagcttagaatatgaagcatatctacccatgggcggaaaatgaagtcagaaagatttgtagtgacattaggcagaaatggccagtcaaacacatagcagtgttccataaaacttgggcttggttccagtgtcagaagcaagcataatccattgcggggtcctcagccccaacagagctgcatctcttgaagctgtgagctatgccattgatactttaaaagccaaggtgcccatatgggaacaaaaggaaatatacgaagagtcatcaacttggcaaaggacaacaaagagtgcttttgggcatccaacagttaatcacta

SEQ ID NO: 178578 - DNA, 455 bp, Homo Sapiens; identical to SEQ ID NO: 97771

SEQ ID NO: 178579 - DNA, 1023 bp, Homo Sapiens
ggatcttcagatctgtgacagtgacagccaataggactgataatattagcttcaaaccaataatatccagggttaaaataaaaatcatagtgaaagtacgattgtaaaattatgctatattaacttttaagtctgtaataacttgacatcaaaatgttatgtaattaccataaataatggctagcgagaacatctttggaaattctcaaattacctttcttactacactgtttgcagaatgaatgtagaaatgatcctgttagctttctgaatgttctgtggttgaatgtgtttttgcttaaataaagcttttggtatttgtttaaattacacttcttgagaagtggaaattttaggatcatctttgctttgtttcagttttgtgatttttgaaatgaatgtttagtttactgagccagttggtcatttcttcctcatgtcgttaagtccagtgagtaagcctgaactgtgaataaattaccaaaaacttgcttagaatttcattttgaagcaatttgctaatatttgaagtgtatacacatttgtagttatgttaaaaattgtattgtactaagaatgtaatcaatgtctactttagttgtaaacatttctgatgtcaaaactttattcattactgttgattttaagaataagaaatcactgcctaaatattaccaaaagccactgtctctacccgaacttcccagtttgggaaagaatcgttagataaaacaaaggctctgccctttctgataccaaactccacagatactttctcacatcttttaaacattttgcaataacatattgtttataggaagtttacagggtatgcaatgattaaaacttttaagtgaattgatagttgcaaaagaaaagataaatatttaagggtcagtgaagtagcaagacaatctaaagtttcctggtaataatctggcctcctctgttaaattatagaagccaaagtttttcccttaacagaaatccctttttaattgaacagccaaagccaaaaaggtc

SEQ ID NO: 178580 - DNA, 1344 bp, Homo Sapiens
  misc_feature (50)..(96): n is a, c, g, or t
  misc_feature (663)..(663): n is a, c, g, or t
  misc_feature (1274)..(1274): n is a, c, g, or t
ggggctggcttttttagtgagagtcaagagctggcttggtaaagtcttannnnnnnnnnnnnnnnnnnnnnnnnnnnnnnnnnnnnnnnnnnnnnntccatgggaaagagctatgatgggagagcttatgtcatcactggcatgtggaaccccaatgcaccagtatttctggcacttaacgaggaaaccccaaaagataagcaagtatacatgactgtggcagtggatatggtagtcacagaggtggtggagcctgttcgctttctcctggagacagtagtccgtgtgtaccctgcaaatgagcgattttggtatttcagcagaaagactttcacagagactttcttcatgagattgaaacagtctgagggaaaaggccataccaatgctggagatgcaatatatgaggtggtgagtctacagcgagagtctgacaaggaggaaccagtcactcctactagtggagggggtccaatgtcaccccaggatgatgaagcagaagaggagagtgataatgaactctcaagtggaacaggtgatgtgtctaaggattgtcctgagaagatcctgtattcttggggagagttgctaagaaaatggcacagtaaccttggtgcacgaccgaaagggctgtctactctggtgaaagagtggtgtccctgnaagcattggagggcaaaggtatggcagttattggcaggctgccatgacaaccaggcaatgctggatagataccgaattcttatcacaaaggtctgttggagtttgctggaggtccactccagaccctgtttgcctgggtatcaccagtggaagctgcagaacagcaaatattgcagaatggcaaatgttgctgcctgatccttcctctggaagcttcatctcagaagggcacctggctgtatgaggtgtcggttggcccctcctgggaggtgtctcccaattagactactcaggtgtcagggacccacttgaggaggcagtctgtccattctcaggtcccaaactacatgctgggagaaccactactctcttcaaagctgtcagacagggacatttaagtctgcagaagtttctgctgccgtttgttcaactatgccctgcccccagtactggagtccaggaaagcaggcaggcctccttgagctttggtggggctcacccagttcagtcttcccggctgctttgtttacctactcaagcttcagcaatgggcggatgcccctccctcagccttgctgacaccttgccggcttgatctcagactgctgtgntagcagtgagtgaagctccctgggtgtgggactcttccgagccgggtgcgggatatatcctcctggggtc

SEQ ID NO: 178581 - DNA, 1105 bp, Homo Sapiens
  misc_feature (1078)..(1078): n is a, c, g, or t
gaaatgaaagctctttatttcatcactccgacatcaaagtctgtagattgtttcttacatgattttgcaagtaaatcggagaacaagtataaagcagcatatatttacttcactgacttttgccctgataatctctttaacaaaattaaggcttcttgctccaagtcaataagaagatgtaaagaaataaatatttccttcattccacatgaatctcaggtgtatactcttgatgtaccagatgcattctattactgttatagtccagaccctggtaatgcaaagggaaaagatgccattatggaaacaatggctgaccagatagttacagtgtgtgccaccttggatgaaaatcccggagtaagatataaaagtaaacctctagataatgccagtaagcttgcacagcttgttgaaaaaaagcttgaagactactacaagattgatgaaaagagcctaataaagggtaaaactcattcacagctcttaataattgatcgtggctttgatcctgtgtccactgtcctgcatgaactgacctttcaggcaatggcatatgatctactaccaattgagaatgatacatacaaatataaaacagatggaaaagaaaaggaggccatccttgaagaagaagatgacctctgggttagaattcgacatcgacatattgcggttgtgttagaggaaattcccaagcttatgaaagaaatttcatcaacaaagaaagcaacagaaggaaagacatcacttagtgctcttacccagctgatgaaaaagatgccccatttccgaaaacagattactaagcaagttgtccatcttaacttagcagaagattgcatgaataagttcaagcttaatatagaaaagctctgcaaaactgaacaggacctcgcacttggaactgatgcagaaggacagaaggtgaaagattccatgcgagtactccttccagttctactcaacaaaaatcatgataattgtgataaaataagagcaattctactttatatcttcagtattaatggaactacggaagaaaatttggacaggttgatccagaatgtaaagatangaaatgagagtgacatgattcgtaact

SEQ ID NO: 178582 - DNA, 409 bp, Homo Sapiens
  misc_feature (40)..(40): n is a, c, g, or t
  misc_feature (260)..(260): n is a, c, g, or t
  misc_feature (359)..(359): n is a, c, g, or t
gggcagggtggggaatgggcgaggagtctttgggaagagnacgggggctgaactttcaactcctttctggcctcttgtcccactgcttccaccatcaccttccaaatccagggctgcactagggcaaggtgaccaccctacttggtaaagacctgattggcgcaccatttctggtgtgggtgtctttcaccacccagaatgaccaggttggaatcggggtgggtgaagttggagggggtggcaagtacaaggcaagggtngcccaggaaccggcatccaggaaatcagccctgggagtagaccttgccttttccttccattcctttaccaagtttagccttcccttttcagtttccgtnttgacccctgttgtttgggtagcccctttcctttccctttcctgttaccc

SEQ ID NO: 178583 - DNA, 541 bp, Homo Sapiens
  misc_feature (12)..(12): n is a, c, g, or t
aattcggcacgnggggcagggtggggaatgggcgaggagtctttgggaagagcaggggcctgaactttcaactcctttctggcctcttgtcccactgcttccaccatcaccttccaaatccagggctgcactagggcaaggtgaccaccctacttggtaaagacctgattggcgcaccatttctggtgtgggtgtctttcaccacccagaatgaccaggttggaatgggggtgggtgaagttggagggggtggcaagtacaaggcaagggtgcccagggaaccggcatccagaaatcagccctgggagtagacctgcctttcctccatccttaccaagttagcctcccttttcagttccgtctgacccctgtgttggtagccccttccttcccttcctgtaccccctccgtctcttctcgtggtagcgggttagtgtttcagtgttcttaactccaatctgcttgttcattgtacaatgtgcttcttttaaggccccatttttgtaacttgagtgtgtcattcatctgaacaacaaacatc

SEQ ID NO: 178584 - DNA, 1108 bp, Homo Sapiens; identical to SEQ ID NO: 4591
  misc_feature (838)..(838): n is a, c, g, or t
  misc_feature (866)..(871): n is a, c, g, or t
  misc_feature (873)..(921): n is a, c, g, or t
  misc_feature (923)..(930): n is a, c, g, or t
  misc_feature (932)..(953): n is a, c, g, or t
  misc_feature (955)..(955): n is a, c, g, or t
  misc_feature (960)..(960): n is a, c, g, or t

SEQ ID NO: 178585 - DNA, 1151 bp, Homo Sapiens
  misc_feature (1098)..(1098): n is a, c, g, or t
gggtacaaaccactgccacagatcagcaaagtagcaaatcacatggacggtttccaaaggcattttgattcccaagtaattatttatggaaaacaagttataatcaatctgattaaccagaagggctcggagaagccacttgagcagacatttgcaacaatggtgtcttccttgggaagtggaatgatgagatacattgcctttgacttccataaggaatgtaaaaatatgagatgggatcgactaagtattttattggatcaggtagcagaaatgcaagatgaattaagttattttctagtggactctgctggccaggtggtggcaaaccaggaaggcgtgttccgaagcaattgcatggattgtctagatagaaccaatgtgatccagagtttgttagctcgtcgttcacttcaggcccaacttcagagactaggagttttgcatgtgggacaaaagcttgaagaacaagatgaatttgagaagatttacaaaaatgcctgggctgacaacgcaaatgcttgtgccaagcaatatgcgggaactggtgcccttgaagactgactttaccagaactggaaagagaactcatttgggacttataatggatggctggaactcaatgatacgatattataagaacaacttttccgatggatttagaaaagattccataaacttatttcttggaaactattcaggggatgaattagaatctcatagtccctttaagtgttccaaggaactggaaaattcctggctttgcctattatcatggttgttgccttttcaatgtgcattatctgtttgcttatggctggtgacacttggacagaaacactggcctatgtgctcttctggggagttgcaagcattggaacattttttatcattctttacaatggcaaagattttgtcgatgctcccagactggtccagaaagaaagatagactgaatttgtatttgtggaaagcggcttggcttggaagattccattgtgcagaactggagtctttactgacccgctttccacatcaagccaaaggccttttttaatgccctttatcccaaaagcaccatcttgtgctcccatgccnggatgtatgacacgaaatggatcctgatggttacctgccctttggatggccct

SEQ ID NO: 178586 - DNA, 643 bp, Homo Sapiens
gaacttagtgggagagtacagaatgcctggagagcctgactctgagctcttgaagtagtcagccagttgtggtaaaatggtaatgaattttcctaactgcatcaactgtaatgatatactcccttctcctcctttattagttaaaatgtaggctgatttctttttacctacaatcttcctaataattttgatgataatgacccctcatttctttctgcccaaagacctcattctttaaataaaacttgttattttggcatatttctggtagggcccattgcacatgtgtatcagtatagttattatttcatattaactttatgaattctcttgacttggcttataatagttttatgatttttactacataggtagcacatttatcatttgtgacagaataatgtgaagttaagtaattactgaactttaaatggaaatagtatgcaagaaactcaggcattgaacttgaagataagagtattattgctttaatccagtgtatttgtttatggaaagaaaaacacaaaggcagactgttgagtaaaaaatattaaatattgttaaatattctgtattctggaatttatccatttataggcttcaaaagtaaatttttaaataaaatatattagtcgactgtgtt

SEQ ID NO: 178587 - DNA, 1245 bp, Homo Sapiens; identical to SEQ ID NO: 4883
  misc_feature (494)..(494): n is a, c, g, or t
  misc_feature (505)..(513): n is a, c, g, or t
  misc_feature (526)..(526): n is a, c, g, or t
  misc_feature (529)..(530): n is a, c, g, or t
  misc_feature (532)..(532): n is a, c, g, or t
  misc_feature (534)..(534): n is a, c, g, or t
  misc_feature (537)..(555): n is a, c, g, or t
  misc_feature (647)..(659): n is a, c, g, or t
  misc_feature (729)..(743): n is a, c, g, or t
  misc_feature (794)..(802): n is a, c, g, or t
  misc_feature (853)..(865): n is a, c, g, or t
  misc_feature (1228)..(1228): n is a, c, g, or t

SEQ ID NO: 178588 - DNA, 941 bp, Homo Sapiens
ggagggaagagccccagtctgctgctgaacaggatgttgttgttcaggaaacattcaacaaaaactttgtttgcaacgtctgtgaatcaccttttctttccattaaagacctaaccaaacatttatctattcatgctgaagaatggcccttcaaatgtgaattttgtgtgcagctttttaaggataaaacggacttgtcagaacatcgctttttgcttcatggagttgggaatatctttgtgtgttctgtttgtaaaaaagaatttgcttttttgtgcaatttgcagcagcaccagcgagatctccacccagataaggtgtgcacacatcacgagtttgaaagcgggactctgaggccccagaactttacagatcccagcaaggcccatgtagagcatatgcagagcttgccagaagatcctttagaaacttctaaagaagaagaggagttaaatgattcctctgaagagctttacacgactataaaaataatggcttctggaataaagacaaaagatccagatgttcggattgggcctcaatcagcattaccccaagctttaaaccacctcccatttcagtacccatcacccgtgaaacccatggggattggtgtgacagcccacaaatttcactacacacaatattccacagacttttcactaccgccattcccctgcacaaagtgtggaaaaggtgtcgacaatatgccggagttgcacaaacatatcctggcttgtgcttctgcaagtgacaagaagaggtacacgcctaagaaaaacccagtaccattaaaacaaactgtgcaacccaaaaatggcgtggtggttttagataactctgggaaaaatgccttccgacgaatgggacagcccaaaaggcttaactttagtgttgagctcagcaaaatgtcgtcgaataagctcaaattaaatgcattg

SEQ ID NO: 178589 - DNA, 829 bp, Homo Sapiens
  misc_feature (781)..(781): n is a, c, g, or t
  misc_feature (797)..(798): n is a, c, g, or t
gggagaggcgtgcgggcttcggaggcgtgcgggcttcgggtgccatggggactcctcccggcctgcagaccgactgcgaggcgctgctcagccgcttccaggagacggacagtgtacgcttcgaggacttcacggagctctggagaaacatgaagttcgggactatcttctgtggcagaatgagaaatttagaaaagaacatgtttacaaaagaagctttagctttggcttggcgatattttttacctccatacaccttccagatcagagttggtgctttgtatctgctatatggattatataatacccaactgtgtcaaccaaaacaaaagatcagagttgccctgaaggattgggatgaagttttaaaatttcagcaagatttagtaaatgcacagcattttgatgcagcttatatttttaggaagctacgactagacagagcatttcactttacagcaatgcccaaattgctgtcatataggatgaagaaaaaaattcaccgagctgaagttacagaagaatttaaggacccaagtgatcgtgtgatgaaacttatcacttctgatgtattagaggaaatgctgaatgttcatgatcattatcagaaacatgaaacatgtaatttcagttgataagtccaagccagataaagccctcagcttgataaaggatgattttttttgacaatattaagaacataagttttgggagcatccagcagtggcacaaagacagaaagaatccatccctttaagtcaaaaactaatggatggagaangaaaaaatgggaaggnnaattccaccagaaaccgggagaaagtgtgaa

SEQ ID NO: 178590 - DNA, 849 bp, Homo Sapiens; identical to SEQ ID NO: 97783
  misc_feature (526)..(526): n is a, c, g, or t
  misc_feature (779)..(779): n is a, c, g, or t

SEQ ID NO: 178591 - DNA, 819 bp, Homo Sapiens
cgtgcacgggatcagtggcagctcacggacgggagccgggtaccggactgctcaggagcaggtagccaagagagtcccggagagtacgacaaggcagcgacatcagggtcaaaagctctgtgggccacacgctgacatggtggtgtgggtcttggcaccaccgagctcgctcctgggtaacatcctgcattggtgacagacttcacaacatcagggccagtgatgaacaggtaggaggtgtcctttaccatgaacgtgaagtctgttagggctggggagtagacggccccaccagcacatgggcccatgatcagagaaatctgagggatgactccggatgccgtaacattcctcagaaagatgtctgcatagccagccaaagactccactccttcttggatccgtgctcccccagagtcattcagcccaatcactggagcccccaccgttatggcctggtccatgattttgcagatcttttgggcatgtgctcctgacagactgcctccaaaaactgtaaaatcctgactgaagacataaaccaatcttccattgattcggcctcgtccagtgaccacgctgtctccaggaaacttattcttatcagcagccattccaaaatctgcacatctgtgttccacaaacatgtcgctctcaacaaagctgccagggtccagcaagagactgatcctctccctggctgttagctttcctcgcttgtgctgcgcgtcaatacggcgttggccccctcccagcagcgcggtccggcgcttgttttcgatgcgttcggacccacgcgtccgtcgacccacgcgtccg

SEQ ID NO: 178592 - DNA, 898 bp, Homo Sapiens; identical to SEQ ID NO: 4953
  misc_feature (361)..(369): n is a, c, g, or t
  misc_feature (411)..(426): n is a, c, g, or t
  misc_feature (571)..(737): n is a, c, g, or t

SEQ ID NO: 178593 - DNA, 780 bp, Homo Sapiens
ctggaagagaggacgcggtcgagtaggtgtgcaccagccctggcaacgagagcgtctaccccgaactctgctggccttgaggttttaaaacatgaatcctacactcatccttgctgccttttgcctgggaattgcctcagctactctaacatttgatcacagtttagaggcacagtggaccaagtggaaggcgatgcacaacagattatacggcatgaatgaagaaggatggaggagagcagtgtgggagaagaacatgaagatgattgaactgcacaatcaggaatacagggaagggaaacacagcttcacaatggccatgaacgcctttggagacatgaccagtgaagaattcaggcaggtgatgaatggctttcaaaaccgtaagcccaggaaggggaaagtgttccaggaacctctgttttatgaggcccccagatctgtggattggagagagaaaggctacgtgactcctgtgaagaatcagggtcagtgtggttcttgttgggcttttagtgctactggtgctcttgaaggacagatgttccggaaaactgggaggcttatctcactgagtgagcagaatctggtagactgctctgggcctcaaggcaatgaaggctgcaatggtggcctaatggattatgccttccagtatgttcaggataactggaggcctggactctgaggaatcctatcccatatgaggcaacagaagaatcctgtaaagtacaatcccaagtattctgtttgctaatgacaccggctttgtggacatcc

SEQ ID NO: 178594 - DNA, 548 bp, Homo Sapiens
ctaacttttaagtcccgtcacccccaacccccatgctgttgtataagtttgcttatttgtgttcgtgcttcagttgtccagtgctctctgcttgaatggcaagatagatttataggcttaattcttggtcaggcagaactccagatgaaaaaaacttgcatcttcagttatacttcctaaagggcaagtcagataatggatatgttttatgtaattaagagttcactttaggtggctttcatttaatatggctgtctgggaagaacagggttgcctagcccgtgtacaatgtaatttaaacttacagcatttttactgtgtatgatatggtgtcctctgtgccagtttcgtaccttatagaggcagattgcctccgatcgctgtggttcttattatcaaaattaagtttacttgtatacggaacaaccacaagaaattcgattctgtaaagaatcctctttagctgtggcctggcagtatatacaatggtgctttcatttaacagaatacctgtggacggacatcaaagcacacctttgcatggttga

SEQ ID NO: 178595 - DNA, 1229 bp, Homo Sapiens
ggtggcacataccgccatgttgaccgtgccaccggccaggtgctaacctgtgacaagtgtccagcaggaacctatgtctctgagcattgtaccaacacaagcctgcgcgtctgcagcagttgccctgtggggacctttaccaggcatgagaatggcatagagaaatgccatgactgtagtcagccatgcccatggccaatgattgagaaattaccttgtgctgccttgactgaccgagaatgcacttgcccacctggcatgttccagtctaacgctacctgtgccccccatacggtgtgtcctgtgggttggggtgtgcggaagaaagggacagagactgaggatgtgcggtgtaagcagtgtgctcggggtaccttctcagatgtgccttctagtgtgatgaaatgcaaagcatacacagactgtctgagtcagaacctggtggtgatcaagccggggaccaaggagacagacaacgtctgtggcacactcccgtccttctccagctccacctcaccttcccctggcacagccatctttccacgccctgagcacatggaaacccatgaagtcccttcctccacttatgttcccaaaggcatgaactcaacagaatccaactcttctgcctctggtagaccaaaggtactgagtagcatccaggaaagggaccagtccctgacaacacaagctcagcaaagggggaaggaagacgtgaaacaagaccctcccaaaccttcaggtagtcaaccaccagcaaggcccccaccacagacacatcctgaagctgctgccgtccatggaggccactgggggcgagaagtccagcacgcccatcaagggccccaagaggggacatcctagacagaacctacacaagcattttgacatcaatgagcatttgccctggatgattgtgcttttcctgctgctggtgcttgtggtgattgtggtgtgcagtatccggaaaagctcgaggactctgaaaaaggggccccggcaggaatccagtgccctttgtggaaaggcaaggcctgaagaaatccatggactccaaacccaaaacggggagaaatggatctactactgcaatgggccagggtatcgatatccctgaagcttgtaacaaccccaagtgggaaacccagtgggaaaagaaatctatcccgtttccttttcaatgcccattgaaaagggaggttggctgcttttccccatggggaaacccg

SEQ ID NO: 178596 - DNA, 978 bp, Homo Sapiens
gaggaggatctgatccaaacaagatgacagtacgagccatagtgaccaccaagaccccatctcattagctgtggaaatggcagcagtcaaccacactatcttggcattggcccgacaaggagccaacgaaatcaagacagaggccctggatgatgactgatcagggaggttaaacatgacaagttaacttagtttagacgtagcaccttagcagactttcctcggtccttaacatgtgttcttacagtataacttgcagtttcttgtatgtcaggtagctgttagggtcttgttctgtgaagatggcatggtgccctcagcctttgcatatactctctcagtattaactcccagtaaataataaccaaccaaccaaccaaacttccctctcccagcccccgaggctagaaaatcttgctgctccgtcttagcattccaagaaagtgcttccaggtatttagatagccctcagttctcaaatattagactacgtgtaaaatcttgggtacctttagattcttgtaacactagtctgtactcccttttccttccccaagactgataggatgcaagctgaggtcgtggcacaggaatgacagacaccatttggggagtatccacagaagtcaaaggaacactagaatccccaactcagcgtgaggataattgatttccagctgcaataagccgtgcctcattatagccacactgtggctagattatacttctttgggtgctgtgctaagaatgtcaatggaaaaaagccgatctcagattttggttggaagttaccatgcctgaaacagacatccctttcctctcacaagctgtgggacttagtagataaaatactgcctttctgccctttgggacctggattaaaacccaggaccaaaaccccgaagtcatcccggttataccacatcaccgaatattaattaaaatgtcgggccgccctcgggcccctcaaaaaccttc

SEQ ID NO: 178597 - DNA, 1316 bp, Homo Sapiens
  misc_feature (738)..(809): n is a, c, g, or t
ggccccccagaggtagtacagttgaggctattccatcgcgcgtatgatataagtagagcgggggggtggcatgtatctagtgggagaagatagtgatagatgatggcatgccgggcgcttttttgtgcgctacatcgcgcgggagagtctttaattttgtgcatccggcgcgccgaggaaagacacagtagtgggggtgagtgacctagagggcggagtgcagcgcaggtttataacattagagatcggcacctggcgggatgatgggaggtcgtgccaataggcgagggggtcggagggagcgcggtttatataattgtgtgtggcagcgcgcaggcaacatagggtcgtgagtgagtagaggaagaaaggggcggcggcgggagctggccactgcatatattgattatagagggtgcggacctgggagtgttcgtcccggcgtctcgcgttataatatttcgacggtaaaatagggcgcttcgtggtggtgtagacgggtagaggggtgtggtagtatgagacgacgtgttccgtatgtggcacacaggcggaccgtgtttcgtttgtattggttgggggtaacaaagaccgtggggatttagtaaaagggggtgttcttaccgaaaacaacgcgttctcctcattgctcggtcagcgcactgggggggcgcgcgcggccgagccgagtggtgttgttaaggctgattaaatgggagggagcgggcggacagacannnnnnnnnnnnnnnnnnnnnnnnnnnnnnnnnnnnnnnnnnnnnnnnnnnnnnnnnnnnnnnnnnnnnnnncagttcaatacagcacacctttattgagcacctaaggatctatgctgccagaggagggcaagagtcgacaaaacaagtgggcaggcctcccctgcagctctctgtgtctgtgatgatggagctgggttggggaaatcctgctgtgacatttgccctgacgcagttccgcacagcatggtggcttccaagctatgctcttgatgggcacccgtaaggagcttctacatgcattagagatggagcctctcctatctttgcaagcctttgtggttcttccctttaaatctgccatccacggacctcaacaggagaataatttggtcttcagtttgctctgttttagacaaatacttcacatgactgatgtaaactgttgcatagtttcgcaaaggctttctcattcattcctgaaattctccatcagtcacaaacacaaattgttcagtatctggggaattcaaagccctttcctcaaaacagacatttctccttatcattcttccttca

SEQ ID NO: 178598 - DNA, 1031 bp, Homo Sapiens
ggattgtagtcccatttcttagtgtttgaaaggtgtgtcagtgagtcggccatgtctccatgtgtttcagacctgttcatcttattttatgatggtatatttcataagtaatattcccttacatgcaatggagctgattaaaattaatccatttcaatttctccatattggaacttcctcagctaccagatttctggtttggagaagtgctggaaagatttcaaagcctattcagttgtgtatgtggggatacgacagcaactgtgataccttgtagaatatgagtgatatgcaagctgtgttttttaattgttttaaaatgtaaattatggttatgctaagagtgaaaacctagaggaagctaatgattttatatactttgcacgaccaaatatggtcgtagtatgacgagttttatacattgccagagagttctgcctcctctgaaataacattcgcactgtagattgcatttcggcttttcctcctttcacattcttttttgctttacacttcacgtcttcgcacctgccctacctcccatcctttcaaagaggtttctttcacgttccagaattcagattgttctgtgatttcttttacatcagtctacccatttctgcaagcagccctgaaagccctttgtgttgattcagagtgttgcagagaaatgcagttgaaccctggtagtggggtgtccctcacacacccgcgcacccctcccaaagttcaggatgaaaggctagaaaacccattcaaagttaggaaagaacacagatctttgaggccgatagcctagacctagaagatgaccttgagtatgtaaacattgtctccgtgacacaaaacactgaaactcttcatgtgcatataacacctgcttctgctcccattgtttcaagctcatcttatcttgtagtagtaatgttgtctttgataactacaaactaaaaaggtacttttatcaaggtttctcaaaacatttacaaaaccagctttgagaaatgttatgttgcctggcaacagcaccc

SEQ ID NO: 178599 - DNA, 865 bp, Homo Sapiens
  misc_feature (510)..(586): n is a, c, g, or t
  misc_feature (791)..(791): n is a, c, g, or t
  misc_feature (837)..(837): n is a, c, g, or t
ggggcgtgcgcagatcagggatcgcgattgcgaatcctccgctgaggtgatttggatatccctagaacgttgagggcacgagtcgggtcctgagaccaggtcctcagccagcagagccacgttccttatgagcaccgtgggtttatttcattttcctacaccactgacccgaatatgcccggcgccatggggactccggctttgggagaagctgacgttgttatccccaggaatagctgtcactccggtccagatggcaggcaagaaggactaccctgcactgctttccttggatgagaatgaactcgaagagcagtttgtgaaaggacacggtccagggggccaggcaaccaacaaaaccagcaactgcgtggtgctgaagcacatcccctcaggcatcgttgtaaagtgccatcagacaagatcagttgatcagaacagaaagctagctcggaaaatcctacaagagaaagtagatgttttctacaatggtgaaaacagtcctgttcnnnnnnnnnnnnnnnnnnnnnnnnnnnnnnnnnnnnnnnnnnnnnnnnnnnnnnnnnnnnnnnnnnnnnnnnnnnnnctacttaaaagaactggtgggagtcaagtaaaaaggtccactgagaaaagaattagagattccaactgacagaatctgccagaagctcccagggaataatggtggccgagttcatcaccagcattattatagtggcttcaaaagaattatttttgatgaacttaaagaacaacaatttattttaaatggtggcactaaactgttntggaacgaagacatgcaccgattcaagaataaaactccggccgggncacggtggaacggtgccctcccatctgg

SEQ ID NO: 178600 - DNA, 580 bp, Homo Sapiens
gcgcctgggtgagccgttggcgtgttggtcccggagtgatcctggcagccggtggggaagacaaggagggtttgagcatggcagaaggaaacaccctgatatcagtggattatgaaatttttgggaaggtgcaaggggtgtttttccgtaagcatactcaggctgagggtaaaaagctgggattggtaggctgggtccagaacactgaccggggcgcagtgcaaggacaattgcaaggtcccatctccaaggtgcgtcatatgcaggaatggcttgaaacaagaggaagtcctaaatcacacatcgacaaagcaaacttcaacaatgaaaaagtcatcttgaagttggattactcagacttccaaattgtaaaataatggcctgaatttaagttttctaagataaactcagtggtttggtttttattattaatagagatagaactattgtgtgttaatgttagcattagtcaataagttattttaatgtcagatttttgaatgttattatatattacctgtatgatggaaggattaccactgtacacaaatctaatcaataaaaacgttagaaccctcaa

SEQ ID NO: 178601 - DNA, 700 bp, Homo Sapiens
  misc_feature (514)..(514): n is a, c, g, or t
  misc_feature (677)..(677): n is a, c, g, or t
ggtgccactcttggccctcttgctattaagggaaaggctttgaagatcacagcactgacagggctgtaaagatggaaggagctggtatttttaccatgcgtagattcccaagagaacttgtactaaaaagcagaaagttacaaggaagcagaattaggccaacatttccagcaattaaaacaatgatgggaaactccaatccatgaggaggctggtcagtcacctcaaggatagtggcctaaagaagtctgaagtggctgatgtccataacttctgagtctgtttccaaaagaaagactcttgctaatgctgttaccagagagtagagatttgaccagcctctccctaaaatgtaagcttctcaacaacagtacaggaagaagtgcaagagtagactagaacctttaaggaatttggggctggaacggagctatgttgcatctgttgttatacaggtagattataagttctacatgcaccagccaaaacttacgacaggatgtccccaaattangatactacagattaccaaatcagaaataaccagctgcgatttaggccaactcacattttatttggaaaattaccctcccctgaataacaggccttcctgagttgtacccgggagggacttaattgagactttgtaccaagacacccacgggggctttggggtnccaggtgcccagtttgggtatcc

SEQ ID NO: 178602 - DNA, 736 bp, Homo Sapiens
  misc_feature (50)..(59): n is a, c, g, or t
  misc_feature (64)..(64): n is a, c, g, or t
  misc_feature (68)..(68): n is a, c, g, or t
  misc_feature (71)..(71): n is a, c, g, or t
  misc_feature (436)..(492): n is a, c, g, or t
  misc_feature (694)..(694): n is a, c, g, or t
  misc_feature (703)..(703): n is a, c, g, or t
  misc_feature (706)..(706): n is a, c, g, or t
aaaggggcccggaaggacggccccgcacaagggaaagagatttaatcatnnnnnnnnnncggcntgtnttnctaagcaccaaattcccagtttttaatgttcaaaatccgcaggcaaaaaattatgatggatagcaattcattctcactggggcacagctaattcatgttccttaaatcatgaaggtaaagtggaaaaactaaatagtttgatggaccttagagaaatcatttattctctcttatactcagttaaatgggagcctggttatcacaatagagatgagtaataatgaaggtaaaatgcctggtaaaatgcatcacagtaggcacccatcttattatacacgcgtcaataaaaataagcatctattttttaagggaagaaaagaaatgcttctaaataaagctctggatgaaccatttatcttctttcnnnnnnnnnnnnnnnnnnnnnnnnnnnnnnnnnnnnnnnnnnnnnnnnnnnnnnnnnttttatctttaattagagtttgtagtatacacttaactttctgtaatctgcagtgatgaatctctatgtaaacattcagaaaaagagcgaatactgtgtcatgacttatgaactataaatcttgcccctgattactagtcaagaacagttttatacatttattaacaactactttcctccacttaacaacagctcttaaatnacaaaatanatnatcaggcatttccaaccacaaatttaagga

SEQ ID NO: 178603 - DNA, 1595 bp, Homo Sapiens
  misc_feature (707)..(815): n is a, c, g, or t
  misc_feature (1125)..(1139): n is a, c, g, or t
  misc_feature (1576)..(1576): n is a, c, g, or t
ggtgccaaactcagggacccagcactgggctgggttgggagtagggtgtcccagtggggttggggtgagcaggctgctgggatcccatggcctgagcagagcatgtgggaactgttcagtggcctgtgaactgtcttccttgttctagccaggctgttcaagactgctctccatagcaaggttctagggctcttcgccttcagtgttgtggccctagctatgggcctaaattgggctctaggtctctgtccctggcgcttgaggctcagaagagcctctgtccagcccctcagtattaccatgtctccctctcaggggtagcagagacagggttgcttataggaagctggcaccactcagctcttcctgctactccagtttcctcagcctctgcaaggcactcagggtgggggacagcaggatcaagacaacccgttggagcccctgtgttccagaggacctgatgccaaggggtaatgggcccagcagtgcctctggagcccaggccccaacacagccccatggcctctgccagatggctttgaaaaaggtgatccaagcaggcccctttatctgtacatagtgactggagtggggggtgctggcaagtgtggcagctgcctctgggctgagcacagcttgacccctctagccccctgtaaatactggatcaatgaatgaataaaactctcctaagaatctcctgnnnnnnnnnnnnnnnnnnnnnnnnnnnnnnnnnnnnnnnnnnnnnnnnnnnnnnnnnnnnnnnnnnnnnnnnnnnnnnnnnnnnnnnnnnnnnnnnnnnnnnnnnnnnncccttgtgccccgccctcgcccctaaaaaaactttttaaaaccattcctttgggcgcgaggccccccttggggccccgaaccccgcccacaaatttttttccccaaaacaaatacccggccctgaacttccccccttgggtttccccaacaaaagtaaaacgcccctctgcggacaaacgcaagccttccttaacacaaaaatccccggggggggttctctccgcgggggtcaataatatgggcgcccttccctgccaaaacaccgcgtccccccgttccggaaaattctctgatccgcccacatggttnnnnnnnnnnnnnnngctgctttggtatcatcgcccgcccccccgaagaaaacccatgggtggggagaatacagctacgttatagcacgttattcttgttcgacgcgaaatactgccgccgcgctgctctctttaacaacaacccgccgttatccgcggcgagagaacagcgtgttggagacctcccctccgaacgcgacctagtcaccgcacgccaccgcctgtggtatgcgcccctccgccaacacaccacaactagtattttgcccgcaagaggcgaggcgcacaaacaccgcgcggcggcgcagaaagacacaactgtctctccatattgtgtgccggcgccctcgtctccataaataaaataccctcaggcggcacatagacaccacacccatagcgccgcctatgtccggctccaaccccacaaaaagtgaggcccgcctggctcnacaaagcgtgctttggggg

SEQ ID NO: 178604 - DNA, 598 bp, Homo Sapiens
  misc_feature (47)..(88): n is a, c, g, or t
  misc_feature (371)..(530): n is a, c, g, or t
  misc_feature (543)..(558): n is a, c, g, or t
gggggtttcaattctgtctccacctcttattagctagctatggactnnnnnnnnnnnnnnnnnnnnnnnnnnnnnnnnnnnnnnnnnnggtgtgagcagcgtttccctgggggatgtgatgcagcccacttggggcctcatgcactcagcatctctttattagcaaacacttattgaacccctagtacatgccaggcactgttatgaagtcccggggatactttataacaaaagggacagaagcattcctgctcttgtgaagtttacattgactagatagtaaacaaaataaatgaaaatatgcagtgtgtcagtgctggtaaacccgtggagaaaataaagcaaggttggggtctggggttgggaattgnnnnnnnnnnnnnnnnnnnnnnnnnnnnnnnnnnnnnnnnnnnnnnnnnnnnnnnnnnnnnnnnnnnnnnnnnnnnnnnnnnnnnnnnnnnnnnnnnnnnnnnnnnnnnnnnnnnnnnnnnnnnnnnnnnnnnnnnnnnnnnnnnnnnnnnnnnnnnnnntccttaattttgnnnnnnnnnnnnnnnnaaaaaatttttaaaacccttttttgggggcccgccccccc

SEQ ID NO: 178605 - DNA, 156 bp, Homo Sapiens; identical to SEQ ID NO: 5451

SEQ ID NO: 178606 - DNA, 1529 bp, Homo Sapiens; identical to SEQ ID NO: 5453
  misc_feature (1136)..(1145): n is a, c, g, or t
  misc_feature (1339)..(1350): n is a, c, g, or t

SEQ ID NO: 178607 - DNA, 722 bp, Homo Sapiens
  misc_feature (49)..(70): n is a, c, g, or t
  misc_feature (80)..(140): n is a, c, g, or t
  misc_feature (147)..(149): n is a, c, g, or t
  misc_feature (204)..(213): n is a, c, g, or t
ttttggtagtgttttgggggtatgggaaagagggggggaggtttttttnnnnnnnnnnnnnnnnnnnnnnaggttttttnnnnnnnnnnnnnnnnnnnnnnnnnnnnnnnnnnnnnnnnnnnnnnnnnnnnnnnnnnnnnttgtggnnntaggaaaatttgcattttaatgtcacattgaatttcagtacttttcaatcccagnnnnnnnnnntaaaccgagacatggtcatgagttcaggattatatatattacaatttgccttgttataatacatttgtggctttatgataaaaataactcagggacatatggaattcaagctgatttgcgtaactgtcacaagaaaaaaagcattaaatgcatttctgaaataagtattttcattaatttcagaatctcaaaacagcattagaccttgccttgtttaaaaaaaatttagttcaacactaagctagctaaataaccttcttgaaaggtttaaacacaattgatatagaaaatgctttccctctaatctcaactttacataaatggaacaggtgaggaagaaaaggtagacaatttctttagcagcatatatggctaaatccatcaaccaccttaaactagaatgtccattattgaccccattaaaaagaactggggaaatatcaaaaattactgatttcataaaccaaagacatcaattttagggttacagttagtaaaatatttttgag

SEQ ID NO: 178608 - DNA, 488 bp, Homo Sapiens
gggaaattaaagatggtgtacacccatcatgtaaaaagcaggcaccatctctaagatggatttaatgctcatttttaaggcatatactcagcttctatttaaaactataatttaaaataattctgtacaatgaaatggggaatatatatgggaataaattctattccatttatttcaatttgaatttccaaattgtaatgtttccctttgtgctataggaataggattaaatgggggaagactaggatttataaggcctgtatatggggggagggcagagatggaacaatgagggttgtgatgatagtgaatagcaaagagtgaattctgtgtgtttttgctgtagcactgaagtgaagagatattagctttggctgttcacaaaatagagcatcatgattttcagtgtttgagagaaaattgatggaaaaagtttgcagtacttgacatgtatttgcatgcacaaaataaaattatttgtccacctt

SEQ ID NO: 178609 - DNA, 1651 bp, Homo Sapiens
  misc_feature (1385)..(1427): n is a, c, g, or t
catatatgacttaagactaaagagacagacttattgtgaaatgcatagttagcgtacatgacttgggagctgattatctggtttctagattatgaagtcccttgtatttgacttctgattcatgttctccaatcagttatgagaaaaggaaaggtaggaaaaagaaacagggaaaatcttagaaattattagctgctcttacaaaagtttaggtcaaagatttaagaaagataaaaccgacggctaaatgtagacttcattaaaaattaccaaaagacagttgtatgctgatcatagagttttcaactatacatagaaccataacattttgttgaaataatactgtggtatacatctatattcttatatgcaaaggccagaaactgtctctggttggacctatttacatctgtaaaagatgaagcagtagacctttctaggaagctggaaagggtatgtaagattatatatttacatacctatccatttattttacgaagactaactcttagaagactactcaagcagttacttaagtcaagctggtaattgattaggaagtaggcataagcatttaggccagaaaaaattggtcctatcaatttgagtattttactatgaatacattattttctatgaaaatatcttatgtatcttaggtaagtcacttatttacaaacattttacatttgtcacttaggcacagcctaagtcatctttacctttcataactgtacagtctgcagcttgctgtggcccacatggagaagtaagcaagactttatacctctattttatgatataatcacctatgtattactcttctaggcagtaggaacatattagattacctctatagacatagaaaatttctgagtcaaaggaaaacaaaatcttactacattataacaaggtaaaggtgaagggattcattctatagcagcgtttcacatctgcagttcatgaaactctcatgtttcatgaatgtaatatacaaataaacacataaaccctgaattatgctagtttcttctaaaataagaaaatatatatgaaaaaaaccctgaatacatgtatatgttattatacaacaatctgcttttaagaaatggtgtgccatgaatgccagaaatcagaaaaggtatcacctgatgttctaatgcctatctgatctgtataacatttcttactgtaggtttaacattaaccaacaagtcatgttattagttatttaatgattaccagtaagcacttactttatatcaacttatagttgtactattattcaatttgtattgcatattaaagtacttaataaaaatttggtaatttctaatagcaattaatttgtgaaactattttcctgctatacattaaggatacannnnnnnnnnnnnnnnnnnnnnnnnnnnnnnnnnnnnnnnnnncaaaaatgcttccatagttaaagtagttctggaaactgttccattaggtataaggacaatgactccttttctccatttttatttggcttgttgtgatgtttttctagttgtattagtttttctttaaaaagtagagaaagatggtccagtacatgacatgggtgagagtcatattttttccctacccatgttaatgcaaaatataaagaagctttcctagcttc

SEQ ID NO: 178610 - DNA, 1466 bp, Homo Sapiens
  misc_feature (654)..(654): n is a, c, g, or t
  misc_feature (915)..(927): n is a, c, g, or t
  misc_feature (1242)..(1242): n is a, c, g, or t
  misc_feature (1282)..(1285): n is a, c, g, or t
  misc_feature (1289)..(1292): n is a, c, g, or t
  misc_feature (1297)..(1300): n is a, c, g, or t
  misc_feature (1302)..(1309): n is a, c, g, or t
gggatgagctttgtctgtattggggctatcttggtctttgtagccttctttgaaattggaccaggccccattccctggtttattgtggccgaactcttcagccagggcccccgcccagctgcgatggcagtggccggctgctccaactggacctccaacttcctagtcggattgctcttcccctccgctgctcactatttaggagcctacgtttttattatcttcaccggcttcctcattaccttcttggcttttaccttcttcaaagtccctgagacccgtggcaggacttttgaggatatcacacgggcctttgaagggcaggcacacggtgcagatagatctggaaaggacggcgtcatggagatgaacagcatcgagcctgctaaggagaccaccaccaatgtctaagtcgtgcctccttccacctccctcccggcatgggaaagccacctctccctcaacaagggagagacctcatcaggatgaacccaggacgcttctgaatgctgctacttaattcctttctcatcccacgcactccatcagcaccccaaggctgcggtttgttggatcttcaatggctttttaattttatttcctggacatcctcttctgcttaggagagaccgagtggacctaccttcatttcangagggattggccgcttggcacatgacaactttgccagcttttcctccccttgggttctgatattgccgcactaaggggatatagggagaggaaaaagtaaggtgcagttcccccaacctcagacttaccaggaagcagatacatatgagtgtggaagccggagggtgtttatgtaagagcaccttcctcacttccatacagctctacgtggcaaattaacttgagttttatttattttatcctctggtttaattacataannnnnnnnnnnnnactttaagtttcaggatacatgtgccgaatgtgcaggtttgttacataggtatatatatgccatgatggaaatatttatttttttaagcgtaattttgccaaataataaaaacagaaggaaattgagattagagggaggtgtttaaagagaggttatagagtagaagatttgatgctggagaggttaaggtgcaataagaatttagggagaaatgttgttcattattggagggtaaatgatgtggtgcctgaggtctgtacgttacctcttaacaatttctgtccttcagatggaaactctttaacttctcgtanaagtcatatacctatataataaagctactgatttcgtaannnncccnnnnccccnnnnannnnnnnncttgtcggcccgcctcggcccctcgaagaagctttcttagaccatttcgtttgggccgcgcggggcccccagaaaggtaaagtgaaacatggggccattagctgggttttccccaaggaagaatccttgggccaatgaaactaaagggctttggcaa

SEQ ID NO: 178611 - DNA, 977 bp, Homo Sapiens
  misc_feature (369)..(449): n is a, c, g, or t
  misc_feature (553)..(672): n is a, c, g, or t
  misc_feature (715)..(731): n is a, c, g, or t
ggaactgggccaccaaagaacttgaacttcaccttttaggatttgagctgttctggaacacattgctgcactttggaaagtcaaaatcaagtgccagtggcgccctttccatagagaatttgcccagctttgctttaaaagatgtcttgttttttatatacacataatcaataggtccaatctgctctcaaggccttggtccctggtgggattccttcaccaattactttaattaaaaatggctgcaactgtaagaacccttggctgatatatttgcaactatgctcccatttacaaatgtaccttctaatgctcaggtgccaggctcccaatgcaaaggcggccggggactccctttgcgtgcgtggnnnnnnnnnnnnnnnnnnnnnnnnnnnnnnnnnnnnnnnnnnnnnnnnnnnnnnnnnnnnnnnnnnnnnnnnnnnnnnnnntggcccgtccccgccgccccgtccgcgccggagcccggccatggtcctcctcaaagccggcggacccccggcctcgtcccggtcccgccctccgctaggtctannnnnnnnnnnnnnnnnnnnnnnnnnnnnnnnnnnnnnnnnnnnnnnnnnnnnnnnnnnnnnnnnnnnnnnnnnnnnnnnnnnnnnnnnnnnnnnnnnnnnnnnnnnnnnnnnnnnnnnngtgcccctacgtcccctccgccggtgcgccagttccgttgtgnnnnnnnnnnnnnnnnngcgtactccggacccgccggtgtctgacacgtgtccccagttcggccacgcccgcctacttgactccagcgcccgcgcgcctgaacgtctatctccccgcatcgtctccgcgctcgtagcgcctagccaccccccctgtcccgcccgcgactctcgcgtgcgcacccggcgacagctcctggtggccctggacccccgcccccctctagtgacggggcggtcgctcgcgggtcgttgactcgcttg

SEQ ID NO: 178612 - DNA, 778 bp, Homo Sapiens
  misc_feature (598)..(598): n is a, c, g, or t
  misc_feature (740)..(740): n is a, c, g, or t
gggtttgcaacaagatgtgatgaatatgtcacccagttggatgagatgcagagacagttagcagctgcagaggatgagaagaagactctgaacactttgttacgaatggctatccagcaaaaactcgccctgacccagaggctggaggacttagagtttgaccatgagcagtcccgacgcagcaaaggcaaacttggaaagagcaagatcggcagccctaaagtaagtggggaggcatcagtcaccgtgcccaccatagacacttacctcctgcatagtcagggcccacagacacccaacattcgggtcagcagtggcactcagaggaaaaggtatgcatgcagcaatcttcatagtacggtgcagtggccagattttagttaactgcaaaaataaatgtgctcttgttgtggaggatggaggaggggaaagaaaagaaaaaatgggagctggcatataaatggtcttgctaatgtgggtctttccagatcaaaacctttttgataattgtgtttatgtagtcctttctaaccccctgcccaatccctcctcttgattaatcgtaatataattttcaagtgtctgttaatatttttgnctactctttgtatgtgtaaatatgcctctcccttacctccaacctgagaattggttagataaaagtggatattaagaatgaagctgtgttctaactgggttttaattttaaaagcccttgtaccctttggaaatggtgctgntttatcagcttctctttaacgggggcaaggatatggat

SEQ ID NO: 178613 - DNA, 806 bp, Homo Sapiens; identical to SEQ ID NO: 5496
  misc_feature (159)..(168): n is a, c, g, or t
  misc_feature (301)..(364): n is a, c, g, or t

SEQ ID NO: 178614 - DNA, 803 bp, Homo Sapiens
  misc_feature (155)..(164): n is a, c, g, or t
gggacacagacacttgagcacacgcgtacacccagacatcttcgggctgctattggattgactttgaaggttctgtgtgggtcgccgtggctgcatgtttgaatcaggtggagaagcacttcaacgctggacgaagtaaagattattgttgttannnnnnnnnnctctctctctctctcttaagaaaggaaaatatcccaaggactaatctgatcgggtcttccttcatcaggaacgaatgcaggaatttgggaactgagctgtgcaagtgctgaagaaggagatttgtttggaggaaacaggaaagagaaagaaaaggaaggaaaaaatacataatttcagggacgagagagagaagaaaaacggggactatggggagaaaaaagattcagattacgaggattatggatgaacgtaacagacaggtgacatttacaaagaggaaattggggttgatgaagaaggcttatgagctgagcgtgctgtgtgactgtgagattgcgctgatcatcttcaacagcaccaacaagctgttccagtatgccagcaccgacatggacaaagtgcttctcaagtacacggagtacaacgagccgcatgagagccggacaaactcagacatcgctggagacgttgagaaacgaaaggccttaatggctgtgacagcccagaccccgatgcggacgattcccgtaggtcacagccctgaagtctgaggacaagtacagggaaaatttaacgaagatattgatctaatgattcagcaggcaaaagattgtgtgctgttccacctccccaacttc

SEQ ID NO: 178615 - DNA, 1316 bp, Homo Sapiens
  misc_feature (654)..(665): n is a, c, g, or t
aaggcaggtattttggttaccacagtggtcattggcccaccaggaaatgcagccacaaccaggttctagccgcaaaggctataagtgagtggggttttcactgagaactgacccgggtttgcagctgttattactcagggatttgggatgccccttggggattcttgggaatgacccatcacaattcctcaatctgcacttttgtgcggagatttcccttggtcacttttgaaatgaactcagatgtgtttggagatagctgtgccgtttttgccttctttccctcttgtagggaaaccttcgcttattcccccaagttgctggcaggtgtgctgaaaatttggcaatggactcaaggctgagctagaagaggaatttctcatttttgtggttgacaattagggggtggaaaggcaaggcaaaccatctgcagctggcaggagaaggaagctgtgggttcctcccctgtcctcagggtttagggttggtagagagtgaggaggggctcacagtacagcatggcctagcagggcagtaactaggtctatttagctgagttccccccaccccctgactggcctttgggtctttctcaaggtgaattcaggacccatcagtgcattaatcatttcagtaacaaatgcagcttaaggnnnnnnnnnnnnctttaaaaaaaataggaatacaaggatttacaaaaaaacctcacacagtgcaataataaaggaaagcagacactagtgggaacccctagggcccactgcatcttgttcatgggcaaaaggaggaagggaggtgaggtctgggtagagtgcttttcccagtcccctgctggcacttctccatgatgacaaggaagtctctgccatcctggccacagtgctgggctccctgcatgacagtgaaaacagtgacaatgttccagcaaagccaccagacaaagttcttaaggtcacaggagagaagggagcccaggatggaaggcacagcagagccatgagtcctggggcagagagtgctgggctgagtcgtattgctttgctagacttccataggaatgggcttcttgcggcgagaaaagggtgccccaccctctacttggactacactactctgaaaccttgtggcagaggcagagaaaaatctgctttatcgtgagtggtcagactgtgctttagtttcaacaggctgccccaaaagagggcacaaggtgatcaatgggttctctgcagatatgaggacttggtgggcagagggaaaggaaagagtggcctatgaggcagatggtgatgcaaaaatgtcaagttgccattccc

SEQ ID NO: 178616 - DNA, 737 bp, Homo Sapiens
agagaactaagacttggcacaaaggcacccttatgccatccagacagtgggccaggaagaaatacaaggtgaaatttgacaacaaaggaaagagtctactgtcggggaaccatattgcctatgattaccaccctcctgctgacaagctgtatgtgggcagtcgggtggtcgccaaatacaaagatgggaatcaggtctggctctatgctggcattgtagctgagacaccaaacgtcaaaaacaagctcaggtttctcattttctttgatgatggctatgcttcctatgtcacacagtcggaactgtatcccatttgccggccactgaaaaagacttgggaggacatagaagacatctcctgccgtgacttcatagaggagtatgtcactgcctaccccaaccgccccatggtactgctcaagagtggccagcttatcaagactgagtgggaaggcacgtggtggaagtcccgagttgaggaggtggatggcagcctagtcaggatcctcttcctggtactgttcttctctacaattttggaggcagaggttggtggggggggaacttaagaaacagtaatgaggatggttttatagctattccatagccttcctctttcttatcctcgtatgtgttctcactgtgttttggtcaaattttactttgcccttttgtgtttgttcctctgcaggtcattgttgaaaataaattatctgaattataacttccccacactt

SEQ ID NO: 178617 - DNA, 833 bp, Homo Sapiens
gggggtctgaaagggagtgttcgggtttcgctggggcctcgcggctccagagcccagcatggcttcctcgcgagcctcttccacggcaaccaaaactaaagcacccgacgacttagttgctccggtcgtgaagaaaccacacatctattatggaagtttggaagagaaggagagggagcgtctggccaaaggagagtctgggattttggggaaagacggacttaaagcagggatcgaagctggaaatattaatataacctctggagaagtgtttgaaattgaagagcatatcagcgagcgacaggcagaagtattggctgagtttgagagaaggaagcgagcccggcagatcaatgtttccacagatgactcagaggtcaaagcttgccttagagccttgggggaacccatcacactttttggagagggtcctgctgaaagaagagaaaggttaagaaatatcctctcagttgtcggtactgatgccttgaaaaagaccaaaaaggatgatgagaagtctaagaagtccaaagaagagtatcagcaaaccctggtatcatgaaagaccaaattagcttgaaggtggcagaactatggatttgctaataatccgttggccagggcaatgaaacgcttgggaagaagcccgactcccataaaggagattccttgaaaacaaaccagggacctccccagaaggcaaagaggttggcccaaggtcttctcccgggccttttggaaccaaattttttggcgcgacccaaaatatgtggggggaaggaaactcgggcgccctaatcctcccccataagtggggggaacctctttcgaaa

SEQ ID NO: 178618 - DNA, 1117 bp, Homo Sapiens
gggatctttcagaatctggtcaggtagacaaagcatctttatgtggaagtatgacaagcaacagctcagcagagacagacagcctgttaggaggcatcacagtggttggttgttctgcagaaggtgtgacgggagctgccacttcccctagtacaaatggtgcttctccagtgatggataaaccaccagaaatggaagcagaaaatagtgaggttgatgaaaatgttccaacagcagaagaagcaactgaagctacagaagggaatgcggggtcagctgaagacacagtggacatctcccaaactggcgtctacacagagcatgtctttacagatcctttgggagttcagatcccagaagacctctccccagtgtatcagtcgagcaatgactcagatgcatataaagatcaaatatcagtactgccaaatgaacaagacttggtgagagaagaagcccagaaaatgagtagtcttttaccaactatgtggcttggagctcaaaatggctgtttgtatgtccattcatctgtagcccagtggaggaaatgtctccattccattaaacttaaagattcgattctcagtattgtacacgtgaagggaatcgtgttagtagccctggctgacggcacccttgcaatctttcacaaaggagtggatgggcagtggggatttgtcaaactatcacctcttaagaccttggacggcctcatcattccatccgttgcatgactggggtacatgaacaaagcctggtgggggctataggaaacaaaatctatgtggtgcagccaaaggccatgaaaatagagaaatcttttgatgcacatcccaggaaggagagccaagtgcgacagcttgcgtgggtgggggatggcgtgtgggtctccattcgcttggattctacgctccgtctctatcatgcacacacttatcaacatctacaggatgtgggaccattgagcttatgtaaggcaaaatgttaggtactggaaactgggcttctctttgtgagaattaccgtcctatgggtgtctggtaatcgtaggtggctggcgacagcacactgggggtccatatctccatccccttgaccagaacccggtaatcttcag

SEQ ID NO: 178619 - DNA, 822 bp, Homo Sapiens; identical to SEQ ID NO: 5530

SEQ ID NO: 178620 - DNA, 815 bp, Homo Sapiens
aatgatagttttcataatggtaaaatggagagatactggtcaagtttctcagggaagtattcatctcacaaagcggacttgtccacttttagctggggcaatcttcgcatttcatacctgcacttgctcttaccacaagaagtcccctccccccaggtgattttcctccaagacacgaggacagaagcattgccagtggcttgaagtgacagcagtgggcaggaggtaccagagctgcacaaggagcagtgtctgcttctcactatctttgagaaggatacccgagacctcgatgaaaaaacagatcctaaaataagccacattttgtcttttatgcctcaagacacttaacattaagttatataatcttatgccagagatgaaagaaactagatcacgtgtttagaatagcagtacacatctcaagtagctttcaagcaggataaataagtcaaaatactggccaccctgagagaaataaagaatagacaaagcactaagtttaaagatttttctccttgtgctattccatctaaaacaaaagctcagtacatgcaaggaactctgtggaatatatagcagcatgtgaagaccgatgaaaactcagacactgtattttccttacaaggtgttgataacgtgagctcttttcaacagaaagagctccactaaacgtcatcctcgctggtgcctcctccaagctctcagaacagcactgcagccttcagtgaaggcagcggcagtgccggccccgtgcatgctgttgtgttactttatgcttaaaggccggacgcgtgggtcgacccacgcgtccg

SEQ ID NO: 178621 - DNA, 1398 bp, Homo Sapiens
  misc_feature (835)..(1019): n is a, c, g, or t
  misc_feature (1120)..(1335): n is a, c, g, or t
gggtcttcaagaaatgtcttccagtgtcaaaacctccatttttaataggaatgattttgatgattcttcatttctcccacaagaacagaaagtacaccttagagaaaaaccttatgaatgtaatgagcatagcaagtctttagagtatcttccagccttactaaacatcaagtaatccatactgtagagaaaccttacaaatgtaattcatgcggcaaggtctttagtcgcaattcgcaccttgcagaacattgtagaattcatactggagagaaaccttacaaatgtaatgtctgtggcaaggtttttagttacaattcaaactttgcacgacatcaaagaattcataccagagagaagccgtatgaatgtaatgaatgtggtaaagtcttcagtaataattcttaccttgcacgacatcaaagaattcatgctgaagagaaaccttacaaatgtaatgaatgtggtaaaggcttcagtcataagtcatctctagcaaatcattggagaatttatactggagagaagccttacaaatgtgatgaatgtggcaaggcctttagtcgcatttcatacctagcacaacatggacaattcatatgggatagaaactacaaatgcaacaaatgcgtcaaagaatttagtgtgcactcaagccttactacccatcttttattccatactgcaaagaaattgtgcaaatgtaaagaatatgacaaggtcttcaagacacaagtttttctaagtaactcattagagaatttatactggagagacttcacaattataataaatgtgtggaaaagtcttcaaaaaaatttcacaccttgcaaannnnnnnnnnnnnnnnnnnnnnnnnnnnnnnnnnnnnnnnnnnnnnnnnnnnnnnnnnnnnnnnnnnnnnnnnnnnnnnnnnnnnnnnnnnnnnnnnnnnnnnnnnnnnnnnnnnnnnnnnnnnnnnnnnnnnnnnnnnnnnnnnnnnnnnnnnnnnnnnnnnnnnnnnnnnnnnnnnnnnnnnnggcagtccctgaacagaccaagtaatgagttccaaaatttaatcactaattaaaaatctatcaaacaaaactctggaccagacagatttatagttgaagcnnnnnnnnnnnnnnnnnnnnnnnnnnnnnnnnnnnnnnnnnnnnnnnnnnnnnnnnnnnnnnnnnnnnnnnnnnnnnnnnnnnnnnnnnnnnnnnnnnnnnnnnnnnnnnnnnnnnnnnnnnnnnnnnnnnnnnnnnnnnnnnnnnnnnnnnnnnnnnnnnnnnnnnnnnnnnnnnnnnnnnnnnnnnnnnnnnnnnnnnnnnnnnnnnnnnnnnncatctgccttcaccaagctaatccaacattatcaagcaggctttaatgttgggctgcacgctg

SEQ ID NO: 178622 - DNA, 831 bp, Homo Sapiens
gggcagtgcgcaggcgcagtcccggctcctggcggcgtgttcctcttttcctcggttcccagtgttctggcaggtaaggaacgccggctcttcgcctctcagcgcggcttgtcctttgttccggacgcccgctcctcagccctgcggctcctggggtcgctgctgcatcccgcacgcctccaccggctgcagacccatggccgagcgcggggaactcgacttgaccggcgccaaacagaacacaggagtgtggctagtcaaggttcctaaatatttgtcacagcaatgggctaaagcctctggaagaggtgaagttgggaaactgcggattgccaagactcaaggaaggactgaggtgtcatttactttgaatgaggatcttgcaaatattcatgatattggtggaaaaccagcttcagtcagtgctcctagagaacatccatttgtcttgcaaagtgttggaggacagacattaacagtatttactgagagctcatcagataagctgtcattggaaggaatagtggtacaaagagctgaatgccgaccagctgccagtgaaaactacatgcgattaaaaagattgcaaatagaagagtcttccaaaccagtgaggctatcacaacagctggacaaagttgtaacaaccaattacaaacctgttgctaatcatcaatacaatatcgaatatgaaaggaaaaaagaaagaagacggaaagcgagctcgagctgataaacaacatgtttttagacatgctattttcagccctttgagaaacatccatactataatccttaaggacttggtggacatcacaaagccaacctggg

SEQ ID NO: 178623 - DNA, 1274 bp, Homo Sapiens
  misc_feature (395)..(395): n is a, c, g, or t
ggaaggccttggctggaagggcctgcccacccgggttacatgggtactttttccctggaagtttaaaaggggaggttcaaggcccaccgggctgcttcccaggaccctcttgaaggaaaaattccctttccaatcttctttttgaaacatgggagctcctccctgaattaattttctgggggatgaaaagtgatgatagccattgtgtgcccttggctatgggtgcgacttgggagctcacgccagtatccaccttcatgaaatacaaggcagggctccaatggagactgtcgaaggaatacttcatagtactgcgccacttgactgtgtttctcagggatgtttttcagatgattagactgcacacagacaacgttcccatctctccaagttcncaggtagaaccccacagtctttggattgccatctggacctcggttcacagagaaggtggacttatttcggtaaccattgatgacaggagagggtataataggatggagaagacaagagagcctctcagattggggtacagccgtggtcacactgactccatggagcatgtggatgtaagactctagtcttggtaaaattttcttctgagctccaaatttcaccttgagctgttcttcatagctcaacctccagagtggtgtcacaacatcagccagcctttcctgccaggaaccatctagtggtccaagatggcttggtttcttctgacttttttgtcctttctgacatttcgtggctatcacacgggtgaaatctcccttacatactgtgcccagaaagagctgtgaccatcctggtggatttctggcataccagggaagcagtcctggtttggagaagagacccaccatggagatgaagtatctgaggctgtgcagtgggactcttctcttaaggcctgacatccaaagaacacactgaaatccaccttccttcgtaaccaataaatcctcttacaaacctgaggcggcaaactaaaaggccagcggatggcctggtttgctgcggcggggaaacagtcacttcctggtgcgcaaggcgcctctactcccgccgcacgcgcagccaacccttggcaagcgcggcgggacacggggctcctcccagcgtcggcgaggcagcaggctccggcacctcgactcctctcggggagtacccctccctactttgctgggggaaccttctatggagaccttccttaaaagcactcatagccctgacacccgccgccttccttctctaagttctcctctcctccc

SEQ ID NO: 178624 - DNA, 822 bp, Homo Sapiens
  misc_feature (95)..(95): n is a, c, g, or t
  misc_feature (157)..(157): n is a, c, g, or t
ccagggttcttcccggggcagtaagccaaggagaaaaagatcatccctgctgatgcagtattcttgttcaccagggatgcccagtaacggtgtcnttcacccagtgcaaatgagaaatctctctgctgaataattttttcttgcccttattattggnttgccttaatcctgtgaggaccaataaatggcccataagcattctcatagacgacttttttctcccgcagagctactcggtagccccaattcaaagagccaatgtgattctgtacagcttctatcattctgtcccaatcatgcttaactgtctcctcgacttcccatccataatttcgagagtcttgcagggcttgtcctaacaaagctgcttgatgcatcagtttttttaggtatgcaacccacattcacacatgttcctccaagaccccatctagttccaagaggggtgggagtgacaaagtccaggaccatcaccttcttgccatattgggctgcctccttagcagctgccagacctcctgagccacctccaatgatgataaggtcatagtcataggacttgggaagatcttcagggccgttcatttttagtagcttttgaagtctgccctcctgataagccttcaaggttggaccatggccgcctatctttctctgtttcacaaacacaacgggcagatcggtttccgcggccaattccgagagcgttccttccagggcccgaccgtcctaagaatttgagaatgatgaagacatcaggccctccttcaggactcgaccacctttcgctctgctgcaaatgccggagtgaagaaaactccc

SEQ ID NO: 178625 - DNA, 845 bp, Homo Sapiens
ggtaactggcaacccatctcttaatccgtcagtatctctcccagggtcattaatagccacctcatctaccgctgccacctccacatctctccctcatcccagctcaacggcagctgttctctcagggctttctgcttcagcaccagtctcagcagcacctttccccctcaacctgtccactgctgttccctcacttttctctgttactcaaggacctctgtcatcttcaaatccctcctatccaggcttttctgtctctaataccccaagcgttacccctgctcttccctcattcccggggctgcaggcgccctctacagtcgcagctgtcacaccactacctgtggctgccacagccccatccccagctccagtcctcccaggattcgcctcagcattcagttccaatttcaactccgctcttgttgcacaagccggtttatcatctggacttcaagctgcaggcagttctgtttttccaggccttttgtccctcccgggtatccctgggtttcctcagaatccttcacaatcatccttgcaagaattacagcataatgcggctgcacagtcagcattgttacagcaggtccattcagcttcggctctgggaaagctatccagctcagccctgatggggtttcctagttatccttcagcgccaggaacaacattttctttgcaaccaagcctgtcccaaaagtggggtggcagtgaatactttttaacttttattcttccttcagagcaacatcagaattgccctgaaaacggcaatgaaacatctgaccaatggtgaaagctgggccaaaagtcggaaaaatggaaaatgagggtaatcctgg

SEQ ID NO: 178626 - DNA, 866 bp, Homo Sapiens; identical to SEQ ID NO: 5918

SEQ ID NO: 178627 - DNA, 914 bp, Homo Sapiens
agcactacaaacactttttttaatgacatcagatggtacatttatacaaattacaagctacaatatagtgaatacaaaatccatccagaaaacggttagaaaagcatcacttaacagaagtaaatcggattcaagtagctaaagaactcaagccccccattttgatgattatacacggcttgaaatgcagcacatccaaaatcctccccctagtcagggcactattcaatactacagcatattcaatgactctagtgatgtaaagattctaacacttttagcatcgacgtcaagagacatctcgtaacaggttcactatgcaaaactcaaatgagaatgtgtgaacgttctttgcaaactgtaaggtgctgtgcagatgttgttagctattgctattattactgttcagtgagattacactgaacgtggggaaaaggaagactactctgtataactgacaaatatgacttacagaacatcttaaaaggaatgcagatattactttcaaatacacatagcaacaacacaggcaaggaaagtgtggccaggagtgatgtcgaggaattcctattttaaggaatatataaaggattaagctattcatagattatgtgtaatatttatcattagattcccaagtccctgaaaataatttatttttaaggtgaccctttccccctgaaaagggaaaaagaaatcttgtcaggttactaatgtgctgcttcagccagctcttgtaaaaattatcttaaacataggagtacagtctgaattaatagttatactaatctggtgggtgacacagagtgcttgacagcagagaaacctgccactgacctcagacaagtgacaaattctgtgtcagagttgaaccataagtttacaacttcacttgggcataaattaaacaataa

SEQ ID NO: 178628 - DNA, 1211 bp, Homo Sapiens
aaatgtcatcagctttgccaaaagaaacaaccaattgacttgtttggcgttgttttccattttcatgtcaattttatgtatacagttagaatacccaaggagaccactaaaatcagttaaacaagtagggtatatacaaagaaagatgaaacccgaaagtacataaaaaggatttaaagtccgattttagatgtacctagtgtgtatttcttatctctagacaagttcatgtttattgtttaatttatgcccaagtgaagttgtaaacttatggttcaactctgacacagaatttgtcacttgtctgaggtcagtggcaggtttctctgctgtcaagcactctgtgtcacccaccagattagtataactattaattcagactgtactcctatgtttaagataatttttacaagagctggctgaagcagcacattagtaacctgacaagatttctttttcccttttcagggggaaagggtcaccttaaaaataaattattttcagggactttgggaatctaatgataaatattacacataatctatgaatagcttaatcctttatatattccttaaaataggaattcctcgacatcactcctggccacactttccttgcctgtgttgtagctatgtgtatttgaaagtaatatctgcattccttttaagatgtactgtaagtcatatttgtcagttatacagagtagtcttccttttccccacgttcagtgtaatctcacttgaacagtaataatagcaatagctaacaacatctgcacagcaccttacagtttgcaaagaacgttcacacattctcatttgagtttgcataggtgaacctgttacgagatgtctcttgacgtcgatgctaaaagtgttagaatcttttacatcactagagctcattgaaatatgctgtaggtattgcaatagtggccctgactagggggaggattggcactgtgctggcatttcaacgcccgagtactactccatccaacattgcgggggggcttgaagttccttcagcctacttgaaatccggatttactttctggtacaggtgaatgctttcctaacccggtgtcttgcactggactcttggtattccactaattatggtacgctggcactttggattaatgtaccctcttatgtcctcacaaacagtgttgtcaccgacaacacacacacggggcgaccaagatcccc

SEQ ID NO: 178629 - DNA, 1168 bp, Homo Sapiens; identical to SEQ ID NO: 5953
  misc_feature (733)..(741): n is a, c, g, or t
  misc_feature (757)..(820): n is a, c, g, or t
  misc_feature (834)..(834): n is a, c, g, or t
  misc_feature (859)..(859): n is a, c, g, or t
  misc_feature (1049)..(1049): n is a, c, g, or t
  misc_feature (1074)..(1086): n is a, c, g, or t

SEQ ID NO: 178630 - DNA, 830 bp, Homo Sapiens; identical to SEQ ID NO: 5980

SEQ ID NO: 178631 - DNA, 820 bp, Homo Sapiens; identical to SEQ ID NO: 6004
  misc_feature (333)..(333): n is a, c, g, or t
  misc_feature (558)..(558): n is a, c, g, or t
  misc_feature (710)..(710): n is a, c, g, or t

SEQ ID NO: 178632 - DNA, 965 bp, Homo Sapiens
  misc_feature (834)..(834): n is a, c, g, or t
  misc_feature (894)..(894): n is a, c, g, or t
gggggtgagacagaagtgaagaaagatgaggccggagaaaactattccaaggatcaaggtggtcggacattgtgtggtgtaatgaggattggcctggttgcaaaaggcttgctgattaaagatgatatggacttggagctggttttaatgtgcaaagacaaacccacagagaccctgttaaatacagtcaaagataatcttcctattcagattcagaaactcacagaagagaaatatcaagtggaacaatgtgtaaatgaggcatctattataattcggaatacaaaagagcccacgctaactttgaaggtgatacttacctcacctctaattagggacgaattggagaagaaggatggagaaaatgtttcgatgaaagatcctccggacttattggacaggcagaaatgcctgaacgccttggcgtctcttcgacatgccaaatggtttcaggcaagggcaaatggattaaaatcatgtgtaattgtcctccgcattctgcgtgatttgtgcaacagagtccccacatgggcaccattgaaaggatggccactagaacttatatgtgaaaagtctataggtacttgtaatagacctttgggcgctggggaggccttgagacgagtaatggagtgtttggcatctggaatactacttcctggggggcctggtcttcatgatccttgggagcggaaacccaacagatgctcctgacctatatgaccatccagcaaaaagaagatattacccacagtgcacagcatgcactcaaactatcagccctttggccagatttacaagtggctggagatggacccccttccatctagtaangccttttcagaagtattcctggtcagtacctggataaaggaaggtggctggggtcttcangctctaaagaggcccattttgaagatgggatttaggggggatgataaaagacccccaacaaggaagaggaa

SEQ ID NO: 178633 - DNA, 984 bp, Homo Sapiens
tggtgtataagaccctctctatagcagaggggaattttctccggggatcaagaatcttggggccctgtgccccagggctttaaggccggcaaaaaggtcgtaagtccaagcaatcaatggaggtgaccaaggggaaccccaggtttgtgctcatgctctcccccacatatccagccgaataaaccggctgaaaggtacatttgcgacctcaactttttgcagaaggaccagaaggttttgacccacaaaccttgcccagggaaagcattcccatgggagaacaccatacattctggcgtcagcacagagactgcctatactggcagaggtcttgctggggaaggcaatagactggcaggtggtccaggtgttgaagtaaatgtacacaggcacagcagagcaggcaaacaccaggagccacacaacggtcagggcataggtgatgcccacaaacgttgcgctcaggcccttgccgcagatggtggtcttgtagtcgccaaagatctgcctgactgcgccggtggtgtagaagccctcagccagcaggagggccccataaaggaagaagaaagaggcagttccatagatgacatactggaaggcatggatcacattgatgagatactcatagtcttggtagtttttggagaaataggtctcaattagcttttctgtgccagtgagggcttcatgtccacagccacagaacagtgccaccccaaagaaacacaatccagtggccaccagggaagcaaagggggcccctaccagacatcttgcacagcactctaacaagcccatgtctttgggactctgactccaattgtagccggctggctagtctgctttgtggctgactttgttcagctggaaggatcctggtctctccagcctccttcttcggtcttttactttttctctctgagtatctttgtcctccggacgcgtgggtcgacgatatcccgggaattccggccggtacca

SEQ ID NO: 178634 - DNA, 1011 bp, Homo Sapiens
  misc_feature (386)..(409): n is a, c, g, or t
ggcacatggtgtaggcatttggactataagactccctccttaatcaatcccccatgtgcttgaatgttgattaacttgaacaggatatgagaaactttgtgtacaactccaacttggcaaatatccattagcgaatgcgaactttttggaaacattctttaggcacaagaaatagcactgcctgcagtgaaagtccttgataatcgaagaaaagaagttccattaaagtataattttacaaatatgaaagaaaatatatgcatttttgccaacagactgctctacatatcaggaaaaatgtcttaatgagattcctcctacgagattaaaaggttaccttttaattgacaactttcaattgacactcaggtgattctgtggtattnnnnnnnnnnnnnnnnnnnnnnnnctgatttagcctaaataagatttaggaaaagaaatgcaagcctattaatatggaataatagctgcacttctttggctaagtcattaaaaaatgccaattaaacattttcagtcaaattttatttaaaaaaagcagcagataaacattacaattcaataatctaatctaaatatgcatttgacaatgaagcatatctgagtatggagtgaaaaaggttttccaaaaaaccatcaaatgtattatctccaaatacccaaataataaatcacttctgcaggccttttgttaagtggaatcataaacaaagaactgaagatttattgctgtgaaaacaaatctgtggtacagtagcatgaatcttgggtatttcgcataatcagttaggtcaagtgaagaagtcgaaaatgtgataagaaatttgtatgtgtgtgcacatgtaaatctgtaagccagttgacccaagagcaactgaaacatctaatttgttcagctgagatcagacattgttaaatttccattttttagaaggcaattaaaaattacaattccaacagcccacaaaccaaacaaaaaaaactgtagagagaaattaaaactatatc

SEQ ID NO: 178635 - DNA, 830 bp, Homo Sapiens
ggggccccggccagtccctaagcacgtgggttgggttgtcctgcttggctgcggagggagtggaacctcgatattggtggtgtccatcgtgggcagcggactaataaaggccatggcgccagcagaaatcctgaacgggaaggagatctccgcgcaaataagggcgagactgaaaaatcaagtcactcagttgaaggagcaagtacctggtttcacaccacgcctggcaatattacaggttggcaacagagatgattccaatctttatataaatgtgaagctgaaggctgctgaagagattgggatcaaagccactcacattaagttaccaagaacaaccacagaatctgaggtgatgaagtacattacatctttgaatgaagactctactgtacatgggttcttagtgcagctacctttagattcagagaattccattaacactgaagaagtgatcaatgctattgcacccgagaaggatgtggatggattgactagcatcaatgctgggagacttgctagaggtgacctcaatgactgtttcattccttgtacgcctaagggatgcttggaactcatcaaagagacaggggtgccgattgccggaaggcatgctgtggtgggtgggcgcagtaaaatagttggggccccgatgcatgacttgcttctgtggaacaatgccacagtgaccacctgccaactccaagactacccatctggatgaagaggtaaataaaggggacatcctgggtggttgcaactggtcagcctgaaatgggtaaagggggaatgaatcaaacctgggggcaatatccatcgactgtggaaac

SEQ ID NO: 178636 - DNA, 1072 bp, Homo Sapiens
catgttggcaccttgtccctgggttgttctagtgggagtaagtggccagaacagcagagtttaagaaactcaaactctttcttctttggatgggaaagccactgggggactgaatccttcctgggactataggatttatgtttccaatgggagacccccacaagtggaaaagagcacttctcccctccctcccccaaggccaaaggaaagcaaagaagatgtctataatgaagaacatctatacatatacccggagtttttccttttatttacaaagcagtaaaccaaattcctgtgtgaacataaatatccaatataatataatattgcgtatgccatttcccccctcaaatatgacttcaattttggccagttgttctgacttaagccaaaaattagtttcatctatatgaacatatgatggtaagtaacctatgttattaccttaaaatgtttccccacatgaaaggaaatggtagagagtaaggggaaaagagaaataagagatgtgataaaacctattccaccatctttatcttcatccacagcatgtcctagacattcagtgcctggggccagtctctatagtaaacttgggctgatctggaaacgtctccacttagctctgtaaggatggcacccttcagggtgcttcagaggaaacttactgaattcaacccaagtgtcctgaaagaaattgaagaagttactcaaagagctgaactttaaaacaaggagtagctgagggtgaggcatatcctatcttgactttctgagcactctggtaccatggaatgtctgtacactgaccttcgccaaagccaagaaagccctggtaggagtcacagcagccatgggtgagctgaaaggcttttcctgacttcctggggtctcaggaatagccagaggtgaaaagatttgccttttttactacataattgcacaaaccatggtatctattttctgatccagatttccaaaggcttttctgaaaactacaagatataccccttgtggactgtgtgaaaataaatttatctttatgtatttgaacagtagccatagatgtgcc

SEQ ID NO: 178637 - DNA, 1178 bp, Homo Sapiens
  misc_feature (16)..(16): n is a, c, g, or t
  misc_feature (346)..(360): n is a, c, g, or t
  misc_feature (1097)..(1111): n is a, c, g, or t
gttcccaagcaggggnaaaaaacccttaaaaccccaggcccttcaggaactggggctttgccttgcagccacatggccccatcccagttggggaagccaggtgagctctgacccttgggcctgggcctctgcccctcccaacccagccgtcgtctccctcgacagcgcccctgctgtcttccccaccgcagtcaccaccacccgaaatgccacgtggtcactgtgcactgccctgttcatgtgcctctgcggggcagggccttcctggttttgtacactgctgtacccagatgcctacaaccatccctgccacatacaggtgctcaataaacacttgtagagcagnnnnnnnnnnnnnnncacatccacatacccctcccccttcttaacccccactttaacgtactaaataggcccccaacgggcctcaaaacctagagcaaccccgcccaccgccccgcgttttcaacttaacctatcctcctaacgcgccctcttttccgtgtggggcgcggcctccgtcgcccccccgcaataacgctcctctacaacaaaatccgtcccgccgtgggggcgcgggcgggtgctccctcttataggcgaaccggggagaaaccccggcgccccctatatggttgttcccccccataaagagaaataaccctggcggacacaaggccaacactaggggccttgtgggacatctctccctcaacacacaaaaaataataaaagaggggtgcgcgggggggacaaaaaatcgcagaagccgtttcttctcaagacaacaataactccaaggagggtgggcgttcttttcgccgaacgctctctttttatcggtgggattacccaacacccaccacacggggaggttcccacatcgtgaatgccctcccccatatattctaaaaactataccaccccgccactcacctcttgtacacaccctctataccccggcagcacgctcgtgtctggccaaataccactataacaccatatctcttcctctcccactatgtgagcaacacctctttcccctcccgggggtcctgtgtgcctgcacctttgatcacgcccctattggtgctcannnnnnnnnnnnnnntccgttacaccgccccccgctcatataaatatttttctccccccgcggtcgataaacaccgcgcgcc

SEQ ID NO: 178638 - DNA, 848 bp, Homo Sapiens
  misc_feature (714)..(793): n is a, c, g, or t
aaagtaaaatggcaattttatttttctccagaaacaagtttttcttacagtccttaacaactccgctccttatatgggcttggggggaggtcatggggcagcacctgcaggtctacgtgtggggatggaggtgttcggctccttgccgtgcttcatgagctcaattcctcaccactgtgctgtgaatggcacaactcacatggtaatgtagcttcacatccagcctgggaagtacacaggcgtcaaggatgctcatttcagaaacatcgctgactgctgcggccctctacgtttcaaatgatgaatttcttagtagcctgtgtcatggggcacacaacaaccacagttcatacagcaaatgggctgcagtgaacagtgcacacctggttgtggacctcttgggcacgaccatggcttcttcttgggaatctgggaggtgcaggcccaagaaagatgaagtaaaaatcttaattggagggtgactaaatgaatccttcaagaccacttaccccaaatccacattctgcaagacagttcaagaagaaaggccaagtagccatctatctcaaggggctagtgggctccacaatacttagcacttgtccccaagtgtaaacattcccatggcgtgcttcttccgtatcccaggtaaggcacaacgatgccaaggtgctgtcatcgagaatcccatcctttagaaaatctcaggccaannnnnnnnnnnnnnnnnnnnnnnnnnnnnnnnnnnnnnnnnnnnnnnnnnnnnnnnnnnnnnnnnnnnnnnnnnnnnnnnaaaggacccgttctggacagcataggtaaacccccctctataaaaatttaaaaat

SEQ ID NO: 178639 - DNA, 1259 bp, Homo Sapiens
  misc_feature (1045)..(1045): n is a, c, g, or t
gggaccggaatcggaagtggctgcgtcgtcgacactgggctttcgggtcccgcgcccagagatgggctccaaggcaaagaagcgcgtgctgctgcccacccgcccagcgccccccacggtggagcagatcctggaggatgtgcggggtgcgccggcagaggatccagtgttcaccatcctggccccggaagaccccccagttcccttcatgatgatggacgatgcctgaggccccgggagatcatctctaccaccaaagccgggcctacgtggctgcccaacagccgctgccgcaggcgggccacttgctgaggcaaaagcgtgagctcctgcaaccatgccggcgacgatctggagctgctaggtggcccacaatcaaccagggatcattgcctggcagcccaagggtgcctccttcaagccggacctcttcggggtccttgtccgcgctgggccaaagccctaattgtgggccctgcctaccttacgttttcaccttaggggggtcccttccggcccctatgacaggtggcattcagcggcggtatcccacccactgcgcccgggggagcgctgaaaataagggtccgataccctcttcttttgcaaatccctggggcgatttttcccacgcaataattttaccagcgcgccgctcggtgaatatataatgtcacacaaatagcttttgcactggcgtgatccccccaccaaaacatccaaagcggcgatatgtttaaaattcacgcgcgcccaccatgggtgggatttgatgagaaaactttgtgtgtaggcgcggccagatcatgtaaacactccgcccgtgaatgtgactcacaccgatgctaccccaacaccacgcttaatagtggccagccaactgctcactctctgacctattatcaccgatagtctccaccaaattcatgagtctcgctgacacacactcgattccatgctccgagtggcatcctctacatgacaaactgatacataccgcgtacggtgtactaccccgcagactctcacgctcctacttatgccncctcccccatacctacgactatctctaccacacggggagtacagtgcaacacatatatcgcagatgattgaataacgcactcgctgttattagtatgacagacgctggtggtcatgacccagaggagtcaaccatttgtgggtgtatcagattgcgcacttcattcgcgcactatcttatccgcgagactcgtaccacacgttgttcgccacgt

SEQ ID NO: 178640 - DNA, 493 bp, Homo Sapiens; identical to SEQ ID NO: 89599

SEQ ID NO: 178641 - DNA, 1334 bp, Homo Sapiens; identical to SEQ ID NO: 7569
  misc_feature (467)..(512): n is a, c, g, or t
  misc_feature (574)..(612): n is a, c, g, or t
  misc_feature (690)..(728): n is a, c, g, or t
  misc_feature (782)..(963): n is a, c, g, or t
  misc_feature (1071)..(1082): n is a, c, g, or t
  misc_feature (1218)..(1293): n is a, c, g, or t

SEQ ID NO: 178642 - DNA, 1005 bp, Homo Sapiens
  misc_feature (137)..(147): n is a, c, g, or t
  misc_feature (194)..(239): n is a, c, g, or t
  misc_feature (372)..(469): n is a, c, g, or t
  misc_feature (545)..(554): n is a, c, g, or t
  misc_feature (602)..(711): n is a, c, g, or t
  misc_feature (926)..(926): n is a, c, g, or t
  misc_feature (975)..(975): n is a, c, g, or t
actatatatcgctccaaccagacttggggggtgttttctacggggagaaaaaaacccggggccgctttttttctccttaaaggggggtttttttgtgagaaataatattattttttgttttacaccaccaaaccccnnnnnnnnnnntttcccccccttttttaattaaaaaggggcgcccaaataggacaaannnnnnnnnnnnnnnnnnnnnnnnnnnnnnnnnnnnnnnnnnnnnnagggcccaaggggtggatccccggggggtttcagttctcacaaccccgttgggagggttcccagtcggccgaaaggtttaaaaaattccacccttcctccaaaaagggcccggtgggggggaaatttaaattnnnnnnnnnnnnnnnnnnnnnnnnnnnnnnnnnnnnnnnnnnnnnnnnnnnnnnnnnnnnnnnnnnnnnnnnnnnnnnnnnnnnnnnnnnnnnnnnnnggggggaatccaacccttgttcttgcccgggttttttttggaaaaaatttggccccttttccttttcttttggggnnnnnnnnnnaaaaaaaggttttaaaaaattttttgggggcggggggggcccccaagnnnnnnnnnnnnnnnnnnnnnnnnnnnnnnnnnnnnnnnnnnnnnnnnnnnnnnnnnnnnnnnnnnnnnnnnnnnnnnnnnnnnnnnnnnnnnnnnnnnnnnnnnnnnnncagaaacgtgtattctttttcttttaatagtaaacctctttacaacaaatatagtgaaagagttttcaaacaaaactcataagaatctcgaggactttgtcttttcttattgtgtagaatactaagaaagcatcaccatacagcacgaaaagaaatattgaaaacaaatcaacagcctcacacttgggactcgccctgccccagggacccagggnagagccccagggagtgtggggtgattgtcaggtgtgggggtgggggcanctccatgggcccatcctgcccctcccttcc

SEQ ID NO: 178643 - DNA, 1477 bp, Homo Sapiens
  misc_feature (110)..(110): n is a, c, g, or t
  misc_feature (195)..(195): n is a, c, g, or t
  misc_feature (252)..(252): n is a, c, g, or t
  misc_feature (254)..(258): n is a, c, g, or t
  misc_feature (302)..(339): n is a, c, g, or t
  misc_feature (353)..(362): n is a, c, g, or t
  misc_feature (366)..(374): n is a, c, g, or t
  misc_feature (376)..(376): n is a, c, g, or t
  misc_feature (381)..(381): n is a, c, g, or t
  misc_feature (386)..(386): n is a, c, g, or t
  misc_feature (439)..(447): n is a, c, g, or t
  misc_feature (468)..(468): n is a, c, g, or t
  misc_feature (478)..(495): n is a, c, g, or t
  misc_feature (533)..(571): n is a, c, g, or t
  misc_feature (610)..(610): n is a, c, g, or t
  misc_feature (670)..(670): n is a, c, g, or t
  misc_feature (750)..(750): n is a, c, g, or t
  misc_feature (784)..(784): n is a, c, g, or t
  misc_feature (787)..(787): n is a, c, g, or t
  misc_feature (800)..(800): n is a, c, g, or t
aggagtcacccgcccccatgggggcgaggagaaacaagggtgggggtgtcaatgtgcgggcgcgaaacgggatgaggttgtcttccgctctcggccctcttgcggggggnaatttcgtccgccgctgccggggagtttcccacacgatacgtctcggcgggtaggggcattgccgagtgggtggattgttggggntatggggtttagaatgtaatagggggtagaaaggcacagtgttttccccgcctcctntnnnnngtgttttggtggggtagggggaatgactatcttcgccctctaannnnnnnnnnnnnnnnnnnnnnnnnnnnnnnnnnnnnnggtacttttccggnnnnnnnnnnatannnnnnnnnanagganggagnaaaaggaggcccgggggccgggcgcgggggcggcccgtggttttttttaaagnnnnnnnnntgtcctgaaggccgggggggnggccccgtgnnnnnnnnnnnnnnnnnngaacaaacctaggttttttgggcgccgccccccgcccnnnnnnnnnnnnnnnnnnnnnnnnnnnnnnnnnnnnnnnaggaaaccaaccaccccccctttaaaattctgtgtggcngcgggggttttccttgaagaggaaaaacacgggttatgccccattttgccgtttactttngggggcccggggggcccaaacggaatggttcttagaaaaaggttttttggatgggtccgaggccgggcccggcaaaaggnaccaaattttttctagggtttgttcccttccaanccngccccaccatggngaagctattatataagggttttatttttaataagatgaatagtttaagcttcgtgtctagccctgcaccctcttagcctaacagcacacctcgagcgctgtgccctgggctgctgacgtggcggcaggccgctagcagcagtcggccacctcttgaggcgggcagcacaggcctgctgtggacactctaggtctggccttgtattttgtggtctcagaagcctttgtggggacttctagtgtagggaaggcagtctctctgggagctcctgcaatgccaaactcttagcccaggttcactcctccgatccaagcctggcaggggtggggcatcatggtgtgtaggtatcaggcaggacttgtaagccatcccatcaagtcaaattctggcttaatgtgtctttaggtagatgacctctgagccacagtttcctattctatgaattggggtttagtaaatctctcgggactgagagccaatgaggccatgtgtgcacacaaaatgctgggcacaaatgaggggctcagcggggctgagaagtacatcccatccagtgccgacatccgcttgcatggtgccctggtaaccttgcctctgccctccccaggccacctcaccgatcagcacctggccgagttcctgcggcgctgcaagggcagcctccgccccaacggccc

SEQ ID NO: 178644 - DNA, 876 bp, Homo Sapiens
  misc_feature (473)..(473): n is a, c, g, or t
  misc_feature (503)..(503): n is a, c, g, or t
gggtggtctggcggagctgcggttggcttgtggcgtctccgccgccgccgccctcccttcctcttccccatcttcttctctcggtcccgggagcccccgcccggagagagtcgcggttgctgatcgtggtgcttgagtagagccgtggttggtgacagcatgacgagcgaggtgatagaagacgagaagcaattctattccaaggccaagacctactggaaacaaatcccacccacggtggacggcatgcttggggggtatggccacatctccagcatcgacatcaacagctcccggaagtttctgcagaggtttttgagggaaggcccgaacaagacaggaacgtcctgtgccctggactgtggagctggcattgggaggatcaccaagcggctgctcctgccgctgttcagagaggtggatatggtcgacataacggaggacttcctggttcaagccaagacctacctggngggaggagggcaagagggtgaggaactacnttctgttgtggggctccaggacttcaccccggagccggactcttacgacgtgatctggatccagtgggtgataggccacctcaccgatcagcacctggccgagttcctgcggccgctgcaagggcaggcctccgccccaaaggcatcatcgtcatcaaagacaacatggcccaggagggccgtgattctggacgacgtggacagcagcgtgtgccgggaccttgacgtggtcccgcaggatcatctgcagtggcaggcctcagcctcccggccgaggcagaggcaggagaaacctcaccgatgcagatctaccatgcctatagctcgccctgcaaatgacccggggcagccacgacaaactgaggaccccagc

SEQ ID NO: 178645 - DNA, 721 bp, Homo Sapiens
  misc_feature (29)..(29): n is a, c, g, or t
  misc_feature (111)..(111): n is a, c, g, or t
  misc_feature (194)..(194): n is a, c, g, or t
  misc_feature (243)..(243): n is a, c, g, or t
  misc_feature (274)..(274): n is a, c, g, or t
  misc_feature (430)..(587): n is a, c, g, or t
  misc_feature (612)..(636): n is a, c, g, or t
ggtgaccactccaagatctttcaatgaanacctgatgatgtatttagttcccattttcccacggtgattgactcaatttaagtgtattgtggctatatgtaatttacaggnctgctttgcgttgcaggtgggaaaatctcccaggctggtgtgaggctgaaactggggtaaaagaccccctgacccctcctcantcttctaaggtcaccacctcttagagggtctcttattttctttcagagntcaaatgcacagttatgctgtacaactaaantctgcagtcttgggaatccttacgagtaccaactattagtcactttttaaagtccccaaagtggagtgaggatagggggagtggaagcagtgtttggttcttactttacccaaactgtgtataaagaataaagttagcagaatgatgccacagtcnnnnnnnnnnnnnnnnnnnnnnnnnnnnnnnnnnnnnnnnnnnnnnnnnnnnnnnnnnnnnnnnnnnnnnnnnnnnnnnnnnnnnnnnnnnnnnnnnnnnnnnnnnnnnnnnnnnnnnnnnnnnnnnnnnnnnnnnnnnnnnnnnnnnnnnnnnnnnnttctttggcgccccccccgcccccnnnnnnnnnnnnnnnnnnnnnnnnngggggccgcccccccagagaaaagggaaagggggtattatttttcccaaaaaacccgggggaaagaaaaggggtggtttcccccc

SEQ ID NO: 178646 - DNA, 913 bp, Homo Sapiens; identical to SEQ ID NO: 7668
  misc_feature (498)..(500): n is a, c, g, or t
  misc_feature (512)..(568): n is a, c, g, or t
  misc_feature (581)..(640): n is a, c, g, or t
  misc_feature (662)..(662): n is a, c, g, or t
  misc_feature (673)..(686): n is a, c, g, or t

SEQ ID NO: 178647 - DNA, 399 bp, Homo Sapiens
  misc_feature (33)..(33): n is a, c, g, or t
  misc_feature (44)..(44): n is a, c, g, or t
ctgaacacaagcaaaccttctcaggaggtgtcnccctaccctcntaatgttccctcttaagctctgctcaatgaaaccttcctcttgagggtcattttcctttctgtattaattataccagtgttaagtgacatagataagaactttgcacacttcaaatcagagcagtgattctctcttctctccccttttccttcagagtgaatcatccagactcctcatggataggtcgggtgttaaagttgttttgattatgtaccttttgatagatccacataaaaagaaatgtgaagttttcttttactatcttttcatttatcaagcagagacctttgttgggaggcggtttgggagaacacatttctaatttgaatgaaatgaaatctattttcagtggaa

SEQ ID NO: 178648 - DNA, 660 bp, Homo Sapiens
  misc_feature (193)..(213): n is a, c, g, or t
  misc_feature (537)..(545): n is a, c, g, or t
gggtttgtggtgctgtaacaaaatacctgagactgggtaatttataaattataggaatttatttctcacagttctggatgctgaaaagtttatgatcaaggcactagcaggtttggtgtctgagggcccagtttctaatttgaagatggtgctttaaacactgtcctcacatggtagaaggggcagatgggcnnnnnnnnnnnnnnnnnnnnnggggcaattgctgtgttgtagccccttctcataaggggctaaagctcatttcaccagggaaagagctctcatgacctaattcacctccaaagaccccacctcttaatactatggcatttgcagataagggttccaccatgacttttgggagggatacaaatttttcacaccatagaatattagtaattatagtatagtatattttttttggggtgtcgtgctcggctttggcccaggtgtacggtgtggaaggtccactctatgtggtggcaatgctataagaagggtggtactctatggggcgcatagttattcccagtgtgnnnnnnnnngtccccacaacttctttcaatttaaccttggcgtgatggcgatatggcgtttggttccccagtatcggggggtaaattttatcgacatcaacacactggcttggttgaccctttt

SEQ ID NO: 178649 - DNA, 519 bp, Homo Sapiens
  misc_feature (236)..(273): n is a, c, g, or t
ggcatcggcagggagaggaggcgcgggagggggacgcaaacaaaaaatggctttcatattcaaagatgttcatgttgctgagctgtaagcaggagcaccctggcttctctggtctttgacttgattaaagtatctccgctttcttgggagggaataggggatgtattatcagtgaatgtgccatacaccttatggtccacttcgtgtgcctttcaaacttccccgcgcgcgcgcannnnnnnnnnnnnnnnnnnnnnnnnnnnnnnnnnnnnncgtgagcttctttctctctcctaaaaatcgataaggagctccacctgaagagggatggaacctctggggcaggaaacagctggaatccacactcacctcattcccattgtctggatcatgcttctttccaacacgtgctcacaatctccaaagggactgaatttcttctcagtgcttaatgtgatttgaaatatgtagaatcaaagagaaatatttattttttgaacacgggagataattccctta

SEQ ID NO: 178650 - DNA, 920 bp, Homo Sapiens
  misc_feature (264)..(274): n is a, c, g, or t
  misc_feature (371)..(383): n is a, c, g, or t
  misc_feature (421)..(429): n is a, c, g, or t
  misc_feature (441)..(457): n is a, c, g, or t
  misc_feature (904)..(904): n is a, c, g, or t
aggggtagtgtaaatcctgtaaattgggaggtgtttctgtaccacctttcttttcaaaaattattatttggtcaggaggcgcgggcggccggtagaaattcttggttatatgggggagttccggtcaggtgagatcaccccccgtggtatgagaagtctcccggggacatggggccccctcagtaggtccccccttttggggggacagggtgtggggaaccccgccccggtgtttctccgccccgcggcgtgttttttattttnnnnnnnnnnnatttcccagaggcccttgttcctggggccgcgggtgttttctttgggggggacccgagttaggggcccccgtggcccactttttctttttggggggnnnnnnnnnnnnntatggaataggtttttgaaaaactttttttcagggccnnnnnnnnnccggacaagtgnnnnnnnnnnnnnnnnncccctagcgatcgaccaggtcgtgtgtgggtggcggtttgccccccctccggcttcaggggtggttgttctcattcaaattacagaattttattgatacagtagattaataaaaactgaaaggatgataaaatgggataaagaattcagtacattattttataacacactctttaaaattaaaatactttaaatctttcttcttaaaattttcattgccatgaaaggccagaaaattctgggacaaatcaatactgaggtgtaaagtaatccaagaacttcaggactatttcacaatttgcatggttgtcctcctatcagaggcatccttctggtgtaatggcagacaatttagcacctctgaagattaagggtgcccagggagtaaacactagggtaaggatacacaaaggggaagagaccatttaactctccaacaaattggtgnccatcagggaaatggc

SEQ ID NO: 178651 - DNA, 939 bp, Homo Sapiens
  misc_feature (602)..(628): n is a, c, g, or t
gggggcagacgaccgggagcacatagcggccgggagcccggctgcacaccaggctgctgctttgtccgtctatccacccgcccacccgcccccaccccaccggcagcgtccaggtgcggggccgggaaccacacaccccactgggccggccacagtctggacccgcacgtcctgttcaaaagcagactcgggaactgcctgaatgtggtttgggacacgagacctcatcatattgatgagcgaacaaacaagaacatttcctccctcccctcctttgaattgaaatggcacattaagacttgtcacggcttctcactgggactggagacctcgttccttcaccccgcgtgtcgccagcctctgggtccagccagagcccctggcttctccgccacccacacccttcccaccctgctgtggggccctgcctttgtggggagcagccagccctctgcccctgcccagggctccccaactataggcctgggacccccgcccagcttggggggctgctcgtacgagtgtagacactgggcccattggacgtgctgttaactactatcttcatttcccacttcccctctctgattgggggtgtatannnnnnnnnnnnnnnnnnnnnnnnnnncgaaggctttgtttggtttcttaggttaagatgctctcgagcgttgagcaggccagctctgtcgaggtccctgtcccccacctgtggttctggcctctgaggttgggggactacttgtttcccaccccaggttcctccaggccaagtcatggggtgatgaggagttggggccctgtctgtcctaggcctggagagtgcctgtctgggaaaaggtcactggacctggcagggtcccccaggttccccctgactcccgtctccatctgtcacgtggttcaccatcatcaggcaccaggcgcaactgcttcccg

SEQ ID NO: 178652 - DNA, 801 bp, Homo Sapiens
  misc_feature (369)..(553): n is a, c, g, or t
  misc_feature (559)..(576): n is a, c, g, or t
  misc_feature (582)..(582): n is a, c, g, or t
  misc_feature (684)..(734): n is a, c, g, or t
ggggtatttttgtttttgtttagttttaggtttacaacagagaggaattaatttatcagcagcctaaaactgttgtgtttttcttatggtttaaaaaacgccatgtcattgataactccctttctcccttcccttctcccggtctgctgatcactctttcatgcctgtgtatccagggtgctctgtttccccaccgttcccaggtgtacgaggcagagggccgggacagctttcctctcagtcattgttcaccccacttgaaaattcagacaagaaaactttgcttaaaagatttcatgtgtgggaaccacagttcctggctgcctttctcctgtgtatgtgtaaattccttaataaatattgcagggnnnnnnnnnnnnnnnnnnnnnnnnnnnnnnnnnnnnnnnnnnnnnnnnnnnnnnnnnnnnnnnnnnnnnnnnnnnnnnnnnnnnnnnnnnnnnnnnnnnnnnnnnnnnnnnnnnnnnnnnnnnnnnnnnnnnnnnnnnnnnnnnnnnnnnnnnnnnnnnnnnnnnnnnnnnnnnnnnnnnnnnnnggattnnnnnnnnnnnnnnnnnnaaaaantttaaaaaaacttttgggcggcgcccgcccccaaggagagaaaaaaacggctttattttttcccaaaaaaaaccgggggcaataaagggtggtgttcccccnnnnnnnnnnnnnnnnnnnnnnnnnnnnnnnnnnnnnnnnnnnnnnnnnnngggggtccgggggctatttgggatgaattaacgagaaggggcccaccgccttctaaatatttatttt

SEQ ID NO: 178653 - DNA, 503 bp, Homo Sapiens
  misc_feature (256)..(452): n is a, c, g, or t
gggaggaaagaggccagtagagaattctgcccactttttataaaaacttacagcgatggccccaccaaggcctagacacggcactggcctcccaggagggcaggggcattgggaatgggtgggtgccctccagagaggggctgctacctcccagcaggcatgggaagagcactggtgtgggggttccaccgagaaggggacctcatctagaaaagaggttacaaacctaccattaaactatttttcctaaaacggnnnnnnnnnnnnnnnnnnnnnnnnnnnnnnnnnnnnnnnnnnnnnnnnnnnnnnnnnnnnnnnnnnnnnnnnnnnnnnnnnnnnnnnnnnnnnnnnnnnnnnnnnnnnnnnnnnnnnnnnnnnnnnnnnnnnnnnnnnnnnnnnnnnnnnnnnnnnnnnnnnnnnnnnnnnnnnnnnnnnnnnnnnnnnnnnnnnnnccccaaaaggaaaggaaaaggggccaaacgtgttcccaaaaaaacccgggc

SEQ ID NO: 178654 - DNA, 406 bp, Homo Sapiens
gggggggcggtccccagcacactagaggaagtcgtgctacccccgcggagttgtcgtgtgttctggattcattccggcaccaccatgtcgaaggtttcctttaagatcacgctgacgtcggacccacggctgccgtacaaagtactcagtgttcctgaaagtacacctttcacagcagtcttaaagtttgcagcagaagaatttaaagttcctgctgcaacaagtgcaattattaccaatgatggaataggaataaatcctgcacagactgctggaaatgtttttctaaaacatggttcagaactgcggattattcctagagatcgtgttggaagttgttaatatctgctacttggaacatacgattgcctttcagaataaatattggtattttttgttgttgtaa

SEQ ID NO: 178655 - DNA, 1561 bp, Homo Sapiens; identical to SEQ ID NO: 7985
  misc_feature (893)..(970): n is a, c, g, or t
  misc_feature (1430)..(1482): n is a, c, g, or t

SEQ ID NO: 178656 - DNA, 552 bp, Homo Sapiens; identical to SEQ ID NO: 97836

SEQ ID NO: 178657 - DNA, 240 bp, Homo Sapiens
ggtcaccatgtcccccggtcaccagtcctcttgctgcccatggttcataggtcatagaaggcagcaatgcactgactgggccacatcttgaaaactcgtggaaagggaaaggggaggagatgggactttgaccacacacagtgatgcctcacaccctgaaggtgggggattttgtacctgtttgtacaactttggtcttgatgggaaaaatggagaattaaaaagtgttttgagaagctt

SEQ ID NO: 178658 - DNA, 1398 bp, Homo Sapiens; identical to SEQ ID NO: 8007
  misc_feature (108)..(206): n is a, c, g, or t
  misc_feature (395)..(403): n is a, c, g, or t
  misc_feature (556)..(556): n is a, c, g, or t
  misc_feature (678)..(678): n is a, c, g, or t
  misc_feature (683)..(683): n is a, c, g, or t
  misc_feature (822)..(822): n is a, c, g, or t
  misc_feature (953)..(953): n is a, c, g, or t
  misc_feature (962)..(963): n is a, c, g, or t
  misc_feature (965)..(965): n is a, c, g, or t
  misc_feature (982)..(982): n is a, c, g, or t
  misc_feature (1009)..(1009): n is a, c, g, or t
  misc_feature (1032)..(1032): n is a, c, g, or t
  misc_feature (1159)..(1159): n is a, c, g, or t
  misc_feature (1247)..(1247): n is a, c, g, or t
  misc_feature (1261)..(1261): n is a, c, g, or t
  misc_feature (1302)..(1302): n is a, c, g, or t
  misc_feature (1307)..(1307): n is a, c, g, or t
  misc_feature (1358)..(1358): n is a, c, g, or t

SEQ ID NO: 178659 - DNA, 1004 bp, Homo Sapiens; identical to SEQ ID NO: 8008
  misc_feature (421)..(599): n is a, c, g, or t
  misc_feature (608)..(621): n is a, c, g, or t
  misc_feature (661)..(816): n is a, c, g, or t
  misc_feature (840)..(857): n is a, c, g, or t
  misc_feature (904)..(912): n is a, c, g, or t

SEQ ID NO: 178660 - DNA, 453 bp, Homo Sapiens
gggggaggtgtggtggggcttgctgggatcatggcggggaatcactgcgagctcctgccgctggcccgtggcaggctcggggcggggttggggtggcttcttgtgcctcccttaaagcgcggggctcagcgtcctggcccagcgccccagcagcaggtccaagtgggtccggctctacagcggcggcacctacttcctcaccactgggcagacgacgctgtgtcaggacccgaaatccttcctgtacctcttgagccaggccgaccccgacccggactcggacaagacggagttttgttcttgttgccccagctggagtaccatggcacaattcttggctcacccacaccctcggcccaccgggggtttcaaggcgaagtccccccctcccttcaagtccctccctgaaataaacctgggggaaatttaccaggggcttgggcaccccaaccc

SEQ ID NO: 178661 - DNA, 817 bp, Homo Sapiens
  misc_feature (41)..(41): n is a, c, g, or t
  misc_feature (51)..(51): n is a, c, g, or t
  misc_feature (72)..(72): n is a, c, g, or t
  misc_feature (136)..(136): n is a, c, g, or t
  misc_feature (140)..(140): n is a, c, g, or t
  misc_feature (148)..(148): n is a, c, g, or t
  misc_feature (156)..(156): n is a, c, g, or t
  misc_feature (182)..(182): n is a, c, g, or t
  misc_feature (193)..(193): n is a, c, g, or t
  misc_feature (196)..(196): n is a, c, g, or t
  misc_feature (211)..(211): n is a, c, g, or t
  misc_feature (218)..(218): n is a, c, g, or t
  misc_feature (423)..(550): n is a, c, g, or t
  misc_feature (554)..(611): n is a, c, g, or t
  misc_feature (691)..(691): n is a, c, g, or t
  misc_feature (727)..(727): n is a, c, g, or t
ccccggaggccctcagggtcctcagtgcctgagggggcaanaccctgtagnacacccgcgtaatgtgcggtntgggcccagtccacaaggaattgtgttgtcctaagcccaaagggggaagcctgactgtgatttncccnaaaaaaantctgtaantcaaacccaaaatgtctgcggaatcncccagtttganacnctctgtaatcagaanagtgggnagtgccctgggtgaacgtgtctagcagccactgtgcgggatcgctgtaacaggagtggaatgtacatatttatttacttttctaactgctccaacagccaaatgccttttttatgaccattgtattcagttcattaccaaagaaatgtttgcactttgtaatgatgcctttcagttcaaataaatgggtcacattttcaaatggnnnnnnnnnnnnnnnnnnnnnnnnnnnnnnnnnnnnnnnnnnnnnnnnnnnnnnnnnnnnnnnnnnnnnnnnnnnnnnnnnnnnnnnnnnnnnnnnnnnnnnnnnnnnnnnnnnnnnnnnnnnnnnnnggannnnnnnnnnnnnnnnnnnnnnnnnnnnnnnnnnnnnnnnnnnnnnnnnnnnnnnnnnacgggcgaagggcgaaacgggggaaaaacacggcaccccagggaaacaccccggggcccggaacaaaagcgttagtgaanatccaaacccaacaaaagaacgcccccggcggggcnacccgagggggggttctctcaaacacaacccccccagtggcggttttcaggggcccttttatttgggtcgctgtcccaagggcgggcccc

SEQ ID NO: 178662 - DNA, 1840 bp, Homo Sapiens; identical to SEQ ID NO: 8011
  misc_feature (130)..(130): n is a, c, g, or t
  misc_feature (143)..(143): n is a, c, g, or t
  misc_feature (152)..(152): n is a, c, g, or t
  misc_feature (280)..(280): n is a, c, g, or t
  misc_feature (305)..(305): n is a, c, g, or t
  misc_feature (784)..(792): n is a, c, g, or t
  misc_feature (839)..(879): n is a, c, g, or t
  misc_feature (1494)..(1518): n is a, c, g, or t

SEQ ID NO: 178663 - DNA, 281 bp, Homo Sapiens
gggaactctcttgtggtcagcaaagcccctgccatgcaggccaggtgccattgagaattaagtgctcagagggccaggagcccaggggatgggaaagtgtgtggttttagtacgttcaaaagggacaatcgcttgcagttggtagatctagcgatctagttgggagataatggtgtttaccccatatgaagtattcaatagttctacttgtgaatttgtatttattttgagttatacttgacacagaattccttttttaaaaaaatatgtgtgtattttgg

SEQ ID NO: 178664 - DNA, 826 bp, Homo Sapiens
  misc_feature (161)..(211): n is a, c, g, or t
gtagatttggggcaaagtggctacagctctgtcttccattcactcaacacctgttcatgactgagccaggtgcccaggacacatcctaaacagtcagcttctatcctgtgtcctagtcggggagacagagtgccagccagcaaccctcccaggtttgtagnnnnnnnnnnnnnnnnnnnnnnnnnnnnnnnnnnnnnnnnnnnnnnnnnnnctacatccttccccgactcccaggcataatgaggcatgtcttactcaatgttatgcaatggatttaggcaaaaattcattcttagtgtcagccacacaattttttttaatgcagtatattcacctgtaaatagtttgtgtaaaatttgacaaaaaaagtatatttactatactgtaaatatatgtgatgatatattgtattattttgcttttttgtaaagcagttagttgctgcacatggataacaacaaaaatttgattattctcgtgttagtattgttaacttctttttgcgactgcgttacatcatttaaagaaaatgctgtgtattgtaaacttaaattgtatatgataacttactgtcctttccatccgggcctaaactttggcagttcctttgtctacaaccttgttatactgtaaacagttgtacgccagcaggaacaaatactgcccaacagacaaaatcgatcattgtaggggaaaatcatagaaatccatttcagatctttagtgttcctcaccccatttcctccttgtgtatgtacttcccccaccccctttttttacgtaaactgtcaattcaatcttgtctaagataaaccagaaaacaaaa

SEQ ID NO: 178665 - DNA, 542 bp, Homo Sapiens
gggttgataatctacacaccatctgttggaaccagggtgttattatggggaactcctcctgtgtactaggaggaggaccttagggagaccaagaggagagaagcatttcctttgatgaagtcacatcctgtctatgagcccactaatgctgtaacattggcctgaaagagagtgttctttaaaagcctttctcggctgttagtataaaaacatgatggtatcagctcttagcatgtttgcttgacccttatggaaggtataaatccacagaacttccttcccagagaactgggaaattgtcctagaaataaaccttgtacagttgagtggacatggataagcaaccaatttgttacttttgcaggaatttgtttccttgggaaattgggttggtggggtccatcctggaaaataatttcatggatagggccgggtttaaatatcccttttttggaaaaaatcccgtttgaaaaacctggggaatttgggggaaagaaacaaaaaatataaattttttgcggcggaacagtaaacaaacacac

SEQ ID NO: 178666 - DNA, 1270 bp, Homo Sapiens
gggggtttacgcggcgttaagacttcgtagggttagcgaaacttgaggtttcttggtattgcgcgtttctcttccttgctgactctccgacatggccatggactcgtcgcttcaggcccgcctgtttcccggtctcgctatcaagatccaacgcagtaatggtttaattcacagtgccaatgtaaggactgtgaacttggcagaaatcctgctgttccagctggaactggcgcacgacaggagcgtgccacacacagggcacacagaccactcgactttcgactgatgtggcctgcaactaaaccacagacactccttacacgccttccttcccccttcacatccgcacagcgaccaatctcgccccttgccacgcgacaactgtcaaccacatccagcaaaccaccacaacggcagaatcccgacccaactccccaaaacaattccctcgccacccaaaaacaaggacaacgcatcatcaccgaaacgccccgcctccccaccctcctgccactgcatcacaacgtgctcctccacgaccgccttccgcaactccaccggcctccagcgcacgaacctgacccattacaacaagctcggcagccctgccccctgccacgcctttgccaacacaccctcccgccggccaaaaccccacagaccacttgccagcgcgattctcccattccctgttggcccctccctctaccgttaccctggtgcccgttttccctgtggctgccgctcctgcccaagccttgaggcccttcgcacacccgttggcccccacgttctcggaaccccggacatctcggagccatccaacgccgcgcacgcgacgccacggaacatggcgaccatctgagacgacccaaacgggaacaccccagaatcggccaacaaccagccccccctcgaaacgcgagacaaaggaacgcgccataacccacatagggcacacaaaaagagccccttagcctctgcgaacaaccccaatcgcaagcactaacactaagacgaaaactggaaaaacaacctccccatgggcagcacctaccgacacggaaccagccgggcaaacagctgggaacaacaaaccacaaaaatggcacaagggaacaaaccgacaacggacccagaaacgccaacagccaaagccacaatgcaacacgtgagccacccacaagaaaaacacctatccgtgcgcaaacgttggggacggaacacactggcaacggcaaagcgcaaagccccaccaagaggggaaagc

SEQ ID NO: 178667 - DNA, 374 bp, Homo Sapiens
acatggtttattgtgtgttgggttttttgtgttgggaattgaaaatagttttatagcagaaaactgagaaacaagaaaacattaaaattgcaccacagaatctgaggtttcaaagatctgtttgaaatatcttcatttcattaatttgaaatttggggcaggatatgatcttaagagtctaaacattcaagagacgagggcaagaaagccagtcacatgtagaataccaagtccaaggcacgcgtcctgcggtcaggacagtgttctagggtgtgaactcacttaccgtgggggcctatgaaggcagggagtgtgtgggccttcgaaggttcgaatgtgttcatgtgggggtgtagcgtgtgaatcggacatgg

SEQ ID NO: 178668 - DNA, 472 bp, Homo Sapiens
gggatgaggaatttaaatccaccttcatcaaactgggaggtggaaaagttgagctgtgacctgaagatctatggtttggaacaagagctggaactgatgaggaaagaatgtagcgatctcaaaatagaactacagaaagccaaacaaacggatccatatcaggaagacaatctgaagagcagagatctccaaaaactaagcatttcaagagtatctgtagcacagcctggagtgcagtggcgcaatcatgggatagcatgaattttgaggactgttccctcttcgcataagaatagaagtagccatcagagttcatatactttttcaaccctttttcctcaaatacgtatcatttttacttaagtaacttcaattctgtgttttaagctatctaataattgttgtttctactatgttaagatagcctctctacattgttaccctccatccaataaaaaatactgatctaaaa

SEQ ID NO: 178669 - DNA, 505 bp, Homo Sapiens
  misc_feature (204)..(204): n is a, c, g, or t
gggggctgccgtgagcacccaccctggttctccaggcccctctgtccaaaggcagggcctgaacctcgggctcctccctggaccagtgacagcattggggaaaaaaacactgggggtcttcaaaccagccagcaaggggccgtgccagtgcccagagagcaggtcagacaacaggcaaccctgaggcagctggctccctctctnctgccctgcagggcttgccgcagggcgtgaggctccccagccacagccccctcttacttgccttaaaactggagagaggaatctagtatttgcacttagcaaaatatttaaaaactgaaaaaaatgtgcatgatctgtcactttgtataaaaacaagaaacgattagttcattaaactttttctttaccttctggtagtaaaaatagataaaataattccgtttcaactactgtgtgtaaaaagcctgtatcatatgtaactgggacttttgtaaataaatgtttgtgcgctctacaaaaa

SEQ ID NO: 178670 - DNA, 414 bp, Homo Sapiens
  misc_feature (31)..(31): n is a, c, g, or t
cccaaggccaacgaaaagggaaattccaagnactaagcccaggcaccgggcaagaaagctgggccttccgcctcccttggaatggggtcaaagaagcccaggccctggcaaattttggaagtgtccctggctaccagctctcaccctacacccacgcaccccgcccacacactatgctctctcaagaatgtaatttattggggcccccccagctgctttcctcacctgcccctgccctaccttacacccccagcttgacttctttccagtccacgtgtgtatataatgatatctatatttttgcccaggtctgggtattgctcctgcccagaccctgacatccctttccactgtgtgtgtgaccatgctgggggagggggactctgcttggaattaaaaggttgcattgggtcc

SEQ ID NO: 178671 - DNA, 352 bp, Homo Sapiens
  misc_feature (62)..(62): n is a, c, g, or t
  misc_feature (80)..(80): n is a, c, g, or t
  misc_feature (191)..(191): n is a, c, g, or t
  misc_feature (202)..(235): n is a, c, g, or t
aaggcacgcaaacgcaaaacatcttacctctcatgcgtgttttacccttttgatgttcagantggctcactggctgggantccttaccctcggggaaagggggaggttggttccttggggggccaaagaaggcagggaatgccctggagggtaactggggggccaccatgaccccttctctctccagaaanagctgcttctnnnnnnnnnnnnnnnnnnnnnnnnnnnnnnnnnnaggtggcccttgtttacagtgaggactcggccactgtgtctctgtttcctgaaatataaactgtagcgaccccagactgtagagatttttatgtgtttggatacatctgctgtgtgg

SEQ ID NO: 178672 - DNA, 428 bp, Homo Sapiens
  misc_feature (13)..(13): n is a, c, g, or t
ggtgtgtgcctanggtccccaatgccgggacttgaggaagagctctgttaatatgtttcccaattcccctttatccaaagataacccaaaccttatggcccttataacaatggaggcactggctgcctcttaattttcaatcatggacctaaagaagtactctgaagggtctcaacaatgcccaggtggggacagatatactcagagattatcccaggtctgcctcccagcgagccctggagtacaccagaccctcctagagaaatctgttataatttaacaacccacttatccaccttaaaactgaggaaagtcgtctttacatctaattttattcttgtgtgttataacttaaacctatttctatttttgtttgttattgcccttataagggtgtccatctccaagttcaataaactaattcattt

SEQ ID NO: 178673 - DNA, 408 bp, Homo Sapiens
gaaaataaaataatatatgccagggcatttgaacagttcattaaccctataagaattaaattgagtttaagagagaatggtggtgttgagctgattattaacagttactgaaatcaaatatttatttgttacattattccatttgtattttaggtttccttttacattctttttatatgcattctgacattacatattttttaagactatggaaataatttaaagatttaagctctggtggatgattatctgctaagtaagtctgaaaatgtaatattttgataatactgtaatatacctgtcacacaaatgcttttctaatgttttaaccttgagtattgcagttgctgctttgtacagaggttactgcaataaaggaagtggattcattaaacctatttaatgtcc

SEQ ID NO: 178674 - DNA, 858 bp, Homo Sapiens; identical to SEQ ID NO: 8140
  misc_feature (705)..(705): n is a, c, g, or t
  misc_feature (825)..(825): n is a, c, g, or t

SEQ ID NO: 178675 - DNA, 266 bp, Homo Sapiens
  misc_feature (15)..(15): n is a, c, g, or t
  misc_feature (41)..(41): n is a, c, g, or t
  misc_feature (75)..(75): n is a, c, g, or t
  misc_feature (91)..(91): n is a, c, g, or t
  misc_feature (106)..(106): n is a, c, g, or t
  misc_feature (118)..(118): n is a, c, g, or t
  misc_feature (130)..(130): n is a, c, g, or t
tggttaaaagatggnaaccaattttttgagagggccctaantttaaacaagcccccctttagaccttttgggtcnccgtagttgctgaaancctgagtacctgcanccctacgggaanaggaagttcacnagcctgcggggtgaatgaaaccccatgtgtgaactgcacagagcaattcatagaaaatgcatagaaatttgtaacactttggtcacatctgtctcctagatggtcattgaatttgtttaaagatggatgaaaggcc

SEQ ID NO: 178676 - DNA, 1045 bp, Homo Sapiens
  misc_feature (167)..(167): n is a, c, g, or t
  misc_feature (207)..(207): n is a, c, g, or t
  misc_feature (592)..(603): n is a, c, g, or t
  misc_feature (758)..(810): n is a, c, g, or t
gggaggttgtgcggtcggcgtcggttggtcttccgtcggcgcacaggggatggctatgcgggggaaagggcggagtagagtggcgtagtgggtggctgtggggtcgaggaggcgcgtcgaaactcaccggcgccctcaggtgcgaaagaataatcaagtgcggaggnccgggttgtgttaggtggataatgaatgaggtggatatangggcgcgtttcatgaagtgagccattgacgcgctggggtgttcagggtgcataattaattttaacaaagcgcggtgttggggcgcgccttccggttttggcggggcgggtcacggccacgcatggtcgaccgcggacgcctccccctcgtttttttaagttttggtcttttcggcggcggcggcgtgctggtattcacccacgcgcggccgggggggtgttgttgggtgttcacgataaatagccgcccggccccgtgtcgttttcgagtccgctgcacttgtcccttttggtttacccgccgggggacgcgcccgtggtttataggggttttccggggccggcgccgcgccgcccaaggagcggttttgggggaaaatgtgttnnnnnnnnnnnnagggcgcggcacaccgtctcgcttgggggcaagtaaggggcggggggaagatcatggtggaggcgttcacagcccctcggttgcgcgcgggtgttttgttgtttttggggttttctggcggtatttgtgtggcattgtcgctttggcgttcaggnnnnnnnnnnnnnnnnnnnnnnnnnnnnnnnnnnnnnnnnnnnnnnnnnnnnncatgaggggggaaaaaagaatcctttatgatagtgaaaatatactttattttttaatacaatagctgccagcaatatactggtgctgatgttccaaagataaaagaaaatacatgcattctataataagctttcatttgcctgttcaagaaattataaagaaaatactccaattctgttcaacattacggcttgaggagttgaaatttttccatgataaaaatatactttgtgcc

SEQ ID NO: 178677 - DNA, 474 bp, Homo Sapiens
ccccggtccctctgcaaacaagcaaaaacccaatcaaaccactgaaaccctccctcatggccacccaaagtgaaacagggccaggccaggtagtaaggccccagctggggaaaatgggaaaagttccctgtcccccctcccacatatcccctacatgaaatatgggaaagttgcctgcctattgattcagggtctgtcttggaggcagaggacccttggtggatagttggtcagtgccctggaaaacctgtcccagtttatcaggaacgcaggccctggggagcccccagtggcggggacagggccagatttcatgttgaccctggggatgctgtgaatttctcctgcaggagagacatcattgaattttttcaactgtatcagtagcacagtatttttgtatgaaaagtgggagacttctgaacagtaattcatttaattgcaaagcattttgaaataaaaaaaatcaaactt

SEQ ID NO: 178678 - DNA, 878 bp, Homo Sapiens
  misc_feature (624)..(624): n is a, c, g, or t
  misc_feature (626)..(626): n is a, c, g, or t
  misc_feature (628)..(628): n is a, c, g, or t
  misc_feature (630)..(694): n is a, c, g, or t
  misc_feature (699)..(699): n is a, c, g, or t
atcgccatcgtctgcaacggtctcgtgggcttcttgctgctgctgctctgggtcatcctctgctgggcctgccattctcgctctgccgacgttgactctctctctgaatccagtcccaactccagccctggcccctgtcctgagaaggccccaccaccccagaagcccagccatgaaggcagctacctgctgcagccctgaaggcccctggcctagcctggagcccaggacctaagtccacctcacctagagcctggaattaggatcccagagttcagccagcctggggtccagaactcaagagtccgcctgcttggagctggacccagcggcccagagtctagccagcttggctccaataggagctcagtggccctaaggagatgggcctggggtgggggcttatgagttggtgctagagccaggccatctggactatgctccatcccaagggccaagggtcaggggccgggtccactctttccctaggctgagcacctctaggccctctaggttggggaagcaaactggaacccatggcaataataggagggtgtccaggctgggcccctcccctggtcctcccagtgtttgctggataataaatggaactatggctctacngngnannnnnnnnnnnnnnnnnnnnnnnnnnnnnnnnnnnnnnnnnnnnnnnnnnnnnnnnnnnnnnnnntacgntttccttggtcggcccgccctccgccctcaaaaaaacttttcaaaaaaccatttccttttggggcgcggcggggccccccgttaagggaaaaggggaaactggggggcccaaaaacggggtttcccgcaagggaaaactccccgtgggcccaagggaactaaaggggccttgggaaatt

SEQ ID NO: 178679 - DNA, 154 bp, Homo Sapiens; identical to SEQ ID NO: 8277

SEQ ID NO: 178680 - DNA, 657 bp, Homo Sapiens
  misc_feature (210)..(210): n is a, c, g, or t
gaccacgcgtccggccaggatggtctcaatctcgacctcggtgatccgcccaccttggctcccaaagtgtgggattacaggcgtgactcaccatgcccagccacttagttttttcttattcccacctttctatcccatagaacactcttttttatcttccctgaaccatattgatgagataaatagggctgggggctgggccccgctggntcactcaacagagtatttcccttgggccgagatgggaagttttgtcccaatagatgagctgctgagcatcaacaagggtgacatttttctgctgcccatttgtgtcctggagacggtggtaccctgaaggcagaggccagctgccgcaagacagcaatgacagtccacctgccgacctgattcctgcatcatggaataaccacatggctaccttctatcctctgttcccaaatggtggtggcacttatcctgaagtcgtcaatgatttccctttgaaactactttattttactaatttaaactattttgtactgatgtagccctgaggtagttcatgaaaatgctgtgcactcattccatggaataaatgttggaaagctgatcttttctgatatacaaatgttgaagtgataaacacaaaatagccaaaaacaaaaacaagggggg

SEQ ID NO: 178681 - DNA, 353 bp, Homo Sapiens
  misc_feature (35)..(35): n is a, c, g, or t
catctgccccgcccaaccctgccctgcccagccanaccctgctctgccccatctgggggtgccctgctcagggatgggctggcagggctgtacccagcctccctggtaaacagagactcaagaaacctctggggtcctgttttctggtcgtgtgatcccaggggtgcacatgggccccttgggtgtctgaacagaagggcatgggagggagggctgcacccctgcagtcttactctgctggtgtagcgggcagctgcccactcccaccccaccctgcaccgcgggctcctgagtcggcagattaagcattttataaattgtattgtaaatacatgttttaaacttggtcgatg

SEQ ID NO: 178682 - DNA, 805 bp, Homo Sapiens
ggggctcgtccgcccgccagtcctctcaacgcgcgcttggccgcccgacgacgcgggagccgcacgcgccggacgaggctcgctgcgctccctgttgcccagcgcgggcccgttgaggcggagccctcagttcccggccacgacacggtctgggccgccgaatctccggccgaagagcggcggcggcagcggcgggaaaaaaatgaagaatgaaattgctgccgttgtcttctttttcacaaggctagttcgaaaacatgataagttgaaaaaagaggcagttgagaggtttgctgagaaattgaccctaatacttcaagaaaaatataaaaatcactggtatccagaaaaaccatcgaaaggacaggcctacagatgtattcgtgtcaataaatttcagagagttgatcctgatgtcctgaaagcctgtgaaaacagctgcatcttgtatagtgacctgggcttgccaaaggagctcactctctgggtggacccatgtgaggtgtgctgtcggtatggagagaaaacaatgcattcattgttgccagctttgaaaataaagatgagaacaaggatgagatctccaggaaagttaccagggcccttggataaggttacctcctgattaatcattcacggatccctctttccttcagatggaaaaaaaccagttaaaggaaaatgggaaatggaaaaccccagcttcggggggaactgccacgcccgccaaggtcccctgggggtaacccagtaattttcccagaaaactttaattaatttttccccacccctttcgtttcccaaa

SEQ ID NO: 178683 - DNA, 291 bp, Homo Sapiens
cctttccagctctagggtcttacgggtgtcggtccacagaaccacggtttttaggttgtgtgtccggggctatgggaacctgtcccccatgatggatcttggtagagacacttccctctgtcatcgtgcccaggaggatgctgcaggtgactacctgcagccctgttctcattcatttggatgccctccagaaatctggggagccatacatcctttagagccttttttgctccttatcaagttggcaaggcttggccaattcctgttcaaggctgcattaaaggcatgttc

SEQ ID NO: 178684 - DNA, 418 bp, Homo Sapiens
agcacccttccctccctcccagcgaaagtcccacgcctcacccccggtgtgtggccccgcccacccactgatcccagacggcggcctcacccctaacccggagaagctgggttatacccccaggacatgattttcacctactaacaaacacctcccatgtgctcagcaaatttgcatgtcccttttcatctgtttcagagtaagttcaatttcaccacggtaaactgggatgttttcaaaagtgccttgccatgtaccttcgcgcacacactggttctcctcttttgggtgtgggcctaacaaaaagggctcaaggggctggagactggctgctggggcctccttgcttggaggctggcaagagctccatttcagtatctttctccgtggttttgtgaaataaactcaagtacaaagc

SEQ ID NO: 178685 - DNA, 391 bp, Homo Sapiens
  misc_feature (14)..(14): n is a, c, g, or t
  misc_feature (57)..(57): n is a, c, g, or t
  misc_feature (66)..(66): n is a, c, g, or t
ctctcactcttcanactcctccagaatttgttctcagcattttcctttctctgtgancattggcanccctgggcgtttcttgccctctactgactactgattggattttacctatggctttctgcaacttgctactctctccctctccatcccatctttgcagcctcatagggtgggatacagcagctttttttgcagttatccacactcacatttcagagtcctgactctcaaggaaccactggtttttgggatagaacttgggccagggctaggaacacaggctccacggtgacatgtcatttgattgtaaattaagtgctctgattagtaagaactaagcagggggccacatgctctcaatggagacaataaagtgttgtctttttac

SEQ ID NO: 178686 - DNA, 374 bp, Homo Sapiens
gggggctctgagagctgtgctccaggccaggggttacacctgccctccgtggtccctccctgggctccaggggcctctggtgcggttccgggaagaagccacaccccagaggtgacagctgagcccctgccacaccccagcctctgacttgctgtgttgtccagaggtgaggctgggccctccctggtctccagcttaaacaggagtgaactccctctgtccccagggcctcccttctgggccccctacagcccaccctacccctcctccatgggccctgcaggaggggagacccaccttgaagtgggggatcagtagaggcttgcactgcctttggggctggagggagaacgtgggttccaccaggccttctg

SEQ ID NO: 178687 - DNA, 351 bp, Homo Sapiens
gggagaagcctggaggaggagcttgagtccagccactgtctgggtactgccagccatcgggcccaggtctctggggttgtcttaccgcagtgagtaccacgcggtactacagagaccggctgcccgtgtgcccggcaggtggagccgcccgcatcagcggcctcggggaatggaagcggagaacgcgggcagctattcccttcagcaagctcaagctttttatacgtttccatttcaacaactgatggctcaagctcctaatatggcagttgtgaatgaacagcaaatgccagaagaagttccagccccagcccctgctcaggaaccagtgcaagaggctccaaaaggaag

SEQ ID NO: 178688 - DNA, 926 bp, Homo Sapiens
ggggcggtttgaaagatcggcgcgcaccgcaggagcaacggttggtcctgcggctgtgatgtcggtgttgaggcccctggacaagctgcccggcctgaacacggccaccatcttgctggtgggcacggaggatgctcttctgcagcagctggcggactcgatgctcaaagaggactgcgcctccgagctgaaggtccacttggcaaagtccctccctttgccctccagtgtgaatcggccccgaattgacctgatcgtgtttgtggttaatcttcacagcaaatacagtctccagaacacagaggagtccctgcgccatgtggatgccagcttcttcttggggaaggtgtgtttcctcgccacaggtgctgggcgggagagccactgcagcattcaccggcacaccgtggtgaagctggcccacacctatcaaagccccctgctctactgtgacctggaggtggaaggctttagggccaccatggcgcagcgcctggtgcgcgtgctgcagatctgtgctggccacgtgcccggtgtctcagctctgaacctgctgtccctgctgagaagctctgagggcccctccctggaggacctgtgagggtggctggcccctgggctgccccttctcatggcttcgtgctgactccataaacattctctgttgaggatgtccagtcagggcttgacaggcccaggctcagcccgccgtggctgggaaggttccctgcagtgccagtgctgcagcagggagagctgggcagaagcaagcgagggggcccagctggcgagactgtagccccctcccaatcccacaatcactcttgcagagcctgtgtctttaagcagctggcgtgttacatctccatttaaggtttcctttgaacaaaaggtctgtggctaaaaaaagttttaaaatctaaaaa

SEQ ID NO: 178689 - DNA, 264 bp, Homo Sapiens
gggggggccgaagctggcgcagcgcgcgactttttgaaagccaggagggttcgaattgcaacggcagctgccgggcgtatgtgttggtgctagaggcagctgcagggtctcgctgggggccgctcgggaccaattttgaagaggtacttggccacgacttattttcacctccgacctttccttccaggcggtgagactctggactgagagtggctttcacaatggaagggatcagtaatttcaagacaccaagcaaattatcag

SEQ ID NO: 178690 - DNA, 1273 bp, Homo Sapiens
gacccacgcgtcgcggacgcgtgggtcgacccacgcgtcgggtgctagaggcagctgcagggtctcgctgggggccgctcgggaccaattttgaagaggtacttggccacgacttattttcacctccgacctttccttccaggcggtgagactctggactgagagtggctttcacaatggaagggatcagtaatttcaagacaccaagcaaattatcagaaaaaaagaaatctgtattatgttcaactccaactataaatatcccggcctctccgtttatgcagaagcttggctttggtactggggtaaatgtgtacctaatgaaaagatctccaagaggtttgtctcattctccttgggctgtaaaaaagattaatcctatatgtaatgatcattatcgaagtgtgtatcaaaagagactaatggatgaagctaagattttgaaaagccttcatcatccaaacattgtaggttatcgtgcttttactgaagccaatgatggcagtctgtgtcttgctatggaatatggaggtgaaaagtctctaaatgacttaatagaagaacgatataaagccagccaagatccttttccagcagccataattttaaaagttgctttgaatatggcaagagggttaaagtatctgcaccaagaaaagaaactgcttcatggagacataaagtcttcaaatgttgtaattaaaggcgattttgaaacaattaaaatctgtgatgtaggagtctctctaccactggatgaaaatatgactgtgactgaccctgaggcttgttacattggcacagagccatggaaacccaaagaagctgtggaggagaatggtgttattactgacaaggcagacatatttgcctttggccttactttgtgggaaatgatgactttatcgattccacacattaatctttcaaatgatgatgatgatgaagataaaacttttgatgaaagtgattttgatgatgaagcatactatgcagccttgggaactaggccacctattaatatggaagaactggatgaatcataccagaaagtaattgaactcttctctgtatgcactaatgaagaccctaaagatcgtccttctgctgcacacattgttgaagctctggaaacagatgtctagtgatcatctcagctgaagtgtggcttgcgtaaataactgtttattccaaaatatttacatagttactatcagtagttattagactctaaaattggcatatttgaggaccataggttctgttacatatg

SEQ ID NO: 178691 - DNA, 832 bp, Homo Sapiens; identical to SEQ ID NO: 8392

SEQ ID NO: 178692 - DNA, 208 bp, Homo Sapiens
ggtattctaaagaattaaatgctaacttaacagcactggctttctggctggtcaactatatgaaaccttgttcattcctccgagtactgtaatgttcacacttgtacaatcttccctgtcatgactttaagttctacttttcattaaccatggcctgatattagttcttagagcttcttgtggcaaaaataaaatgatttaattctga

SEQ ID NO: 178693 - DNA, 235 bp, Homo Sapiens
  misc_feature (27)..(27): n is a, c, g, or t
tcagccacaaagccccccagctcccanaccgcgtcccagctccccccttttgtaagtatgtgaaaaggaaaaaatgcaaacgttggagtttgggctggagctcctccctccagctgcgacttttaactatgtaataatgtacagaggaagctgttggtgttctaagactctgtgtggctgtgcaatttctgtacatttgcaattagaaatattaaagatttatttagctatttgg

SEQ ID NO: 178694 - DNA, 396 bp, Homo Sapiens
ggggccgcgcgggccgggagctgggtgggctgggggacaggcgcgcccgcgccgcccgctccagctgggctagtgctgcacattccggccagcccctcctcaagaccccattcccaagccccttctcagctccctcgggccggcagagcggctctgatcagtaaaatgctgttgaaggcccacgggcatgactgcacccctcactaattggtcattggtttggggaggacaccactgtcccagtggaaccttgagcacaccttgtgagccctcctcttcctctccggacctgtgccaaactgtgagtggcacagagcaaggactgccatcctgcagccaccagaaccttccacatgaaatgaaaggctcaccacttcataggctttaaggaaattc

SEQ ID NO: 178695 - DNA, 432 bp, Homo Sapiens
  misc_feature (250)..(259): n is a, c, g, or t
  misc_feature (353)..(353): n is a, c, g, or t
  misc_feature (373)..(373): n is a, c, g, or t
  misc_feature (382)..(382): n is a, c, g, or t
  misc_feature (389)..(389): n is a, c, g, or t
aatgttcaaaacacatttatttactaaatcacctgacactgacatctaagataatttcaacaaataaaatgtttaagaaaaattgtggtatacatcatatttgtctctagaaaaaagtcttatttacaagttgaggaacaaagatatttcttttaattaaaaacacattaattatgcagtgctaccataataaaagtgaatctcccaagaacagctcaagtatcttgtgaagtattaagaggtgaactgnnnnnnnnnncaatcatattcagaaaatcttatatgtttactcgcttgttgagtctttgccagtctaatcttttcagctttgggtgattaacttttcagtgccncttttcttttcccgagggcnggattaagntttgccngtctatccaaccaaaatcttctgcccatacccttggtcggggt

SEQ ID NO: 178696 - DNA, 406 bp, Homo Sapiens
ggggagccgggccagcacccgagcttgccttgcccccgtgcgggccccgcgacctaggcgatggaagctccagcactggcagcgtgggaagtccggatcagttgcccctggcctgttcccccgatgattgaaggcactgcttcctccacgccgacgcccgcccggattgctccccgagccccgggaccgctgtggacctcgggacctggacgccgtcctggctgcgcaggaggggccgctggcatggactaagaaatcctgacaccaagaagggcccctcgctcttgctggcagggcagcagggggactgaaggctggagcggagggacttgctgggggttggattgggggtaataaacccggacggaagcggaaaaccccaaacccccaaccagaccaaacatgt

SEQ ID NO: 178697 - DNA, 502 bp, Homo Sapiens
ggctgcgacagccgcgttaacagcgactacgagacggacggcgagggcggcgcgtacacggatggcgagggctacacagacggcgagggggggccctacacggatgtggatgatgagcccccggctccagccctggcccggtccctcggagcccgtgcaggcagataagtccccaaagcccgagggatcgtgggaaaatctcggctcatcagggggcccccaggtggacagccgcccacccccagggacagtggcgacaggacagcatgcgaacctatgaacgggaagccctgaagaaaaagtttacgcgagtccatgatgcggagtcctccgatgaagacggctatgactggggtccggccactgacctgtgacctctcgcaggctgccagctggtccgtcctccttctccctccctggggctgggactcagtttcccatacagaacccacaaccttacctccctccgcctggtctttaataaacaaagtattttcgcaaa

SEQ ID NO: 178698 - DNA, 449 bp, Homo Sapiens
  misc_feature (35)..(35): n is a, c, g, or t
accccccaaagggcctcatgtgggcccccaaatgncaatgcccaccattgttgaatgtgactcccagagcccagttattaggaagagcaagctcacccacagaggagtggaacctgaggcccccccagatgttgcctccggtgtcccaagcccacagcggtctggctgttgggaagatggcccaggaatggactcataccattggcacattaggctaaccctggttttatgtgaagtcagcaattaagtgttcccactagaactgacctaagccactgattaatatttaatgagggaaggtaggggagaatctagccattttataatgccagaaatctatatatgttatctgatgccatttttctgaagtagcctcacatgtggtccccctgcagttcagcagttaacagatgacttttttagtgtaataaaaaaatttatcatctatg

SEQ ID NO: 178699 - DNA, 231 bp, Homo Sapiens
tcagggatatagttcatatcccacttctttgtttacaccgatgtccctgaatatcagcctgtagctaatggacttgggatttctggtctaagtgggccccctggggatggggtggtacactgagcttctgagcctcattgtagagtagaaaggtactggggcctgtgtggtaagccttgttgaaatgctctggtattcagtattgccttaataaacttcacccacaactgc

SEQ ID NO: 178700 - DNA, 1005 bp, Homo Sapiens
  misc_feature (517)..(573): n is a, c, g, or t
ggttagacaaatgctacattaatgtttgggtggtcagattctactttgaatctgaagtttgcagatatgcctatagatttttggagtttaccactttcttattctgtatcattaatgtaatattttaaattactatatatgctaccatttttctggatttagtaagaaatttgcagttttggttcgatgtaacaagggttttaatgtaatttatgttagattttgcatttttttcattactgttatattttaacctgactgactgatctaattgtattagtattgggaataatcatgtgaaatgttttgagacagagtactatatttgcgaatataactttatggctctttttcacttagaacctttctgtgtggaaaactaacaaaattgctttctgctgccataatctggcattcctcgttccattaaacccctaccctccctcgccgcactaaaacccacccttatttaacaactccttattcctttaaacatggccccgtgaacccggcgctnnnnnnnnnnnnnnnnnnnnnnnnnnnnnnnnnnnnnnnnnnnnnnnnnnnnnnnnngaaaaaggctttttcctaagaaaaccactttccgttttcggcctcggccgtgtggtcccccacagcaccagggtacgaaagcgccaccactttcgccccccgcccgctttggtcccgcgcctaaagggtaactaccccgtggcgccgcccgaattaatagggcgactgtggccaactccccctatcttcaccagccacaaaatcgccccgggcggtgtgccccccgtattcccgcctcccccgataaacaccgccgcgaatgggtgcgccccccaagttcctcattacccgggaattctacctcaaccccggagctccctcacccgtcggctcttgtccgccgaccttttcccgccgtcccgtgcgccacattaccgcgcgagccctatctggcagagcccctaaaagaacccgcccactacaccgccgacg

SEQ ID NO: 178701 - DNA, 1682 bp, Homo Sapiens
  misc_feature (680)..(680): n is a, c, g, or t
  misc_feature (683)..(684): n is a, c, g, or t
  misc_feature (913)..(966): n is a, c, g, or t
  misc_feature (1164)..(1164): n is a, c, g, or t
  misc_feature (1257)..(1257): n is a, c, g, or t
  misc_feature (1322)..(1322): n is a, c, g, or t
  misc_feature (1403)..(1403): n is a, c, g, or t
  misc_feature (1439)..(1439): n is a, c, g, or t
  misc_feature (1487)..(1487): n is a, c, g, or t
  misc_feature (1489)..(1489): n is a, c, g, or t
  misc_feature (1602)..(1602): n is a, c, g, or t
  misc_feature (1613)..(1613): n is a, c, g, or t
ggggaagagggaagtcgtggtggtcgcgagagagccggaaagatggtggttaccagatctgcacgggctaaggccagcatccaagccgcgtcggctgaaagttccgggcaaaagagttttgctgctaatgggattcaagcgcatccagaaagtagtactggatctgatgcccgaactactgctgaatcacagaccactgggaagcaaagtttaatccctagaactcctaaagctagaaagaggaagagcagaactacaggctcactaccaaaggggactgaaccatctacggatggagagacctctgaggcagagtcaaattattctgtgtctgagcaccatgataccattttaagggtaactaggagaaggcagatcttaattgcatgctccccagtgtccagtgttaggaaaaagccgaaagtaactccaacaaaggagtcttacactgaagaaatagtgtctgaagcagaatctcatgtttcaggtatttctagaattgtgcttcccacagaaaaaactacaggagccagaagaagtaaggctaaatctctgacagatccaagccaagaatctcatacagaagctatatctgatgctgagacatcaagctcagacatttcattctctggaattgccactagaagaacccaggagtatgcagaggaaaattaaaggcnacnnaaaaccttggaaaaacccggcccccagacccccaaaaaggacgcccaccacccacggaagcgcgacagcacaacgaaggagcccccgaccacccccgcaccgcgccccagacgcacacgaccgcacgacaacaacaaccggacccgcgaccccccccaacaccggccccgcaaggccgcgcgcacccgcgaacaacgccgcgcagcccgcgcagcccacacaacgccgnnnnnnnnnnnnnnnnnnnnnnnnnnnnnnnnnnnnnnnnnnnnnnnnnnnnnngcgaacgacaacgacccgggaacagccaccgacccgggagacaccaggagaaccgcacgcccagcgcgggcgaccccgcagccacaccgaaaccgacgagcagccaaaaaaccccgcccgaccacacggacccgacgcacacccccgcgaccacggaaaaaaaccgcaacgcaccacagaagacggacaacacacccncccacccaagaccaccaacgccgcccgaggccacaacagaccgaccaccgcacacggcgccatatacgcacgcccgaagacgcacaagaaccngcgcagccaaacatgacacccgcacaacgagcgcccgacacccgagatccggcagacacgacacncgacgggtgacaccgcagcagcatacccaccgacgccacaccgaccgcccggaccggacgtagcagcccagcgaaaccccnctcccaacgagccctcctcccacgataagacaaacngaccgccagcgaatgcaccaccaacgccttgcgacccaagaatgcacngncacacgcgcggacacgaccgcgcgccgacacaccgcccccatgcgccgcacataataaaaatcaaacgcgcccgaaccagagaccacccacggacggcacatggacatccacngcgccacgccncaccgcccaccgcgcccagcccgggcaccgcgacccaatcattcccccgcacggcgccgcacaaccacc

SEQ ID NO: 178702 - DNA, 435 bp, Homo Sapiens
  misc_feature (382)..(382): n is a, c, g, or t
  misc_feature (411)..(411): n is a, c, g, or t
agaatgcactttaacaaacatagagctgcatgggcaattcaaacaaatctgtgaagtgcagtacccattcagaaatcacacttcctgaaaaccgttcaaaagcagagtccagacgggctgttgatctcactgcctgtaggttgaagctcagattctgatcaattttgagaggagcagggctgcttcaaaagagcaatgtgaatacagtcagaagcttcagactggtctgtaaaaatggcgggtcccgtatttaccactaactagcaaaactgacagaaaaactcacagaggaaaaaatgtaaggaatccttcctgctggtgtgcacttccttacaataggacttttgcaaagggagttttacagtctattatttaaaaaaanttgtatgtttgttaacaattaaagtatgncggaaaagtggaatggacaaaaaa

SEQ ID NO: 178703 - DNA, 444 bp, Homo Sapiens
  misc_feature (163)..(163): n is a, c, g, or t
  misc_feature (384)..(384): n is a, c, g, or t
  misc_feature (392)..(392): n is a, c, g, or t
  misc_feature (400)..(400): n is a, c, g, or t
  misc_feature (426)..(426): n is a, c, g, or t
aattcggcacgatgacagggcagaaaggtctctctcctcctgggcgagccgttcttcactaccagcctgctgccgtggacaacctctacttctggtacgtgcggaccgctgtggaccagcacctggggccaggtccatggtgatgccccaggcagcctcgctnaacgctgtggttgtggagttcagggacctgtggcggatccggagcccctgtggtgactgcgaaggctttcgacgtgcacatcatggacgacatgattaagcgtgccctgggacttcagggagagcagggaagctgagccccacccgctgtggggagtacccattgccgcagccttttccgagcctgggaagattcctgaacctttgatttccagaagccgntgcccttnaagccctnttttgccgagggatttttgggatttnagaaggcccggaagagca

SEQ ID NO: 178704 - DNA, 368 bp, Homo Sapiens
gataattctccagaaccaaatgacccagaagagccccaggaggtgtccagcacaccttcagacaagaaaggaaagaaaagaaaaagatgtatctggtcaactccaaaaaggagacataagaaaaaaagcctcccaagagagatcattgatggcacttcagaaatgaatgaaggaaagaggtcccagaagacgcctagtacaccacgaagggttcacacaaggggcagcctcacctgggcatggcatccaagagaagctccaagtggtggataaggtgactcaaaggaaagacgactcaacctgggaactcagaggtcatgatgagggtccaaaaggcaagaactaaatgtgcccgaaagtccagatcg

SEQ ID NO: 178705 - DNA, 2060 bp, Homo Sapiens
  misc_feature (1230)..(1345): n is a, c, g, or t
  misc_feature (1869)..(1869): n is a, c, g, or t
ggggtggtcctgccgcctggtctcacctcgccatggttcgtctgcctctgcagtgcgtcctctggggctgcttgctgaccgctgtccatccagaaccacccactgcatgcagagaaaaacagtacctaataaacagtcagtgctgttctttgtgccagccaggacagaaactggtgagtgactgcacagagttcactgaaacggaatgccttccttgcggtgaaagcgaattcctagacacctggaacagagagacacactgccaccagcacaaatactgcgaccccaacctagggcttcgggtccagcagaagggcacctcagaaacagacaccatctgcacctgtgaagaaggctggcactgtacgagtgaggcctgtgagagctgtgtcctgcaccgctcatgctcgcccggcttttggggtcaagcagattgctacaggggtttctgataccatctgcgagccctgcccagtcggcttcttctccaatgtgtcatctgctttcgaaaaatgtcaccccttggacaagctgtgagaccaaagacctggttgtgcaacaggcaggcacaaacaagactgatgttgtctgtggtccccaggatcggctgagagccctggtggtgatccccatcatcttcgggatcctgtttgccatcctcttggtgctggtctttatcaaaaaggtggccaagaagccaaccaataaggccccccaccccaagcaggaaccccaggagatcaattttcccgacgatcttcctggctccaacactgctgctccagtgcaggagactttacatggatgccaaccggtcacccaggaggatggcaaagagagtcgcatctcagtgcaggagagacagtgaggctgcacccacccaggagtgtggccacgtgggcaaacaggcagttggccagagagccctggtgctgctgctgctgtggcgtgagggtgaggggctggcactgactgggcatagctccccgcttctgcctgcacccctgcagtttgagacaggagacctggcactggatgcagaaacagttcaccttgaagaacctctcacttcaccctggagcccatccagtctcccaacttgtattaaagacagaggcagaagtttggtggtggtggtgttggggtatggtttagtaatatccaccagaccttccgatccagcagtttggtgcccagagaggcatcatggtggcttccctgcgcccagcnnnnnnnnnnnnnnnnnnnnnnnnnnnnnnnnnnnnnnnnnnnnnnnnnnnnnnnnnnnnnnnnnnnnnnnnnnnnnnnnnnnnnnnnnnnnnnnnnnnnnnnnnnnnnnnnnnnncacacgggacgtacaacagacgagacgggtaaaaaccctgggcgggccgccttgggccccctcgcaaaaagccttttcaaaaaccccttcagttctgggcgccgccggggccccaagttagcgcgacaactgtggaaaacactgggtccacttaagtgttgtctatccccttaaagaaaaaaaccccgtgggagaccaggtgggacattgaatgggggcttttcgggcaattgccctttcccacccccatctacttaagcacctaaaacgcccacccccctctgtggcggcggggcccccacaccctcccgcgaaccgcgcgtgttcttatgcgcaacgccccccgatcttcccccgccataacatcacgtgaaacgcatgtcatcttacacaccaaacccccctctattaaaactcgcggcagacacgctttaatgccgcacaccaccggggcgagcggccccacatccatgaggagacaggctctcccccgatagagcctctcagcgtcgttaacggcatcncccccggcaccccctaggcgcccaggcttcagcacttgagtcaggtgagggccggtgcgcgcggcgcgacagagagtcatatactacaacccagctcgttctcttggctccggggaatacgggggaggaagaccgagagtaagcagaaaaccgcgatacctccgccgatgatgatgctcgggcaaaacgca

SEQ ID NO: 178706 - DNA, 840 bp, Homo Sapiens
  misc_feature (139)..(172): n is a, c, g, or t
ggcaggcacagtgtcatcataccctcaccccatatgtttggggtctgcttgaggattcataaatcagccactctggattgttgaggaatggccatggcagccacagaaaaaagaatttttctctctgagccaaggttgnnnnnnnnnnnnnnnnnnnnnnnnnnnnnnnnnncatttcattggaagatctccaatggactgaacagctccagtcagcagcagttaccacaaactgtgaatctgggccccaccactcttccctgttaaccagttctgtcagcatccccctctccagcagcacttccatgaagttggttctgagactctggccgtgaacacccgtttcttcagtgatttgttttgggcttttggctcaaaaccccaggctcttgtttttgtctagactcttattctgtttcctgagcagcaggaggtagggaccactttgatgtcagacttctggtagctggacatgttctcgagatgggtggctgttcgcgacttttgtaccagagtgaaattgttagaaggagggtttctggctgtggttctaaatggagccccaggaagctgccctctccccagggtttgtgctcagtagagccctgtggatcacagtcttgaggtcctctagcaggggtgagggagagcagcgacttcagctgagtccctgccagtggttaagcaaacaatggtttcaaaacttcaaggtccccaaatggcagcatttatgtctgacctgttcgtgtcatatacgctggtaaaaacaaaaccatcttgagcaacctctggaggtagtaaaacacatgaactgacttacgatgacatgaactgacagct

SEQ ID NO: 178707 - DNA, 985 bp, Homo Sapiens
  misc_feature (28)..(28): n is a, c, g, or t
  misc_feature (39)..(39): n is a, c, g, or t
  misc_feature (47)..(83): n is a, c, g, or t
  misc_feature (507)..(535): n is a, c, g, or t
  misc_feature (834)..(835): n is a, c, g, or t
cctatgaacgattaaggaaggtggttanggctgggtggntcaggggnnnnnnnnnnnnnnnnnnnnnnnnnnnnnnnnnnnnnaaccttaagctgtttaagctgaagcattctcagatgtttggggggaaacatcctcttaaaatgggtccttgtgcttgccttctggggaggcggtcctgagcaggtgaatcataaggcatttatgcatatgttatatgcggactgcacccacctctcccccccagcctttgcctcttgggttgttgtgctgctttccccttactttgctacatttctatagttaagttggttttacttgaatgattcatgtttagggggaaaatgaaaatctcccttaaaatttgtttcaactcctcctgcaaataaaataaatgaagtggcagatgtaaaaaaacccacccaccgaaacccacaagagcccccaagatataaccatgcccgcacaccacgccaaaaaagagcaacgctcatatcctataatatnnnnnnnnnnnnnnnnnnnnnnnnnnnnngccatcgccacacccgcacacattctacttatcccgtttactattccccccaaaatataacccacctctttctggccctgtacttcctctcccccgctaaagcacaccctccctctatattaacaacagtttttctccggtgtgggtccccgcagttcgcctccccaaaatatatttctgaacgatcccccggccgcaccaccagccgtcgttctctttccccgccacccgcaaaggtcggagcgaacaatacataccgccgccgctgcttcttttttcttctaatgagtaaaaacccnnccccctctccgagcggcgagcgaaatgtgtaaggccgcccccatcaaaagaaaaccgcccccgcgcaagtatcccctagaacatttcaaaattggaaagccccacccttcaccccgcgcgcgccttccttacccgtgcattctttatacc

SEQ ID NO: 178708 - DNA, 429 bp, Homo Sapiens
  misc_feature (206)..(344): n is a, c, g, or t
ggtggccagttaagtagtgtcttctctctccaccaaaaagaggaagtgcctccagcttttctgggggtctcataaagagcagttttactaaatgattgtatgcttatgctgaacacctttcatattggagaatcatgcatttgggtcactaattatctcaaaatatttcatactaataaagttgaattattttttattggaagccnnnnnnnnnnnnnnnnnnnnnnnnnnnnnnnnnnnnnnnnnnnnnnnnnnnnnnnnnnnnnnnnnnnnnnnnnnnnnnnnnnnnnnnnnnnnnnnnnnnnnnnnnnnnnnnnnnnnnnnnnnnnnnnnnnnnnnnnnnngggcgcggggccccaagaggaaagagaacggggccatagttgtccccaaaaaaaccggggccaagactagggttggaatccccac

SEQ ID NO: 178709 - DNA, 404 bp, Homo Sapiens
  misc_feature (195)..(209): n is a, c, g, or t
gtaaaaatggtatacatgaaccaatacaaaatgcgaatgggaacatatggatatggagtttcttacactgtaacattgtccatgtacaccttaaaaacagaactggcctaaagggaaaaataagacgtcggtgtgactaaagaacaagcttatttggcatcaattatacatccttcattattttatattcctttnnnnnnnnnnnnnnncaagtttgttctttcttcactctaaaaaaagtgatcaacctgtacaaagtaatactcaacaatacatttcaaacagtgcactgtataacttaagaaaaaatacataaaccaatatacaactaaaatccataatttacctgtttttgactttgttttattattattttttaccaatgtgtggggcctaacactttg

SEQ ID NO: 178710 - DNA, 1284 bp, Homo Sapiens
  misc_feature (159)..(159): n is a, c, g, or t
  misc_feature (225)..(225): n is a, c, g, or t
  misc_feature (439)..(439): n is a, c, g, or t
  misc_feature (637)..(645): n is a, c, g, or t
  misc_feature (766)..(774): n is a, c, g, or t
  misc_feature (813)..(821): n is a, c, g, or t
  misc_feature (1160)..(1160): n is a, c, g, or t
  misc_feature (1168)..(1168): n is a, c, g, or t
  misc_feature (1206)..(1206): n is a, c, g, or t
  misc_feature (1225)..(1225): n is a, c, g, or t
  misc_feature (1248)..(1248): n is a, c, g, or t
  misc_feature (1256)..(1256): n is a, c, g, or t
aaggacgagagaagatatctgtgctgcccccgggtttttccgctctcggtgggcgggaagttatttcatacgtgcgagaagtgcggcagcagagtggcgcttacaggcgtgcccccggacgggcatggtttcgcgaagtattgtcgttaaaacagccgngtgtgcgggggagatgaggttcttccacatgtggggcgcgcgcggaaaacaactgggccggacatntaaatatgcggccaacaccactgcgcgttggattaaaacggcagcggaacaccgcgggggcgggggcggggagaaactggttgacaagataatgggggcgcttctgggcacgggtggcgcgcacccccctgcatgggcgggcgagcagagggccgcccccagtgtgacgcgaggccaggccccgctgagagaatactctccctccatcattgangagggggtgtatttgtgttctctcaaagaccaggcgaccgcgggtttttgtcccacccccgcggggccgctgtattttgtctgttgcggggggggaagatggtcaccgggcgcgcctgcatttgcggtgaaaaccggggggggttccctttagggagcggcagcgacaattgccccaacttggtcctcttgccctacnnnnnnnnncgcggggcgcgccagaacgggaggtgttctaaaaaaatatctttctaagaagccggagggcggccccacacagggggggcgtgtctattagttgtcgggctgggatcaagcggggtacgannnnnnnnnctaccggtagttcacgtaatattgacatatgttgctccnnnnnnnnncgttctggtcatcttagttttattgtagtgagtagtatttttaattttcttgaaaggcacccaagaataattacttttgtgaaccaaaactatataaaactgtacagaataaatatttcatagaaatctaactatgccttcttgtaaaataaagctacattgtccctctcttgaggcaacttaaaccacttacctttagaagtgccttttgctactgatttatggcatctatcaatgtacatcaataaaaataaaataatttttcctatttactttacaactgtgaattacttgccacaggaaatgtatttctattatgggtcattcaggatttacaanggatttanggcctatggaaataagggcaaacccaatatattctctnggtcatatttacaggcggnttctcagtaggctttttaaattntcccaggnggaggtttaaacttgagcataatggcct

SEQ ID NO: 178711 - DNA, 922 bp, Homo Sapiens; identical to SEQ ID NO: 8859
  misc_feature (49)..(49): n is a, c, g, or t
  misc_feature (266)..(267): n is a, c, g, or t
  misc_feature (483)..(733): n is a, c, g, or t

SEQ ID NO: 178712 - DNA, 446 bp, Homo Sapiens
gggtgtccctggccccttcctgccatgggcaggcccgcaggaagagccggtaggggtggaaaggggactcagatgagacacaccccacagctgccaccgccttgtccctcaacaagctcacccccaatcccttgcagccaggccacaatgggggaggtgagtccagccccttggaacaggcttgcccaacatggagggatggcgttggcagtgccagcctccccagcctgtgccaagcttcaacaggggcaagaggaggggccggcccctcctcaggaagctggtatgagtaaggccttgagggtgcaggcaggcagccctgtaccccacccacatagactatactgtacatacagattttgcagtaggcttggggcagctgggtttgtccttgatgtatgatactgttattataataattattattattctgcgaaacaaaaacc

SEQ ID NO: 178713 - DNA, 320 bp, Homo Sapiens; identical to SEQ ID NO: 8921

SEQ ID NO: 178714 - DNA, 649 bp, Homo Sapiens; identical to SEQ ID NO: 8923
  misc_feature (494)..(494): n is a, c, g, or t

SEQ ID NO: 178715 - DNA, 645 bp, Homo Sapiens; identical to SEQ ID NO: 8925
  misc_feature (552)..(593): n is a, c, g, or t

SEQ ID NO: 178716 - DNA, 279 bp, Homo Sapiens; identical to SEQ ID NO: 8952

SEQ ID NO: 178717 - DNA, 507 bp, Homo Sapiens
  misc_feature (278)..(290): n is a, c, g, or t
gggaatattaactgtgttatttttatacactttttaagccttaactcgccattgatttaccagtttaacgtttcctggggtttctttgcccatggggttctctgccccccacccccggcccctttgtttgacttgcgtcgtctgatacctcagtattgtagctttttgtccgcatgttactccctgtaaatacgctgttatacatactgttaacacccctttgctttttctatgggaccctcccaggccacccatatttagaactagttaccttattnnnnnnnnnnnnncagtctgttggcttctcagtctgcatcttggaggcagggaggtgaggcaggtgcccctcagacacttcaggaaggtagtttgcattctatttaaaaaagggagtggggagcaaatgaaaatcaaatgtggggggaaaacactaaagggggcaagaaacaaaggaattacaaaccctctgctctttgtatttctctgttgtgaagaataacaaaaaaa

SEQ ID NO: 178718 - DNA, 459 bp, Homo Sapiens; identical to SEQ ID NO: 92642

SEQ ID NO: 178719 - DNA, 478 bp, Homo Sapiens
  misc_feature (28)..(28): n is a, c, g, or t
  misc_feature (33)..(33): n is a, c, g, or t
  misc_feature (80)..(80): n is a, c, g, or t
tccaggatctgcctaacaattggagccnaaggntaataggataactgaactgccttaatgatgtgggaaagattaaaacnggcactcaatggccctttccccaactcaccctacacaagtgggaacccccacccaagaggcagagcccagcctgattgacactctgcagcacccaagtgaaatctctggagcaacagctggccgatgctgacagacagcaccaagaagtaattgcaatttatcggacacaccttcttagtgctgcacagggtcacatggatgaagatgttcaggaggctctgctccagatcatacaaatgcggcaggggcttgtgggctagccgttagcactgactgccagtatctgttttatctggctggtgctgaacattctttgtgcaactccatggtctttctgggccttactgtgctggtatagttaaaataaaatatattttgttctagaaacagacaagag

SEQ ID NO: 178720 - DNA, 409 bp, Homo Sapiens
  misc_feature (27)..(27): n is a, c, g, or t
  misc_feature (59)..(59): n is a, c, g, or t
  misc_feature (102)..(102): n is a, c, g, or t
  misc_feature (389)..(389): n is a, c, g, or t
  misc_feature (392)..(392): n is a, c, g, or t
ttccacaaggggccccctgaacccaanccccccaatccctgcctaggggtgaaaagcantaccagagagatggagcccatcctatcccaagaagcccttcanctcacccttcacctgcctgctgttgcaaactcggctgttctggactctgatgtgtgtggagggatggggaatagaacattgactgtgttgattaccttcactattcggccagcctgaccttttaataactttgtaaaaagcatgtatgtatttatagtgttttagatttttctaacttttatatcttaaaagcagagcacctgtttaagcattgtacccctattgttaaagatttgtgtcctctcattccctctcttcctcttgtaagtgcccttctaataaacttnaanatgaaaaagcaaaaaaa

SEQ ID NO: 178721 - DNA, 561 bp, Homo Sapiens
  misc_feature (391)..(405): n is a, c, g, or t
gggactcctcagccgatggtggctctgggtttccttgagtgtcatatgtcctagaaagttgctggctgactcttttttgtctggggcctggggaaagggcttggactgtgaaaagaaatgtggcccctttccatcttcaagagagatggaattaatgatggatggaccctggagggaatctccccagccgacttccactgggctgacagactttgctgaccacaggggaacgatgttcttttctttcttcatgatcagacataaacttagcatcttaatggaagaaaaatgaggggaacttcaattatgatttattaaagacaatttctattacaccctcctttatgacaagtgacattttagatgtaaaagtaaaaactttaccatgccnnnnnnnnnnnnnnngttggcctaacattgaggccttaaaacctgaggctcctgtgcctgatggaattcttgtaacatacacttgtgtatcatataaagataccactctggttctcttatggattcttactctaggtggttattaagaatgacaagcacgtcttttccaca

SEQ ID NO: 178722 - DNA, 811 bp, Homo Sapiens
gggggggtctcctggcgacgaccatggcgggggatgtgggcggtcgcagctgcacggactcggaactgctgctgcacccggagctgctgtcccaggagttccttctcctcactctggagcagaagaacatagctgttgaaactgatgtaagagtaaacaaagacagtcttactgacctttatgtccaacatgcaataccattgcctcagagggatttgccgaagaatagatgggggaaaatgatggaaaagaaaagagaacaacatgagattaaaaatgagactaaaaggagtagcactgtagatgggttaaggaaaagacccctcatcgtatttgatggaagttcaacaagtacaagcataaaagtgaaaaagacagagaatggagataatgatcgactgaagcctcccccgcaggcaagctttaccagtaatgcctttagaaaattatcaaattcctcttcgagtgtttcacccctaattttgtcttccaatttgcctgtgaacaataaaacggaacacaataataatgacgctaaacagaaccatgacttaacgcataggaaaagtccttcaggccctgtgaagtcgccaccattgtcccctgttggaactactccagtgaagttaaagagagctgctcctaaagaagaggcagaggccatgaataacctgaagcccacacaagcaaaaaggaagatacaacatgttacttggccctgaagacaagtttccaaacacatgttccatatactgtaactgtagtttttcacaatatgttcatatctatggacaatatctaccgaaaatcc

SEQ ID NO: 178723 - DNA, 587 bp, Homo Sapiens
  misc_feature (22)..(22): n is a, c, g, or t
  misc_feature (31)..(31): n is a, c, g, or t
  misc_feature (37)..(37): n is a, c, g, or t
  misc_feature (59)..(59): n is a, c, g, or t
  misc_feature (73)..(73): n is a, c, g, or t
  misc_feature (79)..(79): n is a, c, g, or t
  misc_feature (88)..(88): n is a, c, g, or t
gaagccaaaaattggcacgagnatgatctgngctcanaatcggggtcaaaacccaagcnaaacggctaaaagnctcggnacccaaccnagctcccgtcctcttggtggcatcaaacttgtgtgaatatgaggtcttagtctgctcatgacagccttaaaagcaataaacagatacaacttccagcaacttcccagcagctgcaaggctgcggggggtcctgcctcgagccataaggtgagcagctagccagtgccgggccagtgtggagaaagctgaattgcctgtgaagctggggttgcaggcaggaatattcatggagcccctgaccatgtactcacactgctcttcctcagttcagggttcttggatttgctcaagtccacccaaatatccctttacgattctcagggtcccactccttccagatccaatgccctaaactttacataagagttccggcaaggctgtgacttcaacttgtgttgtaaccgcaacctgcacaatcaaatttagggttatgttttcagatgtatcaggcttacggctacaagatattaaagagattcttttctgggtattacaccgg

SEQ ID NO: 178724 - DNA, 1159 bp, Homo Sapiens
  misc_feature (449)..(459): n is a, c, g, or t
  misc_feature (718)..(726): n is a, c, g, or t
  misc_feature (864)..(881): n is a, c, g, or t
  misc_feature (939)..(970): n is a, c, g, or t
ctttgtaatgccgaaacccagtgcactcaagtttggcccaagggactcccacagcaccccagaagactgcatgcctcaaggtttatgtcactcctctgctgggctgttcattgtcattgctgtgttcagggacctttggaaataaaacctgttctgtcccaaataaaaccagcctgtgatgttcaagggactggaataaagtggcttacgacctgaaggattctacagagtgctcaactgttcatacatcattcagagtgggagggagctgggggtgctgtcccatcccatctgtatgcccacggtggatttaataatatataatttataaatcatagcctatggagtggcccgtaaatcagttgactgtgtagctcttgcctggcattaaagcatgtttttggtctttcatgaatcacaactatgtcctacgtccgcccaacaaacgnnnnnnnnnnntcttgtcgggccgcctcggccctcaaataagcttttctcaaaaattaattttagagcgcgggcgcccctaaggaaaataaacatggataatgattgattttttaggccaaccctgggccctcaacgaaagttttcaaacccctccccttggcgccacccgcgccccgtgcaacgcaagcgcacctggggaccaatccccttctcgcctaaaaaaaccccgcgtctattggaaataaggccggcggtgtactcccccagnnnnnnnnnccccccgccgggtgtaaacccccaaggcttttcctaaaaaaattccaaagaaaggggttgcgtaggggccccttaggcggggttcttgtccaacatgggaagaccccaccgcccaagcccggaaattgaaatgaaatnnnnnnnnnnnnnnnnnnggggagccttcttcccacaccagtgtgggggcgttaattcttatataaacactttctnnnnnnnnnnnnnnnnnnnnnnnnnnnnnnnnacaaaaaagcggtgtgcgagtaaatcccgggaaaacccctctagcagggcaatatcaccgagccggagatagcccccccttgcgggggatatttatttggggcgccccgtgggtgagatataatacgggggcggaaaaaactcactgttcgcgccaaatattggggcccaccctggttatataactgcc

SEQ ID NO: 178725 - DNA, 1174 bp, Homo Sapiens
  misc_feature (142)..(142): n is a, c, g, or t
  misc_feature (253)..(253): n is a, c, g, or t
  misc_feature (365)..(365): n is a, c, g, or t
  misc_feature (567)..(567): n is a, c, g, or t
  misc_feature (611)..(611): n is a, c, g, or t
  misc_feature (621)..(621): n is a, c, g, or t
  misc_feature (654)..(657): n is a, c, g, or t
  misc_feature (659)..(661): n is a, c, g, or t
  misc_feature (733)..(749): n is a, c, g, or t
  misc_feature (772)..(858): n is a, c, g, or t
tggggtggagatgtacggagagtagatgagagtgtatgtgtggcgtgttcgatggagaggaggtgaggtgtggagcaagtcttggtctgatagtgctgcagcggagacgttctctctgcacggcggtggcgattatcgcgtnggggagttcagcgtaactcagtggcgtgcacggtggagctgctgagagggctcgactgtgcatattatgtagtgagtctcggcacggagggcggataagtaggacactganggtgtgcgcttcgagctcgtaaatgtgcgtcccgcgagtcctatgcccgacccggtagagagtcacggcgatagtgacacctgaaggtgttgtgggcatagggctctacggntgatggtgtgccgtctgcgccgatgcgggatgctcttgcggcaacgtctgataagcgatcaaggtgcgcgagcgtgtgggtcgtgttcgaccgcggtggagtgattatgcgggtcgatcgaggaggtgctcagtttggtggtgccctgaggtataggtagaatggtgtagggcgggaaggagttactgcgcgggcgtctttnctgtgggcatccgttgtagtcggcgctatgcgtgtatacactanacccggtggnagggaagaaagccgcctcgctcctggcggcggnnnngnnngggggctgggtggcggctcttggtacggggtggcgggaggtgggaaacattgtgggctggtgggtgcgggtnnnnnnnnnnnnnnnnnttgaagctctttgcgtggagggnnnnnnnnnnnnnnnnnnnnnnnnnnnnnnnnnnnnnnnnnnnnnnnnnnnnnnnnnnnnnnnnnnnnnnnnnnnnnnnnnnnnnnncagaggctggtcgtcttgtgtgctgccgtctcttcttattttggtatttcggaaaatgggaaaatggggagtatgttagaggttggtgcattttatttttgcctggcgttaaaacttcattataaaatttgccaaataaacatgtcaaaaacaaacttaaaaacaaagtgtagctgatatccagaaattgcagcactgtattgataaagggctcttttcattaccagggaaagaatttaatgtccttccttcctccccaaaagcttccttggtgcaatccagtacagaaaacgccaccaatttctgatgccaggcc

SEQ ID NO: 178726 - DNA, 688 bp, Homo Sapiens
  misc_feature (45)..(167): n is a, c, g, or t
  misc_feature (188)..(198): n is a, c, g, or t
  misc_feature (222)..(232): n is a, c, g, or t
  misc_feature (247)..(385): n is a, c, g, or t
  misc_feature (571)..(571): n is a, c, g, or t
  misc_feature (580)..(580): n is a, c, g, or t
  misc_feature (586)..(586): n is a, c, g, or t
  misc_feature (618)..(618): n is a, c, g, or t
  misc_feature (623)..(623): n is a, c, g, or t
  misc_feature (638)..(638): n is a, c, g, or t
gggggccccgctggggccccctcctgtttgaaaccccccaaagannnnnnnnnnnnnnnnnnnnnnnnnnnnnnnnnnnnnnnnnnnnnnnnnnnnnnnnnnnnnnnnnnnnnnnnnnnnnnnnnnnnnnnnnnnnnnnnnnnnnnnnnnnnnnnnnnnnnnnnnnngtttctttttcctttgggggnnnnnnnnnnnaaaaaagtttttaaaaattttttnnnnnnnnnnngggcccccaatttcnnnnnnnnnnnnnnnnnnnnnnnnnnnnnnnnnnnnnnnnnnnnnnnnnnnnnnnnnnnnnnnnnnnnnnnnnnnnnnnnnnnnnnnnnnnnnnnnnnnnnnnnnnnnnnnnnnnnnnnnnnnnnnnnnnnnnnnnnnnctattggaaaagtaattatttattatgacaaaaataaaactgttgaatgaaaacaaatgaatgttacactatattgcaccatgattggaaatgagccaaaacctgtctaaaagatgaacattccagagcaaacagcatcgttttacttgggttaagtaggcatgcaaacaactcattataacatanttgcagaantaaaanttatgagtactgggcaacctaaacttaacatntaaangagggcacttcatanctaataaagttttaaaaactttaaaacatggtcattttaaacaatccccc

SEQ ID NO: 178727 - DNA, 539 bp, Homo Sapiens
ggttggcattatgaaaatatcttttaatacatgttatttagcaagagaaaaattatcagaaaatgagaagcaccatttatagttcacaagaaatgcaacatggactccaatagaagtagatatcaataactgatacttcctctgtttatgaccccaaacatgctaaaatgctaaagtaatgcttgcaaagaatatgaatgacaaatgttatccagcagctttttggtttaaaataattgccaatgactagcagcttcaatggttaacagtagggaggaagaacccttcagtacctaacaacgctgctgtctgctcctaagtggctttagttagagtcccatgttttaatggtaatactgcattgattttaaaggcatatgcagcaaaatgcggggggagggagagaaactggaagaacataaaagttatatggttagtgtctttaaagtctaaaaatttaaactattgtttaaaaaaccttacatagttcacagctatcggcccacacagtaagcaaatatctgtgtgtaggatgggag

SEQ ID NO: 178728 - DNA, 939 bp, Homo Sapiens; identical to SEQ ID NO: 15850
  misc_feature (113)..(197): n is a, c, g, or t
  misc_feature (238)..(263): n is a, c, g, or t

SEQ ID NO: 178729 - DNA, 533 bp, Homo Sapiens
  misc_feature (440)..(440): n is a, c, g, or t
  misc_feature (456)..(456): n is a, c, g, or t
  misc_feature (492)..(492): n is a, c, g, or t
  misc_feature (516)..(516): n is a, c, g, or t
ggtaggcatggttttggccttttgtgtatattagtaccagaagtagatactataaatcttgttatttttctggataatgtttaagaaatttaccttaaatcttgttctgtttgttagtatgaaaagttaacttttttttccaaaataaaagagtgaatttttcatgttaagttaaaaatctttgtcttgtactatttcaaaaataaaaagacagcaatgactttatatccaagaaaggaatgtgaatgagtcacttaacagggaatctaaagagctgtgttagctgtgtacatacacagattatctgaggaaaaggtcaagggttccacttggggccacagtttttttgttaatcaaacaccactctcttaagggggctggcattcacaaagggcaaccaaggggcccctcttagggctttgaggatttaaaactagtcntttatccattactggntgtggacactcttggcttgggtatttttaggggggntccttacctttttttggttttccncacctttttggttgggc

SEQ ID NO: 178730 - DNA, 1012 bp, Homo Sapiens
  misc_feature (520)..(643): n is a, c, g, or t
  misc_feature (666)..(690): n is a, c, g, or t
  misc_feature (703)..(784): n is a, c, g, or t
  misc_feature (791)..(850): n is a, c, g, or t
  misc_feature (885)..(894): n is a, c, g, or t
ggggtgtgcatagctctctgtagacatttttacccaaacctgttggtaaagtgcccatctggtgctcaagagagcctgggggtctaacagggagcccggctgcctcacctggccacagcctccacaccagatctccacattgtcttgatccagaccagctctgtgatcagaaggaaattgggtccagtgtaggagcgagctggtcctgggcctggcaggcaagagtgtgggcatcctttcctggcctttctccactctccctcaagcctgtgctcaggttgccttgaatgtggactctggaagagccaggggcccagaatgccgggggaggcttctgagtggcactcatggaacaccgtccctctgcccagccataggccctgcctccagtgtcagggaatggaggctgggctgcgagagtgttgctgccccctgtgtcattcttctaatccaatgtagaaattgtacgtaatgtatttaaatcaacgcaaatgtatgaataacaaatacagttctgacnnnnnnnnnnnnnnnnnnnnnnnnnnnnnnnnnnnnnnnnnnnnnnnnnnnnnnnnnnnnnnnnnnnnnnnnnnnnnnnnnnnnnnnnnnnnnnnnnnnnnnnnnnnnnnnnnnnnnnnnnnnnttttgcggccccccccgcccccnnnnnnnnnnnnnnnnnnnnnnnnnggggccggggccnnnnnnnnnnnnnnnnnnnnnnnnnnnnnnnnnnnnnnnnnnnnnnnnnnnnnnnnnnnnnnnnnnnnnnnnnnnnnnnnnncccccgnnnnnnnnnnnnnnnnnnnnnnnnnnnnnnnnnnnnnnnnnnnnnnnnnnnnnnnnnnnncaaaggggatccaaggggattccaaattaaattannnnnnnnnntggccttttttgggaaagggggggaatttattaagacttcgggcgaagtggaaacccctccaaacgggtgtgaaaaacctgaatacccccggggattacaacccctgggccgccttgg

SEQ ID NO: 178731 - DNA, 560 bp, Homo Sapiens
actgttattattatttatttttaccaattttaattaaaatattcacttatgaccaccttatacagttctttggaagattgtttcatagcacaagatcaaaaagagaaaatatatttcatgttagaagagaagggaaaaaatagcattcatatagaaccagataaaaaagaagaccaatgaagtaatatgttaatattttacttggaaaatacataaaaggctgataaatgataagagaatgctatttaaattaagcacagtgattggaatactatttatagagcagtataaaacatgttctccatatgccttctccatggacctctaagatgttagaagagacattagtaggtgaaatgtaaggataggtagttcctttttcagcgaattgagaggcagggaaacacagtggcaaacacaggcaatatccattgttgcttaagaaagtgaagattttccctctccaaagtttgacaaagatggtgatttttgttgtagccttgaacctgagactaaatagtatatgttgactaaataatatatttgattggtcttcaaac

SEQ ID NO: 178732 - DNA, 834 bp, Homo Sapiens
  misc_feature (702)..(702): n is a, c, g, or t
ggggctttcgcccgctgctgccgccgccgccgccggccgcggctgcactcccaagatggcggctcctccgggcgagtacttcagcgttgggagccaggtgtcgtgccggacgtgccaggagcagcggctgcagggcgaggtggtagcctttgactaccaatccaaaatgctggctttaatctcaccagaatgtccctcttccagtggaaagcccaaccatgcagacatcttgctcataaacttacagtatgtttcagaagtggaaataattaatgaccgaacagaaacccctcctcccctagcttcactcaatgttagtaagcttgccagcaaagcacggacagagaaggaggagaagctgagccaggcctatgcaatcagtgctggtgtctctctagagggccagcagctcttccagaccattcacaagaccattaaagactgtaaatggcaagaaaaaaacatcgtagtcatggaagaagttgttattacacccccatatcaagtggaaaactgtaaaggcaaagaggggagtgcactgagccatgtacgcaaaatagttgaaaaacattttagagacgtggaaagccaaaagatactgcaacgttcacaagcccagcaaccacagaaggaggctgccctgtcatcctgagtccgtacacatgggagactcttccagcatccagccaaaggagcgctggntggtggcttcagccggaggcaggcccggggggaagggaaggggatcctatatgtccctggttggcctctttaaccaaaggggtcaggccatttccaaaatccttaagactttggaacacaaccaaaccaccc

SEQ ID NO: 178733 - DNA, 536 bp, Homo Sapiens; identical to SEQ ID NO: 4505

SEQ ID NO: 178734 - DNA, 731 bp, Homo Sapiens
actagttctagatcgcgatctagaactagtcaggaccagacaacaagtttttaaaaatgatgccagagcattagaagccagaataaagataaatgaagaattcaaaaataataaaagtgaaacttcttctaagaaaatagaagagctaatgaaaataggttctgatgttgaattattactcagaacatctgttatacaaggtattcacacagaccacaatacactgaaactggtccctaggaaagaccttcttgtagaaaatgtgccatattgtgatgcaccaactcagaagcaatgagttttctagaatacaacaagtctttgtactttttaactttaaaatctacaactctggcaaaagtcctggaaatgcagacattttccctgaactggcatattgaaaatgaatgaattacagaatagcttcatatttaaatttcatgttaaaaggtcattactgagaactaaagaacataattaagtatttctaaaggaaattagataagaaaacatttcattttcattgaaaatcaaatttcataaagcaaagtaaatgcttagggagatatattcaatctttgaccttgatgagtatttgatcttaccatagctatttgagaatgtggtgcttttacaaattggtgagttttcctgccatgtgaaatgcaattattacatttaaattgttaagattaaacatgatatttagtcctgaaaaatattaaatggtc

SEQ ID NO: 178735 - DNA, 840 bp, Homo Sapiens; identical to SEQ ID NO: 9395
  misc_feature (752)..(752): n is a, c, g, or t

SEQ ID NO: 178736 - DNA, 402 bp, Homo Sapiens
ggggtgacgcatggtacttgcgcaaagacgacgaggaggctgcgaaaagttaagggccggaccgcaggctgtgctcgcttccggaagtggcttctgcgacaacatgcttgcggacctcggcttaatcggaaccataggcgaggatgacgaggtgccggtggagcccgagtctgactccggggacgaggaagaggaggggcccattgtgctgggcagacgacaaaaagctttggggaagaaccgcagtgctgatttcaaccctgatttcgttttcactgagaaggaggggacgtacgatggcagctgggccctggctgatgtcatgagccaactcaagaagaagagggcagccactacattagatgagaagattgagaaagttcgaaagaccaggaacaaacc

SEQ ID NO: 178737 - DNA, 693 bp, Homo Sapiens
aaaaccacagctcagggactgtgagtgccacttctcctaataagtgcaaaagaccaatgaatgccttcatgctttttgccaaaaaatacagagttgaatatactcagatgtatccagggaaagataacagagccataagtgtgatccttggtgacaggtggaagaaaatgaagaatgaagagagaagaatgtacacattagaagcaaaggctttggctgaagaacagaaacgtttaaatcctgactgttggaagaggaaaagaaccaattcaggctcacaacaacattaaaccaggatgcttatgttcttaagtctatatttgcatatacattgactcttgatggaaagacttaagaagatcaaggtctcaccatttgtcctcaattcgtgtgaccataagatactgatagcattgagtcttgaaatgatttaataatatgagtgaggatttgctttctccattagagcattaagctaaaactatcaacattttaaaccaaattgccttatttttcttccaaacttcatatatgtctatcaggtaataataggcttgaaaattgatatcctgtggtgctaaagtacagtagaacagacgaggcacaagtgtatacactgtctccattcttacaattgtacggaaccgggaactctacacacaatatgtcacctgctgtctatacattggctcc

SEQ ID NO: 178738 - DNA, 384 bp, Homo Sapiens
  misc_feature (84)..(84): n is a, c, g, or t
  misc_feature (92)..(92): n is a, c, g, or t
  misc_feature (105)..(105): n is a, c, g, or t
  misc_feature (114)..(114): n is a, c, g, or t
aagagtcctttgcactactatgggaatgccccccatgtctttgatgaataagaacgcgtatcacaatgtgactacagagcagcnctttttgnagggcattatagnaaaaaaccncgtaatcaacttgactcaagattgactctacagactcagaagatgatgctaacagtgttagttttatttttgtactgcaatttttagtttaaaatatgttggatgcactcgtcaaataattatgtatactgtctgttgctgcctggtgattcataaccaccagcttaatttctgtgaatactgtatatttaacttatgaaaaccaagaaatgtaaagataacaggaaaataagttttgattgcattgtttttaaaataagctagttttcg

SEQ ID NO: 178739 - DNA, 1323 bp, Homo Sapiens
ggtgacagtggtcctcctctgagagcctgagctgtctccccgtctcccgcccccaaggagacagagaggatcctacttcttcggggacagtggctgtatggctgtgctgccccacatcagggaccctttccccctgggactatggggcagtttgggagcaaaaccagaaggacaggcccccctctacccgcctaccctgagcaagcgagttgttcctctttgtacaagggcaggtctgcggttactttcaacactgtttattccagcggaagcagccgggtggttttcccacccccgtgtatgtagatatatcgactttgtattaaaggaagatcgtctgactcaaacacaaaacaccaccacaatacaagtccaacaaaccataaacacaaacagtgcacaccactatcacaaaaccccccaccatacgccgcaatatgtgctttcaacgggaagccctcgtgaccgcacatgcgtatttccttgggtacgctggcacaaagagaaaagaggttccgcctgcccccgcctctacccccacaatgtcttcccaaatgcccaccccacaccccgcccgcaccctgtcgtcttatgcgcatccctttcccaccttcctccgcccctcctccacatacttgctcacaacgtacggtggggccggctcccccaccaaacacaaaacccggcacccgggcggcgcaagctacccctcgtttgtcgctgcttcccccccacgacgacgtccctgggtcctccccgcgtagccttgggcccgctgcacccgcgccgccggggagcccccgtctgctttccccctcttgccggcgactatatggctgccactcgcgcccctactacactctagtgctctctcccgcttccgcgcatcccagtccctggcgtgcgctactgccccggcttacgtcggcgagcgctccgctcgcgcgccccgctaacgagcgatagaccccgccgctgctattttctcctccttcacttagtccgactgtagccacatccctgttctatggcgccgctccgggccgcccattacaactcacacacctcggtcgccgcgcggctgattatcggcgacacttaacactaattcattccctcggcgcgccgtggccccccactacgccgtgtcctctcctccctacacctccgtgtctgtattctattgcagtcctccccccctactgccctctacgctcccccctttgtatcccactttctccgctgtctcgggtgggaccctccccctgcctcgtgccttcgatgactattatggccagatatgtttgacactttctcgccctg

SEQ ID NO: 178740 - DNA, 1359 bp, Homo Sapiens
  misc_feature (115)..(156): n is a, c, g, or t
  misc_feature (188)..(188): n is a, c, g, or t
  misc_feature (283)..(283): n is a, c, g, or t
  misc_feature (566)..(578): n is a, c, g, or t
  misc_feature (1109)..(1109): n is a, c, g, or t
gcatttcgcgctggaggggatgtgcgagaggtggcgggatcacgcggaagggctgcagcaggcacgtgggcgtccgcgcgagggtagcggccccggtgagcggcccaggcaggcnnnnnnnnnnnnnnnnnnnnnnnnnnnnnnnnnnnnnnnnnncaccgcggacgctgcagtagagcactctccancggacagcgtccgggcccactacgagaaaccgagacgcgcgcgggaccctcagtccacggcattgggccgtcggtcgtctccggtgcatggcganaaagggcgtcgtcgcgcgagatcgtacaggcgcggtggggaggagaacccacgactagaggcggaatgtctcagattatggtgcagcggcatgcggggcggagtatctcgtgcagtacggtggggctcggcgggagacgcggtctacacgggcggcacaagtagacgcaatgagcggaacatactgggcgcagcaacatggggatacaatagtgggggggattcacaagtgggtgagttgtgtcccgttatggggcgcgtcggcgtcccacacatgcgcggcnnnnnnnnnnnnncgacggttaccgcgcgtaggcacgaacgcgcgaccgtggcgcgggcgggtgaattacgcgccgccgggggcgttcttggggccagaatctctgcctgcggtgggtgtgtgggcccgccaaagaagggaagggaacacgaccttggggggatagcaagagcataaaagccagaatgcacgggtggccgagggccagtaaagacccaggcgcttcacatcctgcaggtgtgtcgcgcaggatctggcctgggggaggccttcaccacccctcctgcccacatcagagaaggtcccccactcacctctaccatctcatatccatcctggggggcagctggggccctgaactggccccctggagagggcccaccccacccatctgaccacccatggctgtcagtcagtctgtctccctccctcactttcccaataaataaatcacccaggcctcagttccttcagtatggggcagaagaacagctcagggacccctgcccttgctcaagggtagagggagttggggtatcaaccnccaccacccctcctcccctttgctgattccccaggctcaccaaagaggcctcgataaataaataacgctccattaaagcttcaatcagaaaaaacctttaagacagaagtgctctcaccgtcctacacgcccagccagccaaagcctccccacctggcctggtcagagcaccagattctgggagcaggcactgccctgggccttgtgggacccccagagcaaaagggccgaaagtgcagttagagccccc

SEQ ID NO: 178741 - DNA, 1111 bp, Homo Sapiens
  misc_feature (713)..(721): n is a, c, g, or t
ggggacacccacagcgatcatggccgggaggctcctggtgcagcggctcttcggcgggtcctcagatctgatggactacgacaatgttcccacgaccgtcttcaccccactggagtatggctgtgtggggctgtccgaggaggaggcagtggctcgccacgggcaggagcatgttgaggtctatcacgcccattataaaccactggagttcacggtggctggacgagatgcatcccagtgttatgtaaagatggtgtgcctgagggagcccccacagctggtgctgggcctgcatttccttggccccaacgcaggcgaagttactcaaggatttgctctggggatcaagtgtggggcttcctatgcgcaggtgatgcggaccgtgggtatccatcccacatgctctgaggaggtagtcaagctgcgcatctccaagcgctcaggcctggacccccacggtgacaggctgctgagggtaagcgccatcccctgcaggccagggcacaccgtgcgcccgccgccagctcctcggaagccaaacccaggatggctgcagggccaggtttggggggcctcaaccctctcctggagcgcctgtgaaatggtccaacgtggagcccaagtgctggacaggtggcccgtgtgccccacagggatggctcaggggactgtccacctcacccctgcacctctcagcctctgccgccgggcannnnnnnnnaggctcctggtgccagatgatgacgacctgggtgggaacctaccctgtgggcacccatgtccgagccccctgggatttctgcaatgcaaataaagaggggacttttttccaaaacccgccttgcggcggtgcccccgttcttgtcgcgccggcctcggcccctcaaaaagttttcgaagaccccttcccttgggggccccggccccccataagggagagtgacccaggggccctttggcgtgttttcccgaggaggaaacctgggggctcatgtgacgcagagcggggggcgcccaccgccctcccgccacgaacggacagcaagcgcgcgcgccgggggcggcacaagcgggagtccgcacagtccgtggaaaggaccaacgcctcccc

SEQ ID NO: 178742 - DNA, 554 bp, Homo Sapiens
ggggcctcctgcctgtagtgtgtgggctggggttggtgcgagcttccagcttggccgcagttggttcgtagttcggctctggggtcttttgtgtccgggtctggcttggctttgtgtccgcgagtttttgttccgctccgcagcgctcttcccgggcaggagccgtgaggctcggaggcggcagcgcggtccccggccaggagcaagcgcgccggcgtgagcggcggcggcaaaggctgtggggagggggcttcgcagatccccgagatgccggagttcctggaacacccctcggtcctgacaaaagacaagctgaagagtgagttggcccccaacaatgtgaccccgccgcccggccagcagcgcaaagacgcgtacgtccagctctacctgcagcacctcacggctcgcaaccggccgccgctccccgccggcaccaacagcaaggggcccccggacttctccagtgacgaagagcgcgagcccaccccggtcctcggctctggggccgccgccgcgggccggagccgagcagccgtcggcaggaaagccac

SEQ ID NO: 178743 - DNA, 1552 bp, Homo Sapiens
  misc_feature (17)..(17): n is a, c, g, or t
  misc_feature (31)..(31): n is a, c, g, or t
  misc_feature (44)..(44): n is a, c, g, or t
  misc_feature (109)..(109): n is a, c, g, or t
  misc_feature (535)..(599): n is a, c, g, or t
  misc_feature (692)..(742): n is a, c, g, or t
  misc_feature (1008)..(1008): n is a, c, g, or t
  misc_feature (1062)..(1062): n is a, c, g, or t
  misc_feature (1279)..(1279): n is a, c, g, or t
  misc_feature (1455)..(1455): n is a, c, g, or t
aaaactgaccttcaaanaatgctcccaaaanggggtatcaaganaccctaggaatagttgatatagatggaaaagatgggtacgttgtcctgtatcccagcctttcaanagatgtctggcccagacgaagaacattgtgtccctaatggtaggcaggagaccaaggagcagaaggcttgccttccctgggagcaggttgtttgagctgttttagagcagtgagccctaccattacatcctgatatctggggcttctgaaggtctgtgctgggagtgaagagtggcttagctatttacccgctctttggggacagggcaaactaaatgcatcccttcttacctaactcccaacccctgccctgggctgaggcatatgaatgctatagttgtgcattaaaataaatgttttttatctcctggaagccctatccccttcccctcccctgccgctgtgccggatcccccccgaccccaccttctaggaaacccgaatgtcgggtgtctcgtgctttgctatccctttttgccgcctttnnnnnnnnnnnnnnnnnnnnnnnnnnnnnnnnnnnnnnnnnnnnnnnnnnnnnnnnnnnnnnnnngccaagattgttgtgggccgccgtcccctgggggcagtggtgctttaggagcaaaggcgggaggccccttgtaccctttcgccttttggtttnnnnnnnnnnnnnnnnnnnnnnnnnnnnnnnnnnnnnnnnnnnnnnnnnnntgagaaagcagaccccccgcacggggtccgatttcgaagccgcttgccgccgtggccgagtattatcccgcactggcaccgccgggaaggtgtagcaggaacggcctgccgcccactataatgaatctcacgcggcgcccgcgctgagagcggcgccagtcaccgacgctcgtctcgcaccgcacagcctgcagattgttagctccccattggtagcgcaccgcgtcgaacgtgtgtgtccgcgcgcgctgaccatctacgtgtgntgcgcgaactagcaacgcccccgcgtctcttctgttttgtcggcacgcaagacntatacctacgggcggggcattgtaacggagatctgacgtgggcggaacggctacacgcggaattgtaggaggtggggtgtccaggtgcgcccgccggcggccttcccggcgcgggtcgtgagtgtgcaccatatatgtgttcttatgttccaccgccgccgccagtgtaacgccatgcgctgaaggtcccgcccggtgctgagtatttgtacccccncctccccacccatctgagcgtcggcggcgccgacgcgcgccccccgccgggccggtgtgataatgagattgggtgaaggacgccccccacggcgcgcatggttgaggcggcccagtgccaggaacggccgtctatggtgcggtgacccgcgtcactcgcggaggatgtgccgccgnctggactgacagtagacgcactggcggagatgtatgtaattgtttctgtcttgagtgttgctacagtctctcaatcgctcccgcccaccgagctttt

SEQ ID NO: 178744 - DNA, 282 bp, Homo Sapiens
caaccccggtagcattgtcccttccccactgacaaacttatcaaatccagaagcttcagagtttcgtctctaactacttttctcctgaacaaaattacccaagccaaaacaaaatgtatttttagaattacggcagcatacgacctgaattttgtgagtttcgcggctttatctcaaatcaccattctccctaaaaacggcctcttcctccttacaaacgctggtgccaacttgatgaaaaagccaaatgcaccagggcaggtcactttcccattacaatga

SEQ ID NO: 178745 - DNA, 873 bp, Homo Sapiens
  misc_feature (637)..(645): n is a, c, g, or t
ggtggctgggtaaccaccgatcagcacagctgtccccttggtctcctgtatcccaggtcactagtcctccctggtccaccccaccctcatcctcaggagccacagccatttcttagagggtttcaaaaggacagcctttggcgccttttccttctaacctttgagtccagccctttccagttttcattcactcgaagtaactgcactcaagctgtgctcaaaatcggcaacgcatttatttacaccaagcccttcccataaaacacaactgctgaagaaaatagcagacgtttcccctctctctaactctgggtatcccacagatgcaaaagggagaataaacctgaatattattacccccccgcgaaaaccgcggcgtcaagtgtccacgaaaaagacaaggcgtagcccccgcagaactgactgtgcaccgcggtgagacagatttttggtggggccggccctcggccccctcgaaaaaattttttctaaaccccatttcccttttggggcgcccgcgggcccccccggaggggggaagagtgggacaaaagggggcacctataaatttgtttttccccaaagggaaaaacccttgtgggcaccaatgaaatagagggggcttcgggagattttnnnnnnnnnaacataaaaaaagaacacgcccccccgcggggggcgaaaacgcccaagggcggctttttctcagtaaaacaaaactccccccaaaacgtgggaagttttctctctcgggagggcccttatttgacccgggggcgttctctatccccaaccacgtgggcggaggctcccctaaggagagcgcgcgtcctctcgataaatattgcgcgacgacgtgtttcagcgcccccc

SEQ ID NO: 178746 - DNA, 713 bp, Homo Sapiens
  misc_feature (185)..(346): n is a, c, g, or t
  misc_feature (352)..(367): n is a, c, g, or t
  misc_feature (392)..(402): n is a, c, g, or t
  misc_feature (406)..(572): n is a, c, g, or t
  misc_feature (587)..(607): n is a, c, g, or t
  misc_feature (638)..(668): n is a, c, g, or t
ggggagaatgaatgctgttctgaatttgtatcttaagggaaatactacaaaatgtcgcagaaggtgctggatggatatctaaagttcaaaaaggaagagaaccacacgagctggagattcaggaagcatcagtagaagtcaatggccattaataaaaacattttttattaaaatattgaatctgnnnnnnnnnnnnnnnnnnnnnnnnnnnnnnnnnnnnnnnnnnnnnnnnnnnnnnnnnnnnnnnnnnnnnnnnnnnnnnnnnnnnnnnnnnnnnnnnnnnnnnnnnnnnnnnnnnnnnnnnnnnnnnnnnnnnnnnnnnnnnnnnnnnnnnnnnnnnnnnnnnttgggnnnnnnnnnnnnnnnnaaaaaattttttaaaaccttttttnnnnnnnnnnncccnnnnnnnnnnnnnnnnnnnnnnnnnnnnnnnnnnnnnnnnnnnnnnnnnnnnnnnnnnnnnnnnnnnnnnnnnnnnnnnnnnnnnnnnnnnnnnnnnnnnnnnnnnnnnnnnnnnnnnnnnnnnnnnnnnnnnnnnnnnnnnnnnnnnnnnnnnnnnnnnnnnnnnntctttattaaatttnnnnnnnnnnnnnnnnnnnnngggggggggggggaaatttataaaaatttcnnnnnnnnnnnnnnnnnnnnnnnnnnnnnnnagaaacctattccccccgggggataacccccttgggccgccgggg

SEQ ID NO: 178747 - DNA, 466 bp, Homo Sapiens
  misc_feature (402)..(402): n is a, c, g, or t
  misc_feature (421)..(421): n is a, c, g, or t
  misc_feature (426)..(426): n is a, c, g, or t
  misc_feature (456)..(456): n is a, c, g, or t
gggttttacacttcacgtattttgaagtacatttatttactaagcatttgtgacttgaataatttcaccaaatgaatacattttggtagtttgtaatgagttcttctaattgttacactttgcttggtacttaacaataaatatgtaaaggtaaaagaaataattttctgtattctgccaatcttaattttatataataaatcatccatttttttcttaaaatagtatggattgactgtttctaaaataccaatctgtggctgtggtttttcttttcttcagcatttccagcatccaagtaaacaatagtcccttatagtcctgctacttgatgggtaaatttggttgctgggttttttaagttgcactcacaataaatcgtgcaaagcatttgtcatgccnttatttactcccttttttnatccnggcatccccggatttttgggccggcaacanattttcttgc

SEQ ID NO: 178748 - DNA, 408 bp, Homo Sapiens
  misc_feature (205)..(205): n is a, c, g, or t
gggggtcctccggacccgatcctgcagctctttctggaccttcaggcacccccaagcgtgcagctctgtcccagccttcactgtgtgtgacacgtctcctgggttggggcccaacccctctaaagtacctggtggccagggatgaaccttgcccagccgtgggggcccccaggcctggtccccaagagctttggaggcttggatntcctgggcctggcccaggtggctgcttccctgaggaccagaactgctcattctagcttgagtgatggcttcaggggttgcaacctcagcccaaactgaagggggccatgccttgtccagcactgttctggcagtactcccccaggggtgggggggtatggggaccattcattccctggcattaatcccttagagggaataata

SEQ ID NO: 178749 - DNA, 483 bp, Homo Sapiens
  misc_feature (15)..(15): n is a, c, g, or t
  misc_feature (262)..(262): n is a, c, g, or t
  misc_feature (277)..(277): n is a, c, g, or t
  misc_feature (350)..(350): n is a, c, g, or t
  misc_feature (381)..(381): n is a, c, g, or t
  misc_feature (412)..(412): n is a, c, g, or t
  misc_feature (420)..(420): n is a, c, g, or t
  misc_feature (452)..(452): n is a, c, g, or t
  misc_feature (468)..(468): n is a, c, g, or t
gaaatttcggcacgngggaggagggaggcctcattgacaagtaggcccatctttggcgcaacccctgacctggaatgtctccacctcggattctgatctgatccttagggggtcccctggccccacggacccgactcagcttgagacactccagccaagggtcctccggacaattcctgcagctctttctggaccttcaggcacccccaagcgtgcagctctgtcccagccttcactgtgtgtgagaggtctcctggggttngggcccagccttctnagagtagctggtggccagggatgaaccttgcccagccgtggtggcccccaggcttgggtccccaagagctttngaggcttggattcctggggcctgggcaggtngggttgttttccttgaaggaaccagaattgntcattttnagtttgagtgatgggtttcaagggtttggaantttcaagcccaaattnaaagggggccatgct

SEQ ID NO: 178750 - DNA, 804 bp, Homo Sapiens; identical to SEQ ID NO: 97888
  misc_feature (581)..(581): n is a, c, g, or t
  misc_feature (611)..(611): n is a, c, g, or t
  misc_feature (616)..(616): n is a, c, g, or t

SEQ ID NO: 178751 - DNA, 554 bp, Homo Sapiens; identical to SEQ ID NO: 9782

SEQ ID NO: 178752 - DNA, 348 bp, Homo Sapiens
  misc_feature (48)..(48): n is a, c, g, or t
  misc_feature (60)..(60): n is a, c, g, or t
  misc_feature (83)..(83): n is a, c, g, or t
  misc_feature (90)..(90): n is a, c, g, or t
  misc_feature (95)..(96): n is a, c, g, or t
  misc_feature (99)..(99): n is a, c, g, or t
  misc_feature (110)..(110): n is a, c, g, or t
  misc_feature (119)..(119): n is a, c, g, or t
  misc_feature (127)..(140): n is a, c, g, or t
  misc_feature (142)..(142): n is a, c, g, or t
caaattggggtttcctttcccctttggggccctttccacaactggggncctgagaatgtntgtaaaagttctgtgacggtacngaggggnaaacnnccnttttatgtatngccttcctnaagggggnnnnnnnnnnnnnngngaaaccctttgacttcccacgtgccccatctcaagacattcccactcacagatttgaggttctggattaccaggtctggagttttccaatgttaatgtaaacagaactggcacacacacattaagatgaatgtaattattattcctcttgctggtcactaccgtcgctttctatttctctttctttgtgtgaatttatttaaaaga

SEQ ID NO: 178753 - DNA, 682 bp, Homo Sapiens; identical to SEQ ID NO: 9805
  misc_feature (161)..(304): n is a, c, g, or t
  misc_feature (354)..(368): n is a, c, g, or t
  misc_feature (394)..(402): n is a, c, g, or t
  misc_feature (568)..(576): n is a, c, g, or t

SEQ ID NO: 178754 - DNA, 965 bp, Homo Sapiens; identical to SEQ ID NO: 9808
  misc_feature (904)..(912): n is a, c, g, or t

SEQ ID NO: 178755 - DNA, 499 bp, Homo Sapiens
  misc_feature (81)..(81): n is a, c, g, or t
  misc_feature (386)..(386): n is a, c, g, or t
gtaggactcaatagtaaatgctgtctgtcttacacatttataaggaccctgcaagacgacgacaaaggcctttggcctgtngctactaaacaagaagcctatgaaaaatttcttctttaaacttgttttttctctttccagtaagttcacatttggataattttaaaaagaaaagtaattacctttgtgtttccagaacactataattggggtgtatcttaattcagttaaatattattagtagacctggattttcccccttgaccccatcagtctataaaggttaaactgcaacttttatgaaatggtctttaatatttccacaataatcctgtgctatatttgttttaagaaacaaagtaactctatacactttcaagactttnacaggaattttttaaatcctgtattgttggattcaattaataaagatgcaaaaaaactttatagagatgtaaaaacaaaactataatggatctcctatttttctttaaatacc

SEQ ID NO: 178756 - DNA, 600 bp, Homo Sapiens
  misc_feature (13)..(13): n is a, c, g, or t
  misc_feature (22)..(22): n is a, c, g, or t
  misc_feature (58)..(58): n is a, c, g, or t
  misc_feature (66)..(66): n is a, c, g, or t
  misc_feature (120)..(120): n is a, c, g, or t
  misc_feature (164)..(164): n is a, c, g, or t
  misc_feature (205)..(205): n is a, c, g, or t
  misc_feature (220)..(220): n is a, c, g, or t
  misc_feature (222)..(222): n is a, c, g, or t
  misc_feature (274)..(274): n is a, c, g, or t
cttcccaaatccntgcaaaaanaattccctccctgaatgaactggaaaaaaggccctntggcctcntaaaagtacagggagggcaccagctaagatcctccccttgtggtgtgaaatgtnccctggaactcagcccaggccctcctcctcccgggcttgcccanagcacccaccctattccccagcattgcccgaaggacccaanccagtttgggtgaanantggcctcctcagcttcctccccatctgggtgccccaccggcggcggaggganctgtggcgatggtggggtgtggggagggacgaggagggaagcctctgtgctgctcacctgcccaaagcccagctcagcgggtacgcagtggaggcgacaaggaaccaatcacaactacagaggtttctctgatcctcctccactcccgctgcttccacttgactaagcttaaaaaaactgcttttgccatggctcatcggagtttatacttatttcttacaaaatgtttcctgttatttgctggaccagtcccaaagaacaggcagatgttcttattagaagatcagccgaaaagaaaaacaaaacacgtccgacgacacccttgg

SEQ ID NO: 178757 - DNA, 781 bp, Homo Sapiens; identical to SEQ ID NO: 9823

SEQ ID NO: 178758 - DNA, 171 bp, Homo Sapiens
ggactgatggttttaatgtatcttttccacttattatagttatattcctacaatacaattttaaaattgtctttttatattatatttatgcttctgtgtcatgattttttcaagctgttatattagttgtaaccagtagtattcacattaaatcttgctttttttcccctt

SEQ ID NO: 178759 - DNA, 790 bp, Homo Sapiens
  misc_feature (52)..(52): n is a, c, g, or t
  misc_feature (64)..(64): n is a, c, g, or t
  misc_feature (696)..(696): n is a, c, g, or t
  misc_feature (722)..(722): n is a, c, g, or t
tccttctcactgcatcatgtcaggagttacatgctatcagcttgatggtgtnattaactttggnacacttggttaaggtagtgtgtgttggttttttgctgctgaaaattactgttattttccctttccatacttctgttctttggaaaacagtcactaagtccagtcatgggaggtggtgggtgggaaagattacattcaaccccctggaagtgggaatatccatatgtagtatttggaatttttctatatggaaaatttgtttctccctcccaccctaatttgtttacatcagtatggactcatgtatattttgtattttgggtaacacagtatttattttgttgcttaagttgtccagcttggctattaggagttctgccaggttggctactatgtccctttgatgtgcccatccttttgatttttgagcacttcttactttctggcactacaagatgctccaggttcatcttggatattccctgccccaaccctagaatccctagaatcaacccctgctccaaagagccctggttccttttgttggagaatcatacttagaaaccaagatctgggcattagatgtgcttgttgctactgggatgtcactgtttgtagcagagttgagaaatatgtatgtatattaatccatgcatatgtacacatctataattatttatgtgtgtacaaagnctaaacatgagtttgtactggccgtncttcaactcaaaatttgtcccaaaattttgtggcatatgtttagattttaaagttgatattttcccta

SEQ ID NO: 178760 - DNA, 964 bp, Homo Sapiens
tggtatttaaaatctttattaacccaaattagaattataaaaatgtttgtctcaaaaacaatgactgtgatactcaagtacagaattgtggtgcagccagaagtggttcaagagccctcccgcaaatcatgacttgcactctggctttaaagtgaagacaagggaatctcaaggcagatgggaggagggcatttgaagaaaacaaagatgacaaaaaagatgggaaggacacaatggtttaaggaagtttcttgtcagatacaataaactatttttaggaaggataaaaattaaaagtgcttaatacaaacaaaatttaacgctgctaattattcttaagtgccataaaacattagttaccaaaataactttattaagagttggccaaacttcaactattattactattactacagggtcttgttctagcaaagttccaatatttatcagttatcttacacatgacatttatcttaatatgtacataaatatcaggaaagtttaaatacttttattttactattttaatcttttccttaaagatgcagggtttcatactacatcaattaggcggacatgacaaaaatgacttaaataggaactgaatataaagaatactcgataccatgacatcatcatctggaacaactgaagttttctacctcttgctccattttctgaataagtgatgttttatcatggtccttgcgatgccgataaatacattggctgattactgcatacaaattttccaactgaaatatgttgtagttttgactttttttaacaacagtcttcaaaagattttttaatcgctcatgatccacaacaagtgagggtgtaggctgagaaagaattgccaaagccttttcaacagtgatgagctgctgctgttctacctgggaacgtctagctcgagtcattcgcagaacacacatttcttttccttcattttcatcagaaa

SEQ ID NO: 178761 - DNA, 978 bp, Homo Sapiens
  misc_feature (63)..(63): n is a, c, g, or t
  misc_feature (69)..(69): n is a, c, g, or t
  misc_feature (305)..(318): n is a, c, g, or t
  misc_feature (350)..(431): n is a, c, g, or t
  misc_feature (558)..(621): n is a, c, g, or t
  misc_feature (851)..(902): n is a, c, g, or t
catgtgaagaagatgttgcaaaggatttatttcacaaattttaaaggagatatgagtaaaagnttttancttttcttgactttttctcctgaacacttatgtcttagcaagtggtcaacatgaggatttgaacgcctaattgttggtaaatggttgaggcatgacaaaaatattaatatccactgtttaccatcatgttatttgaaacaaaagtgaccatgtatactatcttgcttgaagaagtctttgacagaaaaagcaatatcatgtcatttataaattttcttgttctaaagaaagcagtnnnnnnnnnnnnnnaattatgtaaataaaagttattttatatcccnnnnnnnnnnnnnnnnnnnnnnnnnnnnnnnnnnnnnnnnnnnnnnnnnnnnnnnnnnnnnnnnnnnnnnnnnnnnnnnnnntccttgtgggccgccccggccctcaaaaacttttctaaaccattcttttggggccggggcccagaaggaaagggaccttggccatacctgttcccaaggaaatccgggccaggactagggctgggannnnnnnnnnnnnnnnnnnnnnnnnnnnnnnnnnnnnnnnnnnnnnnnnnnnnnnnnnnnnnnntgggggccatcacggggatccaaccaacagggagccccaagcgggagcctccattaattcaaatttaagcccccggggcccttgaccctctcttcggaagaacaaggggggaaaaattcattgaaagcacttccctcccagaatggggagaccccatcccccaagcggggaatgaatgaaacccggaaatccgccccacgcgggcattcaccccccctttcgcccccttnnnnnnnnnnnnnnnnnnnnnnnnnnnnnnnnnnnnnnnnnnnnnnnnnnnnggttctcccctattttgggccacgggtctcaaaatgcacacggggggggaaaactgcccccccgggatattcctcg

SEQ ID NO: 178762 - DNA, 619 bp, Homo Sapiens; identical to SEQ ID NO: 9840

SEQ ID NO: 178763 - DNA, 342 bp, Homo Sapiens
  misc_feature (14)..(14): n is a, c, g, or t
  misc_feature (27)..(27): n is a, c, g, or t
  misc_feature (35)..(35): n is a, c, g, or t
  misc_feature (41)..(41): n is a, c, g, or t
  misc_feature (49)..(49): n is a, c, g, or t
gttgcccctgtggncaaaaaaaagggnagaccccngggaanttccaagncccccgggtgccattccccagcgtttagttttctagaggccctcagtttcctcccatcagcttatgggatcccttgtctttacctgacaagaatggaatagaaatgtaaaagtactctgaaaagcaattgcccctgtaacttatctagaaagaaaagaccctgagactccagaatctgctgttgccatagccccatatgtgtgaattctgcaactagccaaggctagttcctttcaattccatttaaaaaacaaaaaccagcaggtgtggtggctcatggcgtaatgggcctg

SEQ ID NO: 178764 - DNA, 434 bp, Homo Sapiens
  misc_feature (128)..(128): n is a, c, g, or t
  misc_feature (259)..(259): n is a, c, g, or t
  misc_feature (323)..(323): n is a, c, g, or t
  misc_feature (331)..(331): n is a, c, g, or t
  misc_feature (424)..(424): n is a, c, g, or t
cttgcgttgcttttatttaatcacttccccagcccttccatagccttttttgaggataagaaacccaaagttcccagagattaacttgcccaagatcacttggcctggatttgagcctgaggctcagnactccaaaacccacactcaatttgctacatctcccaggggtggggccaaggcagctgtgagcaaaaggagaagtatcagcttctcaagggcctagggtttgttggaagggcaaggcaagggcaaagggggntacagaacaagggggcaagtaccagtgcctggggatgggacccatccattcagggcagggggtntgggggtntcccctgtgcttaggaaaccacctaggcatcataggctggcaacagcactttattggggatctgagtctacagtttcttaggggaggtgaagncctggggttt

SEQ ID NO: 178765 - DNA, 483 bp, Homo Sapiens; identical to SEQ ID NO: 9853

SEQ ID NO: 178766 - DNA, 577 bp, Homo Sapiens
gtggaggggacaaagaagcagagaaggatgatcagaaggggacccccagcccttggaggagagacggcagcctcaggccgccacaaaggattttgtggagtcgccccaggcctgacggcgttaattatccctggctttcatctttatgctcttgcaggggatgctcaagatgccttgtggctcgacccctgcacggagcccccagcccagcctccccgtgggttgaaaccttgatctaggcctgactgtggctgctctggggacatgccctcgtcctttgctgaagctgaggctccagagggggagtcactgccacgaaggttgcccagaactttccttgctgcaaaaagccccaagacttctccctgccacacacacagcttttgccatcgcgttctaaaagctgacagctttctctccaacactgttctccctgagtagggtaaagctacacttggcttccccagtttcctgtttcctgcctagaaacaaatttttgtcagtctgcttttcaaatgggatatatgattcacataccataaaattcaccactttatatggagaaagacgacaaacg

SEQ ID NO: 178767 - DNA, 433 bp, Homo Sapiens
ggtggccagagagtggcaagtggtgggaaggacaaatgcctccggatatggaggagatgagacggcccgaagttctctctgacccccacctcgactcggcctctgccagctgccttccctgccagagaacaaaggctgagatggcagtgcacacaccctccccaccagtggggacctgagaatgcgtgtggcctgctgtcctcgatagaccggaatggggttttcccacagatccccgcctgtggcacaccccagagccagaaatcgaaggtcacaggaagttgtcactgaacttggcccgtgtctgctactctgtaccttgctggtacagacaggggtggtgggcagccaggctctatgagtgggcccctagtgtcagctctgtacagggtcagatcccaggttctatgaccaaataagtaacttaagtttt

SEQ ID NO: 178768 - DNA, 1354 bp, Homo Sapiens
  misc_feature (261)..(261): n is a, c, g, or t
  misc_feature (292)..(292): n is a, c, g, or t
  misc_feature (370)..(370): n is a, c, g, or t
  misc_feature (822)..(891): n is a, c, g, or t
  misc_feature (1306)..(1306): n is a, c, g, or t
agggcgaacgagacgaccggaggttggcggagccggagccgaaataatcggcgccggggactatactcgggagcgcgctcatcagtgggatgggctcggggcggcgttctcgtgtggagcggtttcgtgtcccgggggaggggcgtgtgtactgacgtcgcctgcgaggggagttacgcgatgggcgcgtcgggtgcttaacaaacctctggcgcgggggggtcgtacgatattcgcgcgcccaggggggcggagcccacntcgcgcgcggctcgtcccctctcgggggggncgcgacttacttctgccgtagcggggacacgtcaaggcacggtttcgtctatgtaataaaatcttccgccgggtgccngcgggaggcaaggcggagagcgattaccggcatctggctcggggcgcgctgagattccttcgccgcctcctagcgtttgggtggcggcaaaactccgtcacaggcgtgggggtgaccgagggcgaggaaccaggataaaagccggctccccgtataggtgtagagcgtcaccgtcggggtagttgggctttacatctcggcggtcctcgtgttgcgtcggggggcacgcccggtgcccgtgactctctagcgccgcggacccgtactgcgcggcgcgtcgggtcgatccgccgcgcgcgctctccgggtcgcgctcgggtcgctccgctccccgccaccgcccccgccaggagttcgcggcggcgagcgcggggggggagcaggcgcgctccgggcctcgggcacgaggcgctacgctgggggcacggcgcggacgggcatgggaggcccgnnnnnnnnnnnnnnnnnnnnnnnnnnnnnnnnnnnnnnnnnnnnnnnnnnnnnnnnnnnnnnnnnnnnnntctccccctaaggcactgactgggaaagccgaaagtagggagaagggaggccacattgtccccactttctggggctgggccccagatctccccagccctgggctccccccatcacctgaaatgctaagatgaggcccaggacaacccgatctccccgccaccccaatatattacatcatcactttttaaatagataacagggactggtcccgctaccccctccctgtgacccctccccactgttaggggtacctgggcagctgtgcaaatgggcatgggggtgcatggaagggaggaagagcaccgggcccctgaacctgccccttttaaggagggggaggagccgtcaggccaggaaggggaaatagtgcaagcagagcccaggctgcaaaaggggtccagcacccagcgaggnaaggggggtgtcccccacccccagcagaattgggtagttaaaaatctc

SEQ ID NO: 178769 - DNA, 979 bp, Homo Sapiens
  misc_feature (22)..(22): n is a, c, g, or t
  misc_feature (71)..(117): n is a, c, g, or t
ctaattttgaagcccttcctgnggattggagagcaaggctgaagagaaggaaaatggctccaaacacatannnnnnnnnnnnnnnnnnnnnnnnnnnnnnnnnnnnnnnnnnnnnnncagttcaaagtcttaaccagttttattgtcaaataaactataaatgttatgggggagatcttataaatttcctgggcaagagtgtatgcatacaaagttttcacttttgtgaaatgtaatttttctgtttttgcaaagggatgaggtgattggaattgctttgacccatgctgcctttattctcaaactggcaaacttagcatgttagggtgtattaacctcatcagtcttgaaggacatgtggctcatgagtataacacttctgtaggaggactccctgacaaaagtgaagaattaacttctcctccagaacaagtgcaattcagaaggcagctctgcattctaccttgcttgactggaattgtctgaagctttttctggcctctgttctctagtcggccacccctgaagtgctgaggtctaagtggtttacctcgtgctgatagatggccacactctttagagtaactctcataagttctagaactggtagctcggtcgtttcgcacactaggtggcatacaggcagcagcaggtgttcatatccttgattttgagaatttcccctcaagtatgtggcagtaaatacaacaagacactctatgtattaatgtctccattgtcttaaccctgttccaaaacaaaattcacctcctttctttatgtgaatgtattccccataaaattccagtatttaaaaagcagtttactgttctgtactttctgttgtatcacaatcaggtaaaagtcactttaaactgaggaaacggcaaattgtgttttaaagctctttgtatttctccagtttctgaccttgtaaatttgtatatatgcactaataaagctttttttataatcccga

SEQ ID NO: 178770 - DNA, 463 bp, Homo Sapiens
  misc_feature (129)..(191): n is a, c, g, or t
cttagctcaatgagcatgtttagactttaacataagctatttttctaactacaaaggtttaaatgaacaagagaagcattctcattggaaatttagcattgtagtgctttgagagagaaaggactcctnnnnnnnnnnnnnnnnnnnnnnnnnnnnnnnnnnnnnnnnnnnnnnnnnnnnnnnnnnnnnnntacttgtaaatataaagacgtcttataagcatcattatttatgtattgtgcaatgtgtataaacaagaaaaataaagaaaagatgcactttgctttaatataaatgcaaataacaaatgccaaattaaaaaagataaacacaagattggtgtttttttctatgggtgttatcacctagctgaatgtttttctaaaggagtttatgttccattaaacgatttttaaaatgtacactcgagcacgccgacgaaccccaaaaccctaaaacttgt

SEQ ID NO: 178771 - DNA, 381 bp, Homo Sapiens
  misc_feature (25)..(25): n is a, c, g, or t
aaattgtaccctttggggtaaatantttgtggccccgtgaccctcgttattgttacagcctgagtgtatgtttttgttctgtggagaatgctatctggcattatggtaatatattattttaggtaatatttgtactttaacatgttgcataatatatgcttatgtagctttccaggactaacagataaatgtgtaatgaacaaagatatgttgtatgagtcgtcgtttctgtcagatttgtattgtttccaagggaaaagcttgggggaggactcagttcacaaaatgcaaaactcaacgatcagattcacggacccagagcttttccatgtgtttatattgtaaatatttttgatttcatcaaattatttattcattaaa

SEQ ID NO: 178772 - DNA, 885 bp, Homo Sapiens; identical to SEQ ID NO: 10057
  misc_feature (554)..(565): n is a, c, g, or t

SEQ ID NO: 178773 - DNA, 434 bp, Homo Sapiens
  misc_feature (307)..(307): n is a, c, g, or t
  misc_feature (421)..(421): n is a, c, g, or t
cgcctctccgccgccggggacgccaaggtgcggctggtggcactgacatcggcggccctgcctctcctccctcgcccccggccttccccatgtgatcggtcttaatcctggccgtgtgtgcgcgcgtggggctccattccgcggtgctgggtctccgtgccggggtgggtgctcgtgtgtgcgcttctcctccccatcccccttcccccaagaataaaagaagaaccgggaggcgtgctcagaaaataaataaataaccaccacacacgcgcagcccggagcgagtcggcggggctggcggcacggncgggaggaggagtgaaggcggcggcggcggaggagggacgcgcggaaaaggcagcaactttaaagccagctcagagcctagacctccagccgagcggtttgcagcgcggcggcngcggcggcggcgg

SEQ ID NO: 178774 - DNA, 995 bp, Homo Sapiens; identical to SEQ ID NO: 10060
  misc_feature (232)..(346): n is a, c, g, or t
  misc_feature (374)..(388): n is a, c, g, or t
  misc_feature (405)..(422): n is a, c, g, or t
  misc_feature (546)..(554): n is a, c, g, or t

SEQ ID NO: 178775 - DNA, 1089 bp, Homo Sapiens; identical to SEQ ID NO: 10089
  misc_feature (625)..(625): n is a, c, g, or t
  misc_feature (987)..(987): n is a, c, g, or t
  misc_feature (1028)..(1028): n is a, c, g, or t
  misc_feature (1032)..(1032): n is a, c, g, or t
  misc_feature (1037)..(1039): n is a, c, g, or t

SEQ ID NO: 178776 - DNA, 558 bp, Homo Sapiens
  misc_feature (452)..(452): n is a, c, g, or t
gggaagggacagcagtgacatcggacagaagacccgggctcccgtcctcccccaggacggtccccacataggaagggcactcccagccctcttgctggtgacattgtcatggtcatcttgtctctgcttggatttttcttctgggtcttatgtttggggggaggtttattctttctgaaaatgtctagattcaggaacacatttatgaggatttggattttgaatttgtatttccctctaagtgccttttttaatgtctatttttttaataaaacagaaatgcattcttgtacaattctgttgaaactggaccaaggctctcagaagaggacccccgagttccttcccctcccccgagcctctgcatgattgtttcaagtcagcctggaattcttactttcacgccgctattcttttcctttctccgtgattgcttggctagccatttaaanaaaaatattctctgttcagtgtatatgttgcttgtttgttttatttattgagatatttttacaagctaagtgactgcagtgtggctgtgtatcctgctccccaccc

SEQ ID NO: 178777 - DNA, 415 bp, Homo Sapiens
ccttcacgtttgccatttctcctgtccgttcgctttggaaggcgacgaggccacagccgcctccccaggcctctccgcggcggcttctcccttcgctgcggtcttggagaactgggcacccatgctggccttcttcaacaaagaaactcaacagatccaagaggggaaacaaagagcctcgggttggtgtaacgacggggcgagcagcagcagcagcggcggcggcaacagcggcagcgccacacacaccggagggaggggggtgggggtggtggagaggacagaacagaaccgattaaatacactccggataaaaaaattttagtcgaagagatcaaaaagcagcagcacaggagggagggaaaaagggtggaaaagtcgagcacaaaaaaagggagcccaagtgttagtttcg

SEQ ID NO: 178778 - DNA, 842 bp, Homo Sapiens
ggggaacgccaccgacttgaggaagcccagtacatttcaagttggtcgcggcttgggctccgctttggggaggggcagcaggtttattcactggatctctgaatacccaggccccctccaccatggccagccggggtgggggccggggtcgtggccggggccagttgaccttcaacgtggaggccgtgggcattgggaaaggggatgctttgcccccacccaccctgcagccttctccactcttccctcccttggagttccgcccagtacctttgccctcaggcgaggaaggggaatatgtcctggcactgaagcaagagctacgaggagccatgaggcagctcccctacttcatccggccagctgtccccaagagagatgtggagcgttattcagacaaatatcagatgtcaggtccgattgacaaatgccatcgattggaacccctgattggcggcgtctaccccgggagctaaagatccgagtgcggaagctacacaaggaacggattacaattctgctccccaaggaggccccctaaagaccacagaagataagggaggaaacactactgaaacctcgagaccctggaacagaagggaagaagaagtaagtttcgggagagggatgagccagcgtgaggcggccgggagcgccatgcggggcgttgtggggcgcgcctccggcgcctggggaaagctttccaaagaacatttggtttggggcccccgggccgcggtagggcgaaggggaaacatgggggaaaacccggcgtctcctaaggaaaatcgcggggcgccggacttaaggggtttgggattccgcccacacataaagaggag

SEQ ID NO: 178779 - DNA, 739 bp, Homo Sapiens
  misc_feature (148)..(157): n is a, c, g, or t
  misc_feature (174)..(391): n is a, c, g, or t
  misc_feature (400)..(538): n is a, c, g, or t
ccccccgttttctccccggggggaaattttttcccaagggcccaagggttttatcccccggggatttaagtttcttaaacccgttttgggggggttccctttggcgcaaattttttaaaaatttccccccctctcccaaaagggcccnnnnnnnnnntaattttaattagaggnnnnnnnnnnnnnnnnnnnnnnnnnnnnnnnnnnnnnnnnnnnnnnnnnnnnnnnnnnnnnnnnnnnnnnnnnnnnnnnnnnnnnnnnnnnnnnnnnnnnnnnnnnnnnnnnnnnnnnnnnnnnnnnnnnnnnnnnnnnnnnnnnnnnnnnnnnnnnnnnnnnnnnnnnnnnnnnnnnnnnnnnnnnnnnnnnnnnnnnnnnnnnnnnnnnnnnnnnnccccaaagnnnnnnnnnnnnnnnnnnnnnnnnnnnnnnnnnnnnnnnnnnnnnnnnnnnnnnnnnnnnnnnnnnnnnnnnnnnnnnnnnnnnnnnnnnnnnnnnnnnnnnnnnnnnnnnnnnnnnnnnnnnnnnnnnnnnnnnnnnncctggctaggctaggtttattatttttttcccccagaaaagagactgaaagttgaatttgccttatccaaaatgcttggaaccacaagtgtttcagatttcaggattagggatacttaacctgtaccaagttccaattcatggagaggggccatgattcctgctgtgcttgagcagagagatctcctgacccacgcgtccg

SEQ ID NO: 178780 - DNA, 1152 bp, Homo Sapiens
  misc_feature (39)..(39): n is a, c, g, or t
  misc_feature (46)..(46): n is a, c, g, or t
  misc_feature (675)..(675): n is a, c, g, or t
  misc_feature (678)..(681): n is a, c, g, or t
  misc_feature (684)..(758): n is a, c, g, or t
  misc_feature (838)..(838): n is a, c, g, or t
  misc_feature (941)..(941): n is a, c, g, or t
ggtgtctcttgggggagagatatggtttggtgcctccancgccgancccccggttgaggagtgttctaccccctccattgtgtggggtgagaaacaggctgggccccgagaattgggcggacattatttatttgccgcccgcccgctcttgctccccacagtgagcgccgaagagggcgcggggggcgataaggggcgaaaaatttggctggcgggcgcggccccgggccccggttttcgacggatgtatgaggacaagggggtctctggtgacgagggtttccaccgggggcggggggcgaaatgagcgcacacaggaagctgtccccccgcgggccctttcgttttttgttggggggacggcgtcccgacgcctctaaattcgtgttgtttcgggggtctgcttctttggggggcccggcgggggtggaaccccctgttcttccccctcaggaggcgcgccgccgggggcttcgataaagggacgttttgaggggtttcttccggggcggggggtgggtcgggcgagagaaatttcaaagcgcttgttgtggggggggccgggtcccttcttaaggaaaaccaacttttaggcccatggtcgggcttgcccggttggggccggcacgcgccaaaaaaatggttttagaaggttttcggaggggccgtggtgtnttnnnnggnnnnnnnnnnnnnnnnnnnnnnnnnnnnnnnnnnnnnnnnnnnnnnnnnnnnnnnnnnnnnnnnnnnnnnnnnnnaaagaaacacacacacatttattttaaaatttgcacataatccttgggtaattattagcatttttcagaagtttccgagnactgatatctcaactccaaaccaatagtcaatagcttatttgattggtggaaggattagagagggtcccatgatccagatgaatagatggctatcaaagaagnacagaaccccatagacacaggcagcattaagtcataatttttaaattaactgtcacaaatatgaaacatctcaccagaccaatgataacgtccatatcataatttgcattttaccaaagtgtccacatagacagcacagaactaaaagttctgtgacttcagaatcatatttaaattaatttgatcctttatattataataattaaaaact

SEQ ID NO: 178781 - DNA, 1208 bp, Homo Sapiens
  misc_feature (296)..(328): n is a, c, g, or t
  misc_feature (370)..(389): n is a, c, g, or t
  misc_feature (439)..(455): n is a, c, g, or t
  misc_feature (567)..(598): n is a, c, g, or t
  misc_feature (651)..(651): n is a, c, g, or t
  misc_feature (732)..(732): n is a, c, g, or t
  misc_feature (736)..(736): n is a, c, g, or t
  misc_feature (824)..(824): n is a, c, g, or t
  misc_feature (827)..(827): n is a, c, g, or t
  misc_feature (1000)..(1000): n is a, c, g, or t
  misc_feature (1044)..(1044): n is a, c, g, or t
  misc_feature (1074)..(1074): n is a, c, g, or t
  misc_feature (1109)..(1118): n is a, c, g, or t
ccttatgtcccacctgaatgactgcgtgtgtcccaaggtggcttcccactgaagggacacagaggtccagtccttctgaagggctaggatcgggttctggcagggagaacctgccctgccactggccccattgctgggactgcccagggaggaggccttggaagagtccggcctggcctcccccaggaccgagatcaccccccagtatgggctagagcaggtcttcatcatgccttgtcttttttaactgagaaaggagattttttgaaaagagtacaattaaaaggacattgtcnnnnnnnnnnnnnnnnnnnnnnnnnnnnnnnnncaaagcaaaacaaacaccctgaaacaaccaaaaaagtaacgnnnnnnnnnnnnnnnnnnnncagaaaagcgaacgcccaacaaaaaccaagaagggggaaaaagccgcggnnnnnnnnnnnnnnnnntttggggggcccgccccgccccccaaaaaattttttcaaaaccctttcgttgtggggcggggcgcccccgaaagggaaaaaggcgaacaggggcaaaaacggggggtccccnnnnnnnnnnnnnnnnnnnnnnnnnnnnnnnngggggtgtgggactccccccccccaatataaaaaaacaacccccgccgggggngggcacacacccacaacgcggttctttattaaacaaaaatactccccaaagaggggggaggcctcctgtgagaggagggtntctntgtacgcgggggatactccataatccgcccgaggcggggcgccccacacgggccggagcacctccatagtaatatagaaaatattacnccncccgccccgcgcgcccctgggggaacactctcttatggtgggaagaatgaagggaggtggtgggaacaacctctcctactataaaacacatttttttcctgcgcaccacgcaaagatggtggcaggcacctcttcactctcacgaaaaagcgggggggagaggatagcgagangaaactcgctgcagatatgcatcgcgcccccgcgcgagagaganttataacacgaccggtctcgtgggtgtggntgccggggcgcgacgagataaataaataatccgtnnnnnnnnnngtgtgggagagacacaaagcggggccgggcgcaaaagaaaaagaacgcggcccgcgccatcaattgttggcgcccgcgccggcttaaaaa

SEQ ID NO: 178782 - DNA, 615 bp, Homo Sapiens
  misc_feature (56)..(189): n is a, c, g, or t
  misc_feature (199)..(221): n is a, c, g, or t
  misc_feature (413)..(421): n is a, c, g, or t
  misc_feature (516)..(516): n is a, c, g, or t
  misc_feature (532)..(532): n is a, c, g, or t
  misc_feature (562)..(562): n is a, c, g, or t
  misc_feature (602)..(602): n is a, c, g, or t
ccccgccccaaaaaaaggtttgaaaaaattttttgggggggggggggcgcccaaannnnnnnnnnnnnnnnnnnnnnnnnnnnnnnnnnnnnnnnnnnnnnnnnnnnnnnnnnnnnnnnnnnnnnnnnnnnnnnnnnnnnnnnnnnnnnnnnnnnnnnnnnnnnnnnnnnnnnnnnnnnnnnnnnnnnnatgtctccannnnnnnnnnnnnnnnnnnnnnnaaaaaagcaggcataaaatacaattacattactacgaagatgcaacaaaattttaaaaaagaaaaaggggtgcaatttttttcagagaggacagctgatcaaatatttataattttctaaaccatgcagttcattacttattacaattccaaacaaaactcattattatggggatgggagtcagggagaggnnnnnnnnnaagcatgatatccagcgctgtcacacagtgcttatgttcaaagtgcttacaaatgggtgtcttcacagcataggggaagctgaagccttattccnggggaagggagaggtnagtcagtagccagtgtccaatgcaggctcnggaagcttcgggcagtgactttgctccaatcaggtttttngggccccggtttt

SEQ ID NO: 178783 - DNA, 672 bp, Homo Sapiens
taaagaaaattatattcaagtggcaaatttggaggcaacaggctacttcggagtccatgatatgagatggcgttttaaatacatgttttatcttcaaggttttcagctcttttctctggaccatctggatataagttgatagctgtcacaggtatgacgtccactttatccaactgaagaattcctttgtattcagaaactgggaaaaacacctttaagatggttattaccacagctgctcctgtaattccaaccaccatgatgttcaaaaactgaaagaatactgggaaaacgttgctccagaacctacacagatcttttctaaactcttccatccactgacacattaccttatatgaagatggcggctctgctctgagaggagtttcaggtaacttgcccaggtaaaacatcttcatctacagtggtttccacattcctgataagatactggctagtggtttgcagtgaactaacactttcttttttggagaggttaggaagggtaaataaaatgtcactgtctcgagaaatagagtagagcatgctttcttccaaagggagggtatagtttgaatgtctgagtactccccggttcttaactaaaatatcaatttcagtgacatccttttgctgaacttgttttccatcaatctctactacctcttcttg

SEQ ID NO: 178784 - DNA, 786 bp, Homo Sapiens
gccaggcccggccacagagaatcagggagattctttggcgagagcccaaccagcggatgtccatcgacaccggtaaatacggcactggtgaccagttccaggagagtgaaccaagcaactgaagcgtggtatccgctgtagtttagcatagccggagtagttaggagaacatgcgtgtaacaggctttgtagcctgtctagttagctctagagttatgcatcgtagatctccagtagcccgagttgaccaagctcccctggtctctctacactgaagtccgctgtagcttgaaacttgtactaaacgtactcagaagtaaccagtttacctgtaaaactgttacaagtagcagcccatattaccttgaaagtaaagtgagacattaataggaatgctgacacagatttcatttctaactactagagagaaagcatctcctagacaaaatactatttagatatgaattattttaagatcacagccagaaaaatgtcataaaacatctttagattttgcttggaaaagttagaaaagaaagctttgtgtatcgctcttttatcttttatttccaaagaagatgtacaaatgcttacataatcagaacagtgcaatcttaccaatgaagtttaccttgtgggagctacatttacttatttcatatattagttcaacaacataaatataataaaaatgcttttaagcaatctgattagagcaacatttatattaactacaaaatatacagtaaaatgaaacatcttgttaaataggcctgtaggaaaaca

SEQ ID NO: 178785 - DNA, 373 bp, Homo Sapiens
aaagggtgcgccctcttccctctacccccgcacccacctgctgtgtgccaaccctaaaacggttccctgccctgtccttgggggttggtgaagggtggaaggcagttcctgcccagccgtggcagggctgctatggggcatcccagggctgtgggggtctggaggaggggacatgaggtgagaggtatcctggccgagggcggggggcagcggggggtcctcctccggacctacctcagggagctgagcgtgcaggcgctccagggcaggcctgggacagagtcaaggctcagagaataaaggtagctaatctcatcataatatttttattagaatgttctgatgataaaaataaaacttgttttctttaaag

SEQ ID NO: 178786 - DNA, 824 bp, Homo Sapiens
  misc_feature (410)..(472): n is a, c, g, or t
  misc_feature (518)..(532): n is a, c, g, or t
  misc_feature (656)..(684): n is a, c, g, or t
tatcctgacccccatggggcactgtaaggcctgcgctgtgttcaatccgcgttccagttatctcaagtcatggctggacaacacagtggctcgaacgtgcccatccagctttgagttttctaagaggtgataatttacagatgctcccctcggggaaaggggaccatgaggttcgctccattactcccacccaagggataattttcatcactataatgacgagacgagcaatccacacccccaccagtctcactgttccgattgttcacttgtttaaaaaggagataaatccatctgaaagtaggagaggaggagtgggagagggagagaagctcatggctttcacagacagcctgactcccctggaggggagaggaggaaggcagagagacatgatggtctcctggttnnnnnnnnnnnnnnnnnnnnnnnnnnnnnnnnnnnnnnnnnnnnnnnnnnnnnnnnnnnnnnnaggggccatttaaaccctgacgactaatttagtttactgtgttttnnnnnnnnnnnnnnngccacatgcatagcaggccccttgggggctaagggcccacactgctccctgtgtggccgtggtagacactagctcctggcctcatccccattccttcacaggtcagagtggagctatgcaggcnnnnnnnnnnnnnnnnnnnnnnnnnnnnnagtggtggtggtggtggcggcggcggcaggaccttcggctactctgctggagccaatgtggggagggaagggcagacaggccgtatggtaggggaaagcacaccacaatgcctcatttcaaataaaaaagaaaacagcag

SEQ ID NO: 178787 - DNA, 369 bp, Homo Sapiens
ggatctcactggaagctatccaagagcccactgtcaccttctagaccacatgatagggctagacagctcagttcaccatgattctcttctgtcaccctctgctggcacacccagtggcaaggccccagaatggcgacctctctttagctcaatttctgggcctgaggtgctcagactgcccccaagatcaaatctcccctggctgtagtaacccagtggaatgaatttggacatgccccaatgcttctatatgctaagtgaaatctgtgtctgtaatttgttggggggtggatagggtggggtctccatctactttttgtcaccatcatctgaaatggggaaatatgtaaataaatatatcagcaaagc

SEQ ID NO: 178788 - DNA, 443 bp, Homo Sapiens
  misc_feature (69)..(69): n is a, c, g, or t
  misc_feature (106)..(106): n is a, c, g, or t
  misc_feature (110)..(110): n is a, c, g, or t
  misc_feature (171)..(171): n is a, c, g, or t
  misc_feature (379)..(391): n is a, c, g, or t
tccttggacccaggtgttgtattgcaggaccccttcccccagcagccaagccccctcttctctccctcncgccctggctcagtcccgcgccccgcccgtccccccncccnggactggtctgttgtcttttcatctgttcaagaggagattgaaactgaaaacaaaatgagnacaacaaaaaaaattgtatggcagtttttactttttatcgctcgtttttaacttcacaaataaatgataacaaaacctccccgtctgcgggtgctgtctgtctccccccctttccttccctccctgtagttttgaagcggatgtttgttctttatagatgttgtttaaaaagcctgataatggtgattgaaatttacaaactttgtgnnnnnnnnnnnnnaagaaaaatataaaatagttttcttcaggctcaatgtgctttcctaaccgtg

SEQ ID NO: 178789 - DNA, 928 bp, Homo Sapiens
ccaagtctctctcgtgcgcagagcccaggctgcgcttccctggtcaggcacggcacgtctggccggccgccaggatgcaggccccgcacaaggagcacctgtacaagttgctggtgattggcgacctgggcgaggggaagaccagtatcatcaagcgctacgtgcaccagaacttctcctcgcactaccgggccacaatcggcgtggacttcgcgctcaaggtgctccactgggacccggagactgtggtgcgcctgcagctctgggatatcgcaggtcaagaaagatttggaaacatgacgagggtctataaccgagaaactatgggggcatttattgtcttccatgtcaccaggccagccacatttgaaacagtggccaaagtggcacccaaatgaattgggactccaagttaaatctccctaatggcaaaaccggttccagtgggttttcgttgcccaacaaatgggaccaggggcaaggatgtgctcatgaacaatggcctcaagatggacccagttctgcaaggagcacggtttcgtagcgatggtttgaaaccatcagcaacggaaaatataaacattgatgaagcctccagatgcctggtgaaacacatacttgcaaatgagtgtgacctaatggagtctactgagccggacgtcgtgaagccccatctcacatcagacagggttgccagctggctctggcctggtgccaatcctagtaggcacctttgctggtgtctggtagggaaatgaccctcattgttccaccaaatttggtgcctctattttaacccatttggggtaaacgtccgggatccaagatacccccatgtggcaagccaaaagatctattgcctctggtttgcgccatggacagcagaattagccaaggttctgccaagcgcttccttcacaatcatcca

SEQ ID NO: 178790 - DNA, 385 bp, Homo Sapiens; identical to SEQ ID NO: 10528

SEQ ID NO: 178791 - DNA, 792 bp, Homo Sapiens
  misc_feature (182)..(195): n is a, c, g, or t
  misc_feature (211)..(273): n is a, c, g, or t
  misc_feature (279)..(336): n is a, c, g, or t
  misc_feature (366)..(375): n is a, c, g, or t
  misc_feature (395)..(410): n is a, c, g, or t
  misc_feature (451)..(466): n is a, c, g, or t
  misc_feature (512)..(546): n is a, c, g, or t
  misc_feature (571)..(606): n is a, c, g, or t
  misc_feature (609)..(613): n is a, c, g, or t
agagatttattttttctctaaaggcgcggcacagaggttttttagatcgtccccctcggggggattttagtgtttttcttctctgcccgcgttttgtagagagggtcgcccacctggcgcggggggaaaaatttcttataaaaaaatttcccgccctttttttcgaaaaaaggggaccacannnnnnnnnnnnnnatattttgtatttttnnnnnnnnnnnnnnnnnnnnnnnnnnnnnnnnnnnnnnnnnnnnnnnnnnnnnnnnnnnnnnncccccnnnnnnnnnnnnnnnnnnnnnnnnnnnnnnnnnnnnnnnnnnnnnnnnnnnnnnnnnngaaacccacaccccttgtctggtccccggnnnnnnnnnnggaagaaacggttgtccccnnnnnnnnnnnnnnnnggggcccccccccccaacaaaattgtttaaaaaattttttnnnnnnnnnnnnnnnncgaaaaaaggggatattgttttttatgtgttgttgaggaggggtgnnnnnnnnnnnnnnnnnnnnnnnnnnnnnnnnnnnggtttgtgtggtttgtgttgggggnnnnnnnnnnnnnnnnnnnnnnnnnnnnnnnnnnnntgnnnnnttatttgagcaatttattttttttcaaagaaatccatgcaaagagagaacgatagaaagggagggagtgagagagaaagacatggtaaccatgttctagcagccaaacataggagaataatttggcacaacttgatggttttttttctttctttgcaaaaggacaatctatatgctacc

SEQ ID NO: 178792 - DNA, 1478 bp, Homo Sapiens
ggggggtccttcgacccgtgctgagctggatggaccgcgagacgcgcgccctcgccgacagccacttccgaggcctgggggtcgaggtccccggcgtcggccaggctccgggccgggtagccttcgtctcggagccgggcgccttctcctacgccgactttgtgcggggcttcttgctgcccaacctgccctgcgtgttttccagcgccttcacgcagggctggggcagccggcggcgctgggtgacgcccgcggggaggcccgacttcgaccacctgctacggacctacggagacgtggttgtaccagttgcaaactgtggggtccaggaatacaactcgaaccccaaagagcacatgactctcagagactacatcacctactggaaagagtacatacaggcgggctactcctctcccaggggctgtctctacctcaaagactggcacttgtgcagggactttccggtggaggacgttttcacccctgcctgtgtacttctcgtccgactggctgaatgagttctgggatgcactggatgtggatgactaccgctttgtctacgcggggcctgcgggcagctggtccccgttccatgctgacatcttccgctccttcagctggtctgtcaatgtctgtgggaggaagaagtggctcctcttccccccagggcaggaagaggccctgcgggaccgccacggcaaccgtgccctacgacgtgacctcccccagcactctgcgacacacacctgcacccacggaaccagcttgctggcccacccttggagatcacgcaggaagcgggcgagatggtgtttgtgcccagtggctggcaccaccaggtgcacaacctggatgacaccatctccatcaaccacaactgggtcaatggcttcaacctggccaacatgtggcgcttcttgcagcaggagctatgcgccgtgcaggaggaggtcagcgagtggagggactccatgcccgactggcaccaccactgccaggtcatcatgaggtcctgctcgggcatcaactttgaagagttttaccacttcctcaaggtcatcgctgagaagaggctcctggtcctgagggaggcagccgctgaggacggtgctgggttgggtttcgaacaggcagcctttgatgttgggcgcatcacagaggtgctggcctccttggttgcgcaccccgacttccagagagtggacaccagcgcgttctcaccacagcccaaagagctgctgcagcagctgagagaggctgttgatgctgctgcggcccatagcacctgtcgtgaggatagaaggacgggtggaagagaggcagctcctgctccggggccttccagaaaataaggaccggcctctcttgtacctgggggcccaccctggtatacaactataacactccaaaacaagggggcgcgcaaaaagtttccctggggggcccaatgggcccccgttttgtgcaaggggccc

SEQ ID NO: 178793 - DNA, 757 bp, Homo Sapiens
  misc_feature (72)..(83): n is a, c, g, or t
aactgaagaattcttttatttagtgggaaagaagtaggtaaatgacagacagctcatattctgttaaacagnnnnnnnnnnnngaatacaaacatcacagtgatgaattttcacaaagctaacagatttgaactacagagcaatggaatatttataagcaagatgtcatggtattaatgaccaaattgcatctaactgggttttctaagctcaaaaacatttaaaatctcagacttaaaatttaaatctagacatgacaattgtaagcataccactcagtcatttaaaactattcagtgagtgctactcttcctgcataaatatttttgtcctaacattattttttctcccaagatttagaatgtcacatctcatgttcctactagtaatcacacaccaggattaaaagcccaaccaagaaagtattctttttataatatgttcttaaaagaagaaagaaaaattaaatgtgaacattttgtacaatagttgctgaagaacagtaaaaccaattccgaaatatcatgtgtactatacagaaaggcatggctcatggaaccaagtattcaacactacagcatttgaatatcagtctttaaaggttggtaatattacatcctgtacacagctctgtgtctctctacctggctagcgcatgcccaggatctgtctgcttttcagttggtaatttttctcaatatctgacagggcttgagcccgcagctgggcagcgtgaagccttttcttcaggtccttg

SEQ ID NO: 178794 - DNA, 810 bp, Homo Sapiens; identical to SEQ ID NO: 15878
  misc_feature (655)..(694): n is a, c, g, or t
  misc_feature (697)..(704): n is a, c, g, or t
  misc_feature (706)..(729): n is a, c, g, or t

SEQ ID NO: 178795 - DNA, 653 bp, Homo Sapiens
gaacaagaaaggctcagagctgtggctgggggtggatgccctgggtctcaacatctatgagcagaatgacagagctaactcccaagataggcttcccctgtgagtgaaatcaggaacatctcttacaagtgatgagaaatttgtcatcaagcccattgacaaataaagccccgggacttcgtcttctatgctcccctggcgtgcggattaacaatgcggatcgttggccttgtgcatggggaaccatgaactatacagtgcgccgttctgcaagcctgataccattgaggtgcagcagatgaaggcacaggcccgggaggagaagcaccagaagcagatggagcgtgctatgctggaaaatgagcaagaagaagcgtgactagtggcagagaacggacggaacgacgagagattgaacgggagaaggaggacgctgatcggagaggcatgaagcagatcgaggaccagactaagacggctcagcaagaactggaagaacacgacccgaacgggctctggaacttgagcagggaacggaagcagtgcccagagcgaggctgaaacagctggccacggagcgtcagagaaaggcagaagaggccaaaggaggccttgaagagcaagaacatcccggggacaggaagaaagacata

SEQ ID NO: 178796 - DNA, 855 bp, Homo Sapiens; identical to SEQ ID NO: 10635

SEQ ID NO: 178797 - DNA, 1005 bp, Homo Sapiens
  misc_feature (26)..(26): n is a, c, g, or t
  misc_feature (73)..(130): n is a, c, g, or t
  misc_feature (153)..(183): n is a, c, g, or t
  misc_feature (510)..(621): n is a, c, g, or t
  misc_feature (757)..(816): n is a, c, g, or t
accccaggtgtggtggacatccctgncaacccaagctactcaggaggctgaggtgggaaaatcgcttgaaccnnnnnnnnnnnnnnnnnnnnnnnnnnnnnnnnnnnnnnnnnnnnnnnnnnnnnnnnnnacgagagtgaaaccctgtctcannnnnnnnnnnnnnnnnnnnnnnnnnnnnnngtgtgaacttaaatatatttatatgtgtgtacatatattttcttttttaatattctggttaaatcgagagccatcgggcctctttttaagagtctaatgatgtgtatatctaatgcccattccagctggattgtaacactgcttggggaagataacttaaaaaaaagtagtaccgagattacagcagctagtgtcctaaatggaaaagaagtgaaactaaatgtcataggagaaatcctttcagttttgtgcagtggttcatttgctgttaaatctaccccattaccattccccttactccttgaaaataaagtgatcttcatgttnnnnnnnnnnnnnnnnnnnnnnnnnnnnnnnnnnnnnnnnnnnnnnnnnnnnnnnnnnnnnnnnnnnnnnnnnnnnnnnnnnnnnnnnnnnnnnnnnnnnnnnnnnnnnnnntttggcgggcccctccggccccccagaaaatttttctaaactttttgtttgggcgcggggccccttagggcacgggacctgggcaaaaatttttcccaaggaaatcttggcctggccaagggctgggttccccccnnnnnnnnnnnnnnnnnnnnnnnnnnnnnnnnnnnnnnnnnnnnnnnnnnnnnnnnnnnnccttaacgggccttttcaccgggagcccaggcgacttcaaattaaatttaccccccggccttggccattattcgaagaaaggggggaaattcttaaagcattttggccgaattgggaaccccttcaacaaagggaaggaataaaccttaattcccccgcggcattccgccccctggggccccctttgcc

SEQ ID NO: 178798 - DNA, 866 bp, Homo Sapiens; identical to SEQ ID NO: 10651
  misc_feature (631)..(669): n is a, c, g, or t
  misc_feature (726)..(736): n is a, c, g, or t
  misc_feature (772)..(812): n is a, c, g, or t

SEQ ID NO: 178799 - DNA, 810 bp, Homo Sapiens; identical to SEQ ID NO: 10653
  misc_feature (192)..(224): n is a, c, g, or t
  misc_feature (606)..(621): n is a, c, g, or t

SEQ ID NO: 178800 - DNA, 836 bp, Homo Sapiens; identical to SEQ ID NO: 10655
  misc_feature (421)..(471): n is a, c, g, or t
  misc_feature (561)..(570): n is a, c, g, or t
  misc_feature (577)..(720): n is a, c, g, or t

SEQ ID NO: 178801 - DNA, 445 bp, Homo Sapiens
  misc_feature (90)..(90): n is a, c, g, or t
  misc_feature (170)..(170): n is a, c, g, or t
  misc_feature (352)..(352): n is a, c, g, or t
aaaaacgggtgaatcttcgagaagggctcccctggggccgaaggggtcccaaaaaaaagttccaagaaaaataaattggtttcgcccccnatgcatcttcccatggtcgaggcctcttctccctccgaaaccctgggggctggtgcccctactcccaagccccatcaccnactgttgtgggagagcccatcacccatccccaagctggagcacccaacccagcaagacatcgacctgtaccacacccatgtacatggaggccctggtgaagctcttcgacaagcacaagaccaagttcggcctcccggagactgaggtcctggaggtgaactgagccagcttcggggccaantccctggaggaaccagctgcaaatcacttttttgctctgtaaatttggaagtgtcatgggtgtctgtgggttatttaaaagaaattataaaaa

SEQ ID NO: 178802 - DNA, 436 bp, Homo Sapiens
  misc_feature (18)..(18): n is a, c, g, or t
  misc_feature (33)..(33): n is a, c, g, or t
  misc_feature (68)..(68): n is a, c, g, or t
  misc_feature (74)..(74): n is a, c, g, or t
  misc_feature (100)..(100): n is a, c, g, or t
  misc_feature (112)..(112): n is a, c, g, or t
aaaaccttcaccagggcntccaatgtaacatgntgtggtaacaggtcaatgtcttgctgggttgggtnctccancttggggatggtgaatgggctctccnacaacagtggtnatgggcttggagttaggcaccagcccccaggtgtcggaggagaagaggcctcgaccatggaagatgcatggggcgaaaccaatgtatttctggaacttcttctggacccatcggccccaggagccctcctcgaagatcacctgcttgtacacttcattctctccaaaggagtagatgggaaccaggtcagctccatgacgcagggccagtttcacaaacgcccttcgggttccgcagggtgactgcattcttgccaggcatggagctcagagactcagccgcacccccgaccacgatgatgatagcattgccactcccattctt

SEQ ID NO: 178803 - DNA, 855 bp, Homo Sapiens; identical to SEQ ID NO: 10698
  misc_feature (534)..(537): n is a, c, g, or t
  misc_feature (539)..(540): n is a, c, g, or t
  misc_feature (547)..(547): n is a, c, g, or t
  misc_feature (719)..(719): n is a, c, g, or t
  misc_feature (727)..(727): n is a, c, g, or t
  misc_feature (760)..(761): n is a, c, g, or t

SEQ ID NO: 178804 - DNA, 1546 bp, Homo Sapiens
  misc_feature (129)..(129): n is a, c, g, or t
  misc_feature (252)..(252): n is a, c, g, or t
  misc_feature (453)..(453): n is a, c, g, or t
  misc_feature (515)..(515): n is a, c, g, or t
  misc_feature (680)..(680): n is a, c, g, or t
  misc_feature (826)..(826): n is a, c, g, or t
  misc_feature (1440)..(1440): n is a, c, g, or t
  misc_feature (1503)..(1503): n is a, c, g, or t
tgcggtgggtgagcagatcgcgttcgagtgtctctgcgatgtgggtggagcagagggggcttgaggtgattggaagatagtgttttcggcgcgtgtactaagggttgtcgccgtctgatagttgcgttnggtgggtgtggatatgcgcagcagccggagggtgaggggttcatgcgtatatgttgagaagtgaagcgtcgcggaagaacgttggggtcagtcgttttgtcatattaaaggacgattttgtgntccgttgggggcgcccgacggtgtctagctgtatcctcactagcgcaagctgccgtcatagtgtgctggggcgacggagccatcgaacgcgttcggtggcatgtcttggagtaggggggaaggacatgcggggcggggctcatgtttatgcggctgtgggagggttacattggggtgagatgtctgcgggacggtcgaacntttggcggagtacctgcagcccactggatctttcgcacgggggtggggctgcgcctggcggnttcccgtgttgttcgtggcgtgggtgttggaacgaggtatttgggactgcggtgtgacaatcgtcttattttgacgcatgctggcgggggggagtccatccgcccgggtaatatttcgaggtgggggcgtggttcattcgtggacgattgattgccggggactgncagaaacgcaatggatgtttctatctatacgcgagcagtgctgcgtcccgcgaaaagaataatgagtgggaggggggggcgggaattctagctctggcatcagggtctacgcgctgcggcggtgccctcccgtgtcgtgcggagtngagcggggcgtggtgagggcgcgacatggtgtcgaaccggtagggatggcgggagtgggtatcagagtgtggggtgcgaagacgtggaacgggtgcgggcggctagttgggtttatgctcgggcgtgcggaagggggggtgtgggcgaaggaggtgatttcattatatagtaaggcggggggacgcgtgcggcggagtggctattaagccgtattggtttaggttcttaagaaaagagtgtgcatggggaatcacggaaaatggtgcaggtccgttgaggtgtccagatatgggtagtttaatgagagcctttgcagtgttttcatgcatgaagactcaggtgtggccatggtggcctgagatagccgtaggcaccaggtatctcatgccagtacctggggctccctatagctgtcagcagtgtagcaaaggccctctgcctgcccctaacgccaaactccatgcctgcctcagtcatggtttgtttttgcttctggaaggggtagatggagggtgggaaatgctttggagctaacatgggatgaacagggagggttacccaacctgccattttttatccaaactctgcaggcaaatccagacagagtctcagnaagactgaaaaccagggaccaaacaaaactctgggagcttcccacagacatgcacatgtgacnaagggttcctgcacatagtagtagcaaaggtatggtgttcatg

SEQ ID NO: 178805 - DNA, 330 bp, Homo Sapiens
  misc_feature (20)..(20): n is a, c, g, or t
  misc_feature (38)..(38): n is a, c, g, or t
  misc_feature (44)..(44): n is a, c, g, or t
  misc_feature (53)..(53): n is a, c, g, or t
  misc_feature (74)..(74): n is a, c, g, or t
  misc_feature (104)..(104): n is a, c, g, or t
  misc_feature (108)..(108): n is a, c, g, or t
  misc_feature (112)..(112): n is a, c, g, or t
  misc_feature (124)..(124): n is a, c, g, or t
  misc_feature (147)..(147): n is a, c, g, or t
  misc_feature (179)..(179): n is a, c, g, or t
ggaaagtagttacctggaanctgtaaaggtattaccanttttanatttaaacnccctatagagatccttcaaancccttgagtcctgagccttgtgggtggaantccnaaanttgtatcataanctgtcctttgtgaaacattttgnaaatatgtatatataatattgtatatgcaaantgtgttgtttcacttgtaaagggaaaaggcttatttttctttatatttctgataacttgttttgcatatgaccagcactgactgaaaggcatgtgtagctgcaaacactgttgctttttttgtgaaatgaaaataaaagtatttaaatacc

SEQ ID NO: 178806 - DNA, 970 bp, Homo Sapiens
  misc_feature (870)..(927): n is a, c, g, or t
gacgttcctcggagctctttgatgcctcagacctttcccttttatccctcttgctcaggtgcttcctttcacaactttttccagagggcaggcgtcctagctccagttgctccatcccttgggccctcccctgctcttcatctagccaaactggtttgagtcagccacaccccttcccagctccctgggctcttcacgtggtggctggccactcaaccccacccctgggcttggcttggagccctgagtcagctccatcaccacccaagccaaaccaaagctgaggcaggagccgaaactcagagtccttcaaggcctatagccaggtgatggaggacgaggagaaggcagtggagatcttgggcaacacggaagctgctcatcctccatcccccatccgctgctgctggctccgcctccgctgcttggcagctactagcattatctgtggctgctcttgcctgggagtcatggctctggtgtttgccatcaaggcggaagagcggcataaagcaggccggtccgaggaggcagtgcgctggggggcccgggcccggaaactcatcctggccagctttgctgtctggcttgctgtcctcattctgggtcccctgctgctgtggttgctctcctacgccatcgctcaggctgagtgaccctggatggcctctgctgagagccagccgagacctcctggatcctgcaatgcggcattgctaaggtcctgtgacagcagtggttggaaggatcctggttggaaggatggggactctctcaaggggctttggaagagctcttctagccctttataaaaggagggcagcagctgagactgatgagaggagggcagcctgctctgttctttccagnnnnnnnnnnnnnnnnnnnnnnnnnnnnnnnnnnnnnnnnnnnnnnnnnnnnnnnnnngggaaggggttgaaaaaccaggcctgggtttttaattaaaatt

SEQ ID NO: 178807 - DNA, 574 bp, Homo Sapiens
  misc_feature (245)..(294): n is a, c, g, or t
  misc_feature (552)..(552): n is a, c, g, or t
gggttcatattgttattgtccaatcatcaagttaactaagcattatcagattacgtttatttctcatacatatggatattaacttaaggtaaaaaagctagatgtgaaggttctgaaaaggcattaatttatgtactaattctataaacatgtattaataattgcagtattattaaatacagatggactcaatgtacctttgaaaagaccactaatttagaaaacaaagctaagtgcagtcattnnnnnnnnnnnnnnnnnnnnnnnnnnnnnnnnnnnnnnnnnnnnnnnnnnggtctaagttttcttcatgctggaacaaatgttaaagaagcagtgattgcttacaatgtatgtgataaaataatacctttcacaatcaaaattttaatagtaaatataagataaaatttatattaaataatgaaaacgtatttgtactgaatttagtcactagagaacatcgtaacaaaatacatgaaacaaaagtagccagaaatgttagaacaggtggaaatgtatacattatttgatggtttgtttttttatggnaataaacaacatacatagaaaa

SEQ ID NO: 178808 - DNA, 807 bp, Homo Sapiens
ggggggtccgggccgcaggcccgctgcggcggactgggcggcggaagttcgacggcgccgggcgagtggctgttgagcggcgccgcgggagttccgcaggtttcccgtgttcgcagcggagccggaggccagctgaacccggccgtgggatcccggataggaggaggaggggacccataggacgcgttaacatggacctggaaaacaaagtgaagaagatgggcttaggtcacgagcaaggatttggagccccttgtttaaaatgcaaagaaaaatgtgaaggattcgaactgcacttctggagaaaaatatgtcgtaactgcaagtgtggccaagaagagcatgatgtcctcttgagcaatgaagaggatcgaaaagtgggaaaactttttgaagacaccaagtataccactctgattgcaaaactaaagtcagatggaattcccatgtataaacgcaatgttatgatattgacgaatccagttgctgccaagaagaatgtctccatcaatacagttacctatgagtgggctcctcctgtccagaatcaagcattggccaggcagtacatgcagatgctaccccaggaaaagcagccagtagcaggctcagaggggccacagtacccggaagaagcagctggcaaagcaactccctgcacatggaccaggaccccttcaaagtggccatggaattgctctcccacaagaaggtggaaagaaaatggcacccacttttgtggaagaaaatataaggagccgaagcctcctggggaagtaggaagaattgtccaaacctctccccgta

SEQ ID NO: 178809 - DNA, 465 bp, Homo Sapiens
gatgacttgactaagttggtacaggaacagaaacctaaaggcagtcagcgaagtcggaaaagaggccatacggcttcagaatctgatgaacagcagtggcctgaggaaaagaggctcaaagaagatatattagaaaatgaagatgaacagaatagtccgccaaaaaagggtaaaagaggccgaccaccaaaacctcttggtggaggtacaccaaaagaagagccaacaatgaaaacttctaaaaaaggaagcaaaaaaatctggacctccagcaccagaggaggaggaagaagaagaaagacaaagtggaaatacggaacagaagtccaaaagcaaacagcaccgagtgtcaaggagagcacagcagagagcagaatctcctgaatctagtgcaattgaatccacacagtccacaccacagaaaggacgaggaagaccatcaaaaacgccatcaccatcacaacc

SEQ ID NO: 178810 - DNA, 421 bp, Homo Sapiens
  misc_feature (17)..(17): n is a, c, g, or t
  misc_feature (33)..(33): n is a, c, g, or t
  misc_feature (41)..(41): n is a, c, g, or t
  misc_feature (108)..(108): n is a, c, g, or t
gccagggctctcaatcnggacctgtgttgaaantgtgtaanagaggaatggcgttggcccggcgtgggggtgctcgctttgtcttctgtcctttggttctccttccanaatgctcctgtacccagtttatttaaggggacatgcactggaataggaaatgtcccccatctcccttcctgcaccctgctgtgctccctccaaacccaccttgctctgtgttctcaggcccccctgcttttgtctcacccaggacccatacctttcaccttgttcccttccacccctccagttagtccctatctgggtaagggtcttcccttgagctccagggggtggaacccaatgtttacattctcttctgtctctgcccccaccccatgcagcgctttgaggaattggaaaagaacctgctgttgtaccc

SEQ ID NO: 178811 - DNA, 818 bp, Homo Sapiens
  misc_feature (684)..(684): n is a, c, g, or t
  misc_feature (710)..(710): n is a, c, g, or t
  misc_feature (755)..(767): n is a, c, g, or t
gggtcggggagggccgcgcagtcggaccggctgctgagacgaacgcttcactggggcagtctctgcatatcatggggagatagacgctgctgcctttaattggccttggtcctcacagctccaaaaagaaacaggatctcgataagctctatgagctgaagtccaaagctcggcagattatgaaccagtttggcccctcagccctaatcaacctctccaatttctcatccataaaaccggaaccagccagcacccctccacaaggctccatggccaatagtactgcagtggtaaagataccaggcactcctggggcaggaggtcgtcttagccctgaaaacaatcaggtattgaccaagaagaaattacaggacttagtaagagaagtggatcctaatgagcagttggatgaagatgtggaggagatgctgctgcagattgctgatgattttatcgagagtgtggtgacagcagcctgtcagcttgcgcggcatcgcaagtctagcaccctggaggtgaaagatgtccagctgcatttagagcgccagtggaacatgtggatcccaggatttggctctgaagaaatccgaccctacaaaaaagcttgcaccacaggaagctcacaaacagagaatggcattgatccggaaaaacaccaaggaattaacacacggaaagggtcangggaatggacagcaatgtattttggnagatacttggagctgaagaactcaagccatctccatccttgggannnnnnnnnnnnnaatgccttttacaggagaagcaatatattttttttaattacacggggcgat

SEQ ID NO: 178812 - DNA, 440 bp, Homo Sapiens
  misc_feature (31)..(31): n is a, c, g, or t
  misc_feature (44)..(44): n is a, c, g, or t
  misc_feature (63)..(63): n is a, c, g, or t
  misc_feature (69)..(69): n is a, c, g, or t
  misc_feature (76)..(76): n is a, c, g, or t
  misc_feature (94)..(94): n is a, c, g, or t
  misc_feature (104)..(104): n is a, c, g, or t
aagcccccaaaacctaaggggtccaacatgnaaaaagcctctgnggtcctctccccccctgtnaccccnagaaaancctatttgaagctggaanccgtcccctntgaatcgtgaacgcccttccttgaaagaatttcggacatctctgcccaaagtcttgtgaccctgtagctgcccacgttttgaagagcttgagctgggtccccagtgggctgtctctctgtggggagggctttctgcttcaccatcattaggaatgtgaccattcctatataattcctggactggtgagattggtggtaggcctgtgaaatttgccctagttactaccattctcgttttggaggaaacaatctctgccaccaccaagtcattgactttgctcgaggcaccttttttcctgtttctccttttctgttgtcgagtaaaatttcatattc

SEQ ID NO: 178813 - DNA, 761 bp, Homo Sapiens
  misc_feature (573)..(576): n is a, c, g, or t
  misc_feature (580)..(580): n is a, c, g, or t
  misc_feature (584)..(584): n is a, c, g, or t
  misc_feature (586)..(586): n is a, c, g, or t
  misc_feature (597)..(599): n is a, c, g, or t
  misc_feature (601)..(601): n is a, c, g, or t
  misc_feature (657)..(667): n is a, c, g, or t
gggaggcgcaagataagctaggagccgcgcgagtcgtagtgtcgctgtttgcgggtctccgcgcgggaccggggcgcagcggggtcgctgaggcgagggtgtcatgtcagacaacgaggacaattttgatggcgacgactttgatgatgtggaggaggatgaagggctagatgacttggagaatgccgaagaggaaggccaggagaatgtcgagatcctcccctctggggagcgaccgcaggccaaccagaagcgaatcaccacaccatacatgaccaagtacgagcgagcccgcgtgctgggcacccgagcgctccagattgcgatgtgtgcccctgtgatggtggagctggagggggagacagatcctctgctcattgccatgaaggaactcaaggcccgaaagatccccatcatcattcgccgttacctgccagatgggagctatgaagactggggggtggacgagctcatcatcaccgactgagctggagtcatcttcctgcccttgccccatgcccaattttcattctcactttatatgggtaaataataaaatattcaactttctannnnagcncaananaaaagaaaaannnanccctgtcgggccgccctcggcccttcgagaaacttttctaagaccatttccgtttnnnnnnnnnnncccccgttaggtaaagtggacatgggcccatagcctgttttcctagggagatcctggggccattgactaaggggtttgggtttcctcccccaat

SEQ ID NO: 178814 - DNA, 543 bp, Homo Sapiens
tcgcagtcagaatgattttattgaaatgttttagtacagtgttagaggatcttaaaatcttacattttaaaccaatacaagcactgcaaatgatatactcctgaatctagttgatgtagtatctaaaaagaaaagtgatcatatgagtatctataagttgactaatgtaatttaagttggaggctaaacaaacaactttggtatattcatatttctctggctcctgtttttggccagataaatgccaggtccacccccattcagtagaattggacaggaccaatgtatttggtggtctcacttaagtttccacgccaggagcagcaagaaatgtacaaattttgggattaagctgctcccaagacagtcttcatcacctttgtgaactggaaacaccaaatagtcaaggtctgaatttccattgtgtgtggctaagtccagtcgcattggttcataaatgtattctgaaggattttaaaatacaaaggtggggctaaataatgatagaaaccatcagttcttaattcagagaatgacaatgcc

SEQ ID NO: 178815 - DNA, 843 bp, Homo Sapiens; identical to SEQ ID NO: 97955
  misc_feature (135)..(158): n is a, c, g, or t
  misc_feature (707)..(707): n is a, c, g, or t

SEQ ID NO: 178816 - DNA, 532 bp, Homo Sapiens
gcaaaatatcaatgtttgggtgactgtgtaaagctcagtgtgtaagaacatcttttgtctaggttttctttctgctctttattgaagacaaacactcaccaaaaagaaaaataaaagttttcagagaaactaattttctttggcaagagtattacttaatattttggcctcctaaagtttccctagttagtactcggactcctgtgctaatgtcagcttacatatcattgtatagagactgtttattctgtaccaaactgatttcaaaagtactacattgaaaataaaccggtgactgtttttcttcataaagttctgcgtttggcatcttcactctttccaaaatgtatctgtacatcagaaatgtcactattccaagtgtctttttagtgtggctttagtatggcttccttttaatattgtacatacattgtatctttgttttatggtaataagtaataaaaatgtagacttcatatttggtacaaaatgtcctatgtacagaataaaaaaggttcaataagaaacaggc

SEQ ID NO: 178817 - DNA, 534 bp, Homo Sapiens; identical to SEQ ID NO: 11144

SEQ ID NO: 178818 - DNA, 447 bp, Homo Sapiens
gacatttatggaaaatgggatacccacattaagcagggtgactacctgtttaccatacaacccacacaaagccaatacaactatagatgtgctttatttagtctgttgcctctgcaaacattgcccgtgtgtttctctatgcccttcaaaaacatcagagcagcacatcctggaagatcctatcttttgtaagtttaagaagcagcctcttgtcacaggttgactcctaggtagtgtgcctagtgaccaagagggctgctaagaaagctttctgaccacttgtggctgtcattggactgatttgcccagatgacatcaattgggaatttgaggcatgacctataaagatcagttgcttgcaagagtctcaggaaaataattgtggagttaagaaacttgaagcgatttttaaaaattacctaacccaaccttctcatttgaaaaacg

SEQ ID NO: 178819 - DNA, 207 bp, Homo Sapiens
  misc_feature (22)..(22): n is a, c, g, or t
  misc_feature (29)..(29): n is a, c, g, or t
  misc_feature (55)..(55): n is a, c, g, or t
agagctggaacaagtctggggngggggtngggggaggggcagatgcccctcaggnagccaggaccctcggccagcttccctggaccagggcaggggagggagcatcaggccgtccaatctccaggcaccagctctccacgtgcacgcgcactgcaagccagcagctcctcacacataaatacagacacgcttaacaaaaatagtacc

SEQ ID NO: 178820 - DNA, 479 bp, Homo Sapiens
caaacattgcctcagtggtatcaagagaactttggtggtggtttcttcagaatcatgaagttcttttgccagataaatattttgatattattttcctttttaatataaaggatagggttgaattgtacttaaaatgcatagcattattaaaaacaatcttttaaaatataatttataacatagattgaagcctccccttaagaaaccttaaagaaataagtatcctactcaaaaaaggaagtctgtttcagaactttagggcctttgaaatatttcctcaagcctatttcatgagatctacttggtttacccaagtcatgtttttaatagactgctaatatcaaaggagaatttttaaagccttaacaatgcctactttccattcactgttaacatggaataaacacaattcccaacatcttagatagtgtattatgcttccaacagacagtccctctcatataaagtttatgtacccc

SEQ ID NO: 178821 - DNA, 438 bp, Homo Sapiens
ggcactggagtcagagtcatgtagaagttctcttccctacatctgtgagatgacagctttcaggtttccagattaggacagtcctttgcactgagttgacactcatgccaacaagaacctgtgcccctccttcctaacctgaggcctggggttcctcagaccatctccttcattctgggcagtgcccagccaccggctgacccacacctgacacttccagccagtctgctgcctgctccctcttcctgaaactggactgttcctgggaaaagggtgaagccacctctagaagggactttggcctccccccaagaacttcccatggtagaatggggtggggggaggagggcgcacgggctgagcggataggggcggcccggagccagccaggcagttttattgaaatctttttaaataattgcacgtgttagtcccaaa

SEQ ID NO: 178822 - DNA, 675 bp, Homo Sapiens
gggtggcgtgtggccactgaccgccccccacctcctgccgctcctccaagtttgagctgagatggttctgtgagtccttggcaggggtcaaagggcacatctccttgaacctagaaagccccctacactctcagaggacacctctcctgtggattcagcgctggggcagtgaaggtgtcgggagccagcagagcatggtgcgtgctgccagctgccggccagccgggatagaggagatgccactggccctccgtgcccccagcccctccctcttaaccgaggctgtccttgctctctgcagaggcccctctgcaggatccccgtgtccgcgcgtgatgtgtggtggcacagcccgtgtcaaagtcacagtgtcttttctgtcgttcctagtcccaaggtcacccccgagaggacaacaggcatctggaagtgctctctcgaccactctgggtgctttactgtctctggcttgtttccatcactggaaatcacttagagaattgtagtggttttggtccttgataaagcctagaagacatttgtgatggtacaaaatggaaggtttcttttggttctggtttttaagatctaagaagttgtggaatgttggttaatcatttaacccgttgcaataaatggagagggaaatctccgcgcgcggcgcgcagcgacgag

SEQ ID NO: 178823 - DNA, 888 bp, Homo Sapiens
gggcgcggagcacccggcaggggctgacagcatggcctcgcccgacccgcccgccaccagctacgccccgtccgacgtgccctcgggggtcgcgctgttcctcaccatccctttcgccttcttcctgcccgagctgatatttgggttcttggtctggaccatggtagccgccacccacatagtataccccttgctgcaaggatgggtgatgtatgtctcgctcacctcgtttctcatctccttgatgttcctgttgtcttacttgtttggattttacaaaagatttgaatcctggagagttctggacagcctgtaccacgggaccactggcatcctgtacatgagcgctgccgtcctacaagtacatgccacgattgtttctgagaaactgctggacccaagaatttactacattaattcggcagcctcgttcttcgccttcatcgccacgctgctctacattctccatgccttcagcatctattaccactgatgcacaggcgccaggccaaggggggaaatgctctttgaaagctccaattattggtccccaaaagcagcttccaacgtttgccatctggatgacaaacggaagatccactaaaacggccacggggattaacaagaacctccctgcagactgagcgatgacaccacactttggtttggacatttaaattcactctgctgaataggaggaagcttttctttttcctgggaaaacaactgtctcttgggaattatctgaccatgaacttgctcttctagacaacttcacatcaaagccctcactccacttaatgggaggaatccttaggccccactaatggccaagtctgtttgggggattttggccttcagctatggggctttccctaggagtagggt

SEQ ID NO: 178824 - DNA, 456 bp, Homo Sapiens
  misc_feature (414)..(414): n is a, c, g, or t
  misc_feature (429)..(429): n is a, c, g, or t
ggggtcttccctcctgtggaatcgaggggaaattattcttcccaataccttgatttgattttcagtttcataagcttcttcctctgaatcttattgagggactatggtaccaagcaggtaggactgttcacctggtcgaacagttcttgctctgccttctaggcttcatcccagaaatccagcctctttctggagaccccaaagctggagggagatgggctttcctctgggcctctctcctactttgccatccacactgctcctggctaaccccagcaataaccaacaaatgggaggaagccccatctattgctttttctcaattatgactgcatagtttatgggaaacaaagatcttgaggaacatgagggaagccctcccctctttcacagtcccccatctcttctcctttntgacctgttcaacancagagtttcagtgttttaaacaggaca

SEQ ID NO: 178825 - DNA, 532 bp, Homo Sapiens
  misc_feature (55)..(89): n is a, c, g, or t
ggtcagggaaaggaatgcctgggagtgggggtgcaggcgggcagcactgagggannnnnnnnnnnnnnnnnnnnnnnnnnnnnnnnnnntgcagcttctcaagtgagactgacctgtctcacccagcagccactgcccagccgcactccaggcaagggccagtgcgcctgctcctgaccactgcaatcccagcgcccaaggaaggcccacttctcaactggcagaacttctgaagtttagaaatggaaatacttccttactagtgtcttttggcttaaattttgtcttttgaagttgaatgcttaatcccgggaaagaggaacaggagtgcccagacccctggtctttccagtttagaaaaggctctgtgcccaaggagggaccacaggacctgggacctgcctgcccctgccttttccccttggttttgtgttacaagagttgttggagacagtttcagatgattatttaatttgtaaatattgtacaaattttaatagcttaaattgtatatacagccaaataaaatttt

SEQ ID NO: 178826 - DNA, 573 bp, Homo Sapiens
  misc_feature (361)..(361): n is a, c, g, or t
ttgactccagtcccaggcagcatggggatctcgggtcagttccagccttcctctccaactcttcagccctgtgttctgctggggccatgaaggcagaaggtttagcctctgagaagccctcttcttcccccacccctttccaggagaaggggctgcccctccaagccctacttgtatgtgcggagtcacactgcagtgccgaacagtattagctcccgttcccaagtgtgggactccagaggggctggaggcaagctatgaacttgctcgctggcccacccctaagactggtacccatttccttttcttaccctgatctccccagaagcctcttgtggttggtggctgtgccccctatgcncctgtggcattttctgcgtcttactgggcaaccacacaactcagggaaaggaatgcctgggagtgggggtgcaggcgggcagcactgagggaccctgcccggccctccaccccaggccctttcccctgcagcttctcaagtgagactgacctgtctcacccagcagcactgccagcgaactccaggcaagggccagtgcgcctgctcctgaa

SEQ ID NO: 178827 - DNA, 831 bp, Homo Sapiens
gggggttgccgccatgatagaacagcagaagcgtaagggcccagagttgccgctggttccagtcaagcggcagcggcatgagttgctgttgggagcggggtctggcccaggagccgggcagcagcaggcgacgccgggagccttgctgcaagcgggacctccaagatgttcctcccttcaagccccaatcatgctgctctctggacatgaaggggaagtctactgctgcaagttccaccccaacggatccaccttagcatctgcaggatttgaccgactgatattactgtggaatgtctatggtgactgtgataactatgccacactgaagggacacagtggagcagtgatggaattgcattacaacacagatggcagtatgcttttctcagcatccacagataaaaccgtggctgtgtgggatagtgaaacaggtgagagggttaaaaggctaaagggacatacttcctttgtgaattcctgttatccagccaggagaggccctcagcttgtctgcactggcagtgacgatggcacagttaagctttgggacatccggaagaaagcagccatccagacatttcagaacacgtaccaggtgttagctgtgaccttcaatgacacaagtgatcagattatttctggtggaatagacaatgatatcaagggtcttgggacctgcggccagaacaaagcctaacctacacccatgtagaaggccatgccagattccaagtgaactggccctggagttttaaggttcctgaaaggcctccttatcctttttggtcccaatggcaattgggaacaaattccaggttccgttggtca

SEQ ID NO: 178828 - DNA, 870 bp, Homo Sapiens
ggagcgccgcgcctaggggggtgtggcgctcgaaccacccgccgccgggttgtttgcgcgccggggggcgtgtttttgggtgtggtgggggcaaaaaagcgtggggccgcgccgcggcggcattttatcgcggcccgcgcggggcacacgaagcaaaaccatagggggggcgcacgcacaaggaagaaaaggggggaaaataattcgggggggcgaggggaacaggacaaacgggcgggtattagggcatcggatgcgagggtcgcgccgggtggggaagcgtatgttgtatcggtgtcgtgggtaggcggggaggggttgcggggggttctgcaaaaatttattatttattattaaaaatctcaaacaaacacagacatatggggatacccaccattcccctacgtggataccaggcagcttcaagccctggcaggcacgatagaagaaaattactttgttacaccatcctcatcaactctcagagggatcctgagcccgtagatggaggaaacgcagacggagtaagccacaggtaaaagatctccccaggagctgacacgggcacaacgatacaaatccctgccgtgccggcgggctgtgagcacagcatgctgcatgtgcccatctggacagcacaagtgacaatgcacatggcgaggccgtttaaggacaggctgagtgatacggggccagcgatgagcctcctctggagacccccgagcaaggatcaccatagagaacttttcttcctttggtttcttgttccagctgaaggggatgggatggtacgcctgtgagaagctacaggccaggttggtcaactggggacaagggagttcatggggacacggggcaaagacaaaaccc

SEQ ID NO: 178829 - DNA, 493 bp, Homo Sapiens
ggagctcactaaagtgcacaaacagttggtacgtgataatgcagatctccgctgtgaacttcctaagttggaaaagcgacttcgagctacagctgagagagtgaaagctttggaatcagcactgaaagaagctaaagaaaatgcatctcgtgatcgcaaacgctatcagcaagaagtagatcgcataaaggaagcagtcaggtcaaagaatatggccagaagagggcattctgcacagattgctaaacctattcgtcccgggcaacatccagcagcttctccaactcacccaagtgcaattcgtggaggaggtgcatttgttcagaacagccagccagtggcagtgcgaggtggaggaggcaaacaagtgtaatcgtttatacatacccacaggtgttaaaaagtaatcgaagtacgaagaggaacatggtatcaagcagtcattcaatgactataacctctactcccttgggattgtagaattataactttt

SEQ ID NO: 178830 - DNA, 702 bp, Homo Sapiens
ggatggtggaccatacgagcgctttctccacagaggaactgccacctcctgtccacttatcaaagccaggggaacacatggatgtgtatgtgcctgtggcctgtcacccaggctacttcgtcatccagccttggcaggagatacataagttggaagttctgatggaagagatgattctatattacagcgtgtctgaagagcgccacatagcagtggagaaagaccaagtgtatgctgcaaaagtggaaaataagtggcacaggctgcttttaaaaggaatcctgaccaatggactggtatctgtgtatgagctggattatggcaaacacgaattagtcaacataagaaaagtacagcccctagtggacatgttccgaaagctgcccttccaagcagtcacagctcaacttgcaggagtgaagtgcaaccagtggtctgaggaggcttctatggtgtttcgaaatcatgtggagaagaaacctctggtggcactggtgcagacagtcattgaaaatgctaacccttgggaccggaaagtagtggtctacttagtggacacatcgttgccagacaccgatacctggattcatgattttatgtcagagtatctgatagagctttcaaaagttaattaatgactgcctcctgaaaccttgacaactaattcagattttttagcaacaacaaaatgcaggaggcctt

SEQ ID NO: 178831 - DNA, 318 bp, Homo Sapiens
  misc_feature (40)..(40): n is a, c, g, or t
  misc_feature (75)..(75): n is a, c, g, or t
  misc_feature (103)..(103): n is a, c, g, or t
cctggccaaggtgcaacgtgccgtgtgcatgctgagcaanacgaccgccatcgccgagccctgggcccgcctggnccacaagttcgacctgatgtatgccaanagggcgtttgtgcactggtatgtgggtgagggcatggaggagggtgagttctccgaggcccgtgaggatatggctgccctggagaaggattatgaggaggtgggcatcgactcctatgaggacgaggatgagggagaagaataaagcagctgcctggagcctattcactatgtttattgcaaaatcctttcgaaataaacagtttccttgcacga

SEQ ID NO: 178832 - DNA, 459 bp, Homo Sapiens
  misc_feature (12)..(12): n is a, c, g, or t
  misc_feature (26)..(26): n is a, c, g, or t
  misc_feature (32)..(32): n is a, c, g, or t
caaggttcaacntgggaacccttcancggttnaaaggcccaacgccctcttggaatcactgtccggaaatcccgatggaaaaaaactccctccccatgggttcccgggatcccaggcaaagcaggggctgttcagctgctccctgaaacacccacacggaggtgccccaaaagctctcccagccgggacacctcatcgtagaagagcagccgcaagtcctcaggggctgagcggtagagcagcacggagctcaggctgctgagtggctgctgctccctgacacgcacagcagggcccggccccgagggaggcaccttctcagagttcgccagatgctgctggaggagaggctctgccggggaccctgcagcatcctcatctaacaggaacagggtggacggagtcagcaacagggatacgaggcaggtggaagctatgccctcaaccgagaggttctcc

SEQ ID NO: 178833 - DNA, 1200 bp, Homo Sapiens; identical to SEQ ID NO: 8617
  misc_feature (187)..(187): n is a, c, g, or t
  misc_feature (190)..(190): n is a, c, g, or t
  misc_feature (219)..(228): n is a, c, g, or t
  misc_feature (238)..(288): n is a, c, g, or t
  misc_feature (331)..(344): n is a, c, g, or t
  misc_feature (364)..(418): n is a, c, g, or t
  misc_feature (420)..(433): n is a, c, g, or t
  misc_feature (453)..(456): n is a, c, g, or t
  misc_feature (502)..(502): n is a, c, g, or t
  misc_feature (627)..(627): n is a, c, g, or t
  misc_feature (743)..(743): n is a, c, g, or t
  misc_feature (783)..(783): n is a, c, g, or t
  misc_feature (832)..(832): n is a, c, g, or t
  misc_feature (837)..(837): n is a, c, g, or t
  misc_feature (857)..(857): n is a, c, g, or t
  misc_feature (913)..(913): n is a, c, g, or t
  misc_feature (1012)..(1013): n is a, c, g, or t
  misc_feature (1022)..(1022): n is a, c, g, or t
  misc_feature (1035)..(1036): n is a, c, g, or t
  misc_feature (1065)..(1065): n is a, c, g, or t
  misc_feature (1090)..(1090): n is a, c, g, or t
  misc_feature (1092)..(1092): n is a, c, g, or t
  misc_feature (1106)..(1106): n is a, c, g, or t
  misc_feature (1135)..(1135): n is a, c, g, or t
  misc_feature (1141)..(1141): n is a, c, g, or t

SEQ ID NO: 178834 - DNA, 984 bp, Homo Sapiens
  misc_feature (641)..(641): n is a, c, g, or t
  misc_feature (880)..(880): n is a, c, g, or t
  misc_feature (919)..(919): n is a, c, g, or t
  misc_feature (954)..(954): n is a, c, g, or t
ggggcatttgcttgagttgtggcctcggaaggagaatgtttatctgttttctaactttgctgacaccaggattctccctgtcattgagaagaaagcattatctaattaccttcaggtggtttacttattctgtaaagaatatgtgtaaatattttgtacagagccctgtatcaaataaacagccatatgtggttactaatcacctcttctgtcattccgtccttggccaccgctcagtgggaatggtctctgatctggatgctcccaccttccatgtcaggcccagaactgtgccatggtctgtggactcctggtcagccttgactggctaggagaccttgggcagtacctacagtcttgctgtttctgtttcatctgcaagaattatgacccacacactccagctgcagcccagggcactgtgatattttatacgtgtgtagatgtttttgtccacagttcctggttcatcactcccataaccctttgttataatgttgggacactgcaggcctcagaaaacggaatctctgtctgtgaccttctcctgccccatttcacttgctcaacaccagactttaatctgactgtagctcataaagaccctcatcccagagagggtgctgccccatacccggaanggaggaacgctgcacagaagaggccaagaagcatctggacagacagggccttgctgggtttagaccttatgctttttgtccagtttcatctcaacacagctgccatgcttcagccatgcctatccaatgacgtctccataaaaggcccgggaacacgggagcttctgaagagctgaacatgtgggagggaggggaacgagaacttgtccatgttgccaagagggtgggcgcacccccantccatgggggacagaagcttccagcattttgcccggggncccttccaggaacttcacctgtgtgtattctttcntttggctgtttaatttatttgtatcccttt

SEQ ID NO: 178835 - DNA, 839 bp, Homo Sapiens
gggggcccggccgggggggcaagatggcggcggcagtaggggttcgtggccggtacgagctgccgccttgctccggcccaggctggctcctcagcctttccgccttgctgagtgtggcggcacgaggggccttcgccaccacgcactgggtcgtcacggaggacgggaaaatccagcagcaggtggattcaccaatgaacttgaagcatcctcatgacctagtcatattaatgagacaagaagcaacagttaactacctcaaagaattagagaaacaattagttgctcaaaaaattcacatagaagagaatgaggacagagacacaggactggaacagagacataataaagaagacccagactgcatcaaagccaaggtgcccttaggggacctggatctatatgatggcacataaataactttggagagcaaagacatcagtcctgaagattatatagacacagaatctcctgtccctccagacccagagcaacctgattgtactaaaattctagaacttccatatagtatacatgcttttcagcacttgagaggtgtacagggagagagttaatctttctgcacctctgctacctaaagaagacccaatcttcacatatttagctaaaccggttaggaaaggagtatagaatgacatagggccaacttcattcatggaaggcctaccggaagaacacttccttccggggtactgtaataacatggctttcatttttacttggagatttaagaattgagccctattcggggaataaaaatgtgcccttgcggaacacttccctttctcctttccggggaacaattaaaaaaccattgt

SEQ ID NO: 178836 - DNA, 1437 bp, Homo Sapiens
  misc_feature (973)..(1003): n is a, c, g, or t
  misc_feature (1316)..(1330): n is a, c, g, or t
tgatataaagtcgctataaagcggctggtacggtcggaatcccgggatatcgtcgaccacgcgtcgaaagagcatgcctttctgatagcctttggtgatgtcactgctgggaggtggctatcctgtggaccacctggcctccagacccacactcacagtctgtgaaaaactgaaaatcccctggtgggcactccctggagcccaagcagctcccctaggggactgaccggacctgacctcccctccctgtgtctgggtcttcaggttttagtttggtctttgttcatctgagttgtgctggggcaacgccaggaagtgccctgggtaacctctgctgtgcgctccttcccaggtggcgccatggattcctctgggggctggcgcatgcccaggaaagcctgggccacacgggacactctcttctttatcgaggacacttggaaaggtgactgatatgggtgcttggcttctctggtcccagcttgccctccggggagcaggggctctgtcttgtcccagatgagctgagagcccctgagaggagggctttcccagccctgggaccctccgaggtgggtgtgcgggtctcacaggtgcttcctgggacttcctgtggctgcacagggcttggctttgtcttcgttcccggtggaaaaccgtgggagaggaagcttgggcctctactccaagtatcagagcctgttcaccctcctccctttggtagcttgtgaatgtgccaggtgtttcgaggtaggcttgccttctgggcagcatggactttgttaaaataataggcggaaagaagaggcctgggaagggcccccagtcttttggaatgtcctggtcacagggtcatgtcagctgccagttctcgtctcccgtcctggagttgctcggtcttgcggagctgcccgcctgcctgttctggcggctccagcgcaggctgtccctgctgctttgatcccaggtgaannnnnnnnnnnnnnnnnnnnnnnnnnnnnnngagacggagtccttgctctggtgccccagccaggaatgcaatgggcgccttctccggttcacttgcaaccttcgggcttcaggcgattcctcctgccctcaaccttcctgaagaaacttgggaattacagggtgcattgccaccccaggccccccctggattttttgggatttttatagaagaaaaataggggtttcccccctggctgggtccagggctgggtccgtgaaacactcctggacctccatggatttgggcccgcgccttaaacctccccccaaggggggcgggaaatatataaggggggggaagnnnnnnnnnnnnnnnaggtgtggatttcccagggggaaatttcttttttcctctaaagggcgcccggccaagaggggtggggtctcctctggtgaagagggtgttcgaaaacggggtgtgct

SEQ ID NO: 178837 - DNA, 855 bp, Homo Sapiens
ggccagaagcttggagcagaaagtgaaaccctggtgctccagacaaagatcttagtcgggactagccggccaaggatgaagcctcacttcagaaacacagtggagcgaatgtatcgagacacattctcctacaacttttataatagacccatcctttctcgtcggaataccgtctggctgtgctacgaagtgaaaacaaagggtccctcaaggccccctttggacgcaaagatctttcgaggccaggtgtattccgaacttaagtaccacccagagatgagattcttccactggttcagcaagtggaggaagctgcatcgtgaccaggagtatgaggtcacctggtacatatcctggagcccctgcacaaagtgtacaagggatatggccacgttcctggccgaggacccgaaggttaccctgaccatcttcgttgcccgcctctactacttctgggacccagattaccaggaggcgcttcacagcctgtgtcagaaaagagacggtccgcgtgccaccatgaagatcatgaattatgacgaatttcagcactgttggagcaagttcgtggacagccaaagagagctatttgagccttggaataatctgcctaaatattatatattactgcacatcatgctggggggagattctcagaccctccaggggtcccccccactttccccttttcaactttaaccaaggacccttgggggcaaaagacggggatggaaaacttacccgggggttatggaagggggaaccggcacggcaacataggaaacccgtggggggtcccggggtggaaacccaacggcagggggggtgctttcctatgggcaacccaagggcttc

SEQ ID NO: 178838 - DNA, 909 bp, Homo Sapiens
gcaggttaatctgtttattttttcaaaacaaaactaaaaatcgccactcaatgtatctgagcagagtgcctgatcacagttaaaagctttctgtaatgcgcaggggaacgtcatagcctggtggtcagaaatgagtgcttctggcgctgctggactgtggcccgcagcctgagcaccccttcttctcctccctctgctcatattgtccttgtgctgccatccagtcagcagcggacagccagcccaatgctgctcaggtctgtggcatccagagataaaaggcgtctccgcttccccgcaggtttctgctttgcccacctggtggggtacgcgcctggcacgccacccccactggaggtcctgaatggtccacagagaaggcgtggggcaaggcctcaagtgctgatgctctgagaataaaaattaaaaggcagctctgccctgaagcgtcaccccacagggctcattccttggctgtgccctcctgggtcccggggtggacacatggatttggtgtcatcatcgctcgtgcttgatgttggcttcacttcgctccaaggccaccccgctgccgttccgaggggcgtccttcttgctccagtccttttcagtgtagaactcggctagcactgggcagtgttcagaagccaccccgccccaagaccagttatccggaatccaagggttcgtgaggccttctctcaccacagcccagtgacctgtgaaaaccttctttaagcttttactgatccagatgttgtccagagacttcgagccttgagggttcttggtgctgatgttggtgaaggtgtgcgcggggatcaggtggtggaacttttctttcctcaggatatcatagtcattgctgtctggcccttggccaaaatcccctaagataatgacatcccc

SEQ ID NO: 178839 - DNA, 633 bp, Homo Sapiens
  misc_feature (189)..(203): n is a, c, g, or t
gggggatctggtcctacccatccccgcagtgtgcactaaggggcccggccagccatgtctgcatttcggtggctagtcaagctcctcctccctgcatctgaccagcagcgcctttcccaactctagctgggggtgggccaggctgatgggacagaattggatacatacaccagcattccttttgaacgnnnnnnnnnnnnnnntgggggctctcatgttttcaactgccaaaatgctctagtgccttctaaaggtgttgtcccttctagggttattgcatttggattggggtccctctaaaatttaatgcatgatagacacatatgagggggaatagtctagatggctcctctcagtactttggaggcccctatgtagtcccgtgctgacagctgctcctagagggaggggcctaggcctcagccagagaagctataaattcctctttgctttgctttctgctcagcttctcctgtgtgattgacagctttgctgctgaaggctcattttaatttattaattgctttgagcacaactttaagaggacataatggggtcccgggccatcccacaagtggtggtaaaccctggtggttgctgttttcctcccttctgctactggcaaaaggatct

SEQ ID NO: 178840 - DNA, 890 bp, Homo Sapiens
  misc_feature (97)..(97): n is a, c, g, or t
ggtggtgtggaaggcagtgggctggcggctcattgccctctcctttgggctctatggcctcctctacgtctatgagcgtctgacctggaccaccaanggccaaggagatgggccttcaagcgccacgtgttgtggagcatgccagcgagaagctgcagcttgtcatcagctacactggctccaactgcagccaccaagtccagcaggaactgtctgggacctttgctcatctgtgtcagcaagttgacgtcacccgggagaacctggagcaggaaattgccgccatgaacaagaaaattgaggttctatgactcacttcagagcaaagcaaagctgcatcaggaataaagccggttggttggacagtgagctcaacatgttcacacaccagtaaccatgcagacccacacagatagtgggacacctgaggcgcgagtctgcgatggagaggggcggtgctgccagcacctaaagaggccgtgtgggctcccccagggagcacggtgtgagatcacattgaaacaatggaacactgaacaagacgaagggaaggcaaacacagaatcatcgaaaacacaaaaaaggagacacatacacaagaacaaacctagataaaaaccacacaccgaagaccagaatgaaagactggcagagagccaggacagcaaaagaaacgaaagggaaagaggaaagagacaggcctcaagggaaccaaggcacagggaaacccaaagaagacaacaagaaaaggaccgacaggagaaacaagccagcaacacaaatgagaaacgcaccgaagcacggaaacaaacaaacggccacgaagaaatacacccaaaagcaacgaaacacagagagacgaaccaagacgagagacacgaaagaacgga

SEQ ID NO: 178841 - DNA, 507 bp, Homo Sapiens
ggggtccggcagtagagctcgctgcagatccgggctctgaccatgatttggcgccgcgcggcgctggcggggacgcggctggtttggagcaggagcggctcggcaggctggcttgacagggcggcgggagctgcgggagctgcggcagctgcggcctctgggatggagagcaatacatcatcatctttggagaatttagcgacggcgcctgtgaaccagatccaagaaacaatttctgataattgtgtggtgattttctcaaaaacatcctgttcttactgtacaatggcaaaaaagcttttccatgacatgaatgttaactataaagtggtggaactggacctgcttgaatatggaaaccagttccaagatgctctttacaaaatgactggtgaaagaactgttccaagaatatttgtcaatggtacttttattggaggtgcaactgaacactcataggcttcacaaagaaggaaaattgctcccactagttcatcagtgttattt

SEQ ID NO: 178842 - DNA, 1119 bp, Homo Sapiens
gggccatattgtctgtgtgagcagaggggagagcggccgccgccgctgccgcttccaccacagctctatcaaggcttgtcaagcagtgtgctcatcacatggtaaatcatgcagcgtggaacctcataaaatctccaagaaacatcattcacccatactgactagtttcacatctctttgtttgaagaaaacaggtctgaaacaaggtcttacccccagctgcttctgaacacagtgactgccagatctccaaacatcaagtccagctttgtccgccaacctgtctgacatgtcagggacccgtgccaagcaggggccagagtttacacagatgttaatacacagcagacctcgagaatactgggattacgagtcacatgtggtggaatggggaaatcaagatgactaccagctggttcgaaaattaggccgaggtaaatacagtgaagtatttgaagccatcaacatcacaaataatgaaaaagttgttgttaaaattctcaagccagtaaaacaagaagaaaattaagcgtgacaataaagattttggagaatttgagaggaggtcccaacatcatcacactggcagacattgtaaaagaccctgtgtcacgaacccccgacttggttaaagaacacgtaaacaaacacagacttcaagcaatttgtaccagacgttaacagactatgatattcgatttacatgtatgagcattctgaaggcccttggattattgtcacagccatgggaattatgccacagcagatgtcaagcaccataatgtcattgattgatcatgagcacaggaaagctaccgaactaatagaactgcgggtatgggacatgagtttatcatcctggccaaagactactaatgtcacgaattggcttcccgatacttccaacggtccctgaagctacttgtagactatcagatgaaccccacgaaataaggaggggcacaatgctcgaccgaacaagggctagcaagcacgcgcaacagcaataagcacagccgaacacgagacccatacaccacggtcaccacgaccaatagaaggaccggagcgagaagccgaacaccagcacgggcgacgcaaaacaagaaaacaccgcaa

SEQ ID NO: 178843 - DNA, 1142 bp, Homo Sapiens
  misc_feature (883)..(883): n is a, c, g, or t
  misc_feature (1030)..(1030): n is a, c, g, or t
  misc_feature (1064)..(1064): n is a, c, g, or t
  misc_feature (1081)..(1081): n is a, c, g, or t
  misc_feature (1113)..(1113): n is a, c, g, or t
  misc_feature (1131)..(1131): n is a, c, g, or t
ggggcagaagacccccatcagggtgcggggtgcagttgcggctccagggccatggcggaggagcagggccgggaacgggactcggttcccaagccgtcggtgctgttcctccacccagacctgggcgtgggcggcgctgagcggctggtgttggacgcggcgctggcgctgcaggcgcgcgggtgtagcgtgaagatctggacagcgcactacgacccgggccactgtttcgccgagagccgcgagctaccggtgcgctgtgccggggactggctgccgcgaggcctgggctggggcggccgcggcgccgccgtctgcgcctacgtgcgcatggttttcctggcgctctacgtgctgttcctcgccgacgaggagttcgacgtggtagtgtgcgaccaggccatttgcatcccactgtccttgtgttcggagccaggccacaccgtcctcagcagtgtcatgtgttaaaaacgccaagctgaatatatcatgcccctattaaaacttgtacatggctccccattggtttttggagaaaagttcaagctttttaccttggtgtctgcctgtatcccagtgttcaggctggctagacggcggaagaagatcctattttactgtcacttcccagatctgcttctcaccaagagagattcttttcttaaacgactatacagggccccaattgactggatagaggaatacaccacaggcatggcagactgcatcttagtcaacagccagttcacagctgctgtttttaaggaaacattcaagtccctgtctcacatagaccctgatgtcctctatccatctctaaatgtcaccagctttgactcagttgttcctgaaaagctgggatgacctagtccccaaggggaanaaaattcctgctgctctccatcaacagatacggaaagggaaggaaaaatctggactttgggcactgggaaggccctagtacagcttgcgtgggaaggatttgacattccccaaggtttgggggaggaggggttcatcttgattcgtngggcagggttgggttattggacggagagagttcncggggggaattttgggnacctttattcagggatttgaaggaaattggtnccaacagttccgaccttngggccagtttt

SEQ ID NO: 178844 - DNA, 835 bp, Homo Sapiens
  misc_feature (147)..(147): n is a, c, g, or t
  misc_feature (155)..(155): n is a, c, g, or t
  misc_feature (176)..(176): n is a, c, g, or t
  misc_feature (206)..(206): n is a, c, g, or t
  misc_feature (244)..(244): n is a, c, g, or t
  misc_feature (573)..(573): n is a, c, g, or t
  misc_feature (602)..(602): n is a, c, g, or t
  misc_feature (616)..(616): n is a, c, g, or t
  misc_feature (629)..(629): n is a, c, g, or t
  misc_feature (643)..(643): n is a, c, g, or t
  misc_feature (656)..(656): n is a, c, g, or t
  misc_feature (666)..(666): n is a, c, g, or t
gggagacccacggggctgccctcccctgcgcactcccctcgctgcccgggcccggagcgcagcgcggccgcacagattcacaatgttgaaagcccttttcctaactatgctgactctggcgctggtcaagtcacaggacaccgaagnaaaccatncacgtacacgcaatgcactgnacggatatgagtgggatcctgtgagacagncaatgcaaagatattgatgaatgtgacattgtcccagnacgcttgtaaaggtggaatgaagtgtgtcaaccactatggaggatacctctgccttccgaaaacagcccagattattgtcaataatgaacagcctcagcaggaaacacaaccagcagaaggaacctcaggggcaaccaccggggttgtagctgccagcagcatggcaaccagtggagtgttgcccgggggtggttttgtggccagtgctgctgcagtcgcaggccctgaaatgcagactggccgaaataactttgtcatccggcggaacccagctgaccctcagcgcattccctccaacccttcccaccgtatccagtgtgcagcaggnctacgagcaaagtgaaacacaacgtgtgnccaagagcatagancgaagtgcactgncagggacgcacaanctgtagagcaganccaagtgtgncatcaatttacggggatcctttgcatgtcagtgccctcctgggatatcaaaagcgaggggagcagtgcgtagacatagatgaatggaccatcccctccatattgcaccaaagatgcctgaataccccagggctcattttattgcccgtggcaggtccctggggtttcaa

SEQ ID NO: 178845 - DNA, 347 bp, Homo Sapiens
  misc_feature (263)..(263): n is a, c, g, or t
  misc_feature (282)..(282): n is a, c, g, or t
  misc_feature (310)..(310): n is a, c, g, or t
agcctaacaaccccgggtggttgccccctgaggttcccttcctgcctggttgtgtttccctgctgaggctgttcattattgacaataatctgggctgttttcggaaggcagaggtatcctccatagtggttgacacacttcattccacctttacaagcgtctgggacaatgtcacattcatcaatatctttgcattgctgtctcacaggatcccactcatatccgtcagtgcattgcgtgtacgtgatggtttcttcggtgtncctgtgacttgaccagcgnccagagtcagcatagttaggaaaagggnctttcaacattgtgaatctacaaagcaggcttgagct

SEQ ID NO: 178846 - DNA, 590 bp, Homo Sapiens
gggagtctgggcctaaggaagcagcactggtggtgcctcagccatggcctggaccgttctcctcctcggcctcctctctcactgcacaggctctgtgacctcctatgtgctgactcagccaccctcggtgtcagtggccccaggacagacggccaggattacctgtggggcaaacaacattggaggtaaaagtgtccactggtaccagcagaagacaggccaggcccctgtactggtcgtctatgatgatagcgtccggccctcagggatccctgagcgattctctggctccaactctgggaacacggccaccctgaccatcagcagggtcgaagccggggatgaggccgactatcactgtcaggtgtgggataatagtggtggtcagctttggaatgtcggcgggagggacaagttgaccgtcctacgtcagcccaggctgcccctcggtcactctggtcccaccctcctctgaggagcttcaagccaacaagccccactggggtggctcctaagtgacttctaccccggaacccggaaaatgggcctgaagggaaaataccacccccctcaagggcgggagtgtaaaa

SEQ ID NO: 178847 - DNA, 819 bp, Homo Sapiens
ggggagagactgcgagaaggaggtcccccacggcccttcaggatgaaagctgcggtgctgaccttggccgtgctcttcctgacggggagccaggctcggcatttctggcagcaagatgaacccccccagagcccctgggatcgagtgaaggacctggccactgtgtacgtggatgtgctcaaagacagcggcagagactatgtgtcccagtttgaaggctccgccttgggaaaacagctaaacctaaagctccttgacaactgggacagcgtgacctccaccttcagcaagctgcgcgaacagctcggccctgtgacccaggagttctgggataacctggaaaaggagacagagggcctgaggcaggagatgagcaaggatctggaggaggtgaaggccaaggtgcagccctacctggacgacttccagaagaagtggcaggaggagatggagctctaccgccagaaggtggagccgctgcgcgcagagctccaagagggcgcgcgccagaagctgcacgagctgcaagagaagctgagcccactggggcgaggagatgcgcgaccgcgcgcgcgcccatgggggacgcgctgcgcacgcatctggggccccctacagcgacgaagctgccccagcgcttggccgcgcggccttgaggctctcaaggaagaacggcggcgccagactggccgagtaccacgcccagggcaccgaacatcctgaacacgctcagcgaagaaggcccaagcccgcgcctcaaggaactccccccagggcctgcttgcccgggctgggaaaagcttccaaggtcagctttcc

SEQ ID NO: 178848 - DNA, 708 bp, Homo Sapiens
gtccctggaaaccccaggtgcacttgtctaggatcacgggctggtcaaacttgaaagcatttcaggggaggagaatgtcagtacagatgggtgacacgtacgctcgccttgatgttattttaaacgtggcctgcttagatcagggaaaatcggaacaattctcctaagtcaccatcgacacaaatgtgaggagcagacgctatcgaggaagaggacaggtccgtgtccgactggtccgcctgggcctggtgcctgccctggccccagtgcgaggctcggtcagagggaatatgggcatgccctctgcatcagagcatctgaagagacccgcaccgggtggcaaacgccgctgtggagaggcgcacgggctgctcaggaggcacctggtctcaggattctgcggcatcacttgcagccagaggcctggggagaggagggggcagagatcggtccctcccaggcaaactctagtgaaaatggccagtgtccagcaccccgccagggccgggaagggcggcccttccggcagctctgggctggctcgggccgcgggcccccggcagcgggcgcggccgcagccgccagcgccaaggccagaagccacaccgtggctgcggcccaaggccacgggcaggacgatggaggaggccagcacaccgaaggggtccacacgcgccgccagaccgacgcgcggtcgcgccgcccgta

SEQ ID NO: 178849 - DNA, 873 bp, Homo Sapiens
  misc_feature (776)..(776): n is a, c, g, or t
  misc_feature (816)..(816): n is a, c, g, or t
  misc_feature (853)..(853): n is a, c, g, or t
ggggcttcccattgggtagggccgggaaacacgataaaggggacatgccgggagttgcagtaccctcaggaaggtagcgtcttgatctgcgtggcgtggttctgtgccttgggaagagatgaatgggaagcggccagcggagcccggcccagcccgggtgggaaaaaagggaaagaaggaggtgatggcggagttttcggacgctgttacggaagaaaccttgaaaaagcaggtggctgaggcctggagccgcaggacgccgttcagtcacgaagtcattgtcatggacatggacccttttcttcactgtgtgatcccaaacttcatccaaagccaagacttcttagaagggcttcagaaggaactgatgaacttggacttccatgagaagtataatgatttatataagttccagcagtctgatgatttgaagaagagaagagagcctcacatctccactttaaggaaaattctgtttgaagatttccggtcctggctttctgatatttctaaaattgacctggaatcaaccattgacatgtcctgtgctaaatatgaattcactgatgccctgctgtgccatgatgatgagctggaagggcgccggattgccttcatcctgtacctggttcctccctgggacaggagcatgggtggtaccctggacctgtacagcattgatgaacactttcagccgaagcagattggtcaagtctcttatcccttcgtggaaaaaactgggtttctttgaagtatctcccgtgtcctttcaccangtgtctgaagtgctgtctgaagaaaagtcacgtttgtctnataagtggctggtttcatggtccatcattgactcggncctcccaactactttgaacc

SEQ ID NO: 178850 - DNA, 809 bp, Homo Sapiens
  misc_feature (772)..(772): n is a, c, g, or t
  misc_feature (783)..(783): n is a, c, g, or t
gggggcctccgctcattcctgaccccgcagtgggcgcgatggcggaggctgtactgagggtcgcccggcggcagctgagccagcgcggcgggtctggagcccccatcctcctgcggcagatgttcgagcctgtgagctgcaccttcacgtacctgctgggtgacagagagtcccgggaggccgttctgatcgacccagtcctggaaacagcgcctcgggatgcccagctgatcaaggagctggggctgcggctgctctatgctgtgaatacccactgccacgcggaccacattacaggctcggggctgctccgttccctcctccctggctgccagtctgtcatctcccgccttagtggggcccaggctgacttacacattgaggatggagactccatccgcttcgggcgcttcgcgttggagaccagggccagccctggccacaccccaggctgtgtcaccttcgtcctgaatgaccacagcatggccttcactggagatgccctgttgatccgtgggtgtgggcggacagacttccagcaaggctgtgccaagaccttgtaccactcggtccatgaaaagatcttcacactttccaggagactgtctgatctaccctgctcacgattaccatggggttcacagtgtcccaccgtggaggaagagaggactctgaaaccctcggctcaccctcagctgtgaggagttttgtcaaaatcatgggcaacctgaactttgcctaaacctcagcagatagactttgctgttccagnccaacatgcgnctgtgggggtgcaaacacccactgca

SEQ ID NO: 178851 - DNA, 848 bp, Homo Sapiens
  misc_feature (51)..(51): n is a, c, g, or t
  misc_feature (212)..(212): n is a, c, g, or t
  misc_feature (381)..(381): n is a, c, g, or t
  misc_feature (462)..(462): n is a, c, g, or t
ggggctgcctcgctcccggaagtggagggtctacacgaagcgccgctgggntctgggtgcccggaggcagcgagcgttcgcggagttcgcccgctggcccccgatcaccatgtcggctttcgacaccaaccccttcgcggacccagtggatgtaaaccccttccaggatccctctgtgacccagctgaccaacgccccgcagggcggcctgngcggaattcaaccccttctcagagacaaatgcagcgacaacagttcctgtcacccaactccctgggtcctcacagccagcggttctccagccatcagtggaaccaacccagccgaccccccaggccgtggtgtcttgcagcccaggcaggcctgcttccggcagcaggnaagaactgggacagggaaagctgccgagctgggaacgcaaggagcgggagctgcgagaacactgtagccaacttgcatgtngagacagaacaactggccccctctgccctcgtggtgccctgtgaagccctgcttctatcaggatttctccacagagatccctgccgactaccagcggatatgcaagatgctctactatctgtggatgttgcattcagtgactctgtttctgaacctgcttgcctgcctggcctgggttctcgggcaacagctccaagggagtgggactttggcctctccatcctgtgggtttctgatcttcactccctgtgccttcctttgttgggtaccgacccatctataaggcctttagggtccgacaactctttcagcttctttgtgttcttctttgtattttttttgtcaaataggggatcttacatcatccagttgggttggggcatcct

SEQ ID NO: 178852 - DNA, 1641 bp, Homo Sapiens
gtgtctaaagtacataaaaagtgtcaacagtttaatgctgatacctaaattagttcttctaataccagaagaaaatcttctttagagctagtgcaaagacagcttgaatcctacagcaaagtactccaacttagaatataataattacgaagacaatatatataaatcgaccacgggcgttggcatcttcatgatgagctcgaagcacttttggatgaactggaggctgacagacgggaggggggcacgtccactgtcgctctcttgcggggacctctttttggtgtgggtttactgagacagttctcaatgctgccgtttttaccagacactttgccgcagatctgattgaccagactgataatctgttcctcatcgtagcggtacatcaacttcagccctcggcaggacttctgtttctccacgtggcgcagagcacactccagacagaacacgacgttttcgttctcttgtaccaccatggacaggtagcacaggtgctggcagatctgacacctcctctctgacgtctccaactgcagccactttcgaggctttttcttcccgtccgccaccgtgctgctgccatcgtggtctgccatagcgtccggaggagtggagcccagcctcgaacagctgcccgcgctgaccgtagctctgtactccctgagctcatccacggagggctgaagactggtagctgagagtgggaccgtcttcttcttctgcttctgcttgtgcaatctggtagagtaacttctccatggagaatggcttagctatatggcgacgcttcatttccttggccggtctcaagagcccatacttgtccactgggtgctagcaaagtgcacggtttcagacacgctgtacccacagcacactttggacacaaaggatcccgggaagcagacgacaaactggccactctgctgcacggtcctgtgcaccttgatcccctctttgcacagcacctccggggagatcatgacgttgctttccagcatctgcagccctggggtgccattggcttgcagcagggtgtggaccacatcttccagcttgttctcctcctcagcaggaatgcaataccaaatgcagtcagcaccagtgtgtaagtagtcaatgtatggaaggtgattttggtctcgagaccagcatgaggtagaaaagaccatgccaatatttagccagggaatagtcactccaggcacagcaccgaggtgacgcaggatggaccctgtgttattggggaggacggtgaggttccatccatgcctcgaaaagggttctgattttcctactgggaatccactgccgtgagtgttggtgtccaccttgccgcagtgcactgccacgtggcagtccttctcttccactagcctccagtactcttgctcgatttcggctggggcaggctccttgctgaaacacatgctcatgatattcctcgctgttcgataaaaagttgttagagaaacagaccttcccttatagatgcacttgtggaagtcattgaggacgcctttgtcctcctcctcttccttgaccacttctttttcctgagcgaagagtcgccgccggccagtcttcaactgggcctggcccacctccttgagcttgctgcggaagccgttcccc

SEQ ID NO: 178853 - DNA, 1144 bp, Homo Sapiens
  misc_feature (896)..(896): n is a, c, g, or t
ggggtttcccgcatgctcagtagctgaggtagggatgccatccttctcaaaagacttattgacagtgccaaagctcggtactggacacaacgagggacctgggtctacgataacgcgcttttgctcctcctgaagtgtctttggtccaacgctgttccagagtgtaccatggcttccagtaacactgtgttgatgcgggtggtagcctccgcatattctattgctcaaaacgcacgaatgatagtcacacgtgttattgctgaaggagacctgggtattgtggagaagacctgtgcaacagacctgcagaccaaagctgaccgattggcacagatgaacatatgttcttcattggcccggaaattccccaaactcacaattatagggggaacagctccgggtctgcgttgatcctcctggatggaaccaaggaatatacccgaaggccctccttgactatggaaccaggctccttattgggaactggcttaatgaaacgcaaatggcgtagtcagggagtgttttaacccaggcccctatttaccaactcatggatgggaagcgaacccgaatggctgcggtctcgcgcgacagaaccaactcctgggcggaagtatttcaccgcgctcacggccgcctttttggggcgtttgcaccctcggaaaaagaaaagccccccttgcttggggcaaaacacttcattgttctcaccaaacttatactcgcgcaatcgcccctctggccaagtcgaagggtagggcctgtacccggcaactgctggcatcgccgcgggctatacatagaaacacccctcgcaatgcacttcgtgcgcctaggcggagcctcaggtgcgagggaagcgtcgtggtgatatcttccagcgctctatgctcgcncggctttgatactgtggcaatagcgcgcactaagcccccacgcccggcgccttaactgcgatactctttgcgagcatgcgacaccctcgatatccctgctaataacaacacgcgaggggattaaacttagtcgggcgctctcccgacacaaaacactgctatccgtctcacacctctgcggggcggtgcgcgctagggctgatatcgggtatcaacgccggtgctacatgccgcacgggggggcgcac

SEQ ID NO: 178854 - DNA, 832 bp, Homo Sapiens; identical to SEQ ID NO: 9122
  misc_feature (806)..(806): n is a, c, g, or t

SEQ ID NO: 178855 - DNA, 979 bp, Homo Sapiens; identical to SEQ ID NO: 9135

SEQ ID NO: 178856 - DNA, 309 bp, Homo Sapiens
  misc_feature (22)..(22): n is a, c, g, or t
agaaggacccctggactctganccctctgtaacaggctggatggaaggggccctccacacttccctgggaggtcagagacaaactgtttcagagagtcagatggacttcccaagacttgttgagagatgtgacatggttcttggatttcctctgtagcagcctcctggacttcctgaggactcgacattgtccacagatgtactggccattacatgaaacaagaaaccaagcatctttgctgttgttaattattatatgtgccattgttacaggagattataggctagtctgtaataaattatcttata

SEQ ID NO: 178857 - DNA, 1146 bp, Homo Sapiens
ggggagttcccgagtatcgcgagaagcgcgcttagtctgcacgccgaggtccgcgctgtgtcccgtgttttctgcgtgagaggaaaagatgctagaaccacaggagaatggcgtgattgacctaccagattatgagcatgtagaagatgaaaacttttcctcctttccccacctccagcctctccagagagacaagatggtgaaggaactgagcctgatgaagagtcaggaaatggagcacctgttcctgtacctccaaagagaacagttaaaagaaatatacccaagctgggatgctcagagattaatttcagagagaggacttccagccttaaggcatgtatttgataaggcaaaattcaaaggtaaaggtcatggaggctgaaaacttgaagatgctaatcacaaccctgggagcactggggcacatagggctatttccctaaaagtggagcttgggaggatttttatttggacaggagttggaaacaccccggggaaagtaaaaaagggaaagtttccacaccctggttttacaaaccgaaattcgcaactttggaatccctccccgtagtttttaagcttggaaaggcattctttggcttaacccaaatccaagtggcattggaacctttttgccgggaactcaaactacattgcgagactccttgtgaacggctccagccttttctcgttagcctgcgaaaaatttctagccatctcgccccgcttacttccggtgacacacaaaccctttccatctcctgggaaaaaaggaggcaaagatatgagtttttgggcgtctttccagtgagggcctccacgtgtaatgaaacggcccctccatactcacgacagacagtcgcaacccggacccccgcggcaactttgtgcacgaaacaaaattatgatcacctaacctgtggggccctctcgggcagaagacaaaaggcgcctatacgcccacaaaagtttgtgccgttgatgaataactcacaatcccagcatcaccccctcaggcggacaacaccgaggcaggggggcgaaagatggggcggacttcgcccccccctggtgggacatcaccacacgggaactcgcacaaaagagggccgaagatacacttgggtgggcgagggagcacac

SEQ ID NO: 178858 - DNA, 1005 bp, Homo Sapiens
gggggcctcggtggcggtggtggacacgtcgagccgggtagaagtggaggggccgttcgaagagtcgtgagggggtgacgggttaagattcggagagagaggtgctagtggctggacttgacctggaaagaatcttctgctgactctcaacttttcctggaaaaaatggatcattcccaccatatggggatgagctatatggactccaacagtaccatgcaaccttctcaccatcacccaaccacttcagcctcacactcccatggtggaggagacagcagcatgatgatgatgcctatgaccttctactttggctttaagaatgtggaactactgttttccggtttggtgatcaatacagctggagaaatggctggagcttttgtggcactgtttttactaccaatgttctatgaaggactcaagatagcccgagagagcctgctgcgtaagtcacaagtcagcattcgctacaattccatgcctgtcccccaggaccaaatggaaccatccttatgggagacacacaaaactgttgggcaaaagaatgctgagcttttcctcacctcctgcaaacagtgctgcacatcatccaggtggtcataagctaccttcctcatgctccatcttcatgacctacaacggggtacctctgcattgcagtagcccccaggggccgggaacaggatacttcctcttcacctggaagaaggcaccggcgagtggatatcacagagcattgcccttggacatcaaaactcctatggcggtggcccttatccattgcaatgggaaaatgccgaagacttgaagacgggaatccctgatccaaccatcccctccttggtcccttttcgggggccggtccactctaaataaaacacccccgcaaccaccacgagtcccaccccccgggtaaacagagggttcaattttaaagccccctgggatcaaagccacaaacacccccaaagttggtttctttcaacagagctggcaaattcc

SEQ ID NO: 178859 - DNA, 1204 bp, Homo Sapiens
  misc_feature (630)..(630): n is a, c, g, or t
ggggagcatcatgaagaactgcattggaaaagaactctctaagatccccatgccggtaaactttaatgagcccttgtccatgcttcagcgccttactgaagatctggaataccatgagctgttagaccgagctgcaaaatgtgagaattctctagaacagctctgttatgttgcagctttcaccgtgtcctcctactccactactgtcttccgcaccagtaagccattcaacccactgcttggggagacctttgagctggaccgattagaggagaatgggtaccgatccctctgtgaacaggtgagtcatcatccccctgctgctgcgcaccatgctgagtccaaaaatggctggacattgcgtcaggaaatcaaaatcaccagcaagtttcgaggcaaatacctctccattatgcccctcggtaccattcattgtattttccatgcaactgggcaccactacacttggaagaaagttaccacaactgtacacaacattattgtgggcaagttgtggatagatcagtctggcgaaattgatattgtgaatcacaagacaggagacaagtgtaatcttaaatttgttccttatagctacttctctcgggatgtagcaagaaaggtgacggngggaagtgacagatccatcaggaaaagtccactttgctcttctggggacgtgggatgagaaaatggaatgtttcaaagtacagccagtcattggggaaaatgggggtgatgctccacagagaagccatgaagcagaggaaagcagggtcatgctgtggaaaaggaatcctttaccgaagaatgcagaaaacatgtactacttctcagagcttgctctgactctcaatgcttgggaaagtggcactgccccacagacagccggttacgacctgaccagagactgatgggaaaatggacgctgggatgaagcaaatgcggagaagcagcgcctggaggaaaaaccaaagactttccagaaagaagagagaagcggaagctatgaaagccacagaggatggcacaccatatgatccctattaaggcactgtggtttgagcggaagaaggacctgttaccaaggggttaacccatatttatagggggagaatactgcgagtggtaaggaaaaccggactggagctcatgccgggacattttccggaaacggcggtaccaaacaaaaaaacacaagggg

SEQ ID NO: 178860 - DNA, 256 bp, Homo Sapiens
  misc_feature (246)..(246): n is a, c, g, or t
ggtctgagaatgatggacatttagacactggcgccaggtttgcgctggaccggccaacgcaggggtgggcggaaaagacacacaggtgggctacaggtgtcacacggcaccagccagggccccgggggggctgggggaaggatgggtgtttggccagtgaccaggagtcaggtcaagtccaggtggtcagtgccaggggctccaggaggggagggcagtgcccataaccctcctgggtttccagcntcaccagggc

SEQ ID NO: 178861 - DNA, 958 bp, Homo Sapiens
  misc_feature (722)..(722): n is a, c, g, or t
  misc_feature (793)..(794): n is a, c, g, or t
aattggtggggaaagaaagagggaactgggaagagaaggaggggaacttaaaccttgcttcctgctctgtctttctcagaaaaccaaatatggcatcttccatgaggagcttgttttctgaccacgggaaatatgttgaatctttccggagtttctcaaccattccacggaacaccagtgcatgcaggaattcatggacaagaagctgccaggcataataggaaggattggagacacaaaatcagaaattaagattctaagcataggcggaggtgcaggtgaaattgatcttcaaattctctccaaagttcaggctcaatacccaggagtttgtatcaacaatgaagttgttgagccaagtgctgaacaaattgccaaatacaaagagcttgtagccaagacatcgaacctcgagaacgtaaagtttgcttggcataaggagacatcatctgaataccaaagtagaatgttggagaaaaaggagcttcaaaagtgggactttattcatatgattcaaatgctgtattatgtaaaagacatcccagctaccctgaaattcttccatagtctcttaggtaccaatgctaagatgctcattattgttgtgtcaggaagcagtggctgggacaagctgtggaaaaagtacggatcacgctttccccaggatgacctctgccagtatatcacatcagatgaccccactcagatgctggacaacctanggcttaagtatgagtgctatgaccttttgtccaccatggatatatctgactgctttattgatggtaatgannatggagacctgctttgggattttttgactgaaacctgcaactttaatgccacagcaccacctgatctcaaagcagagcttgggaaaagatctacaagagccctgaattttagtgcctaaaaaaggaggggaaaggttcttttttaataaataactctgaaggtc

SEQ ID NO: 178862 - DNA, 859 bp, Homo Sapiens
  misc_feature (782)..(790): n is a, c, g, or t
  misc_feature (801)..(801): n is a, c, g, or t
  misc_feature (809)..(809): n is a, c, g, or t
  misc_feature (825)..(825): n is a, c, g, or t
  misc_feature (847)..(847): n is a, c, g, or t
ggtgggtaatttctcgttgcaaatattaatccgttgtttttctggcgcccagcccggcccgccgcagtactgtactcgaggtacgttcctatgcaaccgagagccccggcaaatacttcatgagcttagcagcctgggctcgagcagctatgcaaacgcgcttttcatttggagcacggggctgatgtgaagataagaattgtttctcctggacaaagatccatcatttctccagcttcccaagcccccggaaacctctgctcaagctcccagatgtgacgagcacctcccgccagggggagtcaggggttgatcaaaccagctcttgtgacccaaaccagtgccgctgcattaaagggaggcccagctactccttcccagctgagatgggggtacaggtcagatttggcagggagatggcactaacacgacacaagctcactcccagaaccgcagcctgatgtttataataatcggatgtactgtgcaattttaggaggggaaaaaaaggctgtacaagctttaactctaaaataaatttcgatttttgcgcccccttggaaaattaataaaagagggtattaagaactgcgggcggtcggcccaatacaatatcttgtcgggcgcgctgccgccctcggaaagcttttataaaccattccttttggacgcccgcggcccccggaaggtgagggcaggcctggggcttaccgggggcgccgaagggagtccgggggccttgacagagagcgtgggattccccagccaattagtagcccccnnnnnnnnncaaacccagangaggtcgnacgtcctcgccagagncggaggtctcgggggccccgtngctgggaatcct

SEQ ID NO: 178863 - DNA, 1064 bp, Homo Sapiens; identical to SEQ ID NO: 9193
  misc_feature (42)..(42): n is a, c, g, or t

SEQ ID NO: 178864 - DNA, 850 bp, Homo Sapiens; identical to SEQ ID NO: 9194

SEQ ID NO: 178865 - DNA, 1307 bp, Homo Sapiens
  misc_feature (172)..(183): n is a, c, g, or t
gaggtaattattggtgtttcggttaaatgacatggagatcggattccatacataaatgctgatagaattgcaaatttcaactgaattcacattgaggcctacagtggtaattggctacaaactggaacagtttatccacctcagggtatttgagggcacaggaagatacagnnnnnnnnnnnnttaggggtatgcaacacagtttaagtgctcagaaataaattttaccacagtgagaacgaaaccacaatgacatgttactaacgactgtgcagacgtcatggttgaatgcctgcgttctgttccttcctggtggcagccgccttggttcattagttctcatgtttgcagctccttcacatgccccggagcttcccaagtgtgccactcaaaggaaacagcacagtgagtggaggccagcagacccacccggcccaaacagagccttctcagttatgagacttttctacagaagggacttcaaagtctaaacagaccagagagagttaaaaagatcctgctgcttcttagggaagtcaaaaggtacattctgacacctaagtgggaaaaaattctgttttaggaaaagtgccaactgcaatccggggtacaaaatttcaacaaaaagaaaagtaaaactgaatgatctccccctcattccctaattcatagaaaaataggaggtgtgacttttgtttcaaagcaagctgaaaaatggttaaatggacaatttacaaatggtcttcagaaaaccttatcattaccttttctagttgaaagtccatgaatgacatacataaacgtacacatcatagccaaaaaactcaagaactagtggctaacacgatactggaaaaggtgaaggataaaaactggtgaatgaaggtagctgggtggtctacaggctagaacacggtcacgaacggcagaatgcagtagccacctgcgatcctaatcattcaagcttactggtgatacgtcccacttctaaagtggccgtccttcctgggcagccatgtctggagggcgccacatcaggaatgagggcctgtgcattgctttgtcccaaattccagataagagcaacatgtgggtggatctgtgtcgtaagactcatcctcaaagtggatttggcatttcttccccaaagctaattgaacaaatacttgagaaccatgatttctatgaattattctgtatttctggtttcttttcctgcaaaaaatttcatgtatactgagtaacaacctttgatcgatttattaattagaagctatttataccagtagaaaaatacccacaaaccc

SEQ ID NO: 178866 - DNA, 920 bp, Homo Sapiens
ggggcggattggccggagagagcggcgaggcagagcatgatgagtgtcgattggacggctgggcccaagtgggcggaaaacggacggtgcagggggtgggccacgtgtccagccctaacgaaacggtaaccagccctgggaagcccgcaagaggcctcagcggtggccgtccgagcgccgagaggtgagggtgcccccgcctcacctgcagaggggccgttccgggctcgaacccggcaccttccggaaaatggcggctgccaggcccagcctgggccgagtcctcccaggatcctctgtcctgttcctgtgtgacatgcaggagaagttccgccacaacatcgcctacttcccacagatcgtctcagtggctgcccgcatgctcaaggtggcccggctgcttgaggtgccagtcatgctgacggagcagtacccacaaggcctgggccccacggtgcccgagctggggactgagggccttcggccgctggccaagacctgcttcagcatggtgcctgccctgcagcaggagctggacagtcggccccagctgcgctctgtgctgctctgtggcattgaggcacaggcctgcatcttgaacacgaccctggacctcctagaccgggggctgcaggtccatgtggtggtggacgcctgctcctcacgcagccaggtggaccggctggtggctctggcccgcatgagacagagtggtgccttcctctcccagcagcggaagggctcattctgcagcttgtggggcgatgccgtccaccccccagttcaaggagatccagaaactcatcaagggagccggcccagacagtggactggttgggccttcttccaaggccaagaatccctccttcaatggaattccaaccctgccttgaagggaaggaccaaccctcctggttacg

SEQ ID NO: 178867 - DNA, 812 bp, Homo Sapiens
gcaagtgtctggtaccgcctccggaattcccgggatatcgtcgacccacgcgtcggcaagaggcctcagcggtggccgtccgagcgccgagaggtgagggtgcccccgcctcacctgcagaggggccgttccgggctcgaacccggcaccttccggaaaatggcggctgccaggcccagcctgggccgagtcctcccaggatcctctgtcctgttcctgtgtgacatgcaggagaagttccgccacaacatcgcctacttcccacagatcgtctcagtggctgcccgcatgctcaaggtggcccggctgcttgaggtgccagtcatgctgacggagcagtacccacaaggcctgggccccacggtgcccgagctggggactgagggccttcggccgctggccaagacctgcttcagcatggtgcctgccctgcagcaggagctggacagtcggccccagctgcgctctgtgctgctctgtggcattgaggcacaggcctgcatcttgaacacgaccctggacctcctagaccgggggctgcaggtccatgtggtggtggacgcctgctcctcacgcagccaggtggaccggctggtggctctggcccgcatgagacagagtggtgccttcctctccaccagcgaagggctcattctgcagcttgtgggcgatgccgtccacccccagttcaaggagatcccgaaactcatcaaggagcccgccccacacagtggactgctgggctcttccaaggcagaactccctcctcattgaactcaacctgcctggggaagaccccctcctgtccccga

SEQ ID NO: 178868 - DNA, 498 bp, Homo Sapiens
  misc_feature (138)..(138): n is a, c, g, or t
ttggtctccaaggctttattcaggaaggtttgcatctgtttgacaggcactgtgcaggggtttgtaacagttcagttttctccaaggttcccatggggagaggggtgcagaacaggaagagagacctctcggtcaggncgggggggtcctctcctccaggaacaaaaggcactgacgaggtgaccaccccagagccaggggctgggttatatacacatggggtggacagatgcagagaaactcaaagctaaatacaactgaaggatgaaagagtccatcttacagggccagggctgcttctgggctctttctaccaagtgggaaaggaagttcaaaacaaaggcaaagctttcaaggagaaacaagagtccagcctttcggtcttagtgttctgtgcaattttaaaacccaacaaaataaatataacttaaaaatgtcttacatgacactaaaggcaagcctgggaaaagcaagcagttaagaaccttccgagattct

SEQ ID NO: 178869 - DNA, 873 bp, Homo Sapiens
  misc_feature (822)..(822): n is a, c, g, or t
gggggggctgcgcgacggcgcaggggctgcggggagcgccgcgcaggccgtgcagttcctagcgaggaggcgccgccgccattgccgctctctcggtgagcgcagccccgctctccgggccgggccttcgcgggccaccggcgccatgggccagtgcggcatcacctcctccaagaccgtgctggtctttctcaacctcatcttctggggggcagctggcattttatgctatgtgggagcctatgtcttcatcacttatgatgactatgaccacttctttgaagatgtgtacacgctcatccctgctgtagtgatcatagctgtaggagccctgcttttcatcattgggctaattggctgctgtgccacaatccgggaaagtcgctgtggacttgccacgtttgtcatcatcctgctcttggtttttgtcacagaagttgttgtagtggttttgggatatgtttacagaacaaaggtggaaaatgaggttgatcgcagcattcagaaagtgtataagacctacaatggaaccaaccctgatgctgctagccgggctattgattatgtacagagacagctgcattgttggggaattcacaactactcagactgcgaaaatacagattggttcacagaaaccaaaaaccagagtgtccctcttagctgctgcagagagactgccagcaattgtaatgggagcctggcccacccttccgacctctatgctgaggggtgtgaggctctagctgtgaacgaagctaccagaaatcattgatgcatgtggatctgggggccgcactgggcatttgcagcctatttcancctgcctgggccatggctggtgtggcttgtgcatcctggttcggtggcaca

SEQ ID NO: 178870 - DNA, 1218 bp, Homo Sapiens
  misc_feature (142)..(142): n is a, c, g, or t
ctccccccaggctggctgtccactcccaggctgcccatccctgtcaccccttggcatccctgtccttgtggccgtctcaggggatgtctccaccaaacagcgtggagcctcccattgcggtccaggccagccccatgaccancgccgggacggtgtcacgtcatacatgcgcttccaccggtgaacacgggcttcccccacgaagtccggcaggttctcgggcgtcacctcccacggactcggcctcgccgctgacaatcttgtaggccgattcccgtaacaccttctccacttgcttctgcaggttgcggacaccgctctcgcggcagtactgcttgatgagcagcgtcagcacgtccgatgacagcttggccttgctctcatccaagccacacagggcgcgagcctggggcaccaggtagcgctccgcaatggccagcttctcctgggccacgtagcccgacacgttgatcatctccatacggtctcgcagcggctcggggatggtgtccgtgacgttggccgtgcagatgaacagcaccttggacaagtccacgggcacgtccaggtagtggtccaggaagttggcattctgctctgggtccagcagctccagcagtgccgacgacgggtccccctggtagcctcggccgatcttgtccacctcgtcgatgaggatcagggggttctccgtcttggtcttcttcaaacactggatgatcttcccgggcatggcgcccacgtaggtccgcctgtggcccttgatctcagccacgtcagtcatgcccccgacgctgaagcggaagtactctcggttcagggcgcgggcgatggagcgagcaatgctggtcttacccacgccaggggggccatagaagcagaggatcttgcctgggtggagccgcggagctggctaacggcaatgaactccaggatgcgtttcttgacgtcctccatgccgtagtggtcttcctccagcactgcctgtgcccgcgccaggtccaggttctcgttgctgtacttgccccaagggatggacgtgagccagtctaggtagttgcgggtgacattgaactccgaggagtggttgtccagcaggcccagcttgctcagctcctcgtccacacatccatgacgtgcttggggaccacgagctccttcaggcgctcccggaacttctcctcgatggcatccttgtcgtccttctccaggccctgc

SEQ ID NO: 178871 - DNA, 456 bp, Homo Sapiens
  misc_feature (52)..(52): n is a, c, g, or t
  misc_feature (413)..(413): n is a, c, g, or t
  misc_feature (435)..(435): n is a, c, g, or t
gggacgtgagcggaaaatggcggccccggcaggcggcggaggctccgcggtngtcggtgctggccccgaacggccggcgccacacggtgaaggtgacgccgagcaccgtgctgcttcaggttctggaggacacgtgccggcggcaggaacttcaacccctgtgaatatgatctgaagtttcagaggagcgtgctcgacctttctctccagtggagatttgccaacctgcccaacaatgccaagctggagatggtgcccgcttcccggagccgtgaggggcctgagaacatggttcgcatcgctttgcagctggacgatggctcgaggttgcaggactctttctgttcaggccagaccctctgggagcttcttcagccattttccacagatcagcccgtggaccgggagccctnggacccggagcccgttgtgttncaccccgaactgggaggagcg

SEQ ID NO: 178872 - DNA, 849 bp, Homo Sapiens
  misc_feature (538)..(548): n is a, c, g, or t
gggcgcccgggaggcgccggagcccagcggctggcgccagatccaggctcctggaagaaccatgtccggcagctactggtcatgccaggcacacactgctgcccaagaggagctgctgtttgaattatctgtgaatgttgggaagaggaatgccagagctgccggctgaaaattacccaaccaagagaaatctgcaggatggactttctggtcctcttcttgttctacctggcttcggtgctgatcggtcttgttcttatctgcgtctgctcgaaaacccatagcttgaaaggcctggccaggggaggagcacagatattttcctgtataattccagaatgtcttcagagagccatgcatggattgcttcattaccttttccatacgagaaaccacaccttcattgtcctgcacctggtcttgcaagggatggtttatactgagtacacctgggaagtatttggctactgtcaggagctggagttgtcccttgcattaccttcttctgccctatctgcctggctagggtaaacctggnnnnnnnnnnnccacccctggaccttgtgggaaccaatctttgggcatttataacaaaaagcaaatgaaattattatttccttccctgtctatgaaattcgatgaaagtggatgtttcccaaagaaacgtggaaggggcttctaacttgcggattttaagggaaaaacccgccttccaattccaaagcaccttgccagttggtggtggtaaacctgggaggggtggtaggcccccccggctttccaaaaccatcccaccctgggggatttttgggcggggggaaacacaaacttggggaaattcccgggagc

SEQ ID NO: 178873 - DNA, 397 bp, Homo Sapiens
  misc_feature (46)..(83): n is a, c, g, or t
  misc_feature (281)..(281): n is a, c, g, or t
  misc_feature (367)..(367): n is a, c, g, or t
ggggctgttcgcctgcgtcgctccgggagctgccgacggacggagnnnnnnnnnnnnnnnnnnnnnnnnnnnnnnnnnnnnnnatgcccttctccaacagccacaacgcactgaagctgcgcttcccggccgaggacgagttccccgacctgagcgcccacaacaaccacatggccaaggtgctgacccccgagctgtacgcggagctgcgcgccaagagcacgccgagcgggccttcacgctggacgacgtcatcccagacaggagtggacaacccgggnccacccgtaacatcatgaccgtgggctgcgtggcggggcgacgaggagtcctaacgaagtgtttcaaggttctttttgaccccatncattcgaggaccggcacggcgggttacaag

SEQ ID NO: 178874 - DNA, 551 bp, Homo Sapiens
  misc_feature (464)..(464): n is a, c, g, or t
  misc_feature (503)..(503): n is a, c, g, or t
gggccccacggcagacacacaaggtcatccccttgaaaggcctgtgggaggatgtggcacccaccctacctgacggtcactttgatgggatcctgtacgacacgtacccactctcggaggagacctggcacacacaccagttcaacttcatcaagaaccacgcctttcgcctgctgaagccggggggcgtacctcacctactgcaacctcacctcctggggggagctgatgaagtccaagtactcagacatcaccatcatgtttgaggagacgcaggtgcccgcgctgctggaggccggcttccggagggagaacatccgtacggaggtgatggcgctggtcccaccggccgactgccgctactacgccttcccacagatgatcacgcccctgggtgaccaaaggctgagcccccaccccggcccggccacacccatggccctccttccgtgccttcctggggncggggagttccaggggtgttcgcaccagccttggggttnatttcccagttgttgttgttcaaccagaaggtttttcccgggtttttt

SEQ ID NO: 178875 - DNA, 1014 bp, Homo Sapiens
gtaccggtccggaattctcgggatatcgtcgacccacgcgtccgctgaaaagccatctgattcactttctgcaagccttggacttcaattagttggtccttatgatatccttgctggaaaacataaaacgaagaaaaaatcaacaggcctgaattttaaccttcactggaggttttactatgatcctcctgagttccagaccattattattggagataataaaactcagtaccacatggggtatttcagggattctcctgatgaatttcctgtatatgttggtataaatgaagcaaagaaaaattgtataattgttccaaatggagataatgtatttgctgcagtcaaattatttttgacgaaaaaacttaaagaaataacggataaaaagaaaatcaatctcttgaaaaacatagatgaaaaactcacagaagcagccagagaattggggtactcgcttgaacagagaaccgtgaagatgaaacagagagataagaaagttggtgacaaagacctttcatggtgcaggcttggttgttccagtagataaaaaatgatgttgggtaccgagagctccctgaaacagatgctgacctcaagagaatttgcaagacaatagttgaggctgcaagtgatgaggagagactaaaagctttttgctcccattcaggaaatgatgacttttgtgcagtttgctaatgatgaatgtgattatggcatggggcttgaatgggaatggatctcttgctatggtcaccttattttcctaagtgctggcagtttacctctggctttatcgtgaagaagcatctttgcgaattatgggagctcggacaacgagttcaggaactaaccaatgtgcagaataggggtgaaggggtaagatcaagacgatactggttggtggtaggaaccaatactcttcagtaaaaaaagggcgcaaacggcaagcacatttaaggataaataaaaggacagagaggtggcagtgcacccattttgctttaccggagg

SEQ ID NO: 178876 - DNA, 824 bp, Homo Sapiens
cgcggatgttagctcagcgtgtgtactttggatggggatgacagtcaacacagcttggaccagaagcccatggcgcctggctccctggaaaggcacagggcacagacggatgccgcctttcttgctgggacactcctgccaccatccacagctcccccgtcactccacgttcttgtacttggtgaacaggttgtaaagaaccctcagggtggatttgaggtccaagttaaccacgtcttcaggacgagccttgggtttcttgaggcctccgtccagcatcagctcaaaggcgaaggacacattgtggaccttctgatcgaagctttccggagtcaggtagaagtggtggagaggaacaaagtagtcttccagaaggcccatgagcagaaccaggtacacgccatctgcaaactgggtctccagttccgtcacctccaaattcagcttgttcaggtgcttgttcacaaaagtgatgagagacttcttcaccacgctgagcttatccggggcgtggtcgaacagcgtgtcgaaggcatcccgctcgaaccggcccatcatcatctctgtagttgtggtcagctcctccgagatgtggctggaatgcagcaggccttcccgtttccgcacgaccaccacctgcaccgttacatgctcaggaaggcggatgggggccctgaagtgcatggccagagagaccagcaggtggaggatggccaccaggttcttcccgtgaattgagtccacgctccaccggagcgcccagcctcggggccgcagcaggtcatgtactgcttccagcaccgtctgcagcttctgtttctgcc

SEQ ID NO: 178877 - DNA, 556 bp, Homo Sapiens
  misc_feature (472)..(472): n is a, c, g, or t
  misc_feature (478)..(478): n is a, c, g, or t
  misc_feature (507)..(507): n is a, c, g, or t
  misc_feature (513)..(513): n is a, c, g, or t
  misc_feature (543)..(543): n is a, c, g, or t
ggggcttccgctggggaggtcctccatgcgcagccatgagtcgcttcaagtttatcgatattggtatcaacttgactgaccctatgttcagaggaatttataggggggttcaaaagcatcaagtttatgattacaggtggaaatctacaagacagtaaagatgcactgcatttggcacaaacaaatggtatgtttttcagtacagttggatgtcatcctacaagatgtggtgaatttgaaaagaataaccctgatctttacttaaaggagttgctaaatcttgctgaaaacaataaagggaaagttgtggcaataggagaatgcggacttgattttgaccgactgcagttttgtcccaaagatactcaactcaaatattttgaaaaacagtttgaactgtcagaacaaacaaaattaccaatgtttcttcattgtcgaaactcacatgctgaattttttggacataatgganaagganataggagatcggtgtgtagggggggagtnggtgcnttgcatttgatgggtacccaagggaaggcngcagctgcttttt

SEQ ID NO: 178878 - DNA, 897 bp, Homo Sapiens
ggggcgggtgcgcgcgcggacggccgggcggcggcggctcccggaggtggtggcttcactttccaggactcaggggcagccacagcgacagccgcgggcagcagcctcaggagccggagctggaacggccgggggcggcggcagcggcggcgctgagggatctaaaatgtccactgaggcacaaagagttgatgacagtccaagcactagtggaggaagttccgatggagatcaacgtgaaagtgttcagcaagaaccagaaagagaacaagttcagcccaagaaaaaggagggaaaaatatccagcaaaaccgctgctaaattgtcaactagtgctaaaagaattcagaaggaacttgcagaaatcacattggaccctcctcccaactgtagtgctggacccaaaggagacaacatttatgaatggaggtcaactatattgggacccccaggatctgtctatgaaggaggggtgttctttcttgacattaccttttcaccagactatccgtttaaaccccctaaggttaccttccgaacaagaatctatcactgtaatattaacagccaaggtggtgatctgtctggacatcttaaaggacaactggagtccggctttaactatttctaaaggtctcctctccatctggctcacttcttacagattgcaaacccctgctgaccctctggtgggcagcatcgccacacagtacatgaccaacagagcagagcatgaccggatgggccagacagtgggaccaagcggtacgcaacataggggcctgctgcctgccgccccggggaacctgtgcaaggcacattcaccaagtgcatcgggtagccctgcccacccctccaggacctcggttctttattttcctatttttatttaaattt

SEQ ID NO: 178879 - DNA, 1271 bp, Homo Sapiens
  misc_feature (1108)..(1108): n is a, c, g, or t
  misc_feature (1124)..(1124): n is a, c, g, or t
ggtgcgtggctccaggggtgcttaagaatcagtccctggctgaaggaagcttaagtgtctgatggggaagataaaactgacatacgtagcccctgtgcaaggacagcatataaagctggagctggtgcagaatgccttcttcactgaccccaatgaccagagtgcctggttttatcaccgttggctcctaggccgagctgacccccaggatgcactgcgctgcctgcatgtgagccgggacgaggcctgtctgactgtctccttctctcggcccctcttagtgggctccaggatggagatcttgctgctcatggttgatgattctcccctgattgtggagtggaggaccccagatggcaggaaccggcccagccatgtctggctctgtgacctgcctgctgcctccctcaacgaccagttgccccaacatacatttcgcgtcatttggacagcaggcgatgtccagaaagaatgcgtgcttttaaaaggccgccaggagggctggtgccgggactccacgacagacgagcagctattcaggtgtgaactgtcagtggagaagtccacagtgctgcagtctgagctggaatcctgtaaagagctgcaggaactggagcctgagaataaatggtgcccggcttaccatcatcctgctgatgcgggcactggaccccctgctgtatgagaaggagaccctgcagtacttccagaccctcaaggccgtggaccccatgcgggcagcgtatctggatgacctgcgcagcaagttcttgctggagaatagcgtgctcaagatggagtatgccgaggtgcgtgtgctgcacctggctcacaaggatctgacagtgctctgccatctggaacagctgctcttggtcacccatcttgacttgtcacacaatcgtctccgaaccctgccacctgcactggctgccctgcgctgccttgaggtgctgcaggccagtgataatgccatagagtccctggacggcgtcaccaacctaccccggctgcaggagctgctactgtgcaacaaccgcctccagcagcctgcagtgctccagcctcttgcctcctgccccaggctggtcctccctcacctgcaggngtacccgctgtggccnagcggtggggcatcttggagcaactggctgaactgctgccttcagttagcagcgtccctcacctaaagaggccctgccccctacccttgcccctttaacttattggggaactgaaaaaagaaaatggaaaaggcccctctcagggcc

SEQ ID NO: 178880 - DNA, 783 bp, Homo Sapiens
  misc_feature (625)..(638): n is a, c, g, or t
gggagccggagcccggaccaggcgcctgtgcctcctcctcgtccctcgccgcgtccgcgaagcctggagccggcgggagccccgcgctcgccatgtcgggcgagctcagcaacaggttccaaggagggaaggcgttcggcttgctcaaagcccggcaggagaggaggctggccgagatcaaccgggagtttctgtgtgaccagaagtacagtgatgaagagaaccttccagaaaagctcacagccttcaaagagaagtacatggagtttgacctgaacaatgaaggcgagattgacctgatgtctttaaagaggatgatggagaagcttggtgtccccaagacccacctggagatgaagaagatgatctcagaggtgacaggaggggtcagtgacactatatcctaccgagactttgtgaacatgatgctggggaaacggtcggctgtcctcaagttagtcatgatgtttgaaggaaaagccaacgagagcagccccaagccagttggcccccctccagagagagacattgctagcctgccctgaggaccccgccgggactccccagccttcccaacccaataactccctcccgatcttgctgcccttcgttgacacactgtgannnnnnnnnnnnnnatttgtttgggcattgagggttttgtttgtgttttcatcaatgtcctttgtaaagcacaaattatctgccttaaagggcctctggggtcgggggaatcctggagccttgggtcccctccctctcttcttccctccttcccgcttc

SEQ ID NO: 178881 - DNA, 340 bp, Homo Sapiens
  misc_feature (315)..(315): n is a, c, g, or t
  misc_feature (321)..(321): n is a, c, g, or t
ccactgtcagcacctcttctgtgtggtgagtggaccgcttaccccactaggtgaagatgtcagcccaggagagctgcctcagcctcatcaagtacttcctcttcgttttcaacctcttcttcttcgtcctcggcagcctgatcttctgcttcggcatctggatcctcatcgacaagaccagcttcgtgtcctttgtggggcttggcctttcgtgcctctgcagatctgggtccaaagtcctgggccatctcagggaatctttcaccatggggcatcgcttcctggggttgtgttggggggccctcaagggagctncgttgncttctgggggctgtatttt

SEQ ID NO: 178882 - DNA, 698 bp, Homo Sapiens
gggagggagaatctgcagctgaaaggggaggccagaggagacatcactctcttgccctttgactgcgtctggatgcccctactgaccaacactaccatccccttattagactggagaggctgccgggagggtttctaagcctcctattgtggctcacctccaacaggatctctactaagatgttggcagcccggccagctggtctggccatggatgtgacttcaggggctggttatgcttcatgcacctgcttctagcttcactgttgggccagatttcatccccaccccagctctgcagcgcagctgcttcttgattcctccatggaccctgcgtgaaattaccccatgtttccctttgtgcaccactgaggaaggaagcatgaaggacacacagccattttgcagaccctggtcacagtgaaacattccatgggaactcgggccatgagaaacatccttcctaaccacatgactgcagaaacatccttatcgcatcctcccaggcaaaggcccaacagcctgactgcagggacatccttgccatatcctgctgggcagcaagctctaccacccagacccctccctcccagtcccatgattaccccagcctgtgagcggcagttggcgctggcactaagctggttcccccctccccagggttttgctggcaataaaaatgttgctggtgaagccgca

SEQ ID NO: 178883 - DNA, 685 bp, Homo Sapiens
  misc_feature (20)..(20): n is a, c, g, or t
  misc_feature (27)..(27): n is a, c, g, or t
  misc_feature (36)..(36): n is a, c, g, or t
  misc_feature (43)..(43): n is a, c, g, or t
  misc_feature (112)..(112): n is a, c, g, or t
ccgaaccgaaccttgccacnggtccgntgtgcaccnaaaattnaggcctcccaaaagtggaccccagcagtgcacacaataaaaaaccacaagtgcctgtcccataagtggnattgaacttcagaaccacccaagcccaacctttccataaataatggctattgccaacttctgtcaaaaacctaagaataggagcaactaggtcggctgtgataggcatcttattacattgttgtgggacatgatggcgcctgagtttgtcctgggaaatatctattgactgggcaatgctttctgagctagaaatgtggctaaagcagaaactagccagactcctcacaagaagagaaggcaaacctgagtctagtaattgtttaatagcttcaggagattgagaagaggaagcaagggtagccaaatgtgattcagttaatgcgagaggtgcttgtgcatttttagagtcatctgttaaagatgaactaagatcctgctttttgctatcatctgtcatggacagtctatgatgacattgcactggaggaggggtaattcccatccagcccatgagcaaagaaaaatagtttgggtgtacgtgacacattgagcaaagtagactgtcaacagctttcttcaaaaccatattgcagggaagagacatggaccaattaaaaagtaactcaaagcc

SEQ ID NO: 178884 - DNA, 917 bp, Homo Sapiens
tggctggtacggtccggaatcccgggatatcgtcgacccacgcgtccgaagctctacaagatggcggcggtcggggccgaggcgcgaggaggatatggaatattatcttgtaaaatggaaaggatggccagattctacaaatacttgggaacctttgcaaaatctgaagtgcccgttactgcttcagcaattctctaatgacaagcataattatttatctcaggtaaagaaaggcaaagcaataactccaaaagacaataacaaaactttgaaacctgccattgctgagtacattgtgaagaaggctaaacaaaggatagctctgcagagatggcaagatgaactcaacagaagaaagaatcataaaggaatgatatttgttgaaaatactgttgatttagagggcccaccttcagacttctattacattaacgaatacaaaccagctcctggaatcagcttagtcaatgaagctacctttggttgttcatgcacagattgcttctttcaaaaatgttgtcctgctgaagctggagttcttttggcttataataaaaaccaacaaattaaaatcccacctggtactcccatctatgaatgcaactcaaggtgtcagtgtggtcctgattgtcccaataggattgtacaaaaaggcacacagtattcgctttgcatctttcgaactagcaatggacgtggctggggtgtaaagacccttgtgaagattaacaagaatgagtttgtcatggaactatgttgggagaggtaatcacaagtgaagaagctgaaagacgaggacagttctatgacaaacaagggaatccacgtatctctctgatctggactatgagtctgatgaattccagtggatgcggtcgatacggcatgtgtctcatttggtgaatcaccgtgtgacc

SEQ ID NO: 178885 - DNA, 853 bp, Homo Sapiens
cggacgcgtgggtcgacccacgcgtccggcaccatggagcctgtgtacccccagccgcctttcagctactccgatctgtctcgagaggacaaaaagcaagtacagtttgtgtccgagccctgcagcctctccataaacggagtgatcttcggcttgacatccacagatctgcttttccacctgggggccgaggagatcagtagttcttccggaacttcagacagattcagccgaatactcaagcacatcttgacccagaggagctactacccactctacccgccccaagaagacatggccattgactatgagtcgttctatgtttacgcacagctgcctgtcaccccagatgtcctcatcatcccgtcagagctgaggtacttcgtgaaggatgtcctcggctgtgtctgtgtgaaccctgtggcgccttaccaaagggcaggtgggaggcaccttcgcccgactctaccttaggaggccggcagcggacagggcagagaggcagagcccatgcattgctgtgcaggtcgtcaggatctgaggcttctgtcctctgctgttctctgctgtgtgggcccttaaagtcttagccaagagccaagacatagccctgtgacaaggtgaacagttgggtgggaacaggagagaggagccagccaggcaggggcagctgcagtgaccaggcccagcagggaggacttgtgcagccgggcctgcctctgagtgggtgcctctcctgggaaggaagctcttgcttctcagtccaatgctccgtgtccagaaagtaagccaggctgtggaatcccgcccactcagaaaaggcgagaacgcttgtgatttctacttgaatcac

SEQ ID NO: 178886 - DNA, 548 bp, Homo Sapiens
  misc_feature (510)..(510): n is a, c, g, or t
  misc_feature (523)..(523): n is a, c, g, or t
ggggggcgacagacatctgggattccccagaaggctctgacaccctctgcccgccctgtagctgtagtcctcccattggctagggctctggggtcgggcaggtttcgggtgcccccagtgggcctcgggttccaggcagctcgtgacaagcccctgtgctctctagaaagcccgttttggcctgagtgcggctgaggacatcaccccccggttcagggcagcctgtgagcagcaagctgtggctctgactctgcaggaggacagagcatccctgacgctttcaggggggccctcggactggcctttgacctctccaaggtaccaggcccagaggcagcccccaggctgtgtggcgctgacactgggcctggcaaaacgcgtgtggagcctggagcggcgactggcagctgcagaagagacagctgtcagcccgaggaagagcccccggcctgcagggcttcagctcttctttaccagacccagatccccagagaggttgccctggacctnggagtcaggatgncggtttccaggagaattcgttcatc

SEQ ID NO: 178887 - DNA, 1215 bp, Homo Sapiens
gggaggtaggagcgatgtggcctgggaacgcctggcgcgccgcactcttctgggtgccccgcggccgccgcgcacagtcagcgctggcccagctgcgtggcattctggagggggagctggaaggcatccgcggagctggcacttggaagagtgagcgggtcatcacgtcccgtcaggggacgcacatccgcgtggacggcgtctccggaggaatccttaacttctgtgccaacaactacctgggcctgagcagccaccctgaggtgatccaggcaggtctgcaggctctggaggagtttggagctggcctcagctctgtccgctttatctgtggaacccagagcatccacaagaatctagaagcaaaaatagcccgcttccaccagcgggaggatgccatcctctatcccagctgttatgacgccaacgccggcctctttgaggccctgctgaccccagaggacgcagtcctgtcggacgagctgaaccatgcctccatcatcgacggcatccggctgtgcaaggcccacaagtaccgctatcgccacctggacatggccgacctagaagccaagctgcaggaggcccagaagcatcggctgcgcctggtggccactgatggggccttttccatggatggcgacatcgcacccctgcaggagatctgctgcctcgcctctaaatatggtgccctggtcttccatggatgaatgccatgccactgggcttcctggggcccacaggacggggcacagatgagctgctgggtgtgatggaccaggtcaccatcatcaactccaccctggggaaggccctgggtggagcatcaggtggctacacgacagggcctgggcccctggtgtccctgctgcggcagcgcgcccggccatacctcttctccaacagtctgccacctgctgtcgttggctgcgcctccaaggccctagatctgctgatggggagtaacaccattgtccagtctatggctgccaagacccagaggttccgtagtaagatggaagctgctggcttcactatctcgggagccagtcaccccatctgccctgtgatgctgggtgatgcccggctggcctctcgcatggcggatgacatgcttgaagagaggcatctttgtcatcgggttcagctaccccgtggtcccaagggcaaggcccggatccgggtacagatctcacagtgcatagccgaggaaga

SEQ ID NO: 178888 - DNA, 835 bp, Homo Sapiens
aagttaaactgtagtcttctctcttcagagtctacttttatgccagttgcatcaggactgtctccactatcacctacagttgagctgaggctgcagggcattaacttgggcctagaagatgatggtgttgcagatgaatctgtgaaagggctggaaagccaggtgttggataaggaagaggaacagcctttatgggctgcaaatgagaattctgttcaaatgatgagaagtgaaatcaatacagaggtaaatgagaaagctggactattaccttgtcctgagccaacaataatcagtgctatcttgaaggatgataaccacagtcttacattttttcctgagtcaactgagcagaaacaatcagacataaagaaaccagaaaatacacaaccagaaaataaagaaaccatatctcaagcaacttcagagaaacttcccatgattttaacccagagatctgttgctttgggacaagacaaagttgcccttcagaaattaaatgatgcagccaccaagcttcaggcctgttggcggggattttatgccaggaactaccaccctcaagccaaagatgtgcgttacgaaatccggctacgcagaatgcaagagcacattgtctgcttaactgatgaaataaggagattacgaaaagaaagagatggagaacgtattaaaaaatttggtacaggaagaagctttcaaattccttttggaaaccagggaaaggtcttctacagggtttgggcaaacagaccagtggaacccagcgtcctaaagtttccctgggcatacctgaatggttccctccctattattcaaggaaactccttggtga

SEQ ID NO: 178889 - DNA, 978 bp, Homo Sapiens
  misc_feature (820)..(820): n is a, c, g, or t
  misc_feature (830)..(830): n is a, c, g, or t
  misc_feature (867)..(867): n is a, c, g, or t
  misc_feature (898)..(898): n is a, c, g, or t
ggggtggggctatgcccggacagaggatcgcctcgctggcctactctctcctcccgtacggcgccggaatcccagctccacttaccaggccgcggctaccccgccgtcccccccgactcccgccaccccgctctctcaggctcttcaggatccaagtccgtaggccctttaaggggtctagttgccgtttgcgaggccctgggactttggtcccagacagcggggatccggatggcttccgtgcggatccgagaggccaaggagggagactgtggagatatcctgaggctgattcgggtgaagactgcaggccggagctagccgaattcgaaaaactctcggatcaggtgaagatcagtgaagaagccctgagagcagatggctttggagacaatcctttctatcactgtttggtagcagagattcttccagcgcccgggaagctactggggccctgcgtggtgggctatgggatatactatttcatctacagtacatggaagggacgcaccatttatctggaggatatctatgtgatgccggaatatcggggtcaagggattggttccaaaataatcaaaaaggtggctgaggtggccttggataagggctgctcccaattccgcctggccgtcctggactggaaccagagggccatggacttgtacaaggccctaggagcccaagatctgacggaagctgagggctggcacttcttctgctttcaaggagaggcaacgagaaacgtggccaggaacagtgacgccatccctaagaggactctctgtcttgagttcctccttccccatcagctgaagcnctcttcaganctacgtccacagacactgatgctgaggcctccctggnggaaggagggttaggggtgcctatcctcaantattggaagagcagaattgagggagagacctttcttccttgttgagggtgaaaaataaataagaattacatgtcaaaaaa

SEQ ID NO: 178890 - DNA, 723 bp, Homo Sapiens
  misc_feature (417)..(417): n is a, c, g, or t
ttgctcgttgcctctcctttgtaagcagaatgaagtgccagcccgtcagcttccgtcagatctttgggctccttagggccttggtacaagtccatggccctctggttccagtccaggacggccaggcggaatctgggaacagcccttatccaaggccacctcagccacctttttgattattttggaacctatcccttgaccccgatattccggcatcacatagatatcctccagataaatggtgcgtcccttccatgtactgtagatgaaatagtatatcccatagcccaccacgcagggccccagtagcttgcccgggcgctggaagaatctctgctaccaacagtgatagaaaggattgtctccaaagccatctgctctcagggcttcttcactgatcttcaacctgatccgaanagtttttcgaattcggctagctcccgaatcagcctcaggatatctccacagtctccctccttggcctctcggatccgcacggaagccatccggatccccgctgtctgggaccaaagtcccagggcctcgcaaacggcaactagaccccttaaagggcctacggacttggatcctgaagagcctgagagagcggggtggcgggagtcgggggggacggcggggtagccgcggcctggtaagtggagctgggattccggcgccgtacgggaggagagagtaggccagcgaggcgatcctctgtccggc

SEQ ID NO: 178891 - DNA, 1259 bp, Homo Sapiens
  misc_feature (727)..(727): n is a, c, g, or t
  misc_feature (801)..(801): n is a, c, g, or t
  misc_feature (1008)..(1008): n is a, c, g, or t
  misc_feature (1042)..(1042): n is a, c, g, or t
ggggcagacacggagacagcgccggggcggagggtacgatggagaatttcacggcactgtttggggctcaggctgacccaccaccgcccccaaccgcactcggcttcggaccaggaaagcctccacccccgccaccgcctcctgcgggcgggggacccggcacggccccgcctcccaccgcggccacggctcctcctggcgcggacaagtcaggagctggctgtggccctttttacctcatgagggaactgccaggtagcacagagctgacaggcagcacgaatctgatcacacactaccacttggaacaagcctataataaattctgtgggaacaaggcgacagagaagctaacgaacttcctgccttgacctggccagggatgattcgatctgccctggcttccccatgataaacacgcgagccttccagctcctctccgtttggagaaaaccccccctattccaccagggagcctcctgtttccatcccctatttcaagacggggcaaccaattgcatgggaacccggagcctttcctcggctctttcataccactgtggcgccccccgttcttgacacgggcgaagagcagtatgagtctccctttcatccgacataggccttctatattctctcacggctgcccctctccctcacctcgcgtaggtgccatgtgggaattgtccctcgcgggtgtgcccctgacctgtcgctactgccacancgacatcacgggccagacacgtcgctcggtgacacccctccgcaagtgggcgtgtacttcctcccccctggctnttcccgccccctctccacaggataaaaaacccgctgtcccacattacgttgtggggggttttcttctaccaaacgactctctcgcgcgcccccacgtatgacaacgaactatgcggcggtgaccccctttggcgtatgcgctccgcctttatgcccttgttgcccccttgtgttcccccgcttgctcccactccctttttcccggcnctcccctatgtgccggagagagaacgggtgcctntctttgctgcacggacgagcgctagctttcccaggattcgctagcgggacatctcatctggcagcgcggactcccccacatgcacttgtgccgtctcgaccgatgcgtgcacccttgggcgcgcctgctctactatacaccccgccgtggtactcttcccctctgagtggcaacgtcataccccccgtcgcctgtgcctacattcactctattaacc

SEQ ID NO: 178892 - DNA, 919 bp, Homo Sapiens; identical to SEQ ID NO: 9695
  misc_feature (655)..(665): n is a, c, g, or t
  misc_feature (702)..(710): n is a, c, g, or t

SEQ ID NO: 178893 - DNA, 778 bp, Homo Sapiens
  misc_feature (55)..(145): n is a, c, g, or t
  misc_feature (359)..(416): n is a, c, g, or t
ggcaggctggtacggtccggaattcccgggactatcgtcgacccacgcgtccgtnnnnnnnnnnnnnnnnnnnnnnnnnnnnnnnnnnnnnnnnnnnnnnnnnnnnnnnnnnnnnnnnnnnnnnnnnnnnnnnnnnnnnnnnnnncaaacaacaaaaagcagaaacgctgaaggggtcggtttacgggaaaaccgcctgtcagaacacttggctactcctaccccagatcagtggacctgggaatgagggttggtcccgggaggcttttctccaagctgttgccaccagacccgccatgggaaccctggccacagaagcctcccggggagtgagccagagcctggaccgctgtgctgannnnnnnnnnnnnnnnnnnnnnnnnnnnnnnnnnnnnnnnnnnnnnnnnnnnnnnnnntgttcatgggcaagcatgtgcgtgcctgtgtgtgtgcgtgcccctcccctggcagccgtcggtggtatctccactccagccccttcgccacctatctgagcatagtctgtccacgtgagactgcccagagacagcagagctccacgtggttttaaggggagacctttccctggacctgggggtctcgccgtatctcatgaccaggtgctaaatgacacgacatgcatcagctgcctttcgatgaccaacctccctgtccccgtcccgctgacctgaccccgatggcgtctcacggtgatgcctgctcctgacataggtgttcactagtagcgaactacattctggatgggaattttcatgta

SEQ ID NO: 178894 - DNA, 1148 bp, Homo Sapiens
ggggatccattaacccttaatagtcaatgtctatgattttaatgtattactagatccacactgtcattatttcccccagttcgttaaatctgcaaatactttatgttcagttttacatctgttaaagcaagatcctcaagggcagggatggaattctactcacttctgcatcccttgacattgcagtgtgtggaacagagatgacaaatacaggttcaaatttgtgccacctgaaagagtgccatctagaagcagttgcttcaaactgcacttcaacgggacccacacgccctgctaagcaactcaaactcatcatgaaataaatctgcagaagaaatgtgtactctctattcaaactctgaagtaaataaaatgtgtatgattgacacaatcacaaaatggcatttaagtggaagtctgcttcctgaagaaataaaagccagagcaaacagatttggggtcatatttttgttcactgaaaggaccaaccagtttcatcaaacaagctttagagaaagagaaactgagtaattcatcttgtcagttacagttcacatatatacacacacatacaaactggctcagcatcagtgaaacataactattcaaatacaaaagtataaaaaacctctttaaaaaaccaatagcagccagaaacagaacatttgtaaacaaaaccacaactatcagccctgtgcttaaacacagaatctgcattcttttgaaacattaagtatatgcaataaagagaatatagaccatctttttccttaatatacaatacccaatatctaaaacaatgtcaccaataatagacacaaatcggtgttatcataaggcatgttgaacagtctttttcacagtactcaggggcatcatgttgctgcagaggccacactttccagaagttttctcctcgctgtgatcctcgcacaccgggggcactcggaggactggaagcactgtttgtgaaagcaagccctgcacgctgaacatcttctacatgttgctgtctgaaatgggaagatgacagtcgtattctggcaaaattcacaaataaagccctttccttgacacagctcacagccagccacatgtgcaagggaagctttcagaatgtccttgagtaagggtgccagcagccctcc

SEQ ID NO: 178895 - DNA, 558 bp, Homo Sapiens
  misc_feature (510)..(510): n is a, c, g, or t
  misc_feature (537)..(537): n is a, c, g, or t
gggggagacaggtgagcgacgaacttctgagacagttgtgtccctgtggctttggtgcgcctgtgtgcactttctccctccacctggagcatgggctaacaccggaggaaaggaaaagacagagtcagacaggggacaatgaagcctttgaagtgccagtctatgaagaggccgtggtgggactagaatcccagtgccgcccccaagagttggaccaaccacccccctacagcactgttgtgatacccccagcacctgaggaggaacaacctagccatccagaggggtccaggagagccaaactggaacagaggcgaatggcctcagaggggtccatggcccagggaaggaagccctgggaagagctccaatcaaccttcggcttcggggaccacgggctgtgtccactgctcctgatcttgcaaagcttggcgacagtccccacattagagcctctgactccacccccttgcctatggatgttttgctttgggtcaccctgatgatggntagtgtttttttattgagggacaattngggcacccctttaaatggatt

SEQ ID NO: 178896 - DNA, 557 bp, Homo Sapiens
  misc_feature (81)..(81): n is a, c, g, or t
gggtggtcagccggctgcatctttgcagagctggccaatgctgggcggcctctttttcccggcaatgatgtcgatgaccangttgaagaggatcttccgactgctggggacgcccaccgaggagcagtggccctctatgaccaagctgccagactataagccctatccgatgtacccggccacaacatccctggtgaacgtcgtgcccaaactcaatgccacagggagggatctgctgcagaaccttctgaagtgtaaccctgtccagcgtatctcagcagaagaggccctgcagcacccctacttctccgacttctgtccgccctaggccccgggacccccggcctccaggctggggcctggcctatttaagccccctcttgagaggggtgagacagtgggggtgcctggtgcgctgtgctccagcagtgctgggcccagccggggtggggtgcctgagccccgaatttctcactccctttgtggactttatttaatttcataaattggctcctttccccgggaacccaaaccactcacaatgatttcccttgttg

SEQ ID NO: 178897 - DNA, 899 bp, Homo Sapiens
  misc_feature (482)..(482): n is a, c, g, or t
ggggcggttgtgtctgggaaggagagaaaatgtgcggcggagccgaacaagaccgaaatccagactctttttaagaggcttcgcgcagtatccaaccaacaaggcctgtatcgactgcggcgccaagaatccgagttgggccagcgatcacgtacggtgttttcttgtgcattgactgttccggggtgcaccgctccctgggcgtccatctgagcttcatcaggtccacagagttggattccaactggaactggttccagctgaggtgtatgcaggtcggcgggaatgccaatgcgacggctttttttcgccaacatggatgcacagccaatgatgccaacaccaaatataatagccgagctgcccagatgtaccgggagaagatcgggcagctggggagtgcggccctggctaggcatggcactgatctttggatagacaacatgagtagtgccgttcctaatcactccccagagaagaangactctgatttcttcacagaacacactcaaccccctgcctgggatgcgccagccactgagccttccgggacccagcagcccagccccgtctacagagagcagtgggcctggccacagccccgaacaatgggcccccaacacagaaccctggcttggcaccctcaccccaaaaccttcactgggaactgaaaaagcctccattcctttgggcaaaaaagaaacccagcacggcagcttaaagaaaagggccttggggtggccaaagaaaaaggccctagggggcccccagaaaggggtgaaccagcccaagaacctttcccatgaaaaatttggaaccggggcagggctctcaagggggggcaaagaacaaaacctcccgtggggaagccaccacgggggcaaaccccaaaatgtgcc

SEQ ID NO: 178898 - DNA, 981 bp, Homo Sapiens
gctcagccaattttataatttttttaaaaaacttaaagtaaatattagacatagcatccaacatataaatattatatatatacacatatttacattcataaaaataatgattagttttctggatgaagaactgaggcccagaagttaactagattagtggctcaaggtaggctgcattttagaatcaagggcagtgatgcccaagtcacagtgactaatgccatcagaatctcttgggatgggacccttttatttactattttgtaaagctccccaagttaaacttgaaaagtgaattaggtcatattaggtcagagattaatacaaattgtactactgattatcttaccctagcaagtgtaggttaatttttacaatcttcttatgtatgctgtttctaataaaaggggttgttctcttgctcaatctaactaacaggtgagctataaaatcacacaggtgatcacaactctatccaaagaatggtggtgctccatccttaacctcagctatctagttcttatcctcaggtgcttatcactcattcttgggacttcaaaataaatatatagatatccaggaaccaccttagccaagacaaatcaaaatcaatcactaggagagacacctgagcatatgaacttttaaaaaggttcatgattttgatgcctcaccctggatggagctctctcatagtatgccacacggtatgtccttagctgtattcattaatattacagggaagcagatttcagtttaagagaaaacaatgaaaacaattcagagctacccagtaatggaatggttttaaagcagtgagttctctgtggctggaagaataaaagcaaaggttgaactatcacttgctgggaatgctatcaaggggtttccaaattcagtaagtacttgcatcacacaatatttaaatttcctcacaattaagtttctctagccaaaacttccaacagatcacatataacc

SEQ ID NO: 178899 - DNA, 641 bp, Homo Sapiens
cacaatttagaatgtgttagagaaatttaacaaggtagaacaggtgatttctggttgatagactctatctggcagcatattcatttcatgtatcaaaccccaagagttgctggcctgtgttatttttcataatttctcacattctggaaaaatagatgctatcctctacagtaaaacatggaatcacttcatagtagacaatacatgacatttaacaaatactgggtttggaaaaagttgggctttattccaacaattttagtttggcccactgattttcaaatgtctggggggatggcttataactaagtagaaaggtgaagatggatttttacttaagaatggggatagagatgagtttcatggtttttaacaacgttatttccagtccattatttacacatgtggggtaggtggatatgggtcctggtctctggataaggaaatagggagcaactttgttttaaaataactacactaaaagactttcttcatctcccgtatagagaaatccagatttcaattaactccatttatggggtgctaacaaaattcagggttagagtaaattaggtctgtggtccatgtggcctggtttcctagcacccattaaacataatgctatctttaagcctgaacat

SEQ ID NO: 178900 - DNA, 795 bp, Homo Sapiens
  misc_feature (83)..(83): n is a, c, g, or t
  misc_feature (568)..(622): n is a, c, g, or t
gggaacattccagcactttctatctggcctccttgtccccacactacgcccccccaccctcgccagggcttcctctagtgaanactgttagagctaaatctctgagacagggaaggcattactcacttaaaaccccaggctgagtcctggccacctgctggattgtgacataggaggtggaatccactgaactgctacttctgcacaggctccttctcctggggctgtacccaggcccagccctgatggctcaccctgtcaggcaccagctgctccctcctgggctctcacccacctgcacatcctccttcctagcatcacattacctgcgtgtttccccagacaaaagcacttcccattcttgaaccttgcctaccctgggctgagctgacggcaatagatttaatgacagtgactcccaggaagggggtcctgtgactttgcgccttaataagaacaaaaggtggaattggtgacctaggaaaactgttgaattctaaaaagaatgaagttagtttctaacccctagtaatgttccctttttattttttgagtcttgccctgtcannnnnnnnnnnnnnnnnnnnnnnnnnnnnnnnnnnnnnnnnnnnnnnnnnnnnnngtttagccgattctcctgggtagctgggattacgggtgtggtcccaccccaccttagcccctggggcataatttgtactcacaaacaaggtttttgcctagtttggcccaggcctgggtcctcaaattcctgggctttcagtggatcaacccaacctcgggctttccacaagg

SEQ ID NO: 178901 - DNA, 976 bp, Homo Sapiens
gggaggtccgggattggccggagcgcccgccgctcacggtcaggggttgccggatcccgtccgcgggcgatgctgctgcggagggtggtcgagggaggccgggcggtagccgccgcggtccgtggctcggcaagtaccaggacgggtcttggcagcgccgaagggcacgtccgagaggccgctgtccgggggcccgcacgtaccgggaggagccccggcccctccacccgcatgtggggacggagccgggaggatcgcgcgctggccgccgccgaaggacccctcgctcctctcctccatcggctcttaccgagtccccgccccggaatctgtggaggggccgcttagccttgggagaggaagcagcccggtgaacggccactttcctgtttctcagtatctgccgagcgcctgtgtgcgagccctcctgggctctggggactggccgtggacatggagcggatgatgcccctcgcaggactagttaaataagtgaaggggctcgccggttctccagcccggactgctgccagaggcttcctggaggtggcagctttcttcaaaggcaccatcccggagcgcaagcccctgatgggcgcagaaaattcgggacagaccacgtagaggtgggctcccaagcaggtgcggacggcaccaggccgcccaaggcatcgctgccacctgagctccagccgcccacaaactgctgcatgagtggctgccccaactgcgtgtgggtggagtacgcggacaggctgctgcagcacttccaggacggtggggagcgggccctggctgccctggaggagcacgtggctgatgagaacctcaaggccttcctcaggatggagatccggctgcacaccaggtgcggaggctgagccaatccctgctggactccctaccgaaggacggagtccaggacgcagccgcagcctccttccttcaaaccccctcaacagactcctggtgtcca

SEQ ID NO: 178902 - DNA, 897 bp, Homo Sapiens
ggggcgcgactacgctcataaaaggaaaaaaagcgtgtgcggttctcgacgtgccgccaatcttcgaacgcaggtctgtgatcatccgcagactccgaaaaagggttcgaggaacgcgcctgctcccctcgtcgcagtttccagcccgacgagcttgttttgtcccggactcggtgcccctgtagacaatggccctcgtgtctgccgattcccgcattgcagaacttctcacagagctccatcagctgatcaaacaaacccaggaagagcgttcgcggagcgaacacaacttagtgaacatccagaagacccatgagcggatgcagacagagaacaagatttctccctattaccggacaaagctgcgtggcctctacacaaccgccaaggccgatgcagaggctgagtgcaacatccttcggaaagctctggacaagatcgcggaaatcaagtcctctgttggaagagaagcggattgcggccaagattgccggtctctacaatgactcggagccaccccggaagaccatgcgcagaggggtgctgatgaccctgctgcagcagtcggccatgaccctgcccctgtggatcgggaagcctggtgacaagccccccacccctctgtggggccatcccctgcctcaggagactacgtggccagacctggagacaaagtggctgcccgggtggaagcccgtggatggggaccagcagtggatccctgggccaagtgggtcagttaaagcccatggcccccaaacagtattgagggtaaatgacatccgatgaaaaaaagcaaaagaaagacacacccctgaaggcgggcgccgctggtcattcccgcctgccccccggtgggaaaagcccaaaccccggaaaaacaggacccctggaagc

SEQ ID NO: 178903 - DNA, 1399 bp, Homo Sapiens
  misc_feature (404)..(413): n is a, c, g, or t
  misc_feature (588)..(596): n is a, c, g, or t
tcaatcagcctgaccgggctcgtcaccgcggcaccactgcgcgctaggtggcgagcgccccgtcccctcggacagggtaagctggcgcgccggatacgccctcggcctggcgccagacgtaccacacccgcggctgcgtgaagcagggccacatgtcaggagcacacgtcgcgcgtcgacgcggggggtgcgcgcgcccgaccggcgtagcccatagtaggaggaaggcacacgcacgtagggggttggccgcggttcgccatgagaggtgcgcggttttccgcgccactgttaatctgaccagagcgagtacgcgcggcgccacagcgccacgggtatagcaaagctctgttggggccagacaaccagggaggagcaacgtaagcgtacgccgacatccgacnnnnnnnnnncggccgacggtagagcggtcgaagtgttagctgacgcaaaggttccgcttaccagggggaggtgatggggcattccggcctggcccccctgtgacaggctgaatcctcccctggcacagaggaacgggcgccgcgtgcgacctggggccagaagcttagaggccctgggtggatnnnnnnnnntggaaaacaccaggaagcgaatgcagaagaaaagtgttgatcacccataaccctcaccccaggagggggaatgaagaggtctggggggctgcccccatgctatgcccgcagtccttaaatccaaagcaaggagaatgaaaacgaccctccctctgaaatacagccccgacctcagcatggaggcaaaaggacagtgggcaagaccacgtccctccgaagggagagggctgaaggagagcacataccgttagtggctgcggcacccctccctaccagggtctgatgcagcctcagcaccgggagtggggagaggggaggagaagggatgacagcactgtgccatccactcctccctgaacccctggccccagcacaggcattcctctgcccactagcccaagtcaggggatgtggaagaaactgtgttggaatccaaggcccttatctatttcttcttccgttcttgggagcagcgtgggcaaaaccatttcccccgaggcttggttgtcagccccacacaggcaaaatggaaccactcaatggaacaatcagggttgtcacagccaatcatctctccataggagacctggtgacaaaggcaataggtgggttcgttgggatccacaggcatatccaacacatcagaggggtggacactgccaaaggtcactgagggcatcccatactcaggacttctgcatgccaagaggaagagaaagtgtcatctacaggaagggaagctaaagcctgaggctttcagaggtggcaggagatcctggtagggcaaatgatttgggcttctc

SEQ ID NO: 178904 - DNA, 950 bp, Homo Sapiens
  misc_feature (453)..(540): n is a, c, g, or t
  misc_feature (611)..(611): n is a, c, g, or t
  misc_feature (746)..(769): n is a, c, g, or t
cccctcagacccacctgggcctgaaaaacatgatcaaggaggtggatgaggactttgacagcaagctgagcttccgggagttcctcctgatcttccgcaaggcggcggccggggagcttcaggaggacagcgggctgtgcgtgctggcccgcctctctgagatcgacgtctccagtgagggtgtcaagggggccaagagcttctttgaggccaaggtccaggccatcaacgtgtccagccgcttcgaggaggagatcaaggcagagcaggaggaaaggaagaagcaggcggaggagatgaagcagcggaaagcggccttcaaggagctgcagtccacctttaagtagcgggggctgcagccgaccgccctgctccggcccccagtgtggtgggcgagggtggcgcatgggaggccgagcctgaatccttgcctgtgtctgacgggaccactannnnnnnnnnnnnnnnnnnnnnnnnnnnnnnnnnnnnnnnnnnnnnnnnnnnnnnnnnnnnnnnnnnnnnnnnnnnnnnnnnnnnnnnagcggaaagaagaaacccccgacaggggggccaagtagacgaggaaccacagaatagctggcaccagaggngggccaaaaaaggggacagcggacaaaaatacagaagagacaggcgcagcacgtaaaaaagaacagccgacggcgggcaaaagacgacgaagtgagggaggacaattgggggagagagcaccccaacacagcgcnnnnnnnnnnnnnnnnnnnnnnnnagcgcaaacccccccgcagcgaaagtattaaacgcaccacaaagagcggaaagcaagtccccaaactgacgcgggacggaaagtagcggggcgaaaccaacgacgccggaatagtcacgccagcggaacaaaaaagtcgggcacaaggagaacacagaccagaccaatatataccacgggg

SEQ ID NO: 178905 - DNA, 665 bp, Homo Sapiens
ggggagcaaaatggcgcgggagaaggagatgcaggagttcacccgtagcttcttccgaggccgcccggacctcagcacgcttacgcattccatcgtgcggcggaggtacttagctcactcgggccgcagccacctggagcccgaggagaagcaggcactgaagcggctggtggaggaggagctgctgaagatgcaggtggatgaagccgcttccagggaagacaaactggaccttaccaagaagggcaagaggcctcccaccccttgtagcgacccggagagaaaaaggttccgcttcaattcagagtcggagtccggctctgaagccctccagcccagactactttggacccccagcaaagaatggggtggcagcagaagtcagcccagccaaagaggagaatccaaggcgagcctcaaaggcagttgaggagagcagtgatgacgaacggcagagggacctgcccgcacagagggggagaggagagcagtgagggaggaggaaaaggggtacaaggggaagactaagaagaaacctgtgggtaaagaagcaggcaaccagcaaagccctcagtcagtaggaagcaggccagggaagaaagtgaggaaagcgaaggcacaaacccgttccgaggacagccaactatactataccaaaaacataa

SEQ ID NO: 178906 - DNA, 861 bp, Homo Sapiens
  misc_feature (673)..(673): n is a, c, g, or t
  misc_feature (765)..(765): n is a, c, g, or t
  misc_feature (772)..(772): n is a, c, g, or t
gggacactggtgggggagagtccgacgcgcctggctaggagcgccgaccgcagggcctctacggaccttactagaaaaatgaaacctgatgaaactcctatgtttgacccaagtctactcaaagaagtggactggagtcagaatacagctacattttctccagccatttccccaacacatcctggagaaggcttggttttgaggcctctttgtactgctgacttaaatagaggtttttttaaggtattgggtcagctaacagagactggagttgtcagccctgaacaatttatgaaatcttttgagcatatgaagaaatctggggattattatgttacagttgtagaagatgtgactctaggacagattgttgctacggcaactctgattatagaacataaattcatccattcctgtgctaagagaggaagagtagaagatgttgttgttagtgatgaatgcagaggaaagcagcttggcaaattgttattatcaaccccttactttgctaagcaagaaactgaactgttacaagattacccttgaatgtctaccacaaaatgttggtttctataaaaagtttggatatactgtatctgaagaaactacatggtgtcggaggtttctaaagtaaaaatcttgtaagaaaattgtcaaaggggctaatgctacnaggctacactcttccctagagttgaaatattttgttgctgcagccgagtgaccctcataaatactggactgaaaaaacattgttatactacnagtatantggaccatttagaagattacctttgaagctgagaatcccaccactgcacctcccagcctggcgaacagaagaaagactcccatcccaaa

SEQ ID NO: 178907 - DNA, 605 bp, Homo Sapiens
  misc_feature (30)..(30): n is a, c, g, or t
aaagataaaatagagctgaaagactgaaancctaatcaagaagttcctcaagatgaaaactagattccttgaatattgcctacaaaaaggtttcctttctgaatctgcccatcgcagtaaccgttgtggacgaatcagcctgtaactccctggcccaggcacagctcctcctgccgctgcccttaacaaccttctgcgcctttctgggggcaggccgttggggtccccgggaaaaacacgaaaggagtaagctgtccagcacaggtgcccatcgaggttcaggaggcggcaggagtaactgcacggcatacgtgtcgtagtctgtgtcgacgatccagtggtcatcatttcctttctggagaaagggacgtacgccccagtacttcatcttgaacttggcagggtcctcggtgtctgtgaaggtgcccaccatgtctgcgcacacgtcccagttattcaaaagacggactcggcccttggctgtggcgctcatctggccggtctcgtccacggagaactccgcgacgatgttgtcctgcagaaagaggccctcggggtccttcttggccatggcgtaccaggtcccagagaagcgagccttgtcc

SEQ ID NO: 178908 - DNA, 802 bp, Homo Sapiens
  misc_feature (13)..(13): n is a, c, g, or t
cgcgccggcagcntgctccgcagctgcagccagcttccgagtcaaggagaacttcgacaaggctcgcttctctgggacctggtacgccatggccaagaaggaccccgagggcctctttctgcaggacaacatcgtcgcggagttctccgtggacgagaccggccagatgagcgccacagccaagggccgagtccgtcttttgaataactgggacgtgtgcgcagacatggtgggcaccttcacagacaccgaggaccctgccaagttcaagatgaagtactggggcgtagcctcctttctccagaaaggaaatgatgaccactggatcgtcgacacagactacgacacgtatgccgtgcagtactcctgccgcctcctgaacctcgatggcacctgtgctgacagctactccttcgtgttttcccgggaccccaacggcctgcccccagaagcgcagaagattgtaaggcagcggcaggaggagctgtgcctggccaggcagtacaggctgatcgtccacaacggttactgcgatggcagatcagaaagaaaccttttgtagcaatatcaagaatctagtttcatctgagaacttctgattagctctcagtcttcagctctatttatcttaggagtttaatttgcccttctctccccatcttccctcagttcccataaaaccttcattacacataaagatacacgtgggggtcagtgaatctgcttgcctttcctgaaagtttctggggcttaagattccagactctgattcattaaactatagtcacccgtgtcctgtgaa

SEQ ID NO: 178909 - DNA, 775 bp, Homo Sapiens
ggtatccaagttctcagctcctaaaatgcaggctgccaagaccctacacctgtcctggctctacagccacttacctggtttctggactgtcaccctcccagctgacctgcccgtagccaaggaatgaggacctaacttgagttggcccaaagtctgacctggctggtatgtccctgtggcccacacccagcctgtcttgctcattcatgcagcctcaacactggcctccaaagttcccttaacacttgcaaagtcctttttacctgtgcatttggacttgaggacactggtttctatcacaggtgagagccatgttcaatacctccagcaagctctcctggctccctgcactgtgcacgctcctcttcccaaggtcccaataccagcacctctagttagagttagggtcagggtcaggcctctcccaacatcccagtagtttctcctctgagacacatgggcaagagacaatttggagtcaagattttccatttggatctattttaaatcttttagaaatgcatttgaaacagggtggtttgttttttcccttctaggtaagggactatttatatgtgtataggaaagctggctcttttatcgggttttcctttaacaaggtccaaagaaagatgcaaaaggagatcacacccctttgccccgctgagcccccgggataacaagtcactccagactaacctgtgtgccagacattgtgcattgttgcactttgaggttatattatcaagttcttgaaggaagcagaaagagggac

SEQ ID NO: 178910 - DNA, 1205 bp, Homo Sapiens; identical to SEQ ID NO: 9998
  misc_feature (343)..(354): n is a, c, g, or t
  misc_feature (356)..(451): n is a, c, g, or t
  misc_feature (457)..(478): n is a, c, g, or t
  misc_feature (618)..(626): n is a, c, g, or t

SEQ ID NO: 178911 - DNA, 802 bp, Homo Sapiens; identical to SEQ ID NO: 33219

SEQ ID NO: 178912 - DNA, 861 bp, Homo Sapiens
  misc_feature (388)..(401): n is a, c, g, or t
  misc_feature (403)..(693): n is a, c, g, or t
  misc_feature (709)..(710): n is a, c, g, or t
  misc_feature (730)..(731): n is a, c, g, or t
  misc_feature (734)..(734): n is a, c, g, or t
aaaaaaatcaccttagctttttctcttagaatcttctctaaaatgtattctttgtggcattctgaaataggattcatgatgatgcctgttgatcttagggacactacctcacctgccagtatctttggggctgtgtccttcaaggacatgtccccagactgctgtgcagtgtcattttttgtgtttggtttggtggtggcttcttcccccttgctaggctatcaacctcttatcaccacttgttggtgtcagaactaactgcttctggtctggagagggactgaccgatgcctttgggtagagagaattatgaaagaaattttggtatttttctactttatattttctgaggtttctgtaataagcatatttcacttttccaataagnnnnnnnnnnnnnncnnnnnnnnnnnnnnnnnnnnnnnnnnnnnnnnnnnnnnnnnnnnnnnnnnnnnnnnnnnnnnnnnnnnnnnnnnnnnnnnnnnnnnnnnnnnnnnnnnnnnnnnnnnnnnnnnnnnnnnnnnnnnnnnnnnnnnnnnnnnnnnnnnnnnnnnnnnnnnnnnnnnnnnnnnnnnnnnnnnnnnnnnnnnnnnnnnnnnnnnnnnnnnnnnnnnnnnnnnnnnnnnnnnnnnnnnnnnnnnnnnnnnnnnnnnnnnnnnnnnnnnnnnnnnnnnnnnnnnnnnnnnnnnnnnnccaaaaaacttaaaannccaccccacccaaccaaaannaanccttgtcggccgccttcgcccctcgaaaaactttctaaaccattccttttggcgcccggggccccgtaaggtaagggaaactggtcctaacctggtttccaaggaaaacccgggctcataactaagg

SEQ ID NO: 178913 - DNA, 460 bp, Homo Sapiens
  misc_feature (46)..(46): n is a, c, g, or t
  misc_feature (208)..(208): n is a, c, g, or t
  misc_feature (436)..(436): n is a, c, g, or t
  misc_feature (442)..(442): n is a, c, g, or t
ctgaaaaggaccagctgtccttttccgtgtccgcccccactctgtngaaccagctcccccccaacatccgctgtcctcctagtctctctacctggggcccatcttgaagtttggctccaaggagcagaagcaggcgtgggtcacccctttcaccagtggtgacaaaattggctgctttgccctcagcgaaccagggaacggcagtgantgcaggagctgcgtccaccaccgcccgggccgaggggaacttcatgggttctgaatggaaccaaagcctgggatcaccaatgcctggggaggctttcggcttgccgtggtcttttgccagcacggacagagccctgcaaaacaagggcatcagttgctttcctgggtccccattgccaacggcttggggttcaagtttgggggaagaaagaagacaagttggggattnccgggnttcattcaaggccaactt

SEQ ID NO: 178914 - DNA, 762 bp, Homo Sapiens
  misc_feature (593)..(593): n is a, c, g, or t
  misc_feature (688)..(688): n is a, c, g, or t
gtgatggggaagacctgatatacaatggcaattatttattttacaaggaggattctatacatcagggaaggcatcttgaagtacaatacaccaggctttcatttcttctttacattatgattgtgagtttccatataagttggtacttacatggaaagggaacacaaaatccatttttatatacataaaaacaaaacacccaaagagacttgacccccaaaatgtcttgtttcacttgaaaataacatgaatgagacgaaagatgaaccagattacttgggtgacgcacagaaggcgaacaagtagctcaggaaatcaaatcctgtttcaagcttggcacattaagggtaagaaaggtagtgaaagaagggttcgaaaatatcatctcaagccacaaaaaatctggcagaagacagcctccaaatcaataagatagaatggttagaagtcaagttagagttattgtgtggctaccttatatccagacctctaatagactgagtggaattgtcacttctcttccctcagttatcccaattgttagtaaacttcaaggaggctgggcatgatgactcacacctgctatctcaganctttgggaggcgaagatgggcagattccctgagccccggtgttcaagacgagcctgggcaacatggcaaaacctcatctctaaaaaaacacaaanatcagctgggcccggtggcacgtgcctgcagtcccagctactcagactgaagcgggaggattgcttgagcccgc

SEQ ID NO: 178915 - DNA, 528 bp, Homo Sapiens
  misc_feature (45)..(45): n is a, c, g, or t
  misc_feature (116)..(116): n is a, c, g, or t
actgggggacccagtcaaaaaggcctctggcctcctttccttcancccacttctcccagctccctggcaggttcctggtcctgaagtagtcagtgaacgaacgatctcccttaaanggaatccacaagcagagaggagctgaatagatagtggggccagagccgatgtcaatcagcaggtctcccttcacaccgtctaggcagaatatcttgaaaagatttttcagaaggtgcttaagaatctggctttctgcagagtgcctagaaccaaacttgtaatatttttctaggtaatcccgagggttaaaatggcttagataggtgtccttggaggtgaagcctgattccattatgtctcacttctgtaccactggagcactgccctccttctctttcctccagaagccagggagtgaccctgcagaagttgtcttcctgagtctcaggctaacagcattccttccatcagttcagcccttcttttagaacagatggttggttaaacactaacagagaaatagaccacccc

SEQ ID NO: 178916 - DNA, 997 bp, Homo Sapiens
gacgcaggctggtacggtcggaatcccgggatatcgtcgaccacgcgtccgatccgctacctggacgtcagtatcttgggcaagtttgcagttgtgatggctgacccaccctgggatattcacatggaactgccctatgggaccctgacagatgatgagatgcgcaggctcaacatacccgtactacaggatgatggctttctcttcctctgggtcacaggcagggccatggacgttggggagagaactgtctaaatctctgggggtatgaacgggtagatgaaattatttgggtgaagacaaatcaactgcaacgcatcattcggacaggccgtacaggtcactggttgaaccatgggaaggaacactgcttggttggtgtcaaaggaaatccccaaggctttcaaccagggtctggattgtgatgtgatcgtagctgaggttcgttccaccagtcataaaccagatgaaatctatggcatgattgaaagactatctcctggcactcgcaagattgagttatttggacgaccacacaatgtgcaacccaactggatcacccttggaaaccaactggatgggatccacctactagacccagatgtggttgcacggttcaagcaacaggtacccagatggtatcatctctaaacctaagaatttatagaagcacttccttacagagctaagaatccatagccatggctctgtaagctaaacctgacagaagtgatactttcgtacaataagcttttcttcttttatttagataaacatttgtatcgtaaaacacacacaaacacacagggcggccgactaagaggtttccctcgaaggggcccacgactacgcgttacccggcttcttgtccaacctggtccctataagtgagccggatcaaacgcaggcaatgccgtccgttttacaaggtgggactggggaacctgctactgggacttggtgaaggacctactcgatggtgtccctattgcacacc

SEQ ID NO: 178917 - DNA, 318 bp, Homo Sapiens
ggagcagtggtatcaacgtagagtggcattacggccgggtatcactatgctgtatgaaaaacgacaggagtcccagctgagaaaacctgaaaataccactagggctgaagccctcactgagccacttaatgcctaaagactctggggagcagatgttacctaaggtagtgaccctgcattgtggtgcctgagccctggcagaagctcttgtaaaatttgttaattgtttaaaccacttcttttggagagcaaggggaaggtcaagaaggcagttttatcaatattgtgtcagtcaccacaaagtaggccagataagtt

SEQ ID NO: 178918 - DNA, 774 bp, Homo Sapiens
  misc_feature (450)..(450): n is a, c, g, or t
agacggccctggccaacttctccagcggtcccgaaggaggggtcatgcagcccgtgcgcaccgtggtgccggtgaccaagcacaggggctacctgggggtcatgcccgcctacagtgctgcagaggatgcactgaccaccaagttggtcaccttctacgaggaccgcggcatcacctcggtcgtccccttcccaccaggctactgtgctactctttgagcccagcaatggcaccctgctggcggtcatggatggaaatgtcataactgcaaagagaacagctgcagtttctgccattgccaccaagttttctgaaacctcccagcagtgaagtgctgtgcatccttggggctggggtccaggcctacagccattatgagatctttcacagagcagttctcctttaaggaggggaggatatggaaccgcaccaaagaaaatgcagagaagnttgcagacacagtgcaaggagaggtacgggtctgttcttcggtccaggaggctgtggcaggtgcagatgtgatcatcacagtcaccctggcaacagagcccatttttgtttggtgaatgggtgaagccaggggctcacatcaatgctgttggagccagcagacctgactggagagaactggatgatgagctcatgaaagaagctgtgctgtacgtggattcccaggaggcttgcccttgaaaggagtctggagatgtctgctgtcaggggccgagatctttgctgagctggagaagtgattaagggagttgaaccagccacttg

SEQ ID NO: 178919 - DNA, 459 bp, Homo Sapiens
  misc_feature (402)..(402): n is a, c, g, or t
gggaagctgaattctgatctcttccatcgctagtctttgactgtggagctagagaagaacgttacgggtgacaggctacaaaagctcaaatcttgtctgctttctcctctgccaggcgttgacccggacgacacctataatgagaccccctacgagaaaggtttctgctttgtctcatacctggcccacttggtgggggatcaggatcagtttgacagttttctcaaggcctatgtgcatgaattcaaattccgaagcatcttagccgatgactttctggacttctacttgggaatatttccctgagcttaagaaaaagagagtgggatatcattccagggttttgagtttgatccgatggctgaatacccccggctgggcccccgttacctccctgatctntcccctggggacttcactcattgaagcctgctgaaagagctagcccaactgtgggca

SEQ ID NO: 178920 - DNA, 973 bp, Homo Sapiens
gagaggcttcccgcctgacagggccactccgcttttgcaaaccgcagagataatgacgccacccactaagaccttatggcccaagggttccaacgccagtctggcgcggtcgttggcacctgcggaggtgcctaaaggagacaggacggcaggatctccgccacgcaccatctcccctcccccgtgccaaggacccatcgagatcaaggagactttcaaatacatcaacacggttgtgtcctgccttgtgttcgtgctggggatcatcgggaactccacacttctgagaattatctacaagaacaagtgcatgcgaaacggtcccaatatcttgatcgccagcttggctctgggagacctgctgcacatcgtcattgacatccctatcaatgtctacaagctgctggcagaggactggccatttggagctgagatgtgtaagctggtgcctttcatacagaaagcctccgtgggaatcactgtgctgagtctatgtgctctgagtattgacagatatcgagctgttgcttcttggagtagaattaaaggaattggggttccaaaatggacagcagtagaaattgttttgatttgggtggtctctgtggttctggctgtccctgaagccataggttttgatataattacgatggactacaaaggaagttatctgcgaatctgcttgcttcatcccgttcagaagacagctttcatgcagttttacaagacagcaaaagattggtggctattcagtttctatttctgcttgccattggccatcactgcatttttttatacactaatgacctgtgaaatgttgagaaagaaaagtggcatgcagattgctttaaatgatcacctaaagcagagacggaagtggcaaaaccgtctttgcctggtccctgtctttgccctctgctgggttcccttacctcagcggttctgaagtcactcttataatccgatggtgccg

SEQ ID NO: 178921 - DNA, 861 bp, Homo Sapiens
gggagtaacggccgcatggtaactcaggcgccgggcgcactgtcctagctgctggttttccacgctggttttagctcccggcgtctgcaaaatgaagattgaggaggtgaagagcactacgaagacgcagcgcatcgcctcccacagccacgtgaaagggctggggctggacgacagcggcttggccaagcaggcggcctcagggcttgtgggccaggagaacgcgcgagaggcatgtggcgtcatagtagaattaatcaaaagcaagaaaatggctggaagagctgtcttgttggcaggacctcctggaactggcaagacagctctggctctggctattgctcaggagctgggtagtaaggtccccttctgcccaatggtggggagtgaagtttactcaactgagatcaagaagacagaggtgctgatggagaacttccgcagggccattgggctgcgaataaaggagaccaaggaagtttatgaaggtgaagtcacagagctaactccgtgtgagacagagaatcccatgggaggatatggcaaaaccattagccatgtgatcataggactcaaaacagccaaaggaaccaaacagttgaaactgggaccccagcatttttgaaagtttgcagaaagagcgagtagaagctggagatgtgatttacattgaagcccacagtggggccgtgaaaaagcagggcaggtgtgatacctatgccacagaaatcgaccttgaagctgaagagtatgtccccctgccaaaaggggatgtgcacaaaaagaaagaaaatcatccaagatgtgaccttggcatgacttgaatgtggctaatgcccgggccccagggggggacaagat

SEQ ID NO: 178922 - DNA, 656 bp, Homo Sapiens
  misc_feature (432)..(432): n is a, c, g, or t
ggggagggagaatttcaggtcttagactataaggatagaatccctttgcttttgcccttgatcacatgtatactaaggtattaagtggcccaagtctttcctttcaccaaagggcagggagaagtgtctatggacagcagggttccaattcttgtcattccaggaatatctgaatattcctggaatgtggaccctgagacagtgctcaggggccactgggagccaatattaggcattgactctcagccaggagtctgactggtctaacaccacactgcaactcctgacctcttgaagtactaagctactttgctgttagtgacagttattacagtttctcagccccattgtctctgccctctgtggcaatggaaggagaatatagagaagacaaaattaaatatagatagacctgagaaggacagccaggantagaattccatttgtgcctattccctgcctcccctcccctcccccatcctaccagttggttattttctcattgcatacatgatgtgttcactgcctagcctccccctaaagaagagagaagacaagtgggctgactgatctgctctaaatctactgtggtgattaaatcttggttacaacatcctgggaagtttcctgaacaactgtaaaataataaaattatt

SEQ ID NO: 178923 - DNA, 804 bp, Homo Sapiens
gggccctttggagctacttcctcatgctgcccgctcgcctaccgttcaggctgctgagccttttccttcgtggatccgctcccacggcagcgcgccatggcctccgggagccgctcctggagaggaggtgcgctgccgcctcctccttccagcactcatcgagtctgggacgcgagcttccttatgaccccgtggacacggagggctttggagaaggtggtgacatgcaggagcgttttctgttcccggagtacatcctggatccggagccgcaacccacccgcgaaaagcagctgcaggagctccagcaacagcaggaggaggaggagcgacagaggcagcagcggcgggcaggagcggcgacagcaaaacctacgggccaggtcccgggagcacccggtcgtggggcacccggacccggcattgccgcccaacggcgtgaactgcctcgggctgcggggcaaagctgcactgccaaggacgccggagtgcccggctacctgacccgaggagaagttcctccgcacggcggaagggcagacggccgggctgggcaccggaccgggtgccagcagactgcctggcctgcctgctcgaaccaaccgggacgccgcacctacgccctgcagcgtgaagccgcgaagccactacccgggcagcctgcccgagcgcccgcagatagccgcgcaggcccagggaccacctacccatgggatggctacgaacacatgcgaggaaccttgacctggcaacctaggaccagaacgagccactggacaaggccccccgcaaccttgcgcaccc

SEQ ID NO: 178924 - DNA, 646 bp, Homo Sapiens
gggaaattaaatgatatggaccctaatttgtatcattctgagttgattgtgtggtttattcattctggaaacatgttgatacttacagtcagccactgcttttgataagtgatattgattaggttgaatcttcttgtaaatagtatttaccagttagcaaagtctgtgttttcagaattacagtgagcacagaggtgttcataaaatgggaattgagtcccactcggtaagagttgcttaaacttgacactgttgacatttgggctggataaaacccctgtggtggggtctgtgctgtgcattgcaggatggtgagcagcgtccctctcatgtgacacccacagttatgccggatgttgccagatgcccctaggggacagagtcaacccccaactgaggaccactgtcctacagagtcaggaaatattgtagggagaaaaaaataacaacaacaaaggcctgtgttaatgttaaatagatgagattatggaatgtgtatattaatgttaaaaattgtaccttgatcaatgtactttttataaacttgccatagatatctcagatttgaaacctcaagacagatttattattcttaaatgctgtatgataatgaacgaacaaactacaaatttatttcttgcaagtt

SEQ ID NO: 178925 - DNA, 862 bp, Homo Sapiens
  misc_feature (175)..(175): n is a, c, g, or t
gggagatgctcagtaagtggtgcacagggttggtccctatggtgggggccccctaacaccgcccaacccccctccatgttctcacagctccacgcactgagcacgggcatgaaggccatgatgtcagaattctgcacccagggagctgagatgtgccgcagggcctgtggcggancatggctactcaaagctgagtggcctgccatcactggtcaccaaattgtcggcctcctgtacctacgagggtgagaacacagtgctctacctgcaggtggccaggttcctggtgaagagctacctgcagactcagatgtcccctggctccacgccacagagatctctctctccatctgtcgcatatctcaccgcacctgacctggccaggtgtccagcccagagggcagccgacttcctctgcccggagctctacaccacggcctgggcacatgtggcagtaaggctcataaaggactcagtgcagcatttacagaccctgacgcaatccggagctgaccaccacgaggcttggaaccagaccactgtcatacacctccagggctgctaaggtgcactgctactatgtcactgcggaagggttttacagaagctctggagaaactacaaaatgaaccacgcgattcagcaggtgctccagcgcctctgtgacctccatggcataacatggaaatcttgacctaacctcgggtgaactttctcccatgaaccccttccctggtcctggtgcccacactgggacatgggcaagaacacgcccaacctgggaccctgttccgcccctgctatccggccggagttggccaccaaaccttcctaaacccatgggtctcctccctttcggaaa

SEQ ID NO: 178926 - DNA, 443 bp, Homo Sapiens
  misc_feature (27)..(27): n is a, c, g, or t
  misc_feature (36)..(36): n is a, c, g, or t
  misc_feature (42)..(42): n is a, c, g, or t
  misc_feature (47)..(47): n is a, c, g, or t
  misc_feature (57)..(57): n is a, c, g, or t
  misc_feature (70)..(70): n is a, c, g, or t
  misc_feature (78)..(78): n is a, c, g, or t
  misc_feature (129)..(129): n is a, c, g, or t
tcacccccactgctctcccaccccggntgccaccangccccntgagnggggcaaaanaaggcaagggcanggcaaggnaaaagggcaaaagggaaaggaaggaaagagtagcaagtattggaaaggaangagacaaaactatcattatttgcatattaaatgataaatgttagcccaaagaagccctaagagaatcaactaagattttactggaagtaatgagaattcaatacagtggctatctacaaaatcaagaaatcagcacacaaacctcaaatacttttcccatgtaccaccaataactaattagaaaatggaagatcccatttacaatggcaatacaaatgtatgaagaatttaggaacaaaaatacaaagatcttttatctaacaaaagatgtataagatctatatatggaaacactaaagctcttctgaaagaca

SEQ ID NO: 178927 - DNA, 969 bp, Homo Sapiens
  misc_feature (248)..(550): n is a, c, g, or t
  misc_feature (699)..(721): n is a, c, g, or t
ggcatagggaagacttcttaaaaacaagtgaaattgttaaaaccccccctaagcattacagatggcttatagctgtccacggggttggtagaggtgggaaagggaagggttctaggccagaatgttcctatttagaagacactcaaattacagtctgtgttatgtatgtataccatttattcaatgctactgtgtatataatggaaaacttaagtccagtttgaaacatctagtctttctaggtgttnnnnnnnnnnnnnnnnnnnnnnnnnnnnnnnnnnnnnnnnnnnnnnnnnnnnnnnnnnnnnnnnnnnnnnnnnnnnnnnnnnnnnnnnnnnnnnnnnnnnnnnnnnnnnnnnnnnnnnnnnnnnnnnnnnnnnnnnnnnnnnnnnnnnnnnnnnnnnnnnnnnnnnnnnnnnnnnnnnnnnnnnnnnnnnnnnnnnnnnnnnnnnnnnnnnnnnnnnnnnnnnnnnnnnnnnnnnnnnnnnnnnnnnnnnnnnnnnnnnnnnnnnnnnnnnnnnnnnnnnnnnnnnnnnnnnnnnnnnnnnnngtgcacaatgtaggttaacagtagagggcttaagtaacacccctctaagcattgtgttttcagtacttcctaggagtggttgcattggggaatggaatggttaaaacttgatgcttaggagcgaatgcagactattcatcgggtgtaannnnnnnnnnnnnnnnnnnnnnnccagaggaggtatgcagggagaggggttctgggctcctggagattaagtcagaatgggtcctaagccatggttctatatgttgcatcttagtaaactatggggggtattcaaaggataagcgcatcaatggctcaaaggtatgttcacaaatcagaatgtagctaactcagaccctttggggaaatgtccctttgggaagagttttaaggaaaggccgtgactctggggagagaccttcataagccac

SEQ ID NO: 178928 - DNA, 835 bp, Homo Sapiens
ctaatgaggaaagttctcccaaactgcaaatccactttaggatttcaacacatgatcttcaaacactctgcatcggggatcatagggtcaaactgaccagcaatgtcaaaatcacactggcagaactccctataacggccttggactatggttgggctctctcgccgccacacctttccaacatgataacgtttcatcttcttcaccttattcatggccagataacgagcaaagggaacagtaaggtcatagcggagggacaacagctctccaccttgatccttcagatcatacatgagcccagagtcctctccatacttctcagtcagggtttccttcagctcaaatgctggggtgtccatcccctttgctccatgacgtttaaagcagctgataaccaaatcaagaattttctccctcacaaccatatgctgaggactaagatccctggtaccctttggggtcttgataataaaatttggtttctcttgatgtgctttcagttgggatgttaacactgcctctgcaacctggctttggcaacggaccgccccggtgcacgaagcgcagggcggtcgcaggagctggctgagcagcgaagcccaggccctcctgggaagaagtccgagcaggggcatcgcgcggcaggacgccggctttccgggacaggaacaaaaggcctgggaaggaggcgggtcagacaccaggaagggtggagggcactgcaaaggcggaacccgcgcaccagggaaaactcgggcgtttgcgcacctcactagtcacgaaggctgaggtgggatcctcccaagttcccttagtagccagcttcggcccc

SEQ ID NO: 178929 - DNA, 889 bp, Homo Sapiens
ccttgaggtatcccagtagctcatagcagcaggaggtcaggttgagtttgagggcccagacttgtcgaagggcgctggttcaaggtcagcgattctccactttgaggtgaaattaggtcaaatggaatacctgggggtatccttctccagtgcagcttgaacagctgacttgctttctgaatccagggcagacgtagcctcatctgaaaatcagaatcttggggtttcgaactaaggcacgagccaattgcgatgcctctgtttctgccctccactcatttgagctcctttttcccctaccaatgtattaaatttattaggaaactccatgataaaatcatacgcatttgcttcccttgctgctctctccatctcttcatcagtcacatcatctcgtccatacttgatattgttactgatggtggtcccgaacaaaacaggctcttgactaaccactccaatatggtctcgataatgccgcacatttaaagctctgatgtcattctcatccaccatgataaagccatcatccggatcatataacctctgcagaagctggactaccgtactcttcccactgccattgagaccgaccaaggcgactgtctctccagacttaattctgagattcagacctttcagaatcttgatagatggtcttgatggataattgaaagaaacatttttaaattccacagttccttctatggattcaggtttatatccagctgtggaaaagttatctatactgggtttcttatcaataacctggaaaatatgaaaggcagctcctcgggctattgcgaaggtttcaaagtgagggactgctgctccaatgcaataactgctatggattacattaaagaaaacacttgatcggacgcgtggt

SEQ ID NO: 178930 - DNA, 858 bp, Homo Sapiens
  misc_feature (755)..(755): n is a, c, g, or t
  misc_feature (762)..(762): n is a, c, g, or t
ggggagtcatctctgttctgctttaggagtaaagtttaccctgcagttccttctgtggtgaagttttctctttctctcggagaccagattctgcctttctgctggagggaagtgttttcacagattatattctcctgccttttaaaaagatggacttcagcagaaatctttatgatagtggggaacaactggacagtgaagatctggcctccctcaagttcctgagcctggactacattccgcaagaggaagcaagaacccatcaaggatgccttgatgttattccagagactccaggaaaagagaatgttggaggaaagcaatctgtccttcctgaaggagctgctcttccgaattaatagactggatttgctgattacctacctaaacactagaaaggaggagatggaaagggaacttcagacaccaggcagggctcaaatttctgcctacagggtcatgctctatcagatttcagaagaagtgagcagatcagaattgaggtcttttaagtttcttttgcaagaggaaatctccaaatgcaaactggatgatgacatgaacctgctggatattttcatagagatggagaagagggtcatcctgggagaaggaaagttggacatcctgaaaagagtctgtgcccaaatcaacaagagcctgctgaagataatcaacgactatgaagaattcagcaaaggggaaggagttgttgtggggtaatgacaaatctcggactctccaagagaacaggnatagtgnaatcacagactttggacaaagttaccaaatgaaagcaacctcggggatactgtctgatcatcaacaatcacaattttgcaaaagcccgggagaaag

SEQ ID NO: 178931 - DNA, 405 bp, Homo Sapiens
  misc_feature (180)..(180): n is a, c, g, or t
  misc_feature (257)..(257): n is a, c, g, or t
  misc_feature (342)..(342): n is a, c, g, or t
  misc_feature (354)..(354): n is a, c, g, or t
  misc_feature (372)..(372): n is a, c, g, or t
  misc_feature (379)..(379): n is a, c, g, or t
  misc_feature (386)..(386): n is a, c, g, or t
gggcgcgccggtgcgacgtcaacgcagccgggcaagttttaccgatctgtgttccgcggcccggccgcagctgagtcttcccagggtcagggtcaggcgctttgctgagtccctttgtggccgccatggacaattccgggaaggaagcggaggcaattggcgctgttggccgaagcggangcaccaagtgaagaactcgcagtcccttcttctctggcctcttttggaggcgcatccaaaatagaggaagcatgcanaatctacgccagagcagcaaacatgttcaaaatggccaaaaactggagtgctgctggaaacgcgttctgccaggctgcacagttncacctgcattgncagagcaagcacgaacgnagccacntgttttnttggacgttggcaacgatt

SEQ ID NO: 178932 - DNA, 514 bp, Homo Sapiens
  misc_feature (13)..(13): n is a, c, g, or t
  misc_feature (34)..(34): n is a, c, g, or t
  misc_feature (64)..(64): n is a, c, g, or t
aaattcggcaagnagggtctgttgcaaaaaaccnggcggggaccagttttgtcgctcccgttgnaaaaagtggaaacctggtcaatttggtgtcaatgctgtgtcagaaggcttaatcaggttggtcgcaatctgtgatggggaaccatcccaatgcatcaacaattatcagacccaagcacattctcccaacatcagccaatggagagagatgattctggaatggtagccccctctaacatttttcatcagcctatggcaagtggttttgtggatttttctaaaggtctgccaatttccatgtatggaggcaccataataccctctcatcctcagcttgctgatgttccaggaggccctctgtttaatggacttcacaatccagatcctgcttggaaccctatgataaaagttatccaaaattcaactgaatgcactgatgcccagcaggccagtctgcttccttcagtccctgctctcaaaggggaaatcccatcacctcagctaaccagac

SEQ ID NO: 178933 - DNA, 917 bp, Homo Sapiens; identical to SEQ ID NO: 10569
  misc_feature (525)..(533): n is a, c, g, or t

SEQ ID NO: 178934 - DNA, 729 bp, Homo Sapiens
  misc_feature (499)..(499): n is a, c, g, or t
  misc_feature (688)..(688): n is a, c, g, or t
  misc_feature (694)..(694): n is a, c, g, or t
  misc_feature (711)..(711): n is a, c, g, or t
ggtccaggcccctggcaacacttcctgcctgctgcattacatgcctcaggctcccagtgcagagcctcccctggagtggccattccctgacctcttctcagagcctctctgccgaggtcccatcctccccctgcaggcaaatctcacaaggaagggaggatggcttcctactggtagcccctctgtcattttgcaggacagatactcaggctagatatgaggatatgtggggggtctcagcaggagcctggggggctccccatctgtgtccaaataaaaagcggtgggcaagggctggccgcagctcctgtgccctgtcaggacgactgagggctcaaacacaccacacttaatggctttctgggtcttttatttgtacccatgtgtctgtcacaccatgaatgtacctggggaaatcaactgacctccctgaacatttcacgcagtcagggaacaggtgaggaaagaaataaataagtgattctaatgctgcctaggncaccctcaacccccatttactggcacaattgggtggagagaagggaaggggtatgattgtcctgatggctcagggttgcaggaggttcagaggggaaggaggaaaggccagggctggaggctgggctgttagcacttccctcccacagttcagacggctcactctggggctcaggtttgccatggcttncctttnggtcccaaacatagggncctgttcccttaggtcct

SEQ ID NO: 178935 - DNA, 986 bp, Homo Sapiens
ggggcctctcgccccgcctcccgcgctccccgtcaggttcaaagccccctcccgcctaacgtcttcagcccagccaggctgcccttcttccctgcggagggagggcctgggcggtcgcgttggcgggagggaggttacctttcccagtctcgctctggccgcctgagccaggaggaagcagcggcgaggtctgcgggaggcatggcgggagctccggacgagcgccggcggggccccgcggcaggggagcagctgcagcagcaacacgtctcttgccaggtcttccccgagcgtctggcccaggggaatccccagcaagggttcttctccagcttcttcaccagcaaccagaagtgccagcttaggctcctgaagacgctggagacaaatccatatgtcaaacttctgcttgatgctatgaaacactcaggttgtgctgttaacaaagatagacacttttcttgcgaagactgtaatggaaatgtcagtagaggttttgatgcttcaacatctcagatagttttgtgccagaataatatccataatcaggcccatatgaacagagtggtcacacacgagcttattcatgcatttgatcattgtcgtgcccatgtcgactggttcaccaacatcagacatttggcgtgctcagaggttcgagctgctaaactttagtggagactgctcacttgtcaatgaaatattcaggttacatttttggaataaaacaacaccaccagacttgggtgcgagacagagcccactctttctatcctgggctgttaggaatatcagcaaagaagtagctaaaaaggctgttgatgaagtttttgaatcttgttttcatggacatgaaactttttggaagatcccacataacaagacttatgccagatatgctcccagagactttgaaaaccggtgatgggtattattcaaatatatgagccccatggacttttttatattacagaagcttcctcatc

SEQ ID NO: 178936 - DNA, 884 bp, Homo Sapiens
gggcctgtttaagatggcgtcccccgtagcagcgcaggccgggaagcttctgcgagccctagcgctgcggccccgcttcctggcggccgggtcccaggcagttcaattaacctccagaagatggctgaacctgcaggaataccagagcaagaaactgatgtctgacaacggagtgagagttcaaagattctttgtagcagacactgcaaatgaagctctcgaggctgctaagagactaaatgcaaaagaaattgttttaaaagcccagatcttagctggaggaagaggaaaaggtgtcttcaatagtggtttgaaaggaggtgttcatttaacaaaagaccctaatgttgtgggacagctggctaaacagatgattgggtacaatctagcgacaaaacaaactccaaaagaaggtgtgaaagttaacaaggtgatggttgctgaagccttggatatttccagagaaaccctacctggcaattctgatggaccggtcctgcaaatggccccgtgctggtgggcagcccccaggggggcgtcgacattgaacgaggtggctgcttcaaacccggagctcattttttaaggagcaaattgacatttttgaaagaataacaggacagccaagctcagccggatggcccaaaatctaggcttcgattgggcctttgaaaagccaggctgcagatcaaattacgaagctgtataatctcctcctgaaaattgatgctactcaggtggaagtgaatcccttgggtgaaactccagaaggacaagtagtctgtttatgatgccaagatacaccttttgatgacaagggcagaattccgaacaaaaagacataattggctaagcgcacgacaagattcgaggaatgagcccat

SEQ ID NO: 178937 - DNA, 855 bp, Homo Sapiens
gagaagttggctagcatggaatcaccagaggagcctggagcatccatggatgagaactactttgtgaactacactttcaaagatcggtcacattcaggccgtgtggctcaaggcatcatgaaactgtgtctagaggaggagctctttgctgatgtcaccatttcggtggaaggccgggagtttcagctccatcggctggtcctctcagctcagagctgcttcttccgatccatgttcacttccaacctgaaggaggcccacaaccgggtgattgtgctgcaggatgtcagcgagtctgttttccagctcctggttgattatatctaccatgggactgtgaaacttcgagctgaggagttgcaggaaatttatgaggtgtcagacatgtatcagctgacatctctctttgaggaatgctctcggtttttggcccgcacagtgcaagtgggaaactgccttcaggtgatgtggctggcagatcggcacagtgatcctgagctctatacggctgccaagcactgtgccaagacccacctggcccagctgcagaatacagaggaatttctccacttgccccaccgcttactcacagatatcatctcggatggagttccgtgttctcagaacccaacagaggcaatagaagcctggatcaactttaataaagaggaaagagaggcttttgcagagtcactccaggacaagcttgaagggaaatcgggcgagaatgtgcacatttacctgaattggggcaacagagtcatctcgttaccccactcgatgggctgtgtccttgcacctgggccagaagatgactccatcagtgtaagttggccaaaacaggtttgtgccacc

SEQ ID NO: 178938 - DNA, 391 bp, Homo Sapiens
ggacagacaggctgccagccctcagcatggacccggcacatggaatctgtgatcttaaaagagtcaagtgactacctttggcaaccaaaagagacactgccttttagaaggcatatcatctgaaactggctgaaagagctgtcttacttaggaagaaaaatctctcctttggaaagagctggaacttttagtaaaactgaacagtgaggtggcggaagataaatatgctgaggcatgttttcaaggaggggagagagattccttttcctcagccgggcacagagccaacctgaagtgtagcactgtggtgacctggcgggatctgctctccagtcactcccgagggcccttctggggacaaggagacttttctgtgcggcctgttgatttg

SEQ ID NO: 178939 - DNA, 1307 bp, Homo Sapiens
  misc_feature (178)..(178): n is a, c, g, or t
agctcgccagggtgaatcttcgggttggtggaccttccgaaagtgtaactcccaggagaggttccccggaaatgccagggggacccagctccggggccactgagggcgctgctggcaggcctgtttcgaccgattcctttctggcgctgtcccgctgttcttgggggctgcgtcctcncggcttgccagaggacttgctgggggggctgcgtggggatgttgctgctgcggggagactgacccatgggtgagaccgggctggaggtgacgttgggtggctgcaggggccccgaggacgggagggctgactgggaggggccggaggaagtaccaggcggctgggtgtgttgccgagaccagtgggagctgccctgtgcccgacgctggccctgggccctgccggacaggcgggagccacagccagagccagagggcagctggccctgggatccagagctgggggtggccgaggactgggactgggacttgcccgaggtggcatttaaggagaacccccagggcctttgcctggacccggagggactgggcaggggcagctgtggggggatgcgctgaagactctagtggaggccctggaagccgggcgcggccccctcctcaccaagccaggaggtccctgtgaggctcaggggggctgcttcacttgtccttcggctgcggggtctggcttggcttgacgttcctggttattccggccgccgcgtccagggctcgcccgctgaggtcgttcatgattctgtctacggccccgtggtgccttaggaacagcggacgcacgacgcgctgatacagcatgagagccccgttccagggcctgggagccatgcagaacaacaggaaggcgcacttgcccacgtagtagaaagggaaccaggacaggagtagatcgctgaagaactcggccagcccaaacagggcgtacaccacccagtaggtgagccacacagtgtcgtcgtccttgcttgggctctcgatagctttgattgaggcatatgcggggtacacaaatccgatgagattgcacagcagagacgctccgtagccgaacagcagatacaggcttagcagagtgacggctcctgcagccagataccgcttctccaccccggtcttggcctccagcgcccccagcacttcggtgaccaggttcctttgctccaggaagtgctccacgcgctgcctcaggccgtccatggccccgacgcgcccggggttggctgctcgagctcgcccgcggaccagggcacccaccccgctgcacgcgcaccgctttcccgcagcctccc

SEQ ID NO: 178940 - DNA, 583 bp, Homo Sapiens
atgagccaccgtgcccggcttcacacccatttctttaaaaaggatcccgtagcaggcagaaaagccccttccatcctgctcctctgatactgtgcccccttggagatatttccgtcctccacccacgtgtctgtggctggaactgcccagcctgctcctggccccctggaagcctccccacagctggtaatctggacttaaggattgctgggccaccgcctctctgcctaccacccattccatatttaagtggagcccctacgtagaaaggccccggggctttattttagtctccttttcagggatgtcgtgggcgggggagggggttcttggtgctacagccctctccccacccctaaagggacgccgacgctgtttgctgccttcaccacatattagtgcttgaccctggcaggggaccccatggaaaagatggggaagagcaaaatacatggagacgacgcaccctccaggatgctcgctgggattcccacgcccaccactgtcccccaccccatggctgggaggggcctctgaacggaacagtgtccccacagagcgaataaagccaaggcttcttccc

SEQ ID NO: 178941 - DNA, 389 bp, Homo Sapiens
  misc_feature (24)..(24): n is a, c, g, or t
  misc_feature (57)..(57): n is a, c, g, or t
  misc_feature (69)..(69): n is a, c, g, or t
  misc_feature (85)..(85): n is a, c, g, or t
cgtcccctttaaggttgggaaaanggctgttaacacccaaaaaaccccttcccccgnccccaacaaaanccccttaaaaaggaanacttaaaaataaaaccccggggccctttcctacgtaagggctcccaactttaaatatggaatggtggttaggcaaaagaagcggtggccccagcaaatccttaaatcccagattaccagctgtggggaggcttcccagggggcccaggagcaggctgggcagttccagccacagacacgtgggtggaggacggaaatatctccaagggggcacagtatcagaggagcaggatggaaggggcttttctgcctgctacgggatcctttttaaagaaatgggtgtgaagccgggcacggtggctcat

SEQ ID NO: 178942 - DNA, 445 bp, Homo Sapiens
  misc_feature (198)..(198): n is a, c, g, or t
cctgctccctggccccctgaaaacttccccaaaaagctggtaaatctggaacttaagaattgctgggccaacggcctctctgccctaccaaccattcccatatttaagtggagccccctacgtagaaaggccccggggctttattttagtctccttttcagggatgtcgtgggcgggggagggggttcttggtgctanagccctctccccaacccctaaagggacgccgacgctgtttgctgccttcacccacatattagtgcttgaccctggcaggggaccccatggaaaagatggggaagagcaaaatacatggagacgacgcaccctccaggatgctcgctgggattcccacgcccaccactgtcccccaccccatggctgggaggggcctctgaacggaacagtgtccccacagagcgaataaaaaaaaggcttcttccca

SEQ ID NO: 178943 - DNA, 461 bp, Homo Sapiens
  misc_feature (42)..(42): n is a, c, g, or t
  misc_feature (63)..(63): n is a, c, g, or t
  misc_feature (68)..(68): n is a, c, g, or t
  misc_feature (74)..(74): n is a, c, g, or t
  misc_feature (89)..(89): n is a, c, g, or t
  misc_feature (105)..(105): n is a, c, g, or t
  misc_feature (156)..(156): n is a, c, g, or t
caatgtaattttgctacttcccccaaactttttccaatgggntccccttacccaggttaaaancactnaatatntggttaaaggcaagnaaaaacaccgtcgacnttccctttaggggtgggaagagggcttgtagcacaaaagaaccccctccanccgccccacgacatcccctgaaaagcagactaaaataaagccccggggcctttcctacgtaggggctcccacttaaatatggaatggtggtaggcagagaggcggtggcccagcaatccttaagtccagattaccagctgtggggaggcttccagggggccaggagcaggctgggcagttccagccacagacacgtgggtggaggacggaaatatctccaagggggcacagtatcagaggagcaggatggaaggggcttttctgcctgctacgggatcctttttaaagaaatgggtgtgaagccg

SEQ ID NO: 178944 - DNA, 983 bp, Homo Sapiens
aaaagcggctggtacggtccgcaattctcgggatatcgtcgacccacgcgtcggggagtctcgcgccagctgagcggcggtcgggcggggggagcgcggcggcccaagctcgcttggccacgcgccccgccccctcagaggccggcctcccgcacgcaccgcgcagcctgctgtgcccgtgggtcccgagtgctccgccgcccgccccgacccgggcccagccgcctccacggcccgcgctcgtactggagcgaagagcggcctcctgaaggaggggaagggacgtgggggcggccacggcaggattaacctccatttcagctaatcatgggagagattaaagtctctcctgattataactggtttagaggtacagttccccttaaaaagattattgtggatgatgatgacagtaagatatggtcgctctatgacgcgggcccccgaagtatcaggtgtcctctcatattcctgccccctgtcagtggaactgcagatgtctttttccggcagattttggctctgactggatggggttaccgggttatcgctttgcagtatccagtttattgggaccatctcgagttctgtgatggattcagaaaacttttagaccatttacaattggataaagttcatctttttggcgcttctttgggaggcttgttggcccagaaaatttgctgaatacactcacaaatctcctaagagtccagttcacttaatctctgcaattccttcagtgacagctctatcttcaacaaacttggactgcaaacagctttgggtgatgctgatttagctcaaaaaaatagtcttggaaattttcctctggcccgggaccttaaagggtgatgccttgattcaaggtaacaggcaaaaggtggtcgagggacagggtcgaatcctcatggaattttggtgacctaaacggaaacgaaaagggtggaaaggaacaaaaagaaagtacgcagagagaggcg

SEQ ID NO: 178945 - DNA, 761 bp, Homo Sapiens
  misc_feature (673)..(673): n is a, c, g, or t
  misc_feature (721)..(721): n is a, c, g, or t
  misc_feature (751)..(751): n is a, c, g, or t
cttatgctacttctcccatcgctcaaaggggttgcctatggctgggtgtgccctgccctaaatgcagcaccactttcaagcttagtaggaccattccaagaaaaccaggtttcttctccccataccacgttgtgcctgaagaacaagccttcccgtccttgcctgcatgtgagtcacttctttggctgtgcagcaggtccccccctccccgcgatatgctggagggtaggattctgcagcctgtgttgctctctacctggcagcagactgtgcaggagccccaacctgtcctccaattccagcattcacagctgatgagcagtgcaggagcagggcaagaggaacagagccaatgatgttgtgggttacactgaggagccaaggacagggcctcaggtctcccccttacaaggcgtggctcatggcctgcattccagagaccaacatgatagcttttaattcagctgcatgacctgtgccttttaagccataaagatacctcaagcctagcacctcttgaaatccagatgttcatattagactcgaaaaaataggctccaggcctaggtgcccaggctatgatgagtctgcttttgaaggaggtagggaatgacatcttccttggacccaaagcttaaaagtaatgtatgctttgctgaccactgtttgttangccttaaacaacattcactgtgggtggtatcaggcacacgtgctatgntgcatcaattaatttttttgggctttccanaacagaaatc

SEQ ID NO: 178946 - DNA, 1012 bp, Homo Sapiens
  misc_feature (786)..(786): n is a, c, g, or t
gcaagtgtctgagagatactgcatcagccctagacccccgggagccagtcccgccctttacagagcagcccttagcctggggccatgggtcaggctgaccttcaacaattatttctagatgatttctggataagaattgctctctcggtaccagacagtttgacatcctccacccttagaaaatgactgacattgttttgttactgctcctacccaccaaggggataaagaaggcgagttctgagtgttggatgagtcagtcgcgtggaaggacgtggagcgtggcgctctgtaacttcctgccgtctgccaccccgccacgtgtatttaaccctcgcactttctccactgtggagatggctggggcggcgccccacagtgtgtattcctgtcctctatgttagagtgcatcagaagcacatttactgtgctatctatatctctatataaaagtgttttataaaaacccagaataggagcacgacgcatgattggtgtttgaggcgtttgccagctgggacaaactgcgtttggagctgtggttaagctgactaaggaggcggtggctctttcttaacattcccacgtgcccagggctgttcatgcaagattttaatggtgacttgtcctggcttactgggacagtctgtatgaggcatgtcaccacactgtcgcctcatagctgcaagagagaggcaccagctgaagttcccctgactgaagagagcctgtggccatgtaaaaagagaattaaactcttgttgctttttgtatacctgtatgcgnttgtgtagacgtgtgtctcaccagtcacctttgccctgcattgctgatccccttgcgcacactgattctagtgaggtcacagattcggagcttcacacaccagcccagagaaagggcgatggaaccgaaccgagggtctgcagcttcgttagcagagctgtcagattcttgacagtcttggaggatggggaaattcaagcagcagtggtgagggccaaaacagaat

SEQ ID NO: 178947 - DNA, 885 bp, Homo Sapiens
gggccgtttccagttaccaaggcacgaggatccggtgttccaacccagggggaaaaatgcggcctttgactgaagaggagacccgtgtcatgtttgagaagatagcgaaatacattggggagaatcttcaactgctggtggaccggcccgatggcacctactgtttccgtctgcacaacgaccgggtgtactatgtgagtgagaagattatgaagctggccgccaatatttccggggacaagctggtgtcgctggggacctgctttggaaaattcactaaaacccacaagtttcggttgcacgtcacagctctggattaccttgcaccttatgccaagtataaagtttggataaagcctggtgcagagcagtccttcctgtatgggaaccatgtgttgaaatctggtctgggtcgaatcactgaaaatacttctcagtaccagggcgtggtggtgtactccatggcagacatccctttgggtttaggggtggcagccaaatctacacaagactgcagaaaagtagaccccatggcgatcgtggtatttcatcaagcagacattggggaatatgtgcggcatgaagagacgttgacttaaaacgaagccattccaaggacagacggctgtatggaaaggccgagctttggttccctgggttcggggggactccaccatcatggcgaatttctgtcaacactctggcctctctcagggacctcttatttactgtactctctatcactgaaaaatgcaggctgggattcttattatataccagagatggctcaaaaatgggggtacagatcttgtgacgaatagactactgtttcctatttgcatcagagggcttcttgttcctgagcaataggtccaacatccatgg

SEQ ID NO: 178948 - DNA, 656 bp, Homo Sapiens
gggatgctgagcatccaggatgatgcctttatcaacccccacctggctaagatcttcgagcgggtgcggcagagcgcggacttcatgccactgaagcagatgatgaaaactctcaacaacgacctgggccccaactggcgggacaagttggaatacttcgaggagcggcccttcgccgccgcatccattgggcaggtgcacttggcccgaatgaagggcggccgcgaggtggccatgaagatccagtaccctggcgtggcccagagcatcaacagtgatgtcaacaacctcatggccgtgttgaacatgagcaacatgcttccagaaggcctgttccccgagcacctgatcgacgtgctgaggcgggagctggccctggagtgtgactaccagcgagaggccgcctgtgcccgcaagttcagggacctgctgaagggccaccccttcttctatgtgcctgagattgtggatgagctctgcagcccacatgtgctgaccacagagctggtgtctggcttccccctgggaccagggccgaaggcctcagccagggagattcggaacgagatctgctacaacatcctgggttctgtgcctgaagggagctgtttcgagttccactttcattgcaaacagaccccaactggttccaattt

SEQ ID NO: 178949 - DNA, 852 bp, Homo Sapiens
ggggggggcggcggcggcggaagcggatcgcactctctttgtgggcaaccttgaaacgaaagtgaccgaggagctccttttcgagcttttccaccaggctgggccagtaataaaggtgaaaattccaaaagataaggatggtaaaccaaagcagtttgcgtttgtgaatttcaaacatgaagtgtctgttccttatgcaatgaatctacttaatggaatcaaactttatggaaggcctatcaaaattcaatttagatcaggaagtagtcatgccccacaagatgtcagtttgtcatatccccaacatcatgttggaaattcaagccctacctccacatctcctagcagcaggtacgaaaggactatggataacatgacttcatcagcacagataattcagagatctttctcttctccagaaaattttcagagacaagcagtgatgaacagtgctttgagacaaatgtcatatggtggaaaatttggttcttcacctctggatcaatcaggattttcaccatcagttcaatcacacagtcatagtttcaatcagtcttcaagctcccagtggcgccaaggtacaccatcatcacagcgtaaagtcagaatgaattcttatccctacctagcagatagacattatagccgggaacagcgttacactgatcatgggtctgaccatcattacagaggaaagagagatgatttcttctatgaagacaggaatcatgatgactggagcccatgactatgattaccgaagagacagtagtaacacatggacaatggcgctcatctcgacactaacacatgttcaacaggacatggtccataagggtcatctcgggccct

SEQ ID NO: 178950 - DNA, 655 bp, Homo Sapiens
gggacagcatggccgccggtactgcagctgccttagcgtttttgagtcaggagagccgaacgcgggccgggggtgtcgggggcctacgggtcccggccccggtcactatggacagttttttcttcggctgtgagctctccggccacacccgctccttcacctttaaggtagaggaagaggatgatgctggagcacgtgctggcactaaccatgctctgcctcactcgagggagccaaagacgagtgtaatgtggtagaagttgtggcccggaaccatgaccatcaggagatcgcagtccctgtggccaacctcaagctgtcctgccaacccatgctcagtctggatgacttccagctccaaccacctgtaaccttccgcctgaagtcgggctctggccctgtgcggatcactgggcggcaccagattgttacgatgagcaatgatgtttctgaggaggagagcgaggaagaggaagaggacagtgatgaggaagaagttgagctgtgccccatccttcctgccaaaaagcaggggggcaggccctagccctcctaggtcagctccatgtgccatgcaccgccatgcaccctgttccctgacaagtttcaacaattgtaaatatttcttccttgaagaggagagcttgggtggggg

SEQ ID NO: 178951 - DNA, 822 bp, Homo Sapiens
  misc_feature (768)..(769): n is a, c, g, or t
  misc_feature (771)..(771): n is a, c, g, or t
  misc_feature (773)..(773): n is a, c, g, or t
  misc_feature (778)..(778): n is a, c, g, or t
gggggggccccgtttcgggggaggccgggccccggggatctggttcaagagaaaacccccagggggaacgggaacccggggagatttcggggattggaacctgatggaaacttcccgtggtccaggaaggaggcttccaaaatggtggccccgggctttcagaccttacggcagttttgctcacttccgattgctggcccactttgggggggccccccccgtgggcggggtctggggtgggtagaacaatcaggggacggtaacgttggcctccctgaacgcctcgaactccttggcgagcacgtaccccggcggggcacgcaggagggcaggcaggcccctgcgcaggcgctgggtggactgcttccaggtgtcatattggaagaacttgcccacggggtatctggggaagttgtccggaagcacggtcggaggggtcgacacgtccctctcggaacttggcgggggttagcacagtacgtctcccaggagggcccaggtcacagctgcggaaacagcactcctcaacgaatgccacggctgcgacggctcacacggcttgcgggcctgctgaagtagaagccgcggtccccacagacgaactggagggtgtccaccagctccccgccgcacagggtctcactggggcggtaagcagcaatgcagcacgaggcgaaggccaagaaggtgagaagcaccagcatcgacttccccaatgggattcccattggtgtagctcagcagaaggctcgctggggcaggaggagnngngngaagnggaggaggaggaagctggaagtctctttcacaggagaagctaat

SEQ ID NO: 178952 - DNA, 767 bp, Homo Sapiens
ggagagcaggcagctggtgttcctctttattggctcagacgctttcaactgctgtacttttctctctggcttcttgctattggctgggactcaagatggaaacatttatcagctggatgtaagaagtccaagggctccggtacaagtcatccacagatcaggagcaccagttctatccctgctaagtgtcagagatggattcattgctagccaaggtgatggaagctgttttattgtccagcaagacttagactatgtcactgagctcactggggctgactgtgaccctgtgtacaaggtagccacatgggagaagcagatctacacatgctgtcgagacggtcttgtacgacgctaccagctttctgacctctgacttcttggaaagagcagtcccggttagtgaaaaggtttgaccctgatcaacaatgagcagaaacatcatcagtccttcccaaggaccatggcgtttaatgtcttgggcaccccttggaaatcacagaaagtcagctgtactggccgtgtggaactctcatcccaagacctactttgaactgagtaagaaggtcattgtgcccactgcatttgttccaacttctccttgtataaaactcaccccagcaacacagggcaaggatatagatgcttttagtttgttcttaaaacaggtttggttaaatgtttacaaggacctcagtactaaagcctgttctcctggaggaaaataaagaacatattgtttggcacacccaagaaaaacacaaagg

SEQ ID NO: 178953 - DNA, 743 bp, Homo Sapiens
  misc_feature (47)..(47): n is a, c, g, or t
aggactgagaggccctgcctgagggataatcaggcagccacccaggnagaaggatgggggagtggggagaggccaggggcgtggtcctgacctcctgctgtagatggggcatcaggggccacctacagaggtcaggtcctctcctcccctccctggaggtgggggtggagcccagtgaacttgggcagctctggggctacgattctctttgcccaccagatggatgctaccactgtccctgcccactctgttgacttcctgagtctggggacttctgctctggttccatttataagctccctgctctctgggaagggctcggtgaccccttgtcctctccctaccctcacccaagacatcatcctgagaaaacccgtcagtctcagcctgggaaccagagggcctgcccagcccagaagacggaacttggacatgagactttcacagaaagcctctggaagggttgggaaggcaatgagtcacttggcagttttggatggaggggcagcacctcaggatggaggtgccaggccctgcttgctttggtctggccttgtccaggaacgctctggggcggaacctggggctccggatccagcatccgccggccctcagagggatggggggaatcacagcttctcctcgcctgcctggatgcggctgtaggcctcttggtccagcgggacgtagcggcccttctgggcatctagatagaacagcgggtctttcacaatagccgggtc

SEQ ID NO: 178954 - DNA, 869 bp, Homo Sapiens
  misc_feature (311)..(362): n is a, c, g, or t
ctggaccaaagctgacgaggctgggccaagccagtgatggggccacagccagaaccccgagccctacttccaggttctggttagctcagccccagcccagcccagctgctctgcccagagctgggtgagtggggagacacctcagagccccgcaaaacccactgaccggaggcaaaaggcagtggggctgggggtagttttccatggtcacagagaactagtggtggctctgagaaggggaggacctctgggctttgattccatctccttgtcttttttctttgtttttagagacagggtcctgctatttnnnnnnnnnnnnnnnnnnnnnnnnnnnnnnnnnnnnnnnnnnnnnnnnnnnntgggctcaagcaatcctcctgagtgatcccatttcttaatcagtgtagccccaagaaggctggggctatttaccagggtagaaacaaggagcttacctcccacctttggtcctaagtccctgccccctccccttcacaccataactaggtaacagtttgataactagggaagaaagcagaacagttaagcagccgccacatccccgctggctgggggcctcactccaggaaggggctggactggctgtcctttccagtggcctggctccgctgtgtggatggggagatcggggccagaggcagaacccttggtgaggaagctccagtcctgctctctacccagcccatcttgcctccatggttgcctctggaggcctctgggcctcctctaacaggggctggtgggcaccaatgagccaatggagtagacccctggctggtagggcaagtccacggttgctctgggaaggggttctaacatagtctggtgctgtggtctggtgtgcc

SEQ ID NO: 178955 - DNA, 442 bp, Homo Sapiens
  misc_feature (128)..(128): n is a, c, g, or t
gaaaacttgtaaaataactgaccctcccttcctgtccgccctcttcccctctaatgctcacgctcccaacacaaggtgggcagggaggcaccattcaggaacctggaccaaagctgacgaggctgggncaagccagggatggggccacagcagaaccccgagccctacttccaaggtctggttagctcagccccagcccagcccagctgctctgcccagagctgggtgagtggggagacacctcagagccccgcaaaacccactgaccggagcaaaaggcagtggggctgggggtagttttccatggtcacagagaactagtggtggctctgagaaggggaggacctctgggctttgattccatctccttgtcttttttctttgtttttagagacagggtcctgctatttcccaagctagagtgcagtggtgcgattcatgg

SEQ ID NO: 178956 - DNA, 895 bp, Homo Sapiens
  misc_feature (832)..(832): n is a, c, g, or t
gggcctcctccaggccatgctccttgaacttggaaatgtcaaccggagcccttacaccagccctccagcatctaatagacttgaatctactctaaacgaataattaatccaacctcactacattgtagctcagtccaacgactaaccctgaaatgggggtgttccagccttcagcgagatggccaagcggtcccctgggggctgtggcagcgggcttatccttctctgttgccaaccttgccgtccgacctcctccgcccccatgcggtgaccccgtccgtgtctgtgtctgtccatacgtgtgagtcccagctaaaaagacaaaacagaacccgtgggcccagctcggaaggtgcgtggagaaggctccgacgtctccgaagtgcagcccttgggatggcattccgttgcgtgccttattcctggagaatctgtatacggctcgcctatagaaatatagcctcttcatgctgtattagaaggactctttaaagcctccccccccacttgtgctttgccaacccccacccaaccgccgccgcgggggacatatgaactaccctcttcttgtgcggccggcctcggccccccgaaaaagcttcttaaacccattctttttggggcgcgggcgcccccctagggaacgggaacatggggccatagcgtgcgtccctaagaaaaatccggggcaatagacaagggcgtgggaattccccaccaacaaaaaaaccccccgggcgggaaacccgcgagcgggttctgaaaaacgtccccacaagtggcgccccccccgcgcgctcttttacccgcgcttcctttccacaagggagantccacagccgagcgccgccgaacatacaaaatcacgggcgcccgcgccgcggcgtcgatattc

SEQ ID NO: 178957 - DNA, 413 bp, Homo Sapiens
  misc_feature (371)..(371): n is a, c, g, or t
  misc_feature (378)..(378): n is a, c, g, or t
  misc_feature (400)..(400): n is a, c, g, or t
ggggacagggagtgggcaaggggaagaagcagcttatatgactaaccagcccctctgtggtccaccagcgtcttggcttggtgggagggctctcaatcagcagggccccaggagggaagaagaagtggggcaaagctgggcctcgccgctcgggagctttgccatctgagccacgcctcctccaggccatgctccttgaacttggaaatgtcaaccggagcccttacaccagccctccagcatctaatagacttgaatctactctaaacgaatatttaatccaacctcactacattgtagctcagtccaacgactaaccctgaaatggggggtgtttccagccttcagcgagatggccaagcggttccctngggcttnttggcagcggaattattccttnttttgttgccaac

SEQ ID NO: 178958 - DNA, 1060 bp, Homo Sapiens
  misc_feature (12)..(12): n is a, c, g, or t
tgatatgaacantcgtttaaaagcaggctggtacggcccggaattccgggatatcgtcgaccacgcgtcgggtgagtcgggctccgtggcgcgtgctgggaggagactggagcccggttaggaagaatggagttggcgactcgctaccagatccctaaagaagtggctgacatctttaacgcccccagtgatgatgaagagtttgttggcttccgagatgatgttcccatggaaaccctctcgtcagaggagagctgcgatagttttgactcactagagtcagggaaacagcaggatgtgcgctttcattccaaatacttcacagaagagctaagaagaatttttatagaggacactgactcagagactgaggattttgcaggatttacgcagagtgatctgaatggaaagactaacccagaagtaatggtcgtggagtcagatttgagtgatgatggcaaagcatctttggtgagcgaggaagaggaacatgaagaacaagataaggctaccccctagaaaaagcaggtctagaagaagtagtatggtcttcgagtagcctttcagttccccaccaagaagctggcaacaaaccagataaaaacagttcttccgagcagttgttttctagcgcacgcttacagaatgagacaaaaacaattcttgagagaaagaaagactgtcgacaggtgatacaagggaagattctacctctgaatctgaggatgactcccgggatgagagcaggagagtcagatgctgctgaccagcacccagacatcacggagaaccaaagccaggtgccaagttgggggagatgaatccacggccgcatttctccccgtacaagccaaactcggttcagggaaagaccgggggggcctccggaggacgaccgggtcgaccacacgagaggcgccgagaattggccagaacctccacccaaacggcgagtacgtcccacgcaacgggcgcgacacacgataccgcgggacgcgccaagggcacccgccacgccacgacaaccacgggcccgcggacgctcgatctatacgacacc

SEQ ID NO: 178959 - DNA, 646 bp, Homo Sapiens
atgaaattcttgaggagctcctaaaaaaaatgcagtctttatgggaaaaagcttgtgaaaatctcagaaatctgaacatggaaaccacaagaaccagatgctggaagaattatgtgagtttaaggatagaagcaatcagagctgaatatcagaagatgcctgcatttctccatgaagaagagcaacatcacttggaaaggctgcgaaaggagggcgaggacatttttcagcaactcaatgaaagcaaagccagaatggaacattccagggagcttttaagaggaatgtatgaggatctgaagcaaatgtgccataaagcagatgtggagctactccaggcttttggagacatattacacaggtatgagtctctgctgctgcaagtgtctgagcctgtgaatccagagctcagtgcagggcccatcactggactgctggacagcctcagtggattcagagttgattttactctgcagcctgaaagagccaatagtcatatcttcctgtgtggagatttgagaagcatgaatgttggatgtgaccctcaagatgatcccgatatcactggaaaatctgaatgttttcttgtatggggggctcaggctttcccatctggcaaatattattgggaggttcatatggggga

SEQ ID NO: 178960 - DNA, 916 bp, Homo Sapiens
aggctggtacggtcggaattcccgggatatgtcgacccacgcgtcggaggctccggagccatgcaggccgaaggccaggcacagggggttcgacgggcgatgctgatggcccaggaggccctggcattcctgatggcccaggggcaatgctggcggcccaggagaggcgggtgccacgggcggcagaggtccccggggcgcaggggcagcaagggcctcggggccgagaggaggcgccccgcggggtccgcatggcggtgccgcttctgcgcaggatggaaggtgcccctgcggggccaggaggccggacagccgcctgcttcagttgcacatcacgatgcctttctcgtcgcccatggaagcggagctggtccgcaggatcctgtcccgggatgccgcacctctcccccgaccaggggcggttctgaaggacttcaccgtgtccggcaacctactgtttatgtcagttcgggaccaggacagggaaggcgctgggcggatgagggtggtgggttgggggctgggatccgcctccccggaggggcagaaagctagagatctcagaacacccaaacacaaggtctcagaacagagacctggtacaccaggcccgccgccacccgagggagcccagggagatgggtgcaagaggtgtcgcctttaatgtgatgttctctgcccctcacatttagccgactgactgctgcagaccaccgcaactgcagctctccatcagctcctgtctccagcagctttcccctgttgatgtggatcacgcagtgctttctgcccgtgttttgggctcaggctccctcagggcaagaggcgctaagccccaccttggcgccccttcctagggtcatgcctcctccctagggaaatggtccaggcacgagtgccagtcattgtgggggcg

SEQ ID NO: 178961 - DNA, 653 bp, Homo Sapiens
  misc_feature (400)..(400): n is a, c, g, or t
atcacatgatccgcacccccagcatgaggcaggaggagcgctacctggatatcaatgagtgtattcttgaaaactatcccgagtgctccaaccccaggttattttacatcattccgtacttttgtggacagcatcccagatgcagggcagcctggtgaatgggcccttgagagagcaaaagctgaacgtgaatgaaaacttcctgctcgtggggattcttgaagagttggaagatgtgctgctgttactggaaagatttttacctcattacttcaaggggcgtgctcagtatctacaaagacccagagcacaggaagcttggaaacatgactgtgacggtgaagaagactgtcccctctcctgaggctgtgcagatcctctaccagcggatgagatacgnagtacgagttttaccactacgtcaaagagcagttccacctgctgaagcgcaagtttggacttaagtctcacgtcagcaagccccccctgaggccacacttctttatcccaactccactggaaaccgaggagccaatcgacgatgaagaacaggatgatgaaaagtggctggaagatatttataagaggtgatgtgactgtgttgcctctatggctttatctcccttttccagaaagttctttgtttggggaag

SEQ ID NO: 178962 - DNA, 774 bp, Homo Sapiens
cacagtgctcactgagaacagctcaaagacaaagcagtgtgagtcttatttttactccagatgttcttttggcctgtaattgaatatccttttaagaattgattttgatgaaggctgccataatgaaaggaaagtgacctgcaaacatccagtcacaggacaaccatcacaggacaattgtatttttgtagtgaatgaacagactgttgcaaccatgacatctgaagaaaagaaggaacggccaataagtatgataaatgaagcttctaactataacgtgacttcagattatgcagtgcatccaatgagccctgtaggcagaacttcacgagcttcaaaaaacagttcataattttggaaagaggtcaaattcaattaaaaggaatcctaatgcaccggttgtcagacgaggttggctttataaacaggacagtactggcatgaaattgtggaagaaacgctggtctgtgctttctgaccctttgcctcttttattatagagatgagaaacgaagagggtatcctgggaagcatactgttacctagtttcagatagcttcgcttacctctgaagatcacattaatcgcaaatatgcttttaaggcaggccatccaaacatgcggacctatgaatcactgcactgataccgggaaagggaaatggaagtagcgtgatgacaagccacgtagaaaggtggacccaaggaaagacaagaagctgtgcaaacagactggaccaggaattacatctgaaaatgcaccaaccaaagaaag

SEQ ID NO: 178963 - DNA, 809 bp, Homo Sapiens
caggctggtacggtccggagttccgggatatcgtcgacccacgcgtccgaggaaatacacccttgcattgtgcagcttaccgggcccataaacaatgtgccttaaagcttctaagaagtggagcagaccctaatctgaagaacaaaaatgatcagaaacctcttgaccttgcccagggtgctgaaatgaaacacattcttgttggtaataaggtcatctacaaagcattgaaacgatatgagggccctctctggaagagttcaagatttttcggctggagattattctgggtagtgttagagcatggagtcctttcatggtataggaaacagcctgatgcagttcataatatttatcgccagggatgcaaacacctgactcaagcagtatgcacggtaaaatccactgatagctgcctcttctttattaaatgctttgatgacaccattcatggcttccgggttcctaagaatagccttcagcagtcaagagaggactggctggaagcaatagaagaacattctgcttacagcactcactactgttcccaggaccagctgactgatgaggaggaggaagatacggtttctgctgcagacctgaagaaatcattagagaaagcacagtcatgccaacagcgactagatagggaaatttccaactttctcaaaatgattaaggagtgtgacatggctaaagaaatgcttccatcatttcttcagaaagttgaagtcgtctcagaagcttctagagaaaactgtgtagctttgactgattgccttaatctcttcacaaacaagaaggggtga

SEQ ID NO: 178964 - DNA, 897 bp, Homo Sapiens
gttctgctgtgcccggcccgcgaggtctaaggcatgggcttccagcctccggccgctcttcttttgaggcttttccttctgcagggcatcctgaggcttctgtggggggacctggctttcatccctccttttatccgaatgtccggccctgcggtcagcgcgtccctggtcggagacaccgagggtgtgaccgtgtccctggcagtgctgcaggacgaggcgggaatattgccaattccgacgtgtggagtgctgaacaatgagacggaagactggagcgtgactgtgatccccggtgcgaaggtgttggaagtgacagtgaggtggaagagaggtctggactggtgttcctccaatgagacagattccttctcagagtccccctgtatcctccagacccttctggtttcagcatctcataattcatcctgttcagcacatctactcattcaagtggaaatttatgccaactcttctctgacccataatgcctcagagaacgtgactgtcattcctaaccaggtgtatcagccccttggcccttgtccttgtaatttaacagctggagcctgtgatgttcgctgctgctgtgaccaggaatgctcatcaaatttaacaaacgctgttcagacggtcctgcttcaccggcgtgtatggaggagacgtcaatcctccttttgatccagctctggctctgctgggacgacgaacacgtggtgtccccgataggtttcccttttctgtgtgtgcagtccccaccttggccaacacaacccttccttggtttacttctatcatgggtgctgagttccccaaagaggacttcttcctttgaagtatatgcgggatactgacgcaacagactttgcagaacttgggttacaaacaggagaatcc

SEQ ID NO: 178965 - DNA, 932 bp, Homo Sapiens
  misc_feature (107)..(107): n is a, c, g, or t
cgagcgaccgatggagatggcggctgcggctgagtgacggacggtggaggcccagagcccgggcctgaagggggggacaaacctgggtgcccgcaggagcccggcanggtgtcttacaagtatcaagaacttactatatgtggttgaataaacaatcaaggtaaagagcatcaagtaaaaacttctgcttgtcgataagtacttcagacattcccccagtggctgaagtggcatatgaattatgaagttggatcatttggaatgaatgtaagagaattgccaagggctcctcctactccagagaggaaacctcatccagggccatgaagccacttcctcaccatctgtgtgctgcttaagctaatgctgcgggaaccatggttccttgggaggaatcaagctgactcttggcatgagattcctgccttcctagggttgagagcggcactgccatggcttctctggacgacccaggggaagtgagggagggcttcctctgccctctgtgcctgaaggatctgcagtctttctatcagcttcactcacattacgaggaagaacactcaggggaagaccgtgatgtcaaagggcaaattaaaagtaagaggcgaggaccttgcctatcccctgctgtcgttgagagctttaactcacgggatagttctcatcagctttggtgttgccacaggaatatgatacatagtagtagcaaacagattgactagtgtttggtcattgtgccagggcgtttcaagagtttccctggtttattaatttcatttaatcctcacaataacctgtgtggctgtaagccaccatttcgaaccaagacacaggagagattagataacttggtcggaaggccatcaagagaaacaatctggacttgagtctagtaaatgtaattggtgtgaaacaaacaacacaaaggg

SEQ ID NO: 178966 - DNA, 732 bp, Homo Sapiens
  misc_feature (298)..(328): n is a, c, g, or t
aggacttgaaaaacgctgtgagtgtgcaccacgcattggcatccaaggccacggactatgagaagaaaccaaacgtgtttaaacttaaaactgccgactggagggtcttgctttttcaaactcagagcccagaggaaatgcaagggtggataaacaaaatcaattgtgtggcagctgtattttctgcaccaccatttccagcagcaatcggctctcagaagaagtttagccgcccacttctgcctgccactacaacaaaactgtctcaggaggagcaactgaagtcacatgaaagtannnnnnnnnnnnnnnnnnnnnnnnnnnnnnngcaccgctcatatccccccgacaagaaggtcaaagccaaggacgtcgatgagtacaaactgaaagaccactatctggagtttgagaaaacccgctatgaaatgtatgtcagcattctcaaggaaggaggcaaagagctactgagtaacgatgaaagcgaggctgcagggactgaagaagtcgcactcgagtccttcgctgaacccggatacttctccaatcactgccaaagtcaagcgtaacgtgtcagagaggaaggatcaccgacctgaaacaccaagcattaagcaaaaagttacttagagtccatctgcggccaggaagtgctggtcatggagcaaaataggcgtttttcaagatctttctggtaatccgtgaatatatttaacaaacaacaaaacaaag

SEQ ID NO: 178967 - DNA, 853 bp, Homo Sapiens
  misc_feature (330)..(330): n is a, c, g, or t
  misc_feature (353)..(353): n is a, c, g, or t
gtatcagaaatgagggcgacttttgtgtcccgatgatatggtccagtgcttagttgttactgaaagaaagtgaagaaactttcccagtatagactgtgagacagaaagagtctgtagagaataaccatggaaacagactggcaaaggataacaacctattgtgaataaccttgtctctttggtagtcgctaaaaatgacagaaatgcatgcaagaactggatggcataaaaaccacaagatacagcctttggcaaatgtgatgtagaactcccttttgagtgtacttctctccactgtgatgatctgatagagtccacagcctaatgacnatgctaggcaaattcttagaacnattaggaggatccctgctaagttgtggtgtgaatggtagctatgatgactgatatcttcaaactgttcccaaagtagcaaaacactctgtgtcatgacaatgaatactgcaatgccagtggatgcaggcgtagaatcccactggagaggtctgctttgagacttcttcattctgactattgtccaacccatgcatagactcaaaagtaagtataacatctgaatttgggaagcgatgtcaaaaaattctgccaaacttcccataaatggtacccctattccatctttggagtaactggagaaatgaatgtaattagctaaagctgaaccagcttgtaacagcaatgcagttgtcagaacctttaaaatcatgtgcatgggtccgcctttcttaatagcctgcccacaatgattgagcataaatgcaagccaatcacaaagtaccactaggactaggaggaaaaagaactcatgtaaccccagattctccagcactaaaat

SEQ ID NO: 178968 - DNA, 721 bp, Homo Sapiens
ggagggcaacacagatgtcccaggggctggaagcctcaggctgctctgggcttatgtggctcagctgggggctcggcttgtcctggagggggcagccctggggttgcagtaccacctgtatgggttccagatgcccagctcctttgcatgtcgccgagaaccttgccttggtagtataacctgcaatctgtcccgcccctctgagaagaccattttcctaaagaccatgtttggagtcagcggtttctgtctcttgtttacttttttggagcttgtgcttctgggtttggggagatggtggaggacctggaagcacaaatcttcctcttctaaatacttcctaacttcagagagcaccagaagacacaagaaagcaaccgatagcctcccagtggtggaaaccaaagagcaatttcaagaagcagttccaggaagaagcttagcccaggaaaaacaaagaccagttggacccagagatgcctgagttggagatgaactttggccaactttcctcatcaccatacttaaaatcctgtccaaggaggagcttattcaccattttctatacatgtgacatatgtagcagcataaccgacaactgggactgcgctgccttgactccacctctacatacaatgactcagctaaccagactaataaaagccatgtttgcaccattgctcagggaggcattgctttggggaattattcccagtgtcct

SEQ ID NO: 178969 - DNA, 769 bp, Homo Sapiens
tcgaacccacgcgtccgatacaggaggcttttgatatttacacaaatctgcacatatctgatctggcatttcaaccatcctttactgaagcccaccaatataacatctacggtagttcaagcacacaaactgatgtgctctttgtggagctctcttctgggaaggtcaagatgataaagagtctcaaggaaccactcaaggcagaagaatggccttggaaccggaaaaacaggcaaatccaggacagtggcttgtttggtcaatacctgatgacaccttccaaggactctctcttcatcctagatggacgactcaataaattaaactgtgagatcactgaagttgaaaaaggaaatacagtcatttgggttggagatgcctaaaaaccctacgatacaattattgaatgaagcgttttacaatacattgcacttaatccatagtttaaatttacaacttaactttccaagtttatatcctagtcaaacaaaatttacttggttggtccaaataaaataaattgtcttgactaagtgactaagacatacacaattaattatactggttaattagaaatactcagcacaatatttaatgagaaatcacatcagtcacaagaatcaaatatgtaaattatgctttaaacaataaagtaggattcaaatcatttaaaaaactaaactgcagggaatttcacgatgacatagagcattatttcatctgagggtagccatgttctctgcctttggaatgataaaccagaaatcaa

SEQ ID NO: 178970 - DNA, 1045 bp, Homo Sapiens
aaagcaggctggtacggtccggaattcccgggatatcgtgacccaggcgtcgccacgcgtcgagcccttcagcttcctggagaaggaggaggcagctaaaggaagctgctcgacagagagacttggcagccacagctgaagccaagatctccaagcagaaggccaccagaaggattcccaagtccattctggagccagcccttggggataaactccaggaagctgagctcttcaggaaaattcgcatccaaatgagagccctggacatgctccagatggcctcttcccctatcgcctcctctagtaaccgggctaacccacagccccgcacagccacccgaacccagcaggaaaagcttgggtttctgcacactaacttcagattccagcctcgggtgaatcctgtggtccctgactatgagggcctttacaaggccttccagagaagagcagccaaaagaagagaaacccaagaggccactcgcaacaagcccttcttgctgaggaccgccaacctgcgccaccctcagcggccctgtgatgctgccaccaccggaaggaggcaggattccccacagccaccagctacacccctgccaaggagtcgttctctgagcggcttgcttccctctctgcaacactctccctgtgcacatcacagatgccaccaggaagagggaatctgcagtcaagaagtgcacttggaaaaacagaacaaagcgatgagaagtacttccgctggctggagatacccccaacaaggaagtctccaagcacggtccaatctggggacccggcgcgcgaaggcagggatccccataaaagccgggggacggggccacgcccccgcgagagaaaccgccatgaccggcaagcacgaaactaccaccaccgccggcacgacgcgccaaagacccctctctcaacgcgcgcacaccccaaagcagggggtctcaaccccagcggcgggcgaccaacgacagccgcgcgggaaaacaacgctccccacacaagcaccaggacacccacgcgcgccccccacaca

SEQ ID NO: 178971 - DNA, 852 bp, Homo Sapiens
catgtacaatgacacattaaatggcagtacagagaaaaggagtgcagaattgcctgatgctgtgggacctattgttcagttacaagagaaactttatgtgcctgtaaaagaatacccagattttaattttgttgggagaatccttggacctagaggacttacagccaaacaacttgaagcagaaaccggatgtaaaatcatggtccgaggcaaaggctcaatgagggataaaaaaaaggaggagcaaaatagaggcaagcccaattgggagcatctaaatgaagatttacatgtactaatcactgtggaagatgctcagaacagagcagaaatcaaattgaagagagcagttgaagaagtgaagaaattattggtacctgcagcagaaggagaagacagcctgaagaagatgcagctgatggagcttgcgattctgaatggcacctacagagatgccaacattaaatcaccagcccttgccttttctcttgcagcaacagcccaggctgctccaaggatcattactgggcctgcgccggttctcccaccagctgccctgcgtactcctacgccagctggccctaccataatgcctttgatcagacaaatacagaccgctgtcatgccaaacggaactcctcacccaactgctgcaatagttcctccagggcccgaagctggtttaatctatacaccctatgagtaccccttacacattggcaccagctacatcaatccttgagtatcctattgaacctagtggtgtattaggtgcgggtgggtactaaagttcgaggcacgatatgcgtgtccatccttaccaaaggattgtgaacgagacgagccgcaacg

SEQ ID NO: 178972 - DNA, 808 bp, Homo Sapiens
gtgagcaggaaagagtgagcaagaagccaaagaaagccggcctgtcagaggaggacgacagccttgtggacgtgtactatcgggagggaaaagaggaggcagaagagacgaatgtgctgcccaaggagaagcaaaccaagccagcagaagcgccccggctgcagctgtcttcaggcttcgcttggaatgtgggactagactctctgaccccggccttgccacctctagcagagagctcagacagcgaggaggatgagaagccacaccaagccacgcagataaagaaaagcaagaaagaaagggagttggagaagcagaaggcagagaaggaactgtcccgcattgaggaggcgctgatggatcctgggcggcagccagagtccgcggatgaatttgaccgactggtgctgagctcccccaacagctccattctgtggctgcagtacatggctttccacctgcaggccacggagatcgagaaggcccgtgccgtggctgagagggcccttaagaccatctccttcagagaggagcaggagaagctgaacgtgtgggtggctctgctgaacctggagaacatgtacggctctcaggagtccctgaccaaggtcttggagcgagccgtgcagtacaacgagcctctcaaagtctttctccacctggctgacatctacgccaagtcagagaaattccaggaagctgggtgaactctacaagcggatgctgaagcgtttccggcaggagaaagctgtgtggatcaaatacggcgccttccttctgcggaggagccaggctgcagccagtcacc

SEQ ID NO: 178973 - DNA, 714 bp, Homo Sapiens
gccataatgaaggtggctgcggcgcggcggcaggctcagctgcgccgggcgggggcggcgctggggccgcgcctgtaggactcggggccgacgccgcgggatggggacgcggcgcggggagtgaggcagtggcggcggcggcggtaagcggaacttcggcccgaggggctcgcccgctcccgcctctgtcttgtcggcctccacctgcagccccgcggcccccgcgccccgcgggacccggacggcgacgacgggggaatgtggcgctggatccggcagcagctgggttttgacccaccacatcagagtgacacaagaaccatctacgtagccaacaggtttcctcagaatggcctttacacacctcagaaatttatagataacaggatcatttcatctaagtacactgtgtggaattttgttccaaaaaatttatttgaacagttcagaagagtggcaaacttttattttcttattatatttctggttcagcttatgattgatacacctaccagtccagttaccagtggacttccattattctttgtgataacagtaactgccataaagcagggatatgaagattggttacggcataactcagataatgaagtaaatggagctcctgtttatgttgttcgaagtggtggccttgtaaaaactagatcaaaaaacattcgggtgggtgatattgttcgaatagccaaagatgaa

SEQ ID NO: 178974 - DNA, 909 bp, Homo Sapiens
ccaggccaccccaggtgttctcaactatgtgaccaccaagcgtggccggcctctcctctgagttctacaccaccttcaaggcttgtgagcagtttctcttggacaaccggaatgatctggcccccagcctccagaccctctagatgccctcagtggccacatcatgcccactcccactccatcctgtccccaaggacacacatacagtgcctggagaaagccaaagacctttatttcttcctgcctccccgtgggaagcctccgccctgaggtccgctggcccaccacccctgggtgctcagtttctaccaacatgagccagcaagtccttgtggtagccctggggtagcctgtagtagactcgggtcctgtccacagccctagctgccagcaatgctgtcctcacagaggcatagtcgcccccagctgggttgtgctccactgtgacggtggcccggggggaggatgccagcgagcctgcctatggctccagctgtgctgtggcccagcagcatggcctgcatctggaaggacacaggttgccagagccccctggcacaactctagcatatctgtgagcagctgttccctgtagccactgcccagcacctcctcaggccagcctggtgccacagtcacgtgggggaagacctcagccacagctgtaagcagctctctgccagccacatggccgggggaccgaaaaactccccgtgggagattctggcccaagccacacaggccaatgcaagaggcccaggctggagaggcgtgccacgcaaggccagggatggccggagggctgcgggctccactatttgcaactggttgccccagtgtccgggattgtgtggccggctgctgccggcaggactccagcgtcaggatgttgcccctggagtttgaacg

SEQ ID NO: 178975 - DNA, 922 bp, Homo Sapiens
ggtccgtcctacggccgctactacgggcctgggggtggagatgtgccggtacacccacctccacccttatatcctcttcgccctgaacctccccagcctcccatttcctggcgggtgcgcgggggcggcccggcggagaccacctggctgggagaaggcggaggaggcgatggctactatccctcgggaggcgcctggccagagcctggtcgagccggaggaagccaccagagtttgaattcttatacaaatggagcgtatggtccaacataccccccaggccctggggcaaatactgcctcatactcaggggcttattatgcacctggttatactcagaccagttactccacagaagttccaagtacttaccgttcatctggcaacagcccaactccagtctctcgttggatctatccccagcaggactgtcagactgaagcaccccctcttagggggcaggttccaggatatccgccttcacagaaccctggaatgaccctgccccattatccttatggagatggtaatcgtagtgttccacaatcaggaccgactgtacgacacaagaagatgcgtgggcttctcctggtgcttatggaatgggtggccgttatccctggccttcatcagcgccctcagcaccacccgggcaatctctacatgactgaaagtacttcaccatggcctagcagtggctctccccagtcacccccttcaccccccagtccagcaggccaagggattcttcatacccctatagccaatccagatcaaagcatgaaccggccacaacttttcctttgcgagtgtgcatcagtacgaattccttcggggacagtggacaagtgatgattcagatcttttgggatccaagtccaggtatagtggtgagctcagtgtattgtatgcaccagtgaca

SEQ ID NO: 178976 - DNA, 729 bp, Homo Sapiens
tgtgggtcccagagacacgagggagaacggccctggcgctctgaaacattcgaaggtcaccaggtgtaagaggagagggcgatgtggccaggggcggcgaggaccacaaagcccacctgcctgaggagaactgtcgtgtccaggggcctggggaggccaccgagggacagggtcccttgggtgcaggggccccttgggcttatgtctgggagcaggaaacaaagagggccttgtgagctgacggtccctccctgccggggatggagtgacaggcgctctgaggagagaagccggcgctggggggaagcaggcaatgtgcccagagatgaggcacaacagcagccagcggttcacacagccgctgcctgagggaagaggaaaaggacgctgctcgcagggctcaggaggggccactcccctaaggaccaccagatgtccttccaggcgtcactgctgcagctggctggccttgggaaccgtgaagggtgtccagtgggagctgagctggggagagggttgggggcagggacaagtcagactagggccaggagcaggccatggccacgaggcacagtgggcggctgggcagggccctgtgacctcagggagcgcacggggcaggggcctggctgctcccagacttgcctctgagcccttgggctgctcatcctttgttccgttcgttccaaaaagaacctgtccccaaaaaagggcagcacccacgcgtcc

SEQ ID NO: 178977 - DNA, 670 bp, Homo Sapiens
gtctgccgtggctcctcgggtggtgccctgtgtgacaaagcccaacagcaagggtgactcctggcaggtgggggcagcaggagggcagagggcagagctctggccacttctgcccacttcattagggtttgtgaactttgtccttcacctcttttcgtgccctggttgtgagattgcctctaacaggtaatgccaggggcccttcactccgcccccatgactgggaagaggcctgtggcagcgccgctggaccctaggaggctcagaggcagtggtgtgggagccctgtctgcaaggacgcagaataagcagtgagggcggctgcaggagaggaaggggctcccacagcccccactgatgccgctgcaggcccctgtcgagctggggtcccagccaggtgcccccgcatgccctcctgcagttgctggatggatagggacaccaggaagaggacaaactgcatggactcaagcgagctggagccatcttctccatagcattacggacttagcataagagtaaatgactgtgaacgttgtagtaaacggcagcttaagataagtaagcagagacagtgttaaggacgagttggtgtctgtggtagcttttaggctggtcctaacccaccatttattgccttctgagaggtgggtgaggacaagcatgtgcc

SEQ ID NO: 178978 - DNA, 873 bp, Homo Sapiens
aagcaggtggtcctcatcgacagctcctacctgtgccaattctgccccagcaaattcagcacctacttccagctcaagtctcacatgacccagcataagaatgagcaggtgtacaagtgtgtggtcaaaagctgtgcccagacgttcccaaagctcgacacatttctggagcacatcaagagccaccaggaggagctgagctaccgctgccacctctgcggcaaggacttcccctcgctgtacgacctgggcgtgcaccagtactcccacagcctcctgccacagcacagccccaagaaggacaatgccgtctacaagtgtgtcaaatgtgtcaacaaatactccacccctgaggccctggagcaccacctgcagaccgccactcacaacttcccctgcccacactgccagaaggtgtttccttgtgaacgctacctgcggcgtcatctgcccacccacggcagcgggggcaggttcaagtgccaagtgtgcaagaagttcttccggcgggagcattatctcaaactgcatgctcacatccactcgggtgagaagccctacaaatgctcagtgtgcgagtctgcgttcaaccgcaaggacaaactgaagagacacatgttgatccacgagcccttcaagaaatacaaatgccctttctcgacgcacacaggctgcagtaaggagttcaaccggccggacaagctgaaggccacatcctctcccactctggcatgaagctccacaaatgcgccctgtgccagcaagtccttcagccgcgtgcccacctcgccgagcatcagcgcgccacacgggcactacaagtccgctgtgctggctgcgccaagggcttttcccgccacaatactcaagatc

SEQ ID NO: 178979 - DNA, 589 bp, Homo Sapiens
tcgagcatattggaggacttagaccgttacaacaaggctcgcaaagaccctgacattgagtacatacggtcccattacaacattgaagatttcatctacttcagtcaccaccagcgcgaagaacacgggcacatgcatcactttgccctcaaccccattttccggcactacaccaagttctttctgaaggagatcctgcgtttaggctttaaatcctgtctctactaccgtgtttacccaaaatccagagaaggcaagttccagaacccctacgcccactccctgacatctgcccttcattacttggttcccgtgcgaccacgacgacagattgtctatcctctggaaaagcttggcataaacgctccatcaaaggcggtctccaaggatccgatgagttatgctctaaaccatacaaacagaaaactaacattggaacctaaaattactgtcaatgccaagatcattgtggttggtgcatccagtgttggaatttccttcctagagacattggtattttggtgagtggtttcactctattgattgatggtttttaaataataaaaattatcttcctacatctgaagag

SEQ ID NO: 178980 - DNA, 741 bp, Homo Sapiens
cgcgttcgcactaattgaaggacaattcatggccaagaggattcacgcagaaggcctgggctatcgagtcatgtccaagacaaagattttggccacaggaggagcatctcacaatagagaaatcttacaggtgcttgcagatgtgtttgatgccccggtgtatgttatagacactgccaactcggcctgtgtgggttctgcataccgagcttttcatggtcttgcaggtggaacagatgtgcccttttcagaggttgtgaagttagctccaaatcccagactagctgctaccccaagcccgggagcttctcaggtctacgaggcccttctcccccagtatgccaaactcgagcagagaatcttgtctcagacccgggggcctccggagtgaacaggcatccctgttgcccctgcctgcccagatttactgaccccatttgtcgacatggccccagacaggagggatccacttctctgttctgaacagctcttcctgcccctactgactccttggagtgtccaggaccatcttaaagccgccctcagcacatctgcatgaagatagataggcactcctgtccctgtgcccgtgtgccccagggcaggaaagcatctctcttttcctgtcttttatcccaggaggcaggacaacactgagactgggatatgtccaataaaaactatgacttttccccttgcagaggcagaattaaagctaatctagggactcaaaataaatca

SEQ ID NO: 178981 - DNA, 932 bp, Homo Sapiens
gaggcaatattcatataaaacctcggtttaaaagcaggctggtacccggtccggaattttcgggatatcgtcgaccacgcgtccgggagaaatcaccactggtcctcgagtcagtgctctgtctgtcgtgcgggacctggggttttttgggatctacaagggtgccaaagcatgctttctgcgggacattcctttctcggccatctactttccgtgctatgctcatgtgaaggcttcctttgcaaatgaagatgggcaggttagcccaggaagcctgctcttagctggtgccatagctggtatgcctgcagcatctttaggtgacccctgctgatgttatcaagacgagattacaggtggctgcccgggctggccaaaccacttacagcggagtgatagactgctttagaaagatactgcgtgaagaaggaccaaaaagctctgtggaagggagctggtgctcgtgtatttcgatcctcaccccagtttggtgtaactttgctgacttacgaattgctacagcgatggttctacattgattttggaggagtaaaacccatgggatcagagccagttcctaaatccaggatcaacctgcctgccccgaatcctgatcacgttgggggctacaaactggcagttgctacatttgcagggattgaaaacaaatttggactttacctacctctcttcaagccatcagtatctacctcaaaggctattggtggaggcccataggaaggatccagccctgggatagtgctgcctttatgtgggtactgaagtaaaagaacattccctcctgtggaatgaagcaatgcttcatcccttttaacgtccatctcttgtttaatccagtccagctttttatctgtgactcatcacttctggggtgttctaaccagaacatggaatttcaatttttaggcccg

SEQ ID NO: 178982 - DNA, 585 bp, Homo Sapiens
acctcgtgtaaagcggctggtccggtccggaatttctcgggatatcgtccgacccacgcgtcggattatccatgtcccagcctctctccaaaaaaatagtaaacaagatgtcttcttcttttcccaaagatacacatacacacatgtacaaatttttttatcagataataatagctaatatttaatgagtacttaccttagtttgtcccctttacaacagctttacatctgtgtgattgatacagttcatattcccattttataactgagaaaactggtgcacagagaggataagcaacttgccaaaggtcacacagttaataagtggaaatgctggggtatgaaccaggtagtctgcccccatagctctgccccccagagctgtactgtctcccatgagggtacttctccatggagcagcctgaggcgatccctttattctgggcttctctcagaaatggattcccacacagtattcaaagcaaatttccccagaggaaatcctattggaagaacttaaaaactcagaatctttttctttgtccagagagttgaggaagcttaagctaaatgatacatgttttt

SEQ ID NO: 178983 - DNA, 706 bp, Homo Sapiens
gatccatcttcttcaaaaaatttagagctgtgtgtttttactgcttggctaaaaccagtggatgtagaggaacctgatacagttttataacctagttgttcagaaatatccagattggcaaccactaaaggtaccctgtgaaaaagtcctctttgaggtttcaaggcatgtttcagtcgatgagtagcgcagctttctgttattatacttggtgttaatagcagaaaaataagttcttggtttgaaaaatgctcctgcaagtttttgtgaagcagcctctctctaaacgtcatgatctgatctgaatgacgacagaatttgtaccaacctatcacattctttttgacattggagaatattttcttcagtgcttgctcatttacttcacttgaggaattataaaagctaaaaaaagcatggaatatatttctgaatgtcaattgtataaacaacttcaacatcatccatttgggaatcagtaatgctattcttgccttcatcttttacttccttaagaagaacaccttccgtgtcccagacagtgctggggttgtgtaaggcaagctggtcaacacaaagcccaagaacacctgctcttacccttcgtgctgccgtcagctcaggcttcaggagacctaacttcacaacttcattaatctaaaacgcgtctaaaacagtttatagaaaaggaaatcctctcttttgt

SEQ ID NO: 178984 - DNA, 978 bp, Homo Sapiens
  misc_feature (287)..(377): n is a, c, g, or t
  misc_feature (432)..(507): n is a, c, g, or t
  misc_feature (509)..(525): n is a, c, g, or t
  misc_feature (787)..(796): n is a, c, g, or t
  misc_feature (963)..(963): n is a, c, g, or t
ccgtaacataatgaaggtcgttgtgattaaaacacaaacgtgctggttttgttgtgtcacccccgcccgtgttatgccaatatgtctcttttgtgccatctttcggcccctgagtcttgtagaacgcgctcaagtgtcgaagcgatggggtgaaaagaagtgaaaaaacgagtagacttttgtggacagttgacaacgcgagaggtgacaaagtgacgagtgttggaatttaagaataaattgctggccattgctcagccgtaatccacatttgggaggccaaacgnnnnnnnnnnnnnnnnnnnnnnnnnnnnnnnnnnnnnnnnnnnnnnnnnnnnnnnnnnnnnnnnnnnnnnnnnnnnnnnnnnnnnnnnnnnggcgcctgtagtcccagcttatcgggaggcttagcaggagaatatacgtgaactnnnnnnnnnnnnnnnnnnnnnnnnnnnnnnnnnnnnnnnnnnnnnnnnnnnnnnnnnnnnnnnnnnnnnnnnnnnncnnnnnnnnnnnnnnnnntagaagtagaatttaatcttttcacttctctgtaccagtttaaaaaaatatatatcactgatggtatcaaaaggtcccacatctggattttaactcttatgtaggtataagtagtgcttactactgaaactgcatggaagatatacctgcttctactgtatatttctgattgaagagaacatgcagttcctcttagggaactgtaggtctgataaccttatatatggatagtttcaaacaattattgctgagagatcatttnnnnnnnnnntacaatttaaaatacttgattccagagtaatataaaagtaaccttaagaacctcagcgctaaaggaaaacagcaggcaacttcagaattctcccatccaaattttcaagaatagagagtggattaatacccgacgcgtgggtcgacgatatcccgggaattccgganccgtacccagcctgt

SEQ ID NO: 178985 - DNA, 1007 bp, Homo Sapiens
  misc_feature (11)..(11): n is a, c, g, or t
  misc_feature (66)..(256): n is a, c, g, or t
tgaacccccgntgtgaaaaagaggcggtacggtccggaattccgggatatcgtcgacccacgcgtnnnnnnnnnnnnnnnnnnnnnnnnnnnnnnnnnnnnnnnnnnnnnnnnnnnnnnnnnnnnnnnnnnnnnnnnnnnnnnnnnnnnnnnnnnnnnnnnnnnnnnnnnnnnnnnnnnnnnnnnnnnnnnnnnnnnnnnnnnnnnnnnnnnnnnnnnnnnnnnnnnnnnnnnnnnnnnnnnnnnnnnnnnnnnnntccttgtttaagaatttgaaaataaagtttcccaggagtttgaatggagtcgagatttaagtggctgaagtttgcatttcactaggaaaccaacagctttaatcatgaaatgaaagcacagctgggcatagggccagtcacagagtgtctttgctctgagcacttcacaaacccatgtggaggggaggaaagaaaaagaaagccatctttaattatcttagctgttcctaatgtctttggctgcaaagagctagctgtttccttcaaccttggtggttgcacgggtagtgtcctcagcagtgagagggcaggtctgccctgtggtcaggattgcccttgtgaggggcagagctctccaaccatgcagggctccgtgtcggcatggtgtggactcgggtgctctgatcatcccctgtgttgcgtctgacctgtgtggttgcattccttgatgggtgggacgttgtcatttgtaggtgctgaggacattcgtctgttgaattctggtgtttccatgactgctgtccagcgagaagatggataacctggtcattctctctccaatagaagcttagaaaaggagggagcccagtccttattcaaaagaatggtcgtccgaaacctcactaaaggcccacaagggaaaagggtccggccggctcaggggagaaaactgcgcgggggatacagcgcgaaacaaaaagcatctccgccacaagaaaccagcaggcgcgcaagtaatcaccgctcactg

SEQ ID NO: 178986 - DNA, 974 bp, Homo Sapiens
  misc_feature (65)..(256): n is a, c, g, or t
ttgcttttataaaagcaggcctggtaccggccggaatcccgggatatcgtcgacccacgcgtccnnnnnnnnnnnnnnnnnnnnnnnnnnnnnnnnnnnnnnnnnnnnnnnnnnnnnnnnnnnnnnnnnnnnnnnnnnnnnnnnnnnnnnnnnnnnnnnnnnnnnnnnnnnnnnnnnnnnnnnnnnnnnnnnnnnnnnnnnnnnnnnnnnnnnnnnnnnnnnnnnnnnnnnnnnnnnnnnnnnnnnnnnnnnnnnnttgttttaagaatttgaaaataaagtttcccaggagttttgaattggagtcgagatttaagtggctgaagttttgcatttcactaggaaaccaacagctttaatcatgaaatgaaagcacagctgggcattgggccagtcacagagtgtcttttgctctgagcacttcacaaacccattgtggaggggaggaaagaaaaagaaagccatctttaattatcttagctgttcctaatgtctttggctgcaaagagctagctgtttccttcaaccttggtggttgcacgggtagtgtcctcagcagtgagagggcaggtctgccctgtggtcaggattgcccttgtgaggggcagagctctccaaccatgcaggtctccgtgtcggcatggtgtggactccggtgctctgatcatcccctgtgtttgcgtctgaccctgttgtgggtttgcattcccttgattggagtgggcaacgtattgttactttcgctagtgctgaggaccattcgtctgtttgaattttctgggggttttccaatgaaccttgcccttttcagcgagaaagattaattaacctgtgccaattcttttctccccaatttaaagctccagaagaggtggaagatacccccagattctctttttaacagaaatgtgctctttcaaaaacttcataaataaacaaggcgccaacaccgcgagaaaacggctttcgaaaca

SEQ ID NO: 178987 - DNA, 1023 bp, Homo Sapiens
gaattcccgggatatcgtcgacccacgcgtccggtcacaatcacccacactagcaggaatgatgagttttttatcacccccagcacaactgtcccatcagtcttcgaactcaacttctacagcaatggggtacttcatgtctttatcatggaggccatcatagcttgcagcctttatgcagttctgaacaagaggggactggggggtcccactagcaccccacctaacctgatcagccaggagcagctggtgcggaaggcggccagcctgttgctaccttctctccaatgaaggcaccatcctcactgccttgccagacattttaccaagtctgccatgaaacagtaggaaagtttatccagtatggcattcttacagtggcagagcacgatgaccaggaagatatcagtcctagtcttgctgagcagcagtgggacaagaagcttcctgaacctttgtcttggagaagtgatgaagaagatgaagacagtgactttggggaggaacagcgagattgctacctgaaggtgagccaatcccaaggagcaccagccagtttatcaacctttcttacagaggactcctttgggcctttgctgggaggcctacaagctcttgctgccatctttgttcacaactttcagtggttcctgttccagaaccttgaaatctgcaaaaggttgacaattaccttaattaaccgaaaacggaaagaaactgtctggccggtatattgctggaaagggcccccaatatgggcctgtggaagcattccctggtgaccatgtgttacgccaattgggggtgtccagggagcacacaaccaacagagagagggtcggtttaaaaagtgagcagcgatgttacctccaaggccacgagcaaaagtcgaaaatattcggaactggcggctatgaccgtgtgtgtgcgacaagacgtaatagagacttcctgagcaccctgcgccaagatagagcgcgcacgtgacacccaccacaagtatacgagagcccgcatggatgc

SEQ ID NO: 178988 - DNA, 619 bp, Homo Sapiens
  misc_feature (398)..(412): n is a, c, g, or t
  misc_feature (471)..(497): n is a, c, g, or t
aatagactgtgatcagagttgaccaactggttccttacccgtatcagggacatcaagagccacagtatcacaaggacactgggttaaccaaaacaccacaaaggtccagtaaaacctgggaaattccgcaaagcaatcaccaactttttcctgtttgtgtagaaaaaataatagaagagagaacccaaaggtccagcaaaaccagcattatgatgtagcaaacagagtataactctgaagtcagtggggtcagtaaaagccttatcagaccatccatagttttacaatgtgatctgctcttcctcagaccactaatatagaatccaaacaggtgaaaaatacgtcactccttagaatacaacaatgatctgataaaggatttgacttaatggaagggnnnnnnnnnnnnnnngggaattgcagagcatagcccctattagaacaagctaactttccagattttacaaattnnnnnnnnnnnnnnnnnnnnnnnnnnncacttcaacatgaagctaccatacaaagtttttccatttttctttgtaaaaagttcagagtttgcaatttcggacgcgtgggtcgacgatatcccggaattccggaccgtacagccccatgg

SEQ ID NO: 178989 - DNA, 552 bp, Homo Sapiens
cgctcggctcgcaggatggatcccgtacccgggacagactcggcgccgctggctggcctggcctggtcgtcggcctctgcacccccgccgcgggggttcagcgcgatctcctgcaccgtcgagggggcacccgccagctttggcaagagcttcgcgcagaaatctggctacttcctgtgccttagttctctgggcagcctagagaacccgcaggagaacgtggtggccgatatccagatcgtggtggacaagagccccctgccgctgggcttctcccccgtctgcgaccccatggattccaaggcctctgtgtccaagaagaaacgcatgtgtgtgaagctgttgcccctgggagccacggacacggctgtgtttgatgtccggctgagtgggaagaccaagacagtgcctggataccttcgaataggggacatgggcggctttgccatctggtgcaagaaggccaaggccccgaggccagtgcccaagaccccgaggtctcagccgggacatgcagggcctctctctggatgcagccagccagccaagtaa

SEQ ID NO: 178990 - DNA, 898 bp, Homo Sapiens
aacagcgctagtaactatagaacagtggtgtatttaagcaggctggtacggtccggaagtccgggatatcgtcgacccacgctgtccgcgccctgtctgtccccgcagaacgatcgccgcggccggaagagttggcgctcggggcggactccttgtgaactggcttagcgcacccatcccaccttcccgcaccctgggaccggtccaacgagcgctcctccaagcggagccttggagggcacggccggcaccattacctccaacgagtggagctctcccacctcccctgaggggagcaccgcctctgggggcagtcatggcactggacaagcccatcgacaatgacgcagagggcgtgtggagcccggatattgagcagagtttccaggaggccctcgccatctacccgccctgtggcaggcgcaaaatcatcctgtcggacgagggcaagatgtatggtcggaacgagctgattgcccgctaacatcaagctccggacagggaagacccgcaccaggaacgcaggtctccagccacatccaggtgctggctcgtcgccaaagctcgcgagatccaggccaagctaaacggaccaggcagctaaggcacaaggcccttgcagagcatggctgccatgtcgtctgcacagatcatctccgccacgaccttccacagtagcatggccctcgaccggggccccggacagcccagcagtctcaaggataaaggcaaggagctttgccaggacaagccggaaacgtcccatgatgtgacgcctttctctcagcagacctatgctgccagcctccctgcctctgacaggatggagtctcctagaggcccgaccatagccgtctgagcccccgaaagcacctgacacggcgaaagagccaagtcc

SEQ ID NO: 178991 - DNA, 791 bp, Homo Sapiens
agctggtaccggtccggaatttcgggatatcgtcgacccacgcgtccgcgctcctctgcattgccattgttctgaggttcaagaagacgtggaagctgcgggctctgaaggaaggcaagacaagcatgcatccgccgtactctttgtgggcagctggtcccggagaggcctcgacccaccccagtgcttgttcctctcatctccccaccggtgtcccccagcagcctggggtctgacaatacctcgagccacaaccgaccagatgccagggacccacggagcccttatgacatcagcaatacagactacttcttccccagatagctggctgggtggcaccagcagcctggaccctgtggatgacaaaacacaaacgggctcagcaaaagatgcttctcactgccatgccagcttatctcaggggtgtgcggcctttggcttcacggaagagccttgcggaaggttctacgccaggggaaaatcagcctgctccagctgttcagctggttgaggtttcaaacctccctttccaaatgcccagcttaaaggggttagagtgaacttgggccactgtgaagagaaccatatcaagactctaaggacactcacacggacactcaaaagctgggcaggtaggtgggggcctcggctgtgcgagaagcggctggcagcccacccctcaacacctctgcacaagctgcaccctcaggcaggtgggatggatttccagccaaagcctcctccagccgccatgctcctggcccactgcatcgtaacatctgccaactcaa

SEQ ID NO: 178992 - DNA, 675 bp, Homo Sapiens
  misc_feature (82)..(144): n is a, c, g, or t
acccacgcgtcggtggctgcagcaactgcaacagcagcggctgtggcaggcctggccccgggccagctggcgggaagccccnnnnnnnnnnnnnnnnnnnnnnnnnnnnnnnnnnnnnnnnnnnnnnnnnnnnnnnnnnnnnnncgcagtcagcaggcccgaggaggcaggacttcctggtgtgggggtgtcaacagcccagaaagagaaagacggagaggcagagacccaggtgagccgaggagcggagacacggacccagcagggtcacgcgggaggagactcgggacacccactcgctggctgccaccgggagcagaggggggctcggccgcccctcccacatcagtctccagacccttggggcttcagaggccgctcctaggctcctcggaggaggcgcgggtttcttcttttccggagagcaaactttcctcggagatgcctggcaggatgagccgcggcccccggagaggacgggacagcctctgatcgccgcctgcgtgccccgccactgcccatggccaggaggccccagggaacggacagcccgacctcttaggcgccgggaccctcaggctcagatcagtggccgaggccccagagttttgcaaactcagctctggagttcagcagcaacagcagcaggaaaaacctgtccctgtttgcgagtaa

SEQ ID NO: 178993 - DNA, 788 bp, Homo Sapiens
  misc_feature (109)..(140): n is a, c, g, or t
  misc_feature (485)..(528): n is a, c, g, or t
cgtattaggatgaacactagtaggagaaccaccgcctcggtgatttgtataataaaaagggcagctggtacggtccggaatccgggatatcgtcgaccacgcgtcgggnnnnnnnnnnnnnnnnnnnnnnnnnnnnnnnngaaacatgtattggaggtaatttgacactgctgctggcagtagttctctattcaccattttaaagcccattcaggttctctcttcctgaaaagaactgattgctgtgtttacatgaaatgacattggagtcagacggtctgttttaaagatttccatgacagcctcttttcctgagttggagagattggaggtggtctatccgtacgatgtggaatcaaacggtgggtttcttagtagctaaagaagccatgtacttctagtgtgtttctcagaatatcaactcatgttcttcagatgcttttctttttttaatggtgagggaaaaggtataatttgggattccnnnnnnnnnnnnnnnnnnnnnnnnnnnnnnnnnnnnnnnnnnnngcaaaccaagtttcccaagtcctcatctcttatagtgaccaagacatctttctcctctgaagggcttggcagttgtggctaaaaaataagcagtatcattatttgcttgaaatcatatatacagtttgtatgaatttcagtatgttgccaagacatgattttttcttattgtattttctgtaaaatatttctggcactgaactgtaaagtaaagggcaaagtgtaaataatgaacggcggtgcccgtgcccccttgctcc

SEQ ID NO: 178994 - DNA, 410 bp, Homo Sapiens
  misc_feature (342)..(342): n is a, c, g, or t
  misc_feature (371)..(371): n is a, c, g, or t
  misc_feature (396)..(396): n is a, c, g, or t
ttaaaatttaattgactaaatgtattacattcaatattccatgggcttcttctggacaaaggatcggcataaatacaaacaaacctctggaccttcttccctaaccgacgaagatgaaacacaggaggcaaggggcacgggcacgccttcatatttacactttgcctttactttacagttcagtgccagaaatatttacagaaaatacaataagaaaaaatcatgtcttggcaacatactgaaattcatacaaactgtatatatgatttcaagcaaataatgatactgcttattttttagccacaactgccaagcccttcagaggagaaagatgtcttgggncactataaggggatgagggacttgggggnaacttgggtttgccttcaacaagtntttaccggggcgcc

SEQ ID NO: 178995 - DNA, 1135 bp, Homo Sapiens
tggctaagcaggctgtaccggtccggaattcccgggatatcgtcgaacccacgcgtccgcagaaggtgttaaatttcacttcatttaagtactaatatggtcaggatggaggggaaaattcaaatgttcacctgaaggtgcatgggaggttttggaaatgagggtcggtgggaactgtgctggcgagtatctcactcacatgcttcttttgcggggatctgtccaggagaggagcacagcttgatgttgaaaaagaaactaaagtcctccactttgcacagcaataaactcaaggagacctgtgatgcccaccacagagggcctttcatgactcacactgggtgcaccaagcagcacaggtctcagaccctaggagttcaatggctgtcatttcagaaaagcttggtgactttacaagctgtgtcaaggccatttatcaagacctatactgggtatcggtgcagcaggtccattctccactgacctgggagcagctcactcagcttgcccggttctggcggcctctatgtgctcaggtgcagaccttctattttatagccacccaggtaggttatgtcttccctgctaagaactggcttgtttcagccacattgcctggccctggggatccagccctggatagagaagcccatcccttgcctgggcaggagataaactgagcctgtcagtgggtcagatgaggcttgagctgggtgcaccctgaccccattcagcagaaattgcaggtcttggaatgagagcaagaacctgctataaggaaagtagcttgaacaattatactcaaaaatggtgaaccctgcatttcacagagggctaagattataaacaaattttatgtttcttgttacgacatttgatgtctttcagatgtctggtgacagtcatgcatttctatataatcagacaaatattaggatgtaatcattcatatgccttgcaaattttagatgtagaaacagtcaaatacaggttatatgtctctcttttaattcagaaaaggcttgtagcctctaactttcccacgctgagccatggaggactaatatccacaaatcttttaatgtactcctgtgggaacaatgttcgtatattgaacagttgaataaaatatggt

SEQ ID NO: 178996 - DNA, 775 bp, Homo Sapiens
tttgtcctataacagtcgagtaatatcggctggtacggtcggaatcccgggatatcgtcgaccacgcgtcgggcagctgtcctgagccaggagctccaccatatcgtgtcccatcctgttaaggcaattttgagaggctgctctggaatatgtctcaatggtggatgtagggaaacttcacaggctttgatgggactgaggtggtgtctgttgtgtgaagacaggagctgaatgctcaggatctaggctgcttttcttgtggtcagttgggttacctgtttgggaccaagtccatgtttactaaggaggctgaataaattctacagaggaaagtggagctcccaggatgaccgaggaagggtaagaaaagggaaccagagtcgagctcacatgagggaaactccaagaaaaggaaaatcggttccaaggacagctgccaagacagagctggtagaattttgcctttttcccccaaagggaaaataagcagttgacttttatagagggtttgagcagcaaggtgactgacaaaacatttttgagatcctggcactcagagaatatttggggactcagaaggtgttaaatttcacttcatttaagtactaatatggtcaggatggaggggaagattcaaatgttcacctgaaggtgcatgggaggtttcgcaaatgagggtcggtgggaactgtgctggcgagtatctcactcacatgcttcttttgcggggatctgtccaggagaggagcacagcttgatgttgaaaaagaaacta

SEQ ID NO: 178997 - DNA, 831 bp, Homo Sapiens
tagtgactatgacagttgtactaaaaagcaggctgtaccggtccggaatcccgggatatcgattttaaaattaccatatcaaaataaatgtgccttatttttttataagtcttgttaaatcagtgtccatattactgttggggaagggggaatgttgtggggtctgggagagggtgggtactttctatgacacataaattgtgtaatttttgcctgacaatgctggccacattctgatctgtttcattaaatttgtggtgatgttactctaaacattttgactatttgaatgtactgagatgtcagaaaacaaaacaaggaaggaaaatattgttaattaaaatgtgctgctgccaaggaaactgcaacttgaagcaaggatttgtaaaatgcaaaatccagctactgtttccatttcacagtagttaactatattaaagagagaatgctttaaaattgatcttgtttgaaacccacttttatgtagctcatcatggtttatcttactaaggaatatgttggtcattcagttctcaacttttgtatgtgctaaccttaaagtgaagttctgagcccgtgtgccattacagtgcttttaataaaatttatttgggattattgtttccttaacattaaaataatagcgacatttagactatgcaattttagcatagaaaggagtctttgagtatgtacagttttgaaaattctctttgagataatcgatttcatattctgtggctttcaacctccatttacctcttgtcattccaacatcttttatagagaaataaaaaccccaatttctctttcaaaaacaaacaaaacaag

SEQ ID NO: 178998 - DNA, 770 bp, Homo Sapiens
caggtttcaaggcctcaaacaagagtggcccctaaaacagttggtaaaggagtgttttcacctctgtttacagttgagtgcactgctcaaggtcatgcagctggtgaacagcagggagtgagcagtggagaacgtgaggctggtcattaggagcacggtagcctgggtctccctctgccctcagcaacttcacacctgcccctccctgggccccagtctcatccctaaacaggagtgaccccaccgtcatttcaaggtcatcatcacctgccctgcaagggaaacaacagatgtgcaaggtctgagggtccatgtgtggaagcagaggccagagctgacaccacatgggcaaaaggagtgggcgtgtggggctgggagctggggctcatgtgggaggctggtggctgccatggctgcagctcctggccctgcggacagccaggcctggggtctacaagagctgggcagggaagaggacaaacaaggtctcacaggtccattctccccagcctcccagtaggcagctgagtccaacgcagtgcccgagagctcagcccttgtcaaggagagtcctcgaacccagagggggctgggtaagcagcagaagtgcagaagccctgcccaggccctgcctcccaggccaccacccacccctcacggctgccacacccaccagcccatgactgtccacatcctgacccctacctacctcatgacctccccgaccctgatctccacacctgaccccaagcacattttgttattttttg

SEQ ID NO: 178999 - DNA, 861 bp, Homo Sapiens
  misc_feature (490)..(606): n is a, c, g, or t
cctcatttcgttctctgaatagctctaagagcgtgaacaaccccagaaggaaaaagagtgctgttgttaaaggtatctggcatcatggacccaaccatcaccaggagtttctcacttcatctctgctttattgtagtataatttgcatacaataatggcacacatttaatgtgcacagtgtgataaattttgacatatgtatacatccatgaagccggcaccacaatcaagataatgaacatctcgcttaccccagaagtttcctgtgccctgtcactcctccgtattcctccatcctcaggatttcatcaaatggtctgctgcactgtgctggaattttgaactccccagagtagtaaacaacatcttctcaagggtatacaagtcatcagatagagaaaacacccattatagagctgtggagcccttacgatatagtgctatgctgcaacaaattagacagaagagtatttgttgaataataaaagannnnnnnnnnnnnnnnnnnnnnnnnnnnnnnnnnnnnnnnnnnnnnnnnnnnnnnnnnnnnnnnnnnnnnnnnnnnnnnnnnnnnnnnnnnnnnnnnnnnnnnnnnnnnnnnnnnnnttttccaataataacatagaaaaaaggaagaatttgagagtttctcagattaggcaattccttgaagaatctgagaacacagaagctcccctccctactttccatgattgaaatcagtgattcattggtttccttgtgtgggcttttgaaagatcattagaaaccaacctgaagatcctggagatcttgtggacccaggagcatgagtggccatacagtgctttcttatccaacctactttaaaaggtcagcaga

SEQ ID NO: 179000 - DNA, 1004 bp, Homo Sapiens
acacacacacgtcttatgtaaccgagcccgggtaaagcagggctgcagaaagcagaaacggcgagcccggctcctgggagcaggtctcggcccccgcttggggccccggccgtgcggccggagggagcggccggatggagcggaggatgaaagccggatacttggaccagcaagtgccctacaccttcagcagcaaatcgcccggaaatgggagcttgcgcgaagcgctgatcggcccgctggggaagctcatggacccgggctccctgccgcccctcgactctgaagatctcttccaggatctaagtcacttccaggagacgtggctcgctgaagctcaggtaccagacagtgatgagcagtttgttcctgatttccattcagaaaacctagctttccacagccccaccaccaggatcaagaaggagccccagagtccccgcacagacccggccctgtcctgcagcaggaagccgccactcccctaccaccatggcgagcagtgcctttactccagtgcctatgacccccccagacaaatcgccatcaagtcccctgcccctggtgcccttggacagtcgcccctacagccctttccccgggcagagcaacggaatttcctgagatcctctggcacctcccagcaccaccctggccatgggtacctcggggaacatagctccgtcttccagcagccccctggacatttgccactccttcacatctcaggcacgggggccggaaacccttcccaggccctaacaaaacgagtagtggagccctgcgcaggccctaatcccccaggcagcagctttcacaggcaagaaactacccaggatccacccggagtgaaacacgccggagcccccagacacgaggatccaagggtggggccaaagaggccagggaaccgcgagggcagagagtggagagacgacgacggaaagacacgggaccgccgtgtgaaccgcagaggtcacggagaggcaacaaagtgaacgcca

SEQ ID NO: 179001 - DNA, 758 bp, Homo Sapiens
ctgatttccattcagaaaacctagctttccacagccccaccaccaggatcaagaaggagccccagagtccccgcacagacccggccctgtcctgcagcaggaagccgccactcccctaccaccatggcgagcagtgcctttactccagtgcctatgacccccccagacaaatcgccatcaagtcccctgcccctggtgcccttggacagtcgcccctacagccctttccccgggcagagcaacggaatttcctgagatcctctggcacctcccagccccaccctggccatgggtacctcggggaacatagctccgtcttccagcagcccctgggacatttgccactccttcacatctcagggagggggccgggaacccctcccaggccccctaccaacaccagctgtcggagccctgcccaccctatccccagcagagctttaagcaagaataccatgatcccctgtatgaacaggcgggccagccagccgtggaccagggtggggtcaactgggcacaggtacccaggggcgggggtggtgatcaaacaggaacagacggacttcgcctacgactcagatgtcaccgggtgcgcatcaaatgtacctccacacagaggccttctctgggccctctccaggctatggctatgagaaacctctgcgaccattcccagatgatgtctgcgttgtccctgagaaatttgaaggagacatcaagcaggaaggggtcaggtgcatttcgagaggggccgccta

SEQ ID NO: 179002 - DNA, 943 bp, Homo Sapiens
gggagagaaggaggaagtagggagcggggtggcaggggggggacccgccgcggctgctgccaccgccgccaccaccgcctctgctcgtggcgtgggaaaggaggtgtgagtcccgggcgcgagccggcggcggcgccgctgcgggagggtcggcggtgggaaggcgatggcggatttagataaactcaacatcgacagcattatccaacggctgctggaagtgagagggtccaagcctggtaagaatgtccagcttcaggagaatgaaatcagaggactgtgcttaaagtctcgtgaaatctttctcagtcagcctatcctactagaacttgaagcaccactcaaaatatgtggtgacatccatggacaatactatgatttgctgcgactttttgagtacggtggtttcccaccagaaagcaactacctgtttcttggggactatgtggacaggggaaagcagtcattggagacgatctgcctcttactggcctacaaaataaaatatcctgagaatttttttcttctcagagggaaccatgaatgtgccagcatcaacagaatttatggattttatgatgaatgtaaaagaagatacaacattaaactatggaaaactttcacagactggtttaactgtttaccgatagcagccatcgtggatgagaagatattctgctgtcatggaggtttatcaccagatcttcaatctatgggagcagattcggcgaacttatgcgaccaactgatgtaccagatcaaggtctccttggtgatcctttgggggtctgaccccggataagatgtcctagggctgggttgaaactgaacagaggagttgtcctttcacatttgggtgcagaagtggttgcaaaattcctccataagccataattggatctcaatatgttagagcccatcaggtggttgaagaatgggtatg

SEQ ID NO: 179003 - DNA, 425 bp, Homo Sapiens
  misc_feature (41)..(50): n is a, c, g, or t
  misc_feature (159)..(167): n is a, c, g, or t
gataatgaaatgagaagagccaaacatttaccctaagtggnnnnnnnnnnttgggcttatgataggttttctcttatagacagtaaaaagaagtgccaggaatttaaagcaaagaacagtaagatgagagagatctccaatatacaaatgtttcaaaannnnnnnnnagtacaacatgcttatacaagaggtaagacttatttttgtgtttgatttgataatttgacttggaatttttctgtgggaataaaagtgttagaatgcttatttttaaatttctcaaaatttgcaggcagtaagcaaggccttaaagccatagagggctctaaaactagttccataaagcattttactgtaaaaatatgtacagatctttaatagaaaagtatatttctttacagtagaaaaatatctgaacagtcaac

SEQ ID NO: 179004 - DNA, 476 bp, Homo Sapiens
gaggtcggctggttatcgggagttggagggctgaggtcgggagggtggtgtgtacagagctctaggactcacgcaccaggccagtcgcgggtttagggccgaggcctgggttacaagcagcaagtgcgcggttggggccactgcgaggccgttttagaaaactgtttaaaacaaagagcaattgatggataaatcaggaatagattctcttgaccatgtgacatctgatgctgtggaacttgcaaatcgaagtgataactcttctgatagcagcttatttaaaactcagtgtatcccttactcacctaaaggggagaaaagaaaccccattcgaaaatttgttcgtacacctgaaagtgttcacgcaagtgattcatcaagtgactcatcttttgaaccaataccattgactataaaagctatttttgaaagattcaagaacaggaaacaagagatatacaaggagaaagaaaaag

SEQ ID NO: 179005 - DNA, 896 bp, Homo Sapiens
  misc_feature (411)..(420): n is a, c, g, or t
gtccagaggacctcctattactcttgatttcatcttcagagtgtagttaaaaaattattttaaataattatttttttaaatcagttgtaggttcacagcaaaagtggacaaaaagaaatttctcatatatcccctgccctcacacatgcatagcctcccaccactatcagtatcccacaccagagtggtacatttgttacaatcaataaacctccattgacacatcattatcacccaaagtccatagtttacatgaagattcactctggtgttgtacattgtatgggcttagacaaatgtatgatgatatctacaattatagaatcatacagaatagtttcactgccctaaaacttctctatgcttcacctgttcatccctttcttccctaatcccctggcaaccactttnnnnnnnnnnttaggttcagggggtacatgtgcaggtaaactcgtgacaagggggttgttatacagattatttagtgacccaggtactaagcctagtacccaatagttacttttctggtcctgtcccttttcccaccctccaccctcaggtaggccccagtatgttattcctttgtgtccatgttatttcactcccacttgtgagaacatggaatatttggtttcctgttcctatgttagttgttaaggataatggcctccagccccatccatgttcctgcaaaggacatgatctttcttgtggcaaccacttttttactgtcgccatagtccttccttttctagaactgtcatattggaatcatatagtatgtacgccctttcaagactggcttcttttcacttaataataatgcaattaaggttcctcccatgtcatttcatggccttaatagtgcatctattttaagcactgaataatactca

SEQ ID NO: 179006 - DNA, 399 bp, Homo Sapiens
  misc_feature (86)..(86): n is a, c, g, or t
  misc_feature (125)..(125): n is a, c, g, or t
  misc_feature (185)..(185): n is a, c, g, or t
  misc_feature (277)..(277): n is a, c, g, or t
  misc_feature (279)..(279): n is a, c, g, or t
  misc_feature (286)..(286): n is a, c, g, or t
  misc_feature (333)..(333): n is a, c, g, or t
gacatgcatagcctcccaccactatcagtatcccacaccagagtggtacatttgttacaatcaataaacctccattgacacatcantatcacccaaagtaccatagtttacatgaagattcactnctggtgttgtacattgtatgggtcttagtacaaatgtatgatgatatctacaattatagnaatcatacagaatagtttcactgccctaaaacttctctatgcttcacctgttcatcccttttcttccctaatcccctgggcaaccactttananttaaaanttagggttcagggggtacatgtgcagggtaaactcgtgacaaggggngtttgttattcagattatttagttgaccccgggtactaaggccttgttaccccaatagttactttt

SEQ ID NO: 179007 - DNA, 316 bp, Homo Sapiens
cgaccacgcgtccgaattctctcagcatcaccaaactgaatggtgaaatagtgctaagattctgggcaataggaagattagtgaatatgatacattgattccaggtgccaggatggctgacattaaggaccagctggctatggtcctcaggctacggtcctcagtattctagtatttgagtagtggaggtaaatccaaaggcgactggttatattttacttctaaatgtgtgctgaagtgtctcttgttcaaaaattcttgatatttagagcttcaagttaccacatttaaaagtaaagacttggcacggggcaca

SEQ ID NO: 179008 - DNA, 983 bp, Homo Sapiens
acccacgcgtcgctcccaacaggccggcctcggccgcgctggcgactcggcggtgctggtgctgccgccttccccgggccctcgttcctccaggcccagcatggactcggaagggggaagcctcctcctggacgaggactcggaagtcttcaagatgctgcaggaaaatcgcgagggacgggcggccccccgacagtccagctcctttcggctcttgcaggaagccctggaggctgaggagagaggtggcacgccagccttcttgcccagctcactgagcccccagtcctccctgcccgcctccagggccctggccacccctcccaagctccacacttgtgagaagtgcagtaccagcatcgcgaaccaggctgtgcgcatccaggagggccggtaccgccaccccggctgctacacctgtgccgactgtgggctgaacctgaagatgcgcgggcacttctgggtgggtgacgagctgtactgtgagaagcatgcccgccagcgctactccgcacctgccaccctcagctctcgggcctgagcccgccatgccctcagcctgcctcactgctgggccagggtcatgcctatataagttggcatggcagggacaatggtgggcagttgctcttacatgagctaagttgggagacctgaggcccctttgtcctcgctgggtgggccaaggtctgggacctgtcttggactgtgggagactcacctcacttgccaggctctcccctgcaggactggcattgcactagtctgaggtggccactgcctttggatcaaccttgtgtgtgcgagggtctaagtagcggtcgaacacagaagtgggaaggagaagggggtggggccaggggctaatggtgtcactgtgtacagttttgacatacctactctattaatttttgcattggccacattaacaagcaaaaaaagggggggcggcaaaagttcccggggggccagattaagggtac

SEQ ID NO: 179009 - DNA, 776 bp, Homo Sapiens
  misc_feature (14)..(14): n is a, c, g, or t
  misc_feature (61)..(61): n is a, c, g, or t
  misc_feature (81)..(81): n is a, c, g, or t
  misc_feature (124)..(124): n is a, c, g, or t
  misc_feature (515)..(527): n is a, c, g, or t
gttggggtgctggnaatagccatggtagggaagcagatttcttctgtctgggtctacatcntgtctcctctacctagagantgtctaaaactctcaactctgtatatgttccaggatgagctgnaaaaaggtcgaggcagtacaccaacttagtgttttgatctgatgtagaaagagataggatactgcatacgtgcagcacagagcctccactaaccacacccttgatcacccaaagatcccaggtcagtgatatgctagaagacaagcccaggaaaggtatttccctgtggtatgaccctaccccagtgtctatcatctgcctctttttgtgatcactttctggccttgcggagatgacaaacctgttctgctctcagtcttccattaactaagttcgacacctagcccctgacctatcatacctccagatctgtggcaccagtaacttgactcctattgctttaactctcaatcaggaaagggtttagccatattgcagaatacgtaccttnnnnnnnnnnnnnaccaagaaacaggagaaatcactggtggtgccttggatatgctagaaatgtcacagagtcaatgcccaggattgtacatacagcctgtacgttatgctccttgcaattaatgtaaacaggcaagggtggttgtaacaaaagaaaaccaggaggaacccacgtgcatcaggcagttttgcagtcagtggttggtggcttgtttgtcaacccatatagattaatttattttaaaaaaagcccacgcgtccg

SEQ ID NO: 179010 - DNA, 1043 bp, Homo Sapiens
  misc_feature (866)..(866): n is a, c, g, or t
  misc_feature (897)..(897): n is a, c, g, or t
  misc_feature (958)..(958): n is a, c, g, or t
  misc_feature (987)..(987): n is a, c, g, or t
  misc_feature (1030)..(1030): n is a, c, g, or t
gtgagcagcgtgaaggacagaggacagaaggccttggttctcgacattggcactggcacgggactcttgtcaagagatggcggtcacagcaggtgccgacttctgctatgccatcgaggttttcaagcctatggctgatgctgctgtgaagattgtggagaaaaatggctttagtgataagattaaggttatcaacaagcattccaccgaggtgactgtaggtccagagggtgacatgccatgccgtgccaacatcctggtcacagagttgtttgacacagagctgatcggggagggggcgctgccctcctatgagcacgcacacaggcatctcgtggaggaaaattgtgaggccgtgccccacagagccaccgtctatgcacagctggtggagtccgggaggatgtggtcgtggaacaagctatttcccatccacgtgcagaccagcctcggagagcaggtcatcgtccctcccgttgacgtggagagctgccctggcgcaccctctgtctgtgacattcagctgaaccaggtgtcaccagccgactttacagtcctcagcgatgtactgcccatgttcagcatagacttcagcaagcaagtcagtagctcagcagcctgccatagcaggcggtttgaacctctgacatctggccgagctcaggtggttctctcgtggtgggacattgaaatggaccctgaggggaagatcaagtgcaccatggcccccttctgggcacactcagacccaagaggagatgcagtggcgggaccactggatgcagtgtgtgtacttcctgccacaagaggagcctgtggtgcagggctcagcgctctatctggtagcccaccacgatgactactgngtatggtacagcctgcagaggaccagccctnaaaagaatgagagagtccgccagatgcgccccgtgtgtgactgccaggctcacctgctctngaaccggcctcggtttggagagatcaatnaccagggacagaactgatcgatacgtccaggctctgaggaccnttgcttgaagcca

SEQ ID NO: 179011 - DNA, 1086 bp, Homo Sapiens
  misc_feature (221)..(338): n is a, c, g, or t
  misc_feature (351)..(359): n is a, c, g, or t
cctgtttccaaaacaaagccagaaggaaatatgttagatttttaacagtgatgtcgttagatattgcgctaatccgagattgtgttttcaatcttacacttttgtaatgtattttctaaaggatgttcttgtattagaaactgtattaaatatgtggagattaactttagcaaaattgaatgtaattaatggtattaattaaacttgtctgcgggtttggnnnnnnnnnnnnnnnnnnnnnnnnnnnnnnnnnnnnnnnnnnnnnnnnnnnnnnnnnnnnnnnnnnnnnnnnnnnnnnnnnnnnnnnnnnnnnnnnnnnnnnnnnnnnnnnnnnnnnngaacgacacaggnnnnnnnnngcgacgagagtgaggggggccgcgccacatcgacaccacacgcgctggcgccgcgcaccccgcgcaccaccggccccgacgccgacacaggagggggcagccaaacaccaggacggagagagatagaaaaaacaggagagcaaggcgagacaaaaacacaaagcaacaaagagagtgaggaccagacgacacacgaacagacagcgaggaagacagtaaacaagaaccacccctccacggcggggggagcaaaagcagaacgagagagtagaacaacacgaaaggagaacgacagagagaaaacagcaagcgacacgccggcgcgagcgcggaaaaaacaaccaccgccaatgcgcgaaagacgagaagtgcaggacaacacagatacgacgcataaaggtcacagacccaccggcgcaacaagccgtgggaaagcacgaggaagaaacagagagagaaccgtgggtactgaggggcacgcagcgagaggggcaggagggaacagcgcgaggaggcaccgggaagagcggaggcgaagcacacgaacgcaggacacacagggcgcagagagagaaacacaaaattacacggggcaaaaagcggggccaacagactaaggggcggcacacacgacgaggcgcaagcgcaactcggcagacggcaaggcggcgggagccaaccagagcgaccggcacccggggcggcggccccccaggagtgcggcggg

SEQ ID NO: 179012 - DNA, 890 bp, Homo Sapiens
acccacgcgtcgcatggcggagctgagtgaggaggcgctgctgtcagtattaccgacgatccgggtccctaaggctggagaccgggtccacaaagacgagtgcgccttctccttcgacacgccggagtctgagtgggggcctctacatctgtatgaacactgtttctgggctttgggaaacagtatgtggagagacatttcaataagaccggccagcgagtctacttgcacctccggcggacccggcgcccgaaagaggaggacccatgctacaggcactggagacccaccccggaagaagcccacgcgtgctggctattggtgttgaaggcggatttgaccttagcgaggagaagtttgaattagacgaggatgtgaagattgtcattttgccagattacctggagattgcccgggatggactggggggactgcctgacattgtcagagatcgggtgaccagtgcagtggaggccctactgtcggccgactcagcctcccgcaagcaggaggtgcaggcaaggggatggggaagtacggcaaggtgtctaacgcatgccttcagcctcaagcagttggacaaccctgactcgaatccctccctgtgggctggaagtgctccaagtgtgacatgagagagaacctgtggctcaacctgactgatggctccatcctctgtgggcgacgctacttcgatggcacgtgggggcaacaaccacgctgaaggacgcacgtaccgaagagaacaggcataccccgtaagcaagacaagccaggaggacaatcacccctgatgggagctgaagcgagaagtcatatggcacgacagatgacaaggaccgggagcccagcctgggttgaagcacctgcagccaagaagggcaacagac

SEQ ID NO: 179013 - DNA, 756 bp, Homo Sapiens
  misc_feature (162)..(365): n is a, c, g, or t
  misc_feature (498)..(559): n is a, c, g, or t
gacaaaaggtgtttttaagaaaaaagcaacacccacacctgtgtctgtatatagtcagcttatctcgtgttcaatcgtctgatctctacagagagaagtggaaaatgctgtatcaagggtgggcttagctgtgcctttccaataaagatgtgagaagcttcnnnnnnnnnnnnnnnnnnnnnnnnnnnnnnnnnnnnnnnnnnnnnnnnnnnnnnnnnnnnnnnnnnnnnnnnnnnnnnnnnnnnnnnnnnnnnnnnnnnnnnnnnnnnnnnnnnnnnnnnnnnnnnnnnnnnnnnnnnnnnnnnnnnnnnnnnnnnnnnnnnnnnnnnnnnnnnnnnnnnnnnnnnnnnnnnnnnnnnnnnnnncacaataaacgagcgggcaacagttcaccacaccactcataaatcgacataacaacaacaaaaaagaacaaaggaccataaaagacacacaaacagcaacgacaaacatcccacaaaacaagaaaaaggagcnnnnnnnnnnnnnnnnnnnnnnnnnnnnnnnnnnnnnnnnnnnnnnnnnnnnnnnnnnnnnnagcgagtagaagtgacagagaggaggagagccgagaactaaacacggatgcgaaagaatcgattacaacaacgacacacgaacaacgggccaatagagggacagcagagatagaagaaaaaagagagcggaggaggggagggcacaaaaggagctgaaaagtaaaagagatgaatagaatagggagcaagagaagaa

SEQ ID NO: 179014 - DNA, 785 bp, Homo Sapiens
ctgaggcttcaaaagaggagctggtaattgtggtaaactagtagaggaaagcaaggtattcctgcttcaggaaaattgtatatcaagacctgctaaagacccatgctcactgaagcatttcagtaaaaaaatgggagattacagcggaagggggagtagaggaaatccgttacaggggaacttacatgcctttaaatttgaaatctattttagaattaacaatgaacaatcaatggaattttaggcaaggaagtgacccaatcaaaacagttccttaagatcaaaaggtaactatgtaggagatactggatagggaaaaggctgaaggcaaaaagctgcaatcacattggtttaggagaagaaagtgacagatctgagatactttttgtttatggtactggcatatgaagaacaggaaagaatgccaaaaactttcagcccatcacaggtataactcaacaatgtgatttttacaaatccaaaatgtctacagacattctgctcttttgattctcagtaattaagggtttctcagacttgggtggccaacttgagcttccctatcagatagttaccaatctctacccaagtatatatgcaacaacgtacctgcttcgttaaaagtaccacagggttaaatgtgaatctctatttcgctagcagcagttctcaaactctttctcgagcttaagaattaccaaggaagcacatttaaaatataattaaagtgaaataatacacacttaagtggtctagcagtggctttggcaccggacgcgtgggtc

SEQ ID NO: 179015 - DNA, 957 bp, Homo Sapiens
tgctcgctaaccttatctgtccctgtggagggctggtatgcttcatgcatgctgcgtctgctcgatccgatagagccagttccaaaatgattcgcagccatgtacctaagcgcctactactgctatgcaattatcgtcagggtacccttaacttcccgacctggcccatggaatgcccataagtgtatccccaggttgtctggagcagtacccacatgtctgtgttgatgactgggggccagaatggcaccatgttgtattgtctattatgtccaataggggcattttccaaatggaaatgtggatatatcagcattgtatctcctcagccattcatcaaagactgcatctgtgaaggtgtgcaggaggacaaaaataggatcatttggagacaaatgggtttgtccccctgttccattcaggaatagatgagccaaattgtgaagacttcgaacaagcagggtcatactttcccgtggggtcactgtaaccttccactgtgtttcggaaactgtttgtagagttggaataaaaaggaggcgtgtcaaataaaccgacttccaagcactgagcgacatcctgtggttcaggaagacgttgcaccattggtctggccacatttccagctggatttctcctaattggcccatcctcggtgctgttacaaagtgttcccagggtatcataatcttccaaggagtcacagaccactcgccattgagaaaagacagagtttgggcttattagagtggaatcaaagttgcttctggatcccatcaagtcatccgtgcagatatcacagacactttttccccgttgcaaaattccagtaaggaagggagaaagaaggctcttgcaacatttcctgcatgtctttctccagacgcaggaggtggtacctgtgccatgtgagaaaagctggtccctcatgagagaaatccacttcaccaagctttc

SEQ ID NO: 179016 - DNA, 363 bp, Homo Sapiens
  misc_feature (22)..(22): n is a, c, g, or t
  misc_feature (40)..(40): n is a, c, g, or t
  misc_feature (48)..(48): n is a, c, g, or t
aattaaaggaaccggttttaanttgcccaggtccatttanttcccccnatagtgtgtagaaaagtcacctaaattgcaaatgaggaaaagatgtaaaaacccacagctccttggacaactccttagagcactatttccacagctttcacatagcacagataactcgcccatctgtgctaagcattatagtttatacaaattatttttaaatagtatgattcctgtacagtgcacacattggtattctattcatcccttaatatccccattagaatataagctctttgggggcagggactctgtcttgcttaccattgtagccctactatgcctggtacatagtaggaacttaataaatatttg

SEQ ID NO: 179017 - DNA, 1306 bp, Homo Sapiens
tggcctcaggaaaggagtccaggggccactcagatggcgccagtcctcgtgagccctgtgcccaccacacttcctggcctccgccacgccccctggcaaggccctcgaggcccccccgacagcccagatgggtctcccctcactcctgtgccttcccagatgccctggcttgtggccagcccagagccgcctcagagctcacctacacctgctttccccctggctgcctcctatgacaccaatggccttagccagcccccacttcctgagaaacgccacctgcccgggccggggcaacagccaggaccctggggcccagagcaggcatcatcgccagccagaggcatcagtcaccatgtcaccttcgcacctctgctctcagataatgtcccccaaaccccagagcctcctacacaatgagagccaaagcaatgtcaagtttgtccaggatacatccaagttctggtacaagccacacctgtcccgtgaccaagccattgccctgctgaaggacaaggaccctggggccttcctgatcaggggacagtcattcattccaaggagcttattgggctggccctcaaggtggccaaaccgacacccagtgcccagccctggaaaggggacccccgtggaacagctggtccgccatttcctcatcgagactgggcccaaaggggtgaagatcaagggctgccccagttgagccctactttggcagcctgtaccgcctgggtctcccagcactccatctcccccatctccctgccctgctgcctgcgcattcccagcaaagatcctctggaaaagaacccaaaggctccagtgcccaccaacatgagcacagcggcagacctcctgcgtcagggtgctgcctgcagcgtgctctacttgacctcagtggagacagagtcactgacgggcccccaagctgtggcccgggccagctctgcagctctgagctgtagcccccgcccgacaccagctgttgtccacttcaaggtgtcagcccagggcattacactgacggacaaccaaaggaagctcttctttcgccgccattatccagtgaacagcatcaccttctccagcactgaccctcaaagaccggagatggaccaacccagacgggaccacctccaagatcttgggtttccgtggccaagaagccgggaagcccctgggagaatgtgtgtcacctctttgcagagctttgaccccagattcagctgctgtcgcctttgtaccttcattcaccaagttctactgggacagagaaattgaggaggccacaagctcagagcca

SEQ ID NO: 179018 - DNA, 237 bp, Homo Sapiens
  misc_feature (15)..(15): n is a, c, g, or t
  misc_feature (24)..(24): n is a, c, g, or t
tttgggttgcctggnaaggggggnagtgttgatgtgggctctgagcttgtggccttccttcattttctctggcccagtagaactttggtgatgaaggtgacaatggcaccagcaggctgatctgggtcaagctctgcaaagaggtgacacacattctccccaggggcttcccggcttcttggccacgaaaccaaagatcttggaggtggtcccgtctgggttggtcccctgttccga

SEQ ID NO: 179019 - DNA, 277 bp, Homo Sapiens
gcaaacccaggatgaaagccctgtctactgtctggagttcaacagccagcagactcagctcttggctgcgggcgatgcccaggcacagtgaaggtgtggcagctgagcacagagttcacggaaaaagggccccgggaagctgaggacctggaccgcctggcagcagaggtggcggcctgaggggtcccgggaggcgggtgcaagccttcgctgtgccgagccttgtgtttctgaacgcaagccaaaatgaagaaaaggcaaaggctttgggggaaac

SEQ ID NO: 179020 - DNA, 676 bp, Homo Sapiens
  misc_feature (449)..(449): n is a, c, g, or t
tggaagagctgctgcgctgcctcggggcacacatccacactcccaaccgccggcagctcgcccaggagctgcgggcgctgcaaggacggctgagggcccaggccttgggcctgcgcttctgcacagaccgctgtttgccttcccggatgcggtgaagcagatcctccgcaagcgccagatccgtccacactggatgttcgttctggactcactgctcagccgtgctgtgcgggcagccctgggtgtgctaggaccggaggtggagaaggaggcggtctcaccgaggtcagaggagctgaataatgaaggggactcccagcagagcccaggccagcagagcccgcttccggtggagcccgagcagggccccgctcctctgatggtgcagctgagcctcttgagggcagagactgatcggctgcgcgaaatcctggcggggaaggaacggngagtaccaggccctggtgcagcgggctctacagaggctgaatgaggaagcccggacctatgtcctggccccagagcctccaactgctctttcaacggaccagggcctggtgcagtggctacaggaactgaatgtggattcaggcaccatccaaatgctgttgaaccatagcttcaccctccacactctgctcacctatgccactcgagatgacctcatctacacccg

SEQ ID NO: 179021 - DNA, 717 bp, Homo Sapiens
aacccatataatatgcatacgacaaaatattgaagcaaactttattaaaccaaactttcagcagttatttagatatttagtcctggatattgcagataatccagttgaaaatataatacgttttttccctatgactaaggaatttattgatgggagcttacaaatgggaggaaaagttcttgtgcatggaaatgcaggcatctccagaagtgcagcctttgttatagcatacatgatggaaacatatggaatgaagtacagagatgcttatgcttatgttcaagaaagaagatgttgtattaatcctaatgctggatttgtccatcaaccttcaggaatatgaagccatctacctagacaaaattaacaatacagatgatgtcaccactccagatagaaaggtcattatctgttcattctggtaccacaggcagtttgaagagaacacatgaagaagaggatgattttggaaccatgcaagtggcgactgcacagaatggctgactagaagagcaacatcatagagtgtgaatttctatttgggaaggagaaaatacaagagaaaattataatgtaaaatggtaaaaacataagtagtatttttttcaattacatgttgcttccagacataaaagtaagaagaatgaacagaatggtggatagaacaaagaaaaataagagaaggaagaaagatgagagacaaggaaaagaagaggg

SEQ ID NO: 179022 - DNA, 827 bp, Homo Sapiens
agagccgcgggtgagatccccagccctgtgagcctgtaggagatagaatggctccccaaatgtatgagttccatctgccattatccccagaggagttgttgaaaagtggaggggtgaatcagtatgttgtgcaagaggtactgtccatcaaacatcttccaccacagcttagagcttttcaggctgcctttcgagctcaggggcccctggctatgctgcagcactttgatactatctacagcattttgcatcactttcgaagtatagatcctggcctcaaagaagatactctggaattcctgataaaagtggtatcccgccactcccaggagcttccagctatcctggatgatacaactttgagtggatcagatagaaacgcccatctaaatgccctcaaaatgaactgttatgctctgatacgtctcctggaatcctttgagaccatggccagccagacaaaccttgtggacctggaccttggtgggaagggtaagaaagctcggaccaaggcagcccatggctttgactgggaagaagagaggcaaccaattcttcagcttttaacacagctacttcagttggacatccgtcacctgtggaaccactcaataattgaagaagaattgtcagttggttactggctgttgctaccgccttctggagaatcccaccattaatcaccagaagaaccgccccactcgggaagccataacacacctgcttggtgtagccttgacccgttataaccatatgctcagtgctacagtgaagatcatccagatgctgcagcactttgaacacctggcacctgtactggttgcagc

SEQ ID NO: 179023 - DNA, 967 bp, Homo Sapiens
gacccacgcgtccgcttatggagaatgcagtttaaggtgctgaaaaggtattaacatggtattaagcttaaataatacgtaatgggactagatggcccactaagccactgttattttccttcctctctggcagggcacttgatccattccaaagtcaaaaactggactgaagctaaatttgtacttttcataatatacattctgcttctggcttatcttcttggtacatcaatatattaattgtaaagtttattgtatagtatttaaccgctgaagttcctatttgatgttgtgcttatgtgaaccccttggtgaaggtcccttttccttggatgtgtagttatatgatctttttaaatgtacagatattttgctataaaatcggtgcagttttttatggtttttacacttctctttaattcccacctaagcctctgggtaatattgtaagatattgttttaaaatgcatcagcctatgctatacaatctgaatgttattttaacttatagtcttttttaatatactatatttaactataaggacagtttagggaacaagttacctaccacatttcactttaggtgtacctatttacagaaagattaaactgccacctgcgggcacattcccataaatgtgtacttttactttaaaaagaacatgccacgattttgtctttctgtggactcaacattcacttcgattaaaaataagcaatttgaccaagtgtggactttccactaaaaaagcagctgtttaccacaagttcaatgctggacatatatgtattcttacaattaattgcctattaattaatctacaaaatagacaaacgttggcatgttcctattctggtgggtctattaatggagcctgactcctaagcacaattaaaatgttttatacaagccatcatgtaacatgtaccggtcttaacgggctaataagcattataaagtataaat

SEQ ID NO: 179024 - DNA, 185 bp, Homo Sapiens
gcatgtttctaagaaaagggcaaacaattctcaaagaggcccctaatatctaaaattggtttagaatccctgccctaggtgaatacaggaaacactatcaaaactaaaagggaacttgtagggcatcttaatcaatcaaccaagataggtaccaaggcccaaaaccatgtagaggcttgtgcaag

SEQ ID NO: 179025 - DNA, 1192 bp, Homo Sapiens
  misc_feature (1073)..(1073): n is a, c, g, or t
  misc_feature (1132)..(1132): n is a, c, g, or t
  misc_feature (1150)..(1150): n is a, c, g, or t
atcagatacgtcgatggagttcagcacaagcacgagaattgggaatcttcacaatacagtggcgttacttgtttgcattcagatgtctcatcccaaaggaatgtgctcctggcatatttaagcaacgaccacccattagcatgctccctcaagccctctgttgcccctccatgaggaggtagaagccttgtggttcatgtctgaagggaaaccttacctgttagaggtaatgtttgcttgcgggagctgacaggctcgctcttggcactcattgagatggtagtgtactgctgtttctgtaatgagcatttttccttcacaatgctgcatttcattaagaaccaactagaaacggctccacctcatgagttaaagaatacgttccaactacttcatgaaatagtggttattgaagatcctatacaagcagagcgagtcaaatttgtgtttgagacagaaaatggattactagcttggatgcaccacagtaatcatgtggacagtagtcgctgctaccagtgtgtcaaatttcttgtcactcttgctcaaaagtgtcctgcagctaaggagtacttcaaggagaattcccaccactggagctgggctgtgcagtggctacagaagaagatgtcagaacattactggacaccacagagtaatgtctctaatgaaacatcaactggaaaaacctttcagcgaaccatttcagctcaggacacgttaagcgtatgccacagctttgttgaagtgaaaaagagcaatcaggaagcagtaatgggtcggagagtagtcctgccaatgagaacggagacaggcatctacagcaggtataacggtcagcatgtccttgtgtgcaaagggcagccttgctcttaagctttccaaaaagaatttccacagctgagggaaaacaagatgcttcctctggaatgtgagtccaaagagttaccagcgctgccctctagtgatctcagctcagcatatgcactaaccgtgtgtttacagggctgagtagtgctgcagtgtgaagtgaatggaaggcctcgaggtgtttgtggctggccaccctgatncagcctgcaggtagtcccgatgaagccaggggcacagggggattccttccagcttgttncactttatttctgccttnccaggttactgaaatccctcgtttgcttttaccagcctttct

SEQ ID NO: 179026 - DNA, 468 bp, Homo Sapiens
cgggtaaaaaggtcaacatgcccttgtgtgcaaaagggcaacccttgctccttaaagctttcccaaaaaagaatttcccaaagcctgagggaaaacaagatgccttcctctggaatgtgagtcccaaagagttacccagcgctgcccctctagtgatctcagctcagcatatgcactaaccgtgtgtttacagggctgagtagtgctgcagtgtgaagtgaatggaaggcctcgaggtgtttgtggctggccaccctgatcagcctgcaggtagtcccgatgaagccagggcacagggggattcgttccagcttgttcactttattctgccttgccaggttactgaaagtccctcgtttgctctcaccagccttcctggaaatgtggactcttgaaagaaaagctcccgtgctcttgaagtatacctgcttgccaggggagtccaagaaaattttgacatgtattttt

SEQ ID NO: 179027 - DNA, 763 bp, Homo Sapiens
aggaagtatttcagattgcaagtaatgatcatgatgctgcgattaatagatatagccgtttatcaaaaaaaagagaaaatgacaaggtgaagtatgaagtaacagaagatgtgtacacatccagaaagaaacaacaccagaccatgatgcattatttttgtgcattaaatactcttcagttacaagaagaaaatagcattgttagaacctctacttgggtacatgcaagctcagataagtttctttaagatgggttctgaaaatcttaatgaacaactggaagaatttatagctaatattggaacaagcgttcagaatgttcgcagggaacatggacagtgatatagagaccatgcaacagacaatagaggatttggaagtagccagtgatcccttatatgtgcctgacccagaccccaccaaatttcctgttaatcgaaatttaagcccgaaaggctggataccttaatgctaggaataaaacaggcttggtgtcatctacctgggacagacagttttacttcacgcagggtggaaatttaatgagtcaggcccgtggggatgtagcaggaggcctggccatggacatagacaactgttcagtgatggctgtggactgtgaagacagacgatattgttttcagatcacctctttcgatggaaaaaaatcttcaattttgcaagcagagagtaaaaaagatcatgaagagtggatctgtacaataaacaaatatctaaacaaatatacttaagtgaaaaatca

SEQ ID NO: 179028 - DNA, 749 bp, Homo Sapiens
gctctctctcgctgggtcgctcgggtcggcttcggtcgctaccgctcccggctctgccacccccgccaaccgccgctcgggcctccgtcgctgccgcgtcgctttctcgctccttggatcgcacatcctcccagatgcagcgccgggacgaccccgccgcgcgcatgagccggtcttcgggccgtagcggctccatggacccctccggtgcccacccctcggtgcgtcagacgccgtctcggcagccgccgctgcctcaccggtcccggggaggcggagggggatcccgcgggggcgcccgggcctcgcccgccacgcagccgccaccgctgctgccgccctcggccacgggtcccgacgcgacagtgggcgggccagcgccgaccccgctgctgcccccctcggccacagcctcggtcaagatggagccagagaacaagtacctgcccgaactcatggccgagaaggactcgctcgacccgtccttcactcacgccatgcagctgctgacggcagaaattgagaaagattcagaaaggagactcaaaaaaggatgatgaggagaattacttggatatattttctcataagaacatgaaactgaaagagcgagtgctgatacctgtcaagcagtatcccaagttcaattttgtggggaagattcttggaccacaagggaatacaatcaaaagactgcaggaagagactggtgcaaaagatctctgtattgggaagggctcaatgaagag

SEQ ID NO: 179029 - DNA, 498 bp, Homo Sapiens
  misc_feature (54)..(290): n is a, c, g, or t
  misc_feature (311)..(319): n is a, c, g, or t
agcaagagtggagaataagaatacagtactataggctgggcgtggtggctcatnnnnnnnnnnnnnnnnnnnnnnnnnnnnnnnnnnnnnnnnnnnnnnnnnnnnnnnnnnnnnnnnnnnnnnnnnnnnnnnnnnnnnnnnnnnnnnnnnnnnnnnnnnnnnnnnnnnnnnnnnnnnnnnnnnnnnnnnnnnnnnnnnnnnnnnnnnnnnnnnnnnnnnnnnnnnnnnnnnnnnnnnnnnnnnnnnnnnnnnnnnnnnnnnnnnnnnnnnnnnnnnnnnnnnnnnnnnnnacacagcgagactccatctcnnnnnnnnntaataataatacagtagtataaacatggacaagtgcaaaaagctacataacaaattttaaaccctaagctaaatatttacactcagtgggaaagatgaacaagccagtaaccctaatggctgaagcacttacctcttaaatttgtacttaagggcttaagaaaatgtcctctacacacc

SEQ ID NO: 179030 - DNA, 781 bp, Homo Sapiens
  misc_feature (27)..(27): n is a, c, g, or t
  misc_feature (71)..(71): n is a, c, g, or t
  misc_feature (711)..(719): n is a, c, g, or t
taccacaggcctaaggggacattaagnctttagcccctatatttaccataaaataatgtgtgtttcccacngggtcatacccaataacctcagtatggtacctagatataattaggattgttagcctacaattccagtatagcaagacagccctaaaatgccctgaactgacttccgctaactaaaactccagtatatcacagtgttttaagtaatattagtgtgctgcccaaacaagcaactaagatatccagtaaggatgctgtgtaacacagtaaaagacagcaagccttcatcaaggggttattttggggttataatgaattttggcacttaagactgccactgcatgcagaaaccccgaaaaagaaatacacaggtttcaaaatggatatacttcattttgtttaaaatgcccaagagcctttgcaacataactgaaagtattgttctatcaagtcatgaatcttgagaagaaagtacattatccatttcagggaaaaaaaatacagttttcttaccaaattatccagtgtatatgactggttagaattttaagttttgatttttactgaaattcagagtatgaaatgcaaacattcaggataaaatgaattcataattacacgcagttatatcaacttgcaacaaagcagcaaatatgagggcctaacacacatctcgactctccccttcccttctgatccctcnnnnnnnnngtgcaaaatcaaagagtcactgcttggtccaaaaaataaaatacattgtgtataaacatttg

SEQ ID NO: 179031 - DNA, 789 bp, Homo Sapiens
gatcaaggtgtgaataactgaagaaaataacttgctggctatataggaaaatgctgtggaaatgaactgtgtatatacttctgggaggaacaaatttaatcatttcttctgttaagcactaatcagtatagtgcaactcctggttctgtactgtattttatatgcaacatatatgctttaatattttaatgtttgtgcattaatattttcaatttgtttaaccactttgctgctaagattttgccgtcccattcccattttttcctttacaattttaaacaagtttcttcattaaaaactatggtgatgaaatggtttttattttaccttggatctttatagttaacatacccagtttcttaatcagtctacaagactaactgatgatataatgttctctgaatccctatatggaaattttcttttgagtaaatgagaattcctttgtgaaagcaaatgggtagtttaaatcactgattcttaaacatgtgtataggcaccttcaggaacattttctcattctctgtacagattcggcactcccaattggcttttcctctaaaacttttcttgtattatctgatataagcagatggctcaagacaactgcttgagtaatagtattgacacatggcatcatctagaacggtcatgacacgcaagactggtctgatgaacgttgttccccacattcgataattcttaaatatttctcttggcttcaaaagggggacatcatttgatttctgaaagaagttatgtccatgtggagcttcagaaccacctact

SEQ ID NO: 179032 - DNA, 659 bp, Homo Sapiens
  misc_feature (199)..(199): n is a, c, g, or t
  misc_feature (204)..(204): n is a, c, g, or t
  misc_feature (392)..(392): n is a, c, g, or t
ggacccgggatcccgaaaaactcgcttcctgtgacatcgtggtggacgtggggggcgagtacgaccctcggagacaccgatatgaccatcaccagaggtctttcacagagaccatgagctccctgtcccctgggaagccgtggcagaccaagctgagcagtgcgggactcatctatctgcacttcggggcacaagctgnctggncccagttgctgggcactagtgaagaggacagcatggtgggcaccctctatgacaagatgtatgagaactttgtggaggcaggtggatgctgtgggacaatgggatctcccagtgggcagagggggagcctcgatatgcactgaccactaccctgagtgcacgagttgctcgacttaatcctacctggnaaccaccccgaccaagacactgaggcagggttcaagcgtgcaatggatctggttcaagaggagtttctgcagagattagatttctaccaacacagctggctgccagcccgggccttggtggaagaggcccttgcccagcgattccaggtggacccaagtggagagattgtggaactggcgaaaggtgcatgtccctggaaggagcatctctaccacctggaatctgggctgtcccctccagtggccatcttctttgttatctacact

SEQ ID NO: 179033 - DNA, 381 bp, Homo Sapiens
cactttaggtatctcttaggcaaatagagatataaattgtaataggaaacagtctctaaatgtgaggctgaatacagcttcagtctggctctctaataggacaaaagccagtccatgtgttgtctctaactgatttagctttttcttttctttgaacaattcggcatgaattgaaaccaggttttcctgtggaaagttatagcttgattgggagatagaagttgaattgagttctttcttgcaactcttagtgtttatttttatatctcagtaagacgaggataccttcagtttgaatctgcataatgttcactgccaaactccttctcatttaatgcttatggccttcacatttctgtataataaagatcaattatcagc

SEQ ID NO: 179034 - DNA, 992 bp, Homo Sapiens
cagtcataactattttatttaactacttccccaaggatgtggaccttacacttactttacagccagcctcagaaaacttcctagtggcaactaaggctagagcagctgtagagtggtctggagggggctcttcccattctcacacgggtgtgcatgaaccctttctcctatcctaaaggcccttcgggaagaagctctagctggtgatgagagcaaggtttgggggccgctacacttcggcagtgcagtgttgggaaggtgagaacacagttctaaagaacaagaattgttgagtctgaggaatatggggtctggacccccagcacatccccttcataggtctccatgggttgggagagcagggtcaccctcatttttgttgcaggattcacttgcagtgtgaatttcaattgtgctggcatcagaaccttcagacagcatgctcagggcttcgtcagaagtctgcccacccacttgagacaccttcccggaagcagggttttcatggggcatcagtggggatgggtgagccccctcagcagccgaggtggtcagtgattcccactggatctccttcctgggagactgaaaacccaggctgcatcctgtccagccgtagaaggccaaagacaagagaaatcctgggctggattcaggattcccataataaaccatgtggtcttggctgcagttctgacaggtttcaaagaacctccattgatatctgtttgcatctcaagatagaataaaaggctttcattgatgatattcgacaaccaacaaataattaaaaccagcatgattttgaaaaatcggatcttgatcacggctcccatcctcctctcgttctccgtgtaaatgccttgtcttcctttaagtaaagaggccactgcagtcactgtcttttggaacaggatggggttcgccacgagaaccagcagcaggggcaggtacatggtgacataagtgggggatggcgtggtccaggcccc

SEQ ID NO: 179035 - DNA, 1057 bp, Homo Sapiens
tcctatctactagtgagtacaactatatctccaatatgtgctatagtaattcctaggtaacagccattctgcaaaatagttgtactgggctctgttaggcatagatcataattaagtcagtggaagaatgagcccagagaaacctggcagcaagagccgttactctaggaaagttccagtgctatgcaacctgtaaggcatcatcgctcagctgatgatgagactcacagaggttttgtggagcgaaacaggagttgaacccatttttctactcttctttggcagggtaactatggctccaaggaaggaacccagaattaggtcttgtaaaatcttttaagctcccaaagcaagagaaataagacatgaagaaagagccagtaactaggacagatgaaaaattaggtggaattggagggaatggaaacttctggaatgcaaagtagctgggtttagacgccatttgagatgaccaagaatacagtacaggtaaaagcaaatggggcaacaattcaaatattgagttgttcaaatactagaggttaagtaaaatttccccccttgggggaaaactggttgaaaaggatcagaaaggtgaatcagtaacaggacaatgagtacctgagtagaaataggtgtttcaagatgccaagaacagtttaaatatacaggtgagctgagtctacaagaaggaaaagtggttatggcagcctgtttccagatctgatcattggaatgacatttctagcaatggctttgtctgtgaggtcctggcatattttgtgtagcacagatccctttaaaggaatgttttcgtaacactcaaacttatgtgggaatgcaaattactatagtgtaaaaattcaatgacttcccacctattcctgcagggcaggagatcagaagtcttaaaacagctgtggctaaaagcccaagccctcccactgccccgtgataaaaatattaaagaaattaacaaacaagcatcagatgagtcaatgggccttgtaccatgtagacacagataatttatagcgacttcttctgcaggcagcct

SEQ ID NO: 179036 - DNA, 913 bp, Homo Sapiens
ccagactgcacccttgccagcgcttcgcagctctcgaagtaaattatcgcaggatggcggccctcacctaggagaaccaggaaggcaggcagcgctagaacgacgggattgaattttactattgccaaaacaatcacattcaaattcattccacttaaaacctgaaaacattggaccacacaaagtcttactgatttcaggtaaaaacaataattgaagatgtccagcaaaacagcaagcaccaacaatatagcccaggcaaggagaactgtgcagcagttaagattagaagcctccattgaaagaataaaggtttagaaggcatcagcggacctcagtgtcctactgtgaggaacatgccaggagtgaccctttgctgataggaataccaacttcagaaaaccctttcaaggataaaaaaacttgcatcatcttatagtggaatagagaaacagctcctcgcctcttcccaacaagcgcaaattatgagcagctccttgaagagatttaccttcagcttattaggtaaccactgctaataactaaaatgttctcagcattggaataatggactctgaagtctctattttccaagttgtcctttctcttaaaataccctttactgatttaatacagaataacaatcttattttccacttggtaactatggctttatgtagggttactgtgtaaggaaagtagatctgggcctttcttaaaaagcataattatatacttttagaaatacaagggattccgatatgtcaggacctaaatggcctaagcacctgtcaaattagacttccaaaattcattgaaatcctaaagccttgatatcatattctttataaggcgtgtgccagacctgtatagtatataagagagaggggagtaagagtgtataatatatatg

SEQ ID NO: 179037 - DNA, 827 bp, Homo Sapiens
gcccgcttcccgaagctgagcacggtcctcgtactgcgctcccttggcctgcaccgattgtacgccgtcgatctccttctcatggcgggacagggacgggtggacaaacttgcggtaaagcaggctggcgcccttggtgtagggtgagagcagccacagcacgaaggccatcttgatctcatagtagaaagggaaccaggagataaaaatgtctgtaacgatctctgctgccatgaagagtgcaaaaacaatccagtacatcatccaccgcacatattcacgaatgttcttggtcttcacagccttataggaagcataagctggacacagcatcccaaacaccagcaccaccaggcgacagatcatccaggacaccatcttgccggcctttgggacgtggggaggaccccaggaagccgctcagaaggacgttcactcaagggctgggacggggggtgatcagggcagttgcgggaagcagaggggcgatccggctgtccctcggcggaggcagagcccgccgcccacggcctccgactgtgcagttcaggggacctggagaatggggagacccgaggcaaagcggccccggcggggaggaagccgacttgggagcgggcgcgccccgcggccggggcagttacagctcccacccgccctttctgccgcggagaacctggcgctcggcccttgctgctggtcccgcgctggagcgggtcgccgcggttccagcgcgccgggccaccagcaccggcctaacagggcggagttcgcaactcacttgaaagttgcacggaaccgagtgctgcccaaccccagggctccgg

SEQ ID NO: 179038 - DNA, 237 bp, Homo Sapiens
gcctgagtaccatcctggatgaatctagaaggtatggggtagagcttgacagggttcctgtgtacccactgggtatccgttagaggtaagggagaggagaggattgatagagtgttgcaaaagtatagattattcattgagataaaggatttggtttccctgccatgagtattaaaaaaatttaagttttcccaagcttgcatctctgaccaaatttcacataaaacattggaagga

SEQ ID NO: 179039 - DNA, 959 bp, Homo Sapiens
  misc_feature (228)..(528): n is a, c, g, or t
cattggttctgcccgtgcggtgtgtaagtggtcctgctccggaggtgccctcggtgtcgtgtgttccactgtgcgtcgttgtgtaagcgcgcgcgcggttcgcaggcgtgttagttcgtgctctctgtattatgggaccaccgtggttcatgtatatttcggtgtatcgctttatgttgggctccctgtcgggggtttttttggcgggcccgccttttgtttgtgtgnnnnnnnnnnnnnnnnnnnnnnnnnnnnnnnnnnnnnnnnnnnnnnnnnnnnnnnnnnnnnnnnnnnnnnnnnnnnnnnnnnnnnnnnnnnnnnnnnnnnnnnnnnnnnnnnnnnnnnnnnnnnnnnnnnnnnnnnnnnnnnnnnnnnnnnnnnnnnnnnnnnnnnnnnnnnnnnnnnnnnnnnnnnnnnnnnnnnnnnnnnnnnnnnnnnnnnnnnnnnnnnnnnnnnnnnnnnnnnnnnnnnnnnnnnnnnnnnnnnnnnnnnnnnnnnnnnnnnnnnnnnnnnnnnnnnnnnnnnnnnctttatactgaatctgactggaagtcagagcttcagatgccccaaagcaatgggagtgactgctcagggcagcatggtcttacatagtgccccatagagcgcctttccaaatctgtattctagacctcaatgaagctcccagaaggggcattgcagggtttggggctaacctttgtggccagcctcttctgattcttttgttagcccaggggattgagacggggctggctacattccaatagaacctaatttataaaagcaggcaaggaagctgatgaagtaagctccattactgataaattgagtgatcttgggcaagtcacccaccacagggctgctgtgaggaagaagagagaggatgcatgggctgtgcctcaagggagcctggctcagagcaaacagctgacactgccagctagtcacagagaaag

SEQ ID NO: 179040 - DNA, 334 bp, Homo Sapiens
gacccacgcgtccgtgcaaaagcctacatgataggcatattgtggtatttcgtgttgcactcgttctgtattcatattggactttttacatcccttttttagcaaaaaaaagagacacattgtgaattctctttagcataaagctgtgcattggaaactatgtgactgtatccatacggttagcaaaatactcttggccaccaaaggtaaatgaaactgtaaaatacctctggatatttgtgccaatgaacttttcttagcatattaggattaaagcaaaaataatcttttcagtatgtttcatctaggacttacaataaatgtttaaaccatg

SEQ ID NO: 179041 - DNA, 733 bp, Homo Sapiens
  misc_feature (388)..(388): n is a, c, g, or t
cggacgcgtgggtcgacccacgcgtccggagaagccacactggggagaaacccttcagatgtgtggaatgtggcaaaggcttcagctttagttctgactacattatacatcagacagtccacacttggaagaaaccctatatgtgtagtgtgtgtgggaaagcattcaggtttagcttccagctcagtcagcatcagagtgtccatagtgaaggaaaatcctaataatgagaaagatatagaaaactcttaaggttaatgccaaaatggatcaagtatcatcagattcatccattgaaaaacctccaagagggcatgaatatggcagagtccttcatatggaaacagtttttattcctattcagtttaaatcaggaaaggatgaccangttaaagagaaacatcccaaaaatagcctttgttttgtaccaacaggaattagaaaatataatgaaaagatttcgttcccagcagcatcaagaaaagtagattttctagaaataaacagttatggaggacttgtatggagaaatttaagtcttcactgagggccactttacacaaggaaatcttgacataaatggagagagagagaagccattgatgtaggataggaaaacccgtactaaagatactctacctacattaatttattggtttaaatttttggacaacaagcatgtattactatttgaaaagatgaaaaataaagatttatttaaacaaaggacaag

SEQ ID NO: 179042 - DNA, 736 bp, Homo Sapiens
ggagaaggtggagggagacgagaagccgccgagagccgactgaccctccgggtcccagtctgtctgtccgtggtggatctaagaaactagaatgaaccgaagcattcctgtggaggttgatgaatcagaaccatacccaagtcagttgctgaaaccaatcccagaatattccccggaagaggaatcagaaccacctgctccaaatataaggaacatggcgacccaagcagcttgtctgcacccacaatgcttcacaattcctccggagacttttctcaagctcactcaaccctgaaacttgcaaatcaccagcggcctgtatcccggcaggtcacctgcctgcgcactcaagttctggaggacagtgaagacagtttctgcaggagacacccaggcctgggcaaagctttcccttctgggtgctctgcagtcagcgagcctgcgtctgagtctgtggttggagccctccctgcagagcatcagttttcatttatggaaaaacgtaatcaatggctggtatctcagctttcagcggcttctcctgacactggccatgactcagacaaatcagaccaaagtttacctaatgcctcagcagactccttgggcggtagccaggagatggtgcaacggccccagcctcacaggaaccgagcaggcctggatctaccaaccatagacacgggatatgattcccagccccaggatgtcctgggcatcaggcagctggaacagg

SEQ ID NO: 179043 - DNA, 818 bp, Homo Sapiens
  misc_feature (573)..(573): n is a, c, g, or t
  misc_feature (611)..(611): n is a, c, g, or t
  misc_feature (614)..(614): n is a, c, g, or t
  misc_feature (732)..(732): n is a, c, g, or t
  misc_feature (749)..(749): n is a, c, g, or t
  misc_feature (753)..(753): n is a, c, g, or t
tcctgcatacggctctcatgagcgttatgctgcgatcttccctatgtgtcgtgtaccttgcgcctgttgtcggcatggacttgacttcatgactaccaccctctcctgcagacactgggccaggtgccctgtgccagaaggacccggggcatctgcaggggtggaagggggaggaaggggcaggcagcgagggctgcccggagtgctcggaaggctccctgccccaccaggtggactctggcagggcccacgctgccccagaaccgcagggacttgtagcggggagaggcttcctgaaggcagtggtccagcttgtctcgattttcctctgacagattcctcagccccctcagcgccacaaacacctcgtagtggggagcagagcccgcagaggaatccagaatgctgctctccacacagccatggtccagcagcttggcccccgcccactgccccactgcccggcccagggcctcagagaacaggtcttaaccaaatatcttcccctcgcacactcagggtctggtccagcctgcagatgaacctgacgactggacactgattgtaggcacnaaccactcgcaccacatcacccaggcggcacctggtgnagntggcgcggtccgtcagcaccagctcatactgcctatcctgctggcctcggccaaaaggagggtggaggcagcttcctcctgggtgccttccttgactgggagcagctcgataaagggngccagggggcagaaggntagnccatggggctgctctggctgtaggtttaggcccagcacccctcccgaggcagcattcctgtgccg

SEQ ID NO: 179044 - DNA, 840 bp, Homo Sapiens
  misc_feature (810)..(810): n is a, c, g, or t
atccggtccactccatactcggcatacgacccagagacgtgcacaggccactggaagcagctgactgtgcgcaccagccgccgccaccaggccatggccattgcctacttccacccccagaagctgagccctgaggagctggcagagctgaagacctccctagcgcagcacttcacagcagggccaggcagggccagtggagtgacctgcctctacttcgtggaggagggacagcgaaagactcctagccaggagggcctgcccctggagcatgtggctggggaccggtgcatccacgaggacctgctagggctgaccttccggatctctccacacgccttcttccaggtgaacacacccgcagccgaggtgctctacacagtcatccaggactgggcccaattggatgcggggagcatggtgctggacgtgtgctgtggcaccggcaccattggcctggccctggcccggaaggtaaagagggtcattggggtcgagctatgcccagaggctgtggaggacgcccgggtgaacgcccaggacaatgagttgagtaatgtggagttccactgcgggagggccgaggacctggtgcccaccctggtgagcagactggcctcccagcacctcgtggccatcctggacccacccctgtgctggcttgcattccaaggtgatcctggccatccggagagctaagaacctcaggcggctgctgtacgtctcatgcaacccccgggcagccatgggaaactttgtggacctctgcagagccccatctaacccgggtgaagggcatttcctttccgnccgttaaagcttttggcaattggaactttt

SEQ ID NO: 179045 - DNA, 376 bp, Homo Sapiens
ggggcgggcggggagatgggtactcctagcctgcgcctttaagaagggtaggcctcgactttgacgtctctgccttccccgcccttcaggcccccactggtcgcgtccggcgctggaggagcccagtcagccggcgcctgccgggttagcacgtggactccgaggggccaactatcagctttccctgacaaaatgcctttgagctcccccacagctctgaaactccagcttgggagcagggagagtgcaatctgtgacctgtaaaggggcgctgggcaaaagggcccgagagaaggcgtcctttccattcccttcccatctcaagctgagttcagaaatgacacgaaataatttaatcaactatcagtcaaggtcg

SEQ ID NO: 179046 - DNA, 431 bp, Homo Sapiens
tttccctgaagtggctggggtcctgttccttcttgatgacaactgtgttaaccctcgcacatctctgggccaattttgcttgaaaatggcagctcccgagcagccgcttgcgatatcaaggggatgcacgagctcctcctcgctttccccgcctcggggcgaccgaacccttctggtcaggcacctgccggctgagcttactgctgaggagaaagaggacttgctgaagtacttcggggctcagtctgtgcgggtcctgtcagataaggggcgactgaaacatacagcttttgccacattccctaatgaaaaagcagctataaaggcattgacaagactccatcaactgaaacttttaggtcatactttagtcgttgaatttgcaaaagagcaagatcgagttcactccccatgtcccacttcaggctctg

SEQ ID NO: 179047 - DNA, 652 bp, Homo Sapiens
  misc_feature (356)..(356): n is a, c, g, or t
  misc_feature (523)..(532): n is a, c, g, or t
ataagcactgtgcccggcctgaatcttgtcttttgacaataccaaagaaatagggggtagctagagtaaagaacctagggcctggacctgggctggacagtgtatccctttaggtgtgggaactgggtatttccctggggtctgtatgcctttgtcttgtcatttgcttttagggcagatgacactttttcccacccttttaaagctacaagtctatcttctttcttgacccatttcaggagggagccctctcctttatcctgatataatatttaaaagacagaacaagaaagcatgtagccctaatgataggagattatcgcatagagtttcagagactgggaaactgaattttnccctcgactttcactttgtggggtaaatcacccaattttaggctcttttctgcaaggatggccaaaattaatcatttttaaaaagtagattcatgcccactgcccttgggtgagggggaagaatacgggggttcccagaagcccccatgtgatccaagggtttgtannnnnnnnnnaagttggttcatatttgtatgtacatgactatttaaagccaggggattatctttctataaagtgtataactggcaaaaagacaaaagaatacaaaacaacaagaactcactacaaaaagg

SEQ ID NO: 179048 - DNA, 792 bp, Homo Sapiens
ttttccccatccccacagcagagctgccggtcgtgccgcaggtgaggaagcggtttctgggaggggtgttgtgcagagcccccagagctcatcagtggtggccctggattacaggggagaaggcctgggccaggtctcccctcagcaatgcattcttcgtggttcccaccagcagctcagagccaagcccttcagcaatggctcgcacggccccgaagtgctcgggaatctcagcctcctggagggccaccaacccgggcccccactgtaccagccggcggtcccgcccgccaccactcagcactgtcccgtccctccggagacacaaggcgaagatagaaccttcatgagcgtgagcctgggccacaatcccataggtctctttggcgccacccctgcctggggtcttggaatctgaagggctccgcccccaggtgagaatgttcccctctgagtctccagtgagaatgtctccatccggaaggaacacaaagcaagggataaacttgggtttcttgtatttcccaaagacaccctgtttccgggtaagggtcccattcccaggaacccctactccaccactccaattccagaagtggacgtgagatttcccactggtgacgatgcagctgctgtcacgagggttgaagccaacggccaggactgagtcatttgtactcttgatctcagccagcttcattccccggctgcagtcccacaccgacagcatgtgctcattggaatcatccaccacacacaagaaaggcaccctgatccgcagctgaaaaggcc

SEQ ID NO: 179049 - DNA, 194 bp, Homo Sapiens
acgcctgcgtctctcccgaaggaggcataggcgccccgctcaccgctcttgcctgaacctccgaactgcgccccggccagggagcagggccggcccttcccgttggtgacaggcagcgggaacatcatgctgaagtccaggaggtcactgagcctccttgtctgtgcccacaggcgccatcctctgcggctggt

SEQ ID NO: 179050 - DNA, 834 bp, Homo Sapiens
gcttaatgtctgctgacagcgtcgcccgatgttgctcagggggtctgggaagaggggacacctttgatgtgggcgtgctggcacccaagaggcaacgtggtcaggctcgatgcttgccagccctggaaggtcccgccaggttggggggtcgggtgagcactcagagatctggggaggaagcgaggagcctggtgtcctcaccaggtgcagaggggaaatgcgtactgctccagaaggttctgactcaagtctcggccctgaggactcagaactcacaagtcatggatcaagtacagagggagggagggccccagcccaaccctgcgggggaggaggagggtctgaaggtgggagggcagctccatgagccagccaactgttcctgaacagccgaagtgccaggcagggggaggtttccatgtccaggagggagaggacctccaccctctgacctttcagttttccatagcagcccagtgtgaagctcggcgggggtgggcagggcatcaggacaagatgaagatgctggctctggaatgaggactccccttgggctacaggggtagttggctggcagaggttgcccatgctcttttggaggccacagggaactacgaggtgcggtggtgcttccggccctgtgaggcccgcccccctgagccccctcgtctgcttcttgtgtggcagaacatacgatgtggggcacagcccctagatggatgggaatctgcccaagctgtgccctctgggggaacttgacactcttggcttcctcgtgcaggcttccccttttccctttgcggggtggggggctgggggtgcccaggtccaacc

SEQ ID NO: 179051 - DNA, 883 bp, Homo Sapiens
  misc_feature (853)..(853): n is a, c, g, or t
  misc_feature (855)..(855): n is a, c, g, or t
agccgggagctccctgctgccggtataccacagccttcatctgcgccctggggccaggactgctgctgtcactgccatccattggagcccagcaccccctccccgtccatccttcggacagcaactccagcccagccccgcgtccctgtgtcacttctcctgacccctcggccgcacccagaaggctggagcagggacgccgtcgctccgggcggctgctccccgtcgggtccccgtgcgatcccacgccgtgccccggtgctccgctccgcgagccctgccactggacacaggataaggcccagcgcgacaggcccccgacgtggacagcagtggaccgcggggagggctcccgtctggctgtttgcccgtgctgctggccagctgcagcctcgaggccagcaagtcttgcagaaacagtccattgtgaccttcagcctgtgggtcccgagagaggcgaggtgacatataccactagccaggtctcgaagggctgcgtggctcaggcccccaatgccatccttgaagtccatgtcctcttcctggagttcccaacgggcccgttcacagctggagctgactctcccaggcatccaagcaaaatggcacctggccccgagaggtgcttctggtcctcagtgtaaacagcagtgtcttcctgcatctccaggccctgggaatcccactgcacttggcctacaattccagcctggtcaccttccaagagcccccgggggtcaacaccacagagctgccatccttccccaagacccagatccttgagtgggcagctgagaggggccccatcacctctgctgctgagctgaatgacccccagagcatcctcctccgnangccaagcccaggggtcactgtccttctg

SEQ ID NO: 179052 - DNA, 771 bp, Homo Sapiens
  misc_feature (353)..(353): n is a, c, g, or t
  misc_feature (372)..(372): n is a, c, g, or t
tagagactttaatatagaactggattccaacaaaacagttttattaaaataaggcacaatgtttgatatggcaaaattcacagaggatttggttaatataagatcttttgtacgtcctgggggagggggaagaaggtggtagaattgaagtagcccatatattcttttaagagcatttagcattacaaggcaatatataaatttgatacttaatataataaacaataacttatcctaaatataaaaattgttgaatcatgttgctgaattacacttatttctaccattaagttttacttatttatctatagatgtagattattcccaatttgcaagatttcaaatacagaaanattaagaaatcagatcatnaaaaagtaatttgacccaagtaaaagtatgttttcagtacccttcgttaatactttgacatcccaaactttacaaaaacttacaatgctgcttatctaaaacttttctcccattatgtttttgtttctcatgaatacaaagcaggctcagaaatgcaaaaaacctcaactgcaggcacacgtctttacatgattgttgtaaagtgactgtttaggttaatattctttctcaatatcacaacaatgttaacaatttaagttagtgaaaggattctcttaaacataagcggtagacataattaaccatttagtcatgtttttgcattctgcacagcatgtcatcttatccccgtatcttcccccagctggaacttacaataaaaaagtcttatccatttat

SEQ ID NO: 179053 - DNA, 695 bp, Homo Sapiens
ggaggctcagagtggggagcaggcctaccctggcaggccgtggcagggcagtaccacttggagcggtacccggacagttacgagtccatgtccgagccgcccatgctcatctttgcgccccgtgcttccccgggccttcgccttccccgtggacccccaggtccagtctgccgctgatgagactgctgtgcagctgagcgacgttgctgacgctgcccgtgctcatgaagcgctccatcacggcaccgctggccgcccacatctccttggtgaacaaggccgctgtcgactacttcttcgtggagctgcacctggaggcgcactatgaggcactgcggcacttcctgctgatggaggacggcgagttcgcccagtccctcagcgacctgctctttgagaagcttgggagctgggcaaacgcccggagagctgctcaacccgctggtgctgaactctgtgctgagcaaggccctgcagtgcagcctgcatggggacaccccgcacgcctccaacctctccctcgctctcaagtacctgcccgaggtgtttgcccccaacgccccggatgtgctgagctgcctggagctcaggtacaaggtggactggcctctcaacatttgtcatcaccgagggctgctaagcaagtacagcggcgtcttctccttcctgctgcagtgaagctcatgatgtgggcg

SEQ ID NO: 179054 - DNA, 765 bp, Homo Sapiens
ctgtccctggcctcaagtgatccacccacctcaggcctctcagtgttgggattaataggcaaccgcgcccggccaaatccatgatcatcacttaatgtttaaaggctacgttcagtttccttataggtgatattgttaggatctactagcaaatgatttggtaacctgacatctttgtattcatgtccaaaaaaattcttttataagaacaaaaatggtactcttagcctcattcactggagtattactgaaaagcatgatattcttactctattttgggtacattatgacagagaggttattattaccaactgtcagtagaactgaggcttcttgagtaaaggggattgaggtaaacctttggaagctggtgaatacatttcaagacacaacatggcacctgtgtctagctctatggtacaacatggtactatgacacatataatgggttgccagatggggaaggcagcttctctgcaactgagctgagatctcaaaatagacaatgtcaagatggaatgagaagggaaaaacagcatgtgtagacaggtagtgacaaaaggctaattaaggactgaaagaaaccagtggccaacaagggaatctacgggtgataaagataagacggtgagagagataaggctagattgtataaggcttgacagaccatagcaagataagcaagaactgtgtcctgttaaccatttatccctaacatctagcatagagttcagttagtaaaagccataaaccctttgagtcttc

SEQ ID NO: 179055 - DNA, 832 bp, Homo Sapiens
gattattaaagaattcattgttatcatgtaataagcaccctaaatttataaagctaaccacagaaagttgcctgtacattttttctatacctagtttcttgcaaattctgacaatctgacttaagggataattaacggggaatacagtgtattactagacatgaaagtagtcctatccttagaaacgctgtagttgaatataccagaataagtcagcttgaagaaatctgtgattctagtagtaataccatatcacttaggaccatcaaaaaaatgtgtacctgttctccaagacgacaactgatgcctgttctttatgtaagcttttcacgtgttcttggcacatattccagttgcatttcaataaaaagtgcttaatgcattatcagtaaataaaagaattctatataaaactattctcagtttcataattgcttcctatatatttccttggaaaatagtgaaattacatatgacaaggcaaccagccaaatttaaagagattttgtagataaaattcatttatgaccattaagttttggctggggggccaaaacatcaaagtctcacttgtgatttttaaaatgcactcttaattcattttgagttaattaaaattccatttgcaaaacactattttaatcgctgacctaggtgtgacaaagtcttataataatttgtaaaagttcttagggatgtctgggaacagtttcacaccactagaaaagataatttctgtagctagatagtaaattcagttttttcagccattctatagttaatgaaaatctgccttttaaattctgcttgtgagccattccaagacaaaaat

SEQ ID NO: 179056 - DNA, 795 bp, Homo Sapiens
gagagggaccggatctcagccttgaaaagatcttttgaggtcgaggaggtcgagacacccaactccaccccaccccggagggtccagactcccctactccgagccactgtggccagctccacccagaaattccaggacctgggcgtgaagaactcagaaccctcggcccgccatgtggactccctaagccaacgctcccccaaggcgtccctgcggagggtggagctctcgggccccaaggcggccgagccggtgtcccggcgcactgagctgtccattgacatctcgtccaagcaggtggagaacgccggggccatcggcccgtcccggttcgggctcaagagggccgaggtgttgggccacaagacgccagaaccggcccctcggaggacggagatcaccatcgtcaaaccccaggagtcagcccaccggaggatggagccccctgcctccaaggtccccgaggtgcccactgcccctgccaccgacgcagcccccaagagggtggagatccagatgcccaagcctgctgaggcgcccaccgcccccagcccagcccagaccttggagaattcagagcctgcccctgtgtctcagctgcagagcagtgctggagcccaagccccagccccctgtggctgaggctacaccccggagccaggaggccactgaggcggctcccagctgcgttggcgacatggccgacaacccccagagatgccgggctcaagcaggcgcctgcatcacggaacgagaaggccccggtggacttcggctacgtggggattgactcca

SEQ ID NO: 179057 - DNA, 855 bp, Homo Sapiens
caggtgagttgccaccattagccgctgccgaaggagatgattcttcccgctggtcgggcacgtggccaatcagggttttctctgggtttcatcggccactggctcactggctccccttgtcctgtcaggggctggcccacggagtgcagacacttgacaaagtcaccatctcccagggcctgaagcacaggtgtccccagtcgggtcataatacgcatgcttgccaccacataggctgatgtcagtgagctgcaccccgatgcgggacagcggggagcccacaggacccatgctgaatggaagcacatacatggtgcggccctgcatgcagcctggaaacctctcatccacagctcgctggaaatcagctggggacatccagttgcccagctgcccacgggccccaccaggcgggagtggtaccgtgtcccgctgagaaggagttacaatcaccgtcttgctctctactcgtgccacatccttggggtctgtgcgggccagccagcagttattgtacttggggagctttcggatgaggccctgctgctccagcagggtcagtgtggcagtattctcagcctcagttccatcacagatgtggatgccctctggttggcacaggcgggcactgtgctctacaaaatctcgaatgccagtgggaagctggcccagatctccactaagcactcgcagggtctggatgctacggcatgatggccagcccaaggggctcagcccatgccagttaagccagcaggccagggcggtacaatcgcggccatggcacctgggcaggggctgcggggtggccaggaaccgagcggagccggggaggtatggaaggcggggaaggag
